United States Patent Application Publication US 2011/0296543 A1 - sequence listing, part 5

SEQ ID NO: 19772 - protein, 261 aa, Unknown
  Obtained from environmental sample
  DOMAIN (3)...(215): Glycosyl hydrolase family 3 N terminal domain
  misc_feature (1)..(261): Xaa is any amino acid
MIRSAELLPGNDTDSAIAGIIADSFNAGTAINALGINLNLAPVAEYLHDDNREFLEDRSYGSDPAFVTEAAAAFITGMEQAGILCVVKHFPGSAGADPHRFPSVLKGGREALVELTAPIAALIHSGHARAIMISHTTVPAWDSKTIASLSHAVMDSWLRQELGFEGIIVCDDFSMAAASGPATASSPVSVEAQGSLKPETTVVLSLAAGADMVLVWPPDLRRTHHAIVAALDNGGLSRXRLQEAAGRIIFEKIRMGLLHDE

SEQ ID NO: 19773 - DNA, 888 bp, Unknown
  Obtained from environmental sample
  misc_feature (1)..(888): n is a, c, g, or t
gtgggcgctttcctcgctgggacaatggactacccggacattgcttttgaaacaatcaagccctatgtgcgggacgaaattcccgattcgacgctggaagacatagtccgctccgcctacacttttgacgcgcctcttgcaggcgttggggacaggttcgtgctggaattgtttcacggcccgacagcggcatttaaggattttggggcgcggttcatggcgcgggctttcgcttacctaaggcgcggcgaggacaagcccttgcgtatccttgtcgccacatcaggcgatacaggcggggcggtcgccgacggtttctttgaagtagagggcatttacgtcaccgtgctctatcccaaaggaagaataacgcccttgcaggagcggcaaatcgccggtcttggcaagaatatttccgcccttgccgttgaggggagttttgacgactgccagcggcttgtaaaagccgcccttgccgacgaaggccttaaaaagaagatggcgctttcctcggcgaattcaattaacatcagcaggttgattccccaggcggcctattacgccgccggcgcgggcaaagctcccggcataacgctctgcgtcccttccggcaatttcggcaatcttaccgccggtctttacgccatgaaaatgggcgcgccggtaaaggtattcatcgccgccaccaacatcaacaaaacatttcccgattaccttgcgacaggcgattatcagaccaggatttcacaggccaccatttccaacgcgatggacgtgggcgcgcccagcaactttgagcgtatggcggcgcatttttcgttagatgaaatgcggcggctcatacttggcgtttccgtaacggacgcggaaaccaggaaaccatcgtaa

SEQ ID NO: 19774 - protein, 295 aa, Unknown
  Obtained from environmental sample
  DOMAIN (23)...(295): Pyridoxal-phosphate dependent enzyme
  misc_feature (1)..(295): Xaa is any amino acid
MGAFLAGTMDYPDIAFETIKPYVRDEIPDSTLEDIVRSAYTFDAPLAGVGDRFVLELFHGPTAAFKDFGARFMARAFAYLRRGEDKPLRILVATSGDTGGAVADGFFEVEGIYVTVLYPKGRITPLQERQIAGLGKNISALAVEGSFDDCQRLVKAALADEGLKKKMALSSANSINISRLIPQAAYYAAGAGKAPGITLCVPSGNFGNLTAGLYAMKMGAPVKVFIAATNINKTFPDYLATGDYQTRISQATISNAMDVGAPSNFERMAAHFSLDEMRRLILGVSVTDAETRKPS

SEQ ID NO: 19775 - DNA, 570 bp, Unknown
  Obtained from environmental sample
  misc_feature (1)..(570): n is a, c, g, or t
atggccgagataggcaaaaagctcctccaagtcatggataattgttctgcttatctattggttcttttaggactttttgcgggatggctgttctattatggcggtatggatgttgttcgtccaatttataacaaggcggttaccggtattggcaatacggttgatggtattaaagataaattctttgaacctaagccaattaaagaacctgaacctgtggtaaaggaaccggaacccgttaaaccggtcgagcctgtcaagcagacggaacctgttcagcaaaaggtcgaacctgcgcctgtgattcaagcgcctgatatcgcgcctgagccaaaacagcggcagacggaaaggtcaagtaacgcgccggttatgtcatacaaagttccgacgactattccaagagagggcgttaattataagattcgctggggcgatacattatgggatatcgcggaggcgttttatcgtaatccctggctttatccaagaatcgcgaagtataataatattaggaatcctaacttgattatatccggaagaacaatccgtattcctcctaggaattaa

SEQ ID NO: 19776 - protein, 189 aa, Unknown
  Obtained from environmental sample
  DOMAIN (140)...(186): LysM domain
  misc_feature (1)..(189): Xaa is any amino acid
MAEIGKKLLQVMDNCSAYLLVLLGLFAGWLFYYGGMDVVRPIYNKAVTGIGNTVDGIKDKFFEPKPIKEPEPVVKEPEPVKPVEPVKQTEPVQQKVEPAPVIQAPDIAPEPKQRQTERSSNAPVMSYKVPTTIPREGVNYKIRWGDTLWDIAEAFYRNPWLYPRIAKYNNIRNPNLIISGRTIRIPPRN

SEQ ID NO: 19777 - DNA, 585 bp, Unknown
  Obtained from environmental sample
  misc_feature (1)..(585): n is a, c, g, or t
atgagcctgaaagtaaaattaaccacgattatccttgtgatgatactggtatccatcgcggttttgtccgtgttcaaccttacacgctcttcagcattgcagttagacacaacttacacttacgcccagactctggtgaaactcaacgcaaaggaaacccagcggcaaatggaagtctatacggattacggaaacgtactcgttcagatattcaacggctatgaagatacggaaatgagcggacggcggcaaatgtatgacgatgttatgcacagcttaatctcatcagttgactctattctcggtatctggacagcgtggcttcccaacaccatagacacttatgacgcccggttggggcagtatcaaacgtatttccatagaaggaacggtcctctggtcagagaacccgccggctttgcgggctggcaggatcaattgaagagaataaccccgcaaggacttacttccacaacgggaagagagccagctttccaggaacttgcggatgttttttgggcggatgtaacaggcagggggaacgtccctgtcgttgccgttatttattcttttaaaaaccagtaa

SEQ ID NO: 19778 - protein, 194 aa, Unknown
  Obtained from environmental sample
  SIGNAL (1)...(26)
  misc_feature (1)..(194): Xaa is any amino acid
MSLKVKLTTIILVMILVSIAVLSVFNLTRSSALQLDTTYTYAQTLVKLNAKETQRQMEVYTDYGNVLVQIFNGYEDTEMSGRRQMYDDVMHSLISSVDSILGIWTAWLPNTIDTYDARLGQYQTYFHRRNGPLVREPAGFAGWQDQLKRITPQGLTSTTGREPAFQELADVFWADVTGRGNVPVVAVIYSFKNQ

SEQ ID NO: 19779 - DNA, 879 bp, Unknown
  Obtained from environmental sample
  misc_feature (1)..(879): n is a, c, g, or t
ttgcgggcgcacaggcgggatgaggctatttccgtacaaaacgccctgcgctggtcgatcgtctggatcctgctatccctgctttttgctgtgtacatagcatgtagccacgggatggaagacgcttcgctctatcttgccggttacctgctggaaaagtccctgtcggttgacaacctcttcgtcatcatggccatcttctcctccttcgccatcaaggacgagttccagcaccgcgtactctattacggcatcctcggcgcgttggttctgcgcatggtctttgtcgccgcggggagttccctggtcgtgctgttcggtccctatgccttggcgggcttcggccttttcgtgctgtggtcggcctggaaaatgtggcagcagatgggcaaggacgaagaacaactcgaagattacacccaccactgggcagtcgcctggacgcaacgattttttcccgtgcataacagactggacgggcacaacttttttgtgaaggttcaggacggcgcgcgtgtcgcgcgcaaagcgacgccgctgtttctgtgtctggtggtggtggagatttccgacgtcatgttcgcctttgactcggtacccgccgtcatcgccattacccgggaaccttttttggtttacaccagcaatattttcgccattctcggcctgcgttccctgtattttctgctggcggcggccaagcgctacctatgccggctggaaacggccgtcatcctcatcctggtgtatatcggcctgaaaatgctgctggatgtcacaggcattctccacatgacgccgatgttcagcctggccgtcgtctgcctcctgcttgcgggcggagtgcttgcctcgcttgtctggncggaaaaggaataa

SEQ ID NO: 19780 - protein, 292 aa, Unknown
  Obtained from environmental sample
  DOMAIN (44)...(167): Integral membrane protein TerC family
  misc_feature (1)..(292): Xaa is any amino acid
MRAHRRDEAISVQNALRWSIVWILLSLLFAVYIACSHGMEDASLYLAGYLLEKSLSVDNLFVIMAIFSSFAIKDEFQHRVLYYGILGALVLRMVFVAAGSSLVVLFGPYALAGFGLFVLWSAWKMWQQMGKDEEQLEDYTHHWAVAWTQRFFPVHNRLDGHNFFVKVQDGARVARKATPLFLCLVVVEISDVMFAFDSVPAVIAITREPFLVYTSNIFAILGLRSLYFLLAAAKRYLCRLETAVILILVYIGLKMLLDVTGILHMTPMFSLAVVCLLLAGGVLASLVWXEKE

SEQ ID NO: 19781 - DNA, 474 bp, Unknown
  Obtained from environmental sample
  misc_feature (1)..(474): n is a, c, g, or t
atgggcgagctacaacatttgttggaacgcggttgcatatacatcgcgaccggcgagggtgccgttcagacggtgttgggcagttgcgtctcggtttgcctgtgggatccggaggcgcggtgcggcgggatgaatcacttcatataccctcagacgatgcgcaaagagcaggctacgcctaagtacggaaacgtggccacgatggccctgattaagctgatgtgcgaagagggttgcagtcccggcagccttaccgcccacataatagggggcggccatccggacggcgctaccgacagcaccggcatgcgcaatgtggaggtggccagaaagattttgaacgacaagggtataacgataatgtccgaggacgtgggcggcagggtaggccgcaaagtggtctttgatctttcgaccggccaagtggccgtattaaaggtgactaaactgagggcggaagattggattaattaa

SEQ ID NO: 19782 - protein, 157 aa, Unknown
  Obtained from environmental sample
  DOMAIN (37)...(156): CheD
  misc_feature (1)..(157): Xaa is any amino acid
MGELQHLLERGCIYIATGEGAVQTVLGSCVSVCLWDPEARCGGMNHFIYPQTMRKEQATPKYGNVATMALIKLMCEEGCSPGSLTAHIIGGGHPDGATDSTGMRNVEVARKILNDKGITIMSEDVGGRVGRKVVFDLSTGQVAVLKVTKLRAEDWIN

SEQ ID NO: 19783 - DNA, 333 bp, Unknown
  Obtained from environmental sample
  misc_feature (1)..(333): n is a, c, g, or t
atgggcacccagaagatggtcatgtgccacgggcaactgctgccgctttacagctgggctgaagttatgggcaagaagaacaccgtcacggtagaaaacggcatagtgatggtggtggaggacgccggcaaacgcaccggactgcttgtggataggatcataggccagcagcagacggttataaagaagctgggcgagggcgtaggaaagatagacggcgtctcaggaggcgcgatcatgcccgacggcaaggttagcctaatcatagatgttgcggaaacggttaagctggctatgagaagcgggagcatgatagcggatcccaagagctga

SEQ ID NO: 19784 - protein, 110 aa, Unknown
  Obtained from environmental sample
  misc_feature (1)..(110): Xaa is any amino acid
MGTQKMVMCHGQLLPLYSWAEVMGKKNTVTVENGIVMVVEDAGKRTGLLVDRIIGQQQTVIKKLGEGVGKIDGVSGGAIMPDGKVSLIIDVAETVKLAMRSGSMIADPKS

SEQ ID NO: 19785 - DNA, 858 bp, Unknown
  Obtained from environmental sample
  misc_feature (1)..(858): n is a, c, g, or t
ttggcccgaaaggcgggacatccccggccttgcccccctataatccacaataaacaggaaacaccaggatcaagcgcgcggccgggtcaagccgcgcccaggctagggctcagagaaagccaagccggactttcaagaatttttggaggctttatgaaacccccccccgaggccatcgccggaccggcggccccggccgccaggtcggaatttcgccagaaccggttgccgcccgccaaggcggtcaaatggctccgccaggccgctgaacagggcaacgccacggcccggttcaacctgggcgaggcctattacttcggcgaaggcgttgccgaagaccaggccgaagcggccaggtggtaccggctggccgccgaacaaggccacgccgcggcccggttcaacctgggccacgcctattacttcggcgaaggcgttttagaggacaaggccgaagcgttcaaatggtaccggctggccgccgaacaaggccacgccgcggcccggttcaacctgggccacgcccattacttcggcgaaggcgttttagaagacaaggccgaagcggtcaagtggtaccggctggccgctgaacaaggacatccggaggcccagaacagcttgggcgacgcatattacttcggcgaaggcgtcaaagatgacaaggccgaagcggtcaagtggtaccggctggccgccgaacaaggcgattcgccggcccgattcagcttgctggccgcttctgatttcggcctcggccttgaagacgaccgggccgaagcggtaatgggccaccggccggccgccgggccgggccggttcggcctgggcaacgcctgccgcttggcggaggcgtga

SEQ ID NO: 19786 - protein, 285 aa, Unknown
  Obtained from environmental sample
  DOMAIN (166)...(201): Sel1 repeat
  misc_feature (1)..(285): Xaa is any amino acid
MARKAGHPRPCPPIIHNKQETPGSSARPGQAAPRLGLRESQAGLSRIFGGFMKPPPEAIAGPAAPAARSEFRQNRLPPAKAVKWLRQAAEQGNATARFNLGEAYYFGEGVAEDQAEAARWYRLAAEQGHAAARFNLGHAYYFGEGVLEDKAEAFKWYRLAAEQGHAAARFNLGHAHYFGEGVLEDKAEAVKWYRLAAEQGHPEAQNSLGDAYYFGEGVKDDKAEAVKWYRLAAEQGDSPARFSLLAASDFGLGLEDDRAEAVMGHRPAAGPGRFGLGNACRLAEA

SEQ ID NO: 19787 - DNA, 369 bp, Unknown
  Obtained from environmental sample
  misc_feature (1)..(369): n is a, c, g, or t
atgcgaagtttaacatgtattgtctgcccaatgggatgttctcttgaggttgatgacagcggtggtaaggacgctatttatgtgacaggaaacaaatgtcaacgtggcaaggattatgcggtggaagaaattcgcgcgccaaaacgcgtcgtaactgcaacttgcgtcatcaatgggcaggcgcgtgtttcttctgtaaagcgtgtgccggtaaagaccgctaccccctgtccaaaggaaaaaatctccgcccttttacaagatatttacaaggctaaaataacccttcccgtaaaaatgggcgacattgtaatcgcggactggaacggcaataagatagacatagtagcgacaaggacgttgagttaa

SEQ ID NO: 19788 - protein, 122 aa, Unknown
  Obtained from environmental sample
  DOMAIN (2)...(119): Protein of unknown function (DUF1667)
  misc_feature (1)..(122): Xaa is any amino acid
MRSLTCIVCPMGCSLEVDDSGGKDAIYVTGNKCQRGKDYAVEEIRAPKRVVTATCVINGQARVSSVKRVPVKTATPCPKEKISALLQDIYKAKITLPVKMGDIVIADWNGNKIDIVATRTLS

SEQ ID NO: 19789 - DNA, 426 bp, Unknown
  Obtained from environmental sample
  misc_feature (1)..(426): n is a, c, g, or t
gtgcttgatttatttgatcgcaaggtcgtcggctgggcattaagcgacaacatggaaacatgcaatacaaccattcctgcgtttgaaatggcggtaaaaaaccgtcaaccggaaagtgatttgatatttcattcagacagaggtgtccagtattgcgcgtattcattcggtgaggttatgagcaatctatgtccgtctgttcgccggagcatgagccgtaaaggtaactgctgggacaatgcctgcgcggaatcatttttcaaaacattaaaatcggaggaggaaaaacttaacggaaaatattctgccaatgatgtaaggcaggctgtatttttctatgtcgaaggttattataaccgcgaacggattcattcggtgcttgactatcttgcacctaatgaatattatttaagtaaagctgcttaa

SEQ ID NO: 19790 - protein, 141 aa, Unknown
  Obtained from environmental sample
  DOMAIN (1)...(137): Integrase core domain
  misc_feature (1)..(141): Xaa is any amino acid
MLDLFDRKVVGWALSDNMETCNTTIPAFEMAVKNRQPESDLIFHSDRGVQYCAYSFGEVMSNLCPSVRRSMSRKGNCWDNACAESFFKTLKSEEEKLNGKYSANDVRQAVFFYVEGYYNRERIHSVLDYLAPNEYYLSKAA

SEQ ID NO: 19791 - DNA, 345 bp, Unknown
  Obtained from environmental sample
  misc_feature (1)..(345): n is a, c, g, or t
ttgtgggatctaggggcatcgtataatagaatgggagatcacctgacggcgttaggacaaacgaaagaagcgggtgaatattacaagaaattttttgacgcgatggtacaagtatgcagacagaacggcactctggcgatgctgagggatctgtctgtagcgtatggtaatatgggagatcatctgacggcgttaggacaaactgaagaagccggggagtattaccgtaaagcgcttgatacggatattcaaatctataagcagaccggcactgcggagatgctgaggagtctggctgttggacttaaccccagccagtatacaaagttaagcagctttacttaa

SEQ ID NO: 19792 - protein, 114 aa, Unknown
  Obtained from environmental sample
  misc_feature (1)..(114): Xaa is any amino acid
MWDLGASYNRMGDHLTALGQTKEAGEYYKKFFDAMVQVCRQNGTLAMLRDLSVAYGNMGDHLTALGQTEEAGEYYRKALDTDIQIYKQTGTAEMLRSLAVGLNPSQYTKLSSFT

SEQ ID NO: 19793 - DNA, 528 bp, Unknown
  Obtained from environmental sample
  misc_feature (1)..(528): n is a, c, g, or t
gtgaccgccaacctttttgacccctgttgcggctgcgggctgccgttacaaacaatagctcgtgatcatgagtgcaatacntacggggtagagcttgacttgcaccgggcggaggaggctcttacccggctcaaccgggtaggtttcggttcctactttcacagccgcatcagtcaggaagcgtttcacctaatgctgctcaatccgccgtatttgtccgtgatgaccgaaggcgggagcaacgcccgaagtgaaaagcgtttcttgatcgattgttacagccaccttatgtacggcggactaatgatctacatcataccctattaccggctgacaagtgacgtatgccgtgtgttgtgtgataacttcgatgatctctccgtatggaaattcatggacaacgagtttaagaagtacaagcaggtagccgtcatggggctgcggtgtaaacggcgggacggttccaagatggttcaggagcttgcgtcactggcactgaaaccgggagtttgtaggaaaaccccataa

SEQ ID NO: 19794 - protein, 175 aa, Unknown
  Obtained from environmental sample
  misc_feature (1)..(175): Xaa is any amino acid
MTANLFDPCCGCGLPLQTIARDHECNTYGVELDLHRAEEALTRLNRVGFGSYFHSRISQEAFHLMLLNPPYLSVMTEGGSNARSEKRFLIDCYSHLMYGGLMIYIIPYYRLTSDVCRVLCDNFDDLSVWKFMDNEFKKYKQVAVMGLRCKRRDGSKMVQELASLALKPGVCRKTP

SEQ ID NO: 19795 - DNA, 744 bp, Unknown
  Obtained from environmental sample
  misc_feature (1)..(744): n is a, c, g, or t
gtggataacaataaatcacgccggctctgtcatcgggtgtttacgaaagcttctgacctcatctacatcgacagcggtaacggtgaatacactgggcaggtagtctgcggcattaggtgtaatggcagaacctattacaaacctgtaggggaagcctatcctgacgtgcttctggataccgatacattccccacggatctatcatgcgcacaggcggctgtatccgccccccagagcatcgccgcgaacataatggcggcggcggcggtggtatcgtatctttacaacattctggtactcggaagcattgagaccagaagcgtcacattttccactaaaaccgtgaacctgaaacctgtcgtcatattacagaaaagaagaaaggaggaaagaagtatgtccataaaaacacaacgcgaaaacatgcaaaccatctcccgtcttgtctctcaagagttaggctacatcggcggcgagcgcgaaagcggccccaacggagctaagaaacaattccacaccaaatcggcggcgttcctgcgggcattgggtaacgatctcggcttcaaagactttaaagtcacgaggaattacgccggcatagcggtgtcaggcgagataacgctgatgggcatgtggagtgaaggcaacggcctgtatctgcaaatctcccaaccgataaacacacagcgcgagttcctgtatagaagcataactcacttgaaggattacagcggaaaggaataa

SEQ ID NO: 19796 - protein, 247 aa, Unknown
  Obtained from environmental sample
  misc_feature (1)..(247): Xaa is any amino acid
MDNNKSRRLCHRVFTKASDLIYIDSGNGEYTGQVVCGIRCNGRTYYKPVGEAYPDVLLDTDTFPTDLSCAQAAVSAPQSIAANIMAAAAVVSYLYNILVLGSIETRSVTFSTKTVNLKPVVILQKRRKEERSMSIKTQRENMQTISRLVSQELGYIGGERESGPNGAKKQFHTKSAAFLRALGNDLGFKDFKVTRNYAGIAVSGEITLMGMWSEGNGLYLQISQPINTQREFLYRSITHLKDYSGKE

SEQ ID NO: 19797 - DNA, 870 bp, Unknown
  Obtained from environmental sample
  misc_feature (1)..(870): n is a, c, g, or t
ttggtgtttgtgatattcatgctgggctccagccagcgctggtttgtccgggacaacgattatgtcacctatttcagttccgcctccggcctcagccagaatatgcctgtccagtacaaaggttttaccatcgggctcgtaaaaaaaattgaattcaatctggctgatgacagggtggacgttcagttcaccatttttaaggaatatattgataaggttaagcaaggctcccgcgtcgaactgttgggcagcccgatcagcgcccttgggggaaaccagttcctgttttatccgggccgcggtcttgaggatgaacctcttccgtcgggtacccttattcccccggctaacgcgcccgagtccctgcttctgcctgacaggcatttgacgaccgcgccgccgcgggatgacggcatcggcaatataataaaccagatcggcattctgctcgggacagtgaacgaggcgcttggggaaggaagtcaggaaaacagattaacgtcaattctgaataacgtagtagtattactttcagagcttcaggtgctggtcgggaaactctcgggcgatcttgatattgaaaaaattatgggggatctcagtcccgcgctcgcgaatttccgcggtcttaccgaaaagttcaacgcgccggataacgtcatcatgtcgtttctcaattcggaaggggacctttacggcaatctggacaaaactcttgaaggcgccgccgggactttacagcacctggaaggcaccatgggcgatattcataagcagacccctcagcttgcggccgcgttcagcaatctgctcaccgccctgaaatccgcaaaccaggtgcttgaatcggtaaaaacaaccccctgctga

SEQ ID NO: 19798 - protein, 289 aa, Unknown
  Obtained from environmental sample
  DOMAIN (17)...(99): mce related protein
  misc_feature (1)..(289): Xaa is any amino acid
MVFVIFMLGSSQRWFVRDNDYVTYFSSASGLSQNMPVQYKGFTIGLVKKIEFNLADDRVDVQFTIFKEYIDKVKQGSRVELLGSPISALGGNQFLFYPGRGLEDEPLPSGTLIPPANAPESLLLPDRHLTTAPPRDDGIGNIINQIGILLGTVNEALGEGSQENRLTSILNNVVVLLSELQVLVGKLSGDLDIEKIMGDLSPALANFRGLTEKFNAPDNVIMSFLNSEGDLYGNLDKTLEGAAGTLQHLEGTMGDIHKQTPQLAAAFSNLLTALKSANQVLESVKTTPC

SEQ ID NO: 19799 - DNA, 369 bp, Unknown
  Obtained from environmental sample
  misc_feature (1)..(369): n is a, c, g, or t
gtggaatatttttttctcggtgaaacagagcttgtaattgctttccggttcatcggcattgaaggaatggcggtgaatagttccggtgaagcaattacggctttcaggaaaataaccgaaggttttgtagacgctgcggatattccgctttctgaccagtcggaaaagataaggtttccgtcagcgggcggctgtcatattttattaataacggaagaagtcgccgtatggcttggagatttgctgattgattggcagctttccggaaggtatcccctgttagttgaaatacccggtattgcgggaaagatgctcggcaggaaaacccttgtagatacaatcagagaagctatcggaattcatgtataa

SEQ ID NO: 19800 - protein, 122 aa, Unknown
  Obtained from environmental sample
  misc_feature (1)..(122): Xaa is any amino acid
MEYFFLGETELVIAFRFIGIEGMAVNSSGEAITAFRKITEGFVDAADIPLSDQSEKIRFPSAGGCHILLITEEVAVWLGDLLIDWQLSGRYPLLVEIPGIAGKMLGRKTLVDTIREAIGIHV

SEQ ID NO: 19801 - DNA, 300 bp, Unknown
  Obtained from environmental sample
  misc_feature (1)..(300): n is a, c, g, or t
atgaacaaaaaagcgttatttgtgtgtgtgctgttatttgcatccgccgctttattcgcacaggaggctgaaacggacggctcttccgtgactgcagggttaaagtacattgccgctgcattttctgtaggaatagcttgtgtcggaggcgctatggctgtagggaagatcggagctgccgcaatgggcgcaatgagcgaaaatcctgaactttcgggaaaagccctgccgtatgtcgggcttgcggaaggtatctgtctttggggatttcttgtagcgctgcttattttattcctctga

SEQ ID NO: 19802 - protein, 99 aa, Unknown
  Obtained from environmental sample
  SIGNAL (1)...(20)
  DOMAIN (34)...(99): ATP synthase subunit C
  misc_feature (1)..(99): Xaa is any amino acid
MNKKALFVCVLLFASAALFAQEAETDGSSVTAGLKYIAAAFSVGIACVGGAMAVGKIGAAAMGAMSENPELSGKALPYVGLAEGICLWGFLVALLILFL

SEQ ID NO: 19803 - DNA, 795 bp, Unknown
  Obtained from environmental sample
  misc_feature (1)..(795): n is a, c, g, or t
atggaaacagcacagataaaagatgaacatctcggccctgagtcgatctgggctattttacgggaaactgctgaacagcaaaaggaaattgatcgaattttaaaggaaaacgccgaacagcgagctgaacagcgaaaagaaacagatcggcaaatgaaggaaagagatgaacggtttgaaagagaaaggaaagaaagagtcgaacagcaaaaggaaacagagcggcaaatgaaggaaagtgccgaacggtttgacagagaaatgaaggaaagagatgaacggtttgacagagaaatgaaggaaagagatgaacggtttgacagagaaatgaaggaaagtgccgaacagttcaacaaacaaatgggaaaactcggtaaccgttttggcgaaatggtcgagtatatggttaagccgaatctaatcgcaaaatttcacgagctcggttttgtttttgagaaggcttactctgacatgacgattaaggacacaaaaaataatattattacggaagctgacattactcttgaaaacggcgacaaggtaatgattgtcgaagttaagtccaaaccaactaccgaaaacataacagaacatatagaaagaatgaataaaatacgtaggcacggagatttacacggagacatgcgganatttttgggcgctgtcgctggtatagtttttaatgataacgagaaaaaatttgccatgaaatgcngtttttatgttattgagccgtccggcgatacatttgcgattaccgccccccgaggcgaatactcaccaagggaatggtga

SEQ ID NO: 19804 - protein, 264 aa, Unknown
  Obtained from environmental sample
  misc_feature (1)..(264): Xaa is any amino acid
METAQIKDEHLGPESIWAILRETAEQQKEIDRILKENAEQRAEQRKETDRQMKERDERFERERKERVEQQKETERQMKESAERFDREMKERDERFDREMKERDERFDREMKESAEQFNKQMGKLGNRFGEMVEYMVKPNLIAKFHELGFVFEKAYSDMTIKDTKNNIITEADITLENGDKVMIVEVKSKPTTENITEHIERMNKIRRHGDLHGDMRXFLGAVAGIVFNDNEKKFAMKCXFYVIEPSGDTFAITAPRGEYSPREW

SEQ ID NO: 19805 - DNA, 702 bp, Unknown
  Obtained from environmental sample
  misc_feature (1)..(702): n is a, c, g, or t
ttggcaatacggaggttgtttcgatgggaaggaatctaccgccttgaaaaacaatacggtattgtcggatttgtatatccggtttattatttcgggctgccaaagagagtaattgaatttgccacaaatcttaatttggaaaacaacaaaaaggcgtatttttttgctatagcgacatacggcggcagcgcgggaaacgctttaaatcaactgaatgaattattgctgcaaaaacacgtcgtaaaactaaattttgtaaaaggcttaagaatgttcgccaattacgtgtccctgtacgatatgagtaaaaatgtaaaaaggattactgaaaggtcagatagagcgcttgtcccaataataaaatcaatcaaggtgaaaaaaagcaaccgtgtaaataaattaacaagaatattcaattccatgaatgaggattttattcagaaagcagcaaatactgacagcggttatgttgttaatgacaaatgtaccggctgtggaatttgcaaggctgtttgtcctgtaggaaatatagaaattgttgattgcaagccaaagtacaatcataattgcgaggtttgcatggcttgtattcaattttgtcctgaaagggcgattaactatggaaatgtaacgcagaacagaaggagatataccaatccggacgtgagttataaggaactggtggaaaaaaataagatgtaa

SEQ ID NO: 19806 - protein, 233 aa, Unknown
  Obtained from environmental sample
  DOMAIN (184)...(206): 4Fe-4S binding domain
  misc_feature (1)..(233): Xaa is any amino acid
MAIRRLFRWEGIYRLEKQYGIVGFVYPVYYFGLPKRVIEFATNLNLENNKKAYFFAIATYGGSAGNALNQLNELLLQKHVVKLNFVKGLRMFANYVSLYDMSKNVKRITERSDRALVPIIKSIKVKKSNRVNKLTRIFNSMNEDFIQKAANTDSGYVVNDKCTGCGICKAVCPVGNIEIVDCKPKYNHNCEVCMACIQFCPERAINYGNVTQNRRRYTNPDVSYKELVEKNKM

SEQ ID NO: 19807 - DNA, 552 bp, Unknown
  Obtained from environmental sample
  misc_feature (1)..(552): n is a, c, g, or t
gtgctaccaatgaaataccaccccatactattcaccacggatatgattcgtgccatattggaaggtcgcaaaacgcaaacgaggcgtatcaaattcaagtgcgaggttggtgatgtgctttgggtcagggagacgtggcgtgtttctgaggtgcttggaaaaaccacggaaggaaattttcaaatttctgtaaaatttaaaggcggcacaactggatatgttacattcacgcccgatagatataagaaatttaaaaaattcatagatgcgcccaaaaagtggcatactgtcaggcgtaaatggattccctccatctttatgccccgcgaagcctgccgcctgtatctgcaagcggaagcggggcgaaaggagaagttgaatgatattctcccaccagacttactaaaagaaggaactccatatagtgaagacccaaacgacactagagaggaatttatacaactctgggacggcatcaacgccaagcgtggctacggttgggataaaaaccctgttgttaaagtgattgagtttaggagggtggagagatga

SEQ ID NO: 19808 - protein, 183 aa, Unknown
  Obtained from environmental sample
  misc_feature (1)..(183): Xaa is any amino acid
MLPMKYHPILFTTDMIRAILEGRKTQTRRIKFKCEVGDVLWVRETWRVSEVLGKTTEGNFQISVKFKGGTTGYVTFTPDRYKKFKKFIDAPKKWHTVRRKWIPSIFMPREACRLYLQAEAGRKEKLNDILPPDLLKEGTPYSEDPNDTREEFIQLWDGINAKRGYGWDKNPVVKVIEFRRVER

SEQ ID NO: 19809 - DNA, 447 bp, Unknown
  Obtained from environmental sample
  misc_feature (1)..(447): n is a, c, g, or t
atggtttccgccggagtggatactacggtgatctgcgacaatatggcaagcatggtaatgaaaaacggctgggttaaggcctgttttacaggctgcgaccgcgtggcatctaacggggatgctgccaacaaaatcggtacttccggcgtggcaatcctcgcaaggcattacgggatccccttttatatctgcgctcccacatctactgtagatatgtcgattaaggaaggaaaagacattgtgatcgaggaacggaaggcggaagaagtcaccgagatgtggtacagcgagcgtatggcccctgcgggggtaaaagtattcaaccccgcctttgatgtaaccgatcacagtctgattaccgcaatcattaccgaattcgggattgcccgcccgccctattcagagagtcttaaagttatctttgagaggaaaaccggtatttcttga

SEQ ID NO: 19810 - protein, 148 aa, Unknown
  Obtained from environmental sample
  DOMAIN (1)...(133): Initiation factor 2 subunit family
  misc_feature (1)..(148): Xaa is any amino acid
MVSAGVDTTVICDNMASMVMKNGWVKACFTGCDRVASNGDAANKIGTSGVAILARHYGIPFYICAPTSTVDMSIKEGKDIVIEERKAEEVTEMWYSERMAPAGVKVFNPAFDVTDHSLITAIITEFGIARPPYSESLKVIFERKTGIS

SEQ ID NO: 19811 - DNA, 717 bp, Unknown
  Obtained from environmental sample
  misc_feature (1)..(717): n is a, c, g, or t
ttgatttttacagagccgcagggagaagttattttttcgccgctgattcccaatttgccggaacatgcttttttacccggggaaacaatcaccccattttccaaggtgtattctgacacttacaaaccgtccttattttcaattttaagcaaaaaatccctaataatcaatgatctggggattcctatcttaattatcggtaaatatgatgaattttcaaaaataaattgctacaatactttcgtgatagacctgcacacccattccaatatatctgacggggactttagtcctgaacagcttatcaaagaggctgccggacagggtcttagcgctatcgcccttaccgatcacgataccattaacggtctggaaagcgcaagaaaggcggctcttggtgaaaatattaggtttatccccggaatcgagataaatattacatggaatgggggcaaaggagttccgggagtaggccccggaggcgaatttcaccttcttggactgggaattaacgcgccaaccggcaattttacttcatctatcgaaggattattacgaagaagagaggacagaagccgtaaaatactggatagaatgcacgaattgagcattgacgcgacgtgggaagagcttttaccactgcaaaagatgattcaaagggagaaacaggcgaaaaaagcggcttttcaacaaaggaagcgggcggacgttcaatag

SEQ ID NO: 19812 - protein, 238 aa, Unknown
  Obtained from environmental sample
  DOMAIN (83)...(236): PHP domain
  misc_feature (1)..(238): Xaa is any amino acid
MIFTEPQGEVIFSPLIPNLPEHAFLPGETITPFSKVYSDTYKPSLFSILSKKSLIINDLGIPILIIGKYDEFSKINCYNTFVIDLHTHSNISDGDFSPEQLIKEAAGQGLSAIALTDHDTINGLESARKAALGENIRFIPGIEINITWNGGKGVPGVGPGGEFHLLGLGINAPTGNFTSSIEGLLRRREDRSRKILDRMHELSIDATWEELLPLQKMIQREKQAKKAAFQQRKRADVQ

SEQ ID NO: 19813 - DNA, 444 bp, Unknown
  Obtained from environmental sample
  misc_feature (1)..(444): n is a, c, g, or t
atgagcgaaaaatactttccacttgataaagctgctctggaaaaactaacgcggcagtatccaacacctttttatgtttacgatgaaaaagcaatacttgaaaatgtccgtcggataaaatcggcgttttcggtttttccttcttacaaaaatcactttgcggttaaggcattgcccaacccctatatgttaaaaattctcgcaaaggaaggtttcggggcagactgctccagttatcctgaattgcttctcgcggaaatggcgggaatgtccggtgaagatgttatgcttacttcgaatganactcccgcaaatgaatacaaagcagctcgtaatgtgggcgctataataaatttggatgattttacgcacattgagtttcttgaaaaaacggcaggattgccggaattaaatttcatgnncgtacatcctggtccctattaa

SEQ ID NO: 19814 - protein, 147 aa, Unknown
  Obtained from environmental sample
  misc_feature (1)..(147): Xaa is any amino acid
MSEKYFPLDKAALEKLTRQYPTPFYVYDEKAILENVRRIKSAFSVFPSYKNHFAVKALPNPYMLKILAKEGFGADCSSYPELLLAEMAGMSGEDVMLTSNXTPANEYKAARNVGAIINLDDFTHIEFLEKTAGLPELNFMXVHPGPY

SEQ ID NO: 19815 - DNA, 870 bp, Unknown
  Obtained from environmental sample
  misc_feature (1)..(870): n is a, c, g, or t
ttgataatgtcttacaacactgcggctttagatacagcggttgaagtccccgaggaagtgctctcaaaccccgccctgttatttttatattaccgtattgaacaaatactcggcataaaaccggaaagcggagctcttgttaaattaaatgagtacatggaacacaactgcggcgcttcttttattgaaaaccccgctgcctttgagtatcttcttacttcccgcgaacaaatatataacatttcaaaatacattaccgtcaacgaaacatattttttcagggaaaacgccaattttaatcttctcgcgcatcttctgcctgaattcgccaaacttgaccgacctctgcaaatatgttcagccgccgtttcaatagggtgcgaggcttacagtatagccatgcttattgattatcatataaagaacgggcttaatcttgatttttcagtagacgcttttgatgtctgcgccgaatcaatagaaacggcaaagaacgcccgctatacattaaacgcatttcgctctgacggctcttcatataggcatattcttgatacctatttaattcaagacggcaatgaatatgtagtgtccgaaaacattcgcagaaaggtcaggttttttcctcataacatcatgcgaggactcgacaaacagtatgatattatttttttcagaaactctcttatttatttttcttctaaaagcagaatttccgttgtaaacaatctttgcgaatcgctttttcataacggaattttatttatcggcgcttcggaaacagcatccataaaacatcctctgcttgtaaacaaaaatttatccgatgttttttattttcaaaaaaccaggaattccgtatatttatga

SEQ ID NO: 19816 - protein, 289 aa, Unknown
  Obtained from environmental sample
  DOMAIN (88)...(280): CheR methyltransferase, SAM binding domain
  misc_feature (1)..(289): Xaa is any amino acid
MIMSYNTAALDTAVEVPEEVLSNPALLFLYYRIEQILGIKPESGALVKLNEYMEHNCGASFIENPAAFEYLLTSREQIYNISKYITVNETYFFRENANFNLLAHLLPEFAKLDRPLQICSAAVSIGCEAYSIAMLIDYHIKNGLNLDFSVDAFDVCAESIETAKNARYTLNAFRSDGSSYRHILDTYLIQDGNEYVVSENIRRKVRFFPHNIMRGLDKQYDIIFFRNSLIYFSSKSRISVVNNLCESLFHNGILFIGASETASIKHPLLVNKNLSDVFYFQKTRNSVYL

SEQ ID NO: 19817 - DNA, 690 bp, Unknown
  Obtained from environmental sample
  misc_feature (1)..(690): n is a, c, g, or t
atgagtttttatttccgtatccatagctggcttgacgcagacacggtaaaactggatatcaatattgagtcggacagaaaacaccctccgttgaccattcatctagcctacgatatgaacagtcaggatgttactccaatggcagtttctctcgggttttcaaaacaaagaacaatgtacgcttataaagcgtttgcccctgtccggggggacatggttttgggaggaaaacgaataactttaaaacaagaaatctgttcgggagttttttgggattgtaaggggtttttcccgtacaaaatgcataccagtatgtgcagtgccgcaggttttgatgaagaaaacaggcgttttggcttccatattgccgaaaatcaaacaagggatccaaataaaaataacgagaatgctttgtgggtaaatgggaaattaaccccattgccaccggtgcaaattacaatgccaaacggaattgacgccgattggataattcaggatgttgaaggtatggttgatttgacatttaccccaaaagaaccggataaaagcggcgtaaaatcgtggtttacaagagccgattttaacgttgcattggggtattttaatggaatgttggtcaattccgaaggagaaaagattcatattaaaaacctttttggaattggtgaaaaactttatttgcgggtgtga

SEQ ID NO: 19818 - protein, 229 aa, Unknown
  Obtained from environmental sample
  misc_feature (1)..(229): Xaa is any amino acid
MSFYFRIHSWLDADTVKLDINIESDRKHPPLTIHLAYDMNSQDVTPMAVSLGFSKQRTMYAYKAFAPVRGDMVLGGKRITLKQEICSGVFWDCKGFFPYKMHTSMCSAAGFDEENRRFGFHIAENQTRDPNKNNENALWVNGKLTPLPPVQITMPNGIDADWIIQDVEGMVDLTFTPKEPDKSGVKSWFTRADFNVALGYFNGMLVNSEGEKIHIKNLFGIGEKLYLRV

SEQ ID NO: 19819 - DNA, 399 bp, Unknown
  Obtained from environmental sample
  misc_feature (1)..(399): n is a, c, g, or t
gtgttgcgaatacatccgggcgacgggcagcggcggattacctcgggtatatgtggcggaagctggaatgaggctgaacagcgccaagaccctcatagagctgcgcttcaaaaagatcccgacaacggagcctacttagactcttacgcatgggtcttttataagatgggcgattacgaaaaggcgttgcattacatgaaaaaggcgttggaacaggagagcgtgcacgacgatccggtgccctacgagcatatcggagacatatactttaagctttccgactacagcgccgcggagggggcgtacaagcgcagcctcgagttgaagacggaagacgccaagaggataaaggagcggttggtcgagataaagaacctgcgcgacaagaaggggcgatag

SEQ ID NO: 19820 - protein, 132 aa, Unknown
  Obtained from environmental sample
  misc_feature (1)..(132): Xaa is any amino acid
MLRIHPGDGQRRITSGICGGSWNEAEQRQDPHRAALQKDPDNGAYLDSYAWVFYKMGDYEKALHYMKKALEQESVHDDPVPYEHIGDIYFKLSDYSAAEGAYKRSLELKTEDAKRIKERLVEIKNLRDKKGR

SEQ ID NO: 19821 - DNA, 687 bp, Unknown
  Obtained from environmental sample
  misc_feature (1)..(687): n is a, c, g, or t
ttggatgaaaacaatgaggaaagcgcaatgcctccttcttttattagggccgaggccgatatccagccgccggacacggttatattggacctcacaccgccaatgaaatcaataatcgaacagatgaaacccaagtggcgctataattacaggcttgccttaaaaaaaggagtgaaggtaagacaggcggaaaaaaaagaaataaacgttttttacgatcttcttaaagaaacttcaaaaagagacagaatagcgattcatggctttgattattacaaggagctttttgaaaacgaaataccggaaataaggctttaccttgccgagcatgagggagatgttcttgccggcattgtaacgctttttcgcaggtctaatgccgtgtatctctacggcgcttcatctgatataaagcgaaacctgatgccggcttacgcgcttcaattaaaggctatagaagacgccaaaaactttggctgcgaaaactatgacttttttggaatcccgccacgtaaagatgagtcacattcaatgtcaggcttgtatcaatttaagactggttttggcggcaaaataattcatcgcccgggaagctgggattatccataccggcatattgtttatcgaattttccgaatcgctgaaaattttagaagcactctcaaaaaattaaaaaaacatcgctag

SEQ ID NO: 19822 - protein, 228 aa, Unknown
  Obtained from environmental sample
  DOMAIN (1)...(216): FemAB family
  misc_feature (1)..(228): Xaa is any amino acid
MDENNEESAMPPSFIRAEADIQPPDTVILDLTPPMKSIIEQMKPKWRYNYRLALKKGVKVRQAEKKEINVFYDLLKETSKRDRIAIHGFDYYKELFENEIPEIRLYLAEHEGDVLAGIVTLFRRSNAVYLYGASSDIKRNLMPAYALQLKAIEDAKNFGCENYDFFGIPPRKDESHSMSGLYQFKTGFGGKIIHRPGSWDYPYRHIVYRIFRIAENFRSTLKKLKKHR

SEQ ID NO: 19823 - DNA, 759 bp, Unknown
  Obtained from environmental sample
  misc_feature (1)..(759): n is a, c, g, or t
gtgcttaactccattgagttcttttattctaccacagcccctgcttacgacaattacaagaaaggttattacaacgggtcatcccgcgcattattcaaatttgtttttatccgcgattcttccaataaatacttcgctaaaactttcataagtaatagctggagccacctcggttatcaaactgttgattcgtcctcccttgcttcgcagaatttgtctcaatattatttcctttcaggcaccggtaaccctcaagcccataccgttacgcttcccgccggcgcttatcttattactctcaacggagccgctggcggtcttataatcgacaataacgctaacggcggttccggaggtcatgtatccgaagttgtcgttcttgcaaaagattcttccttcactttctttacaggggaaaaaggctggagcggtaccagttctcaaagatcagttacagccggcacaagtgtttttcatttttattctaattcaggcggcggaggaggctccggttcttttgcttattcccctgacggctatttcttatgcgcaggcggcggaggaggcgcttccgtccttgatacccgctccgtacatgatcagatttttctccccggcgattactattttgcaggcggcgggtcgggcggctctataggcggcggcggggctggcggtactgtggaattcaaaccttctttgcaggcggcgggtccggctctgtaccagcatatttacccaaaccgttgtcggcggtaa

SEQ ID NO: 19824 - protein, 252 aa, Unknown
  Obtained from environmental sample
  misc_feature (1)..(252): Xaa is any amino acid
MLNSIEFFYSTTAPAYDNYKKGYYNGSSRALFKFVFIRDSSNKYFAKTFISNSWSHLGYQTVDSSSLASQNLSQYYFLSGTGNPQAHTVTLPAGAYLITLNGAAGGLIIDNNANGGSGGHVSEVVVLAKDSSFTFFTGEKGWSGTSSQRSVTAGTSVFHFYSNSGGGGGSGSFAYSPDGYFLCAGGGGGASVLDTRSVHDQIFLPGDYYFAGGGSGGSIGGGGAGGTVEFKPSLQAAGPALYQHIYPNRCRR

SEQ ID NO: 19825 - DNA, 561 bp, Unknown
  Obtained from environmental sample
  misc_feature (1)..(561): n is a, c, g, or t
ttgaagatattacctctttttcactctatggcggcgcttttgctgtatataaaaagccgcacccttctgcctgtggaaatggacgcgaacgcggatgaagacccgcgggcggaacttgttgagcgccttatcgaatatcaaaagtataaaaaatattccgaactgctggaagaaaaacaaaatgagaacgagtggggaatagaaaggcgcagattacagcataatcttccgtttgcggatgatgatcaatgggaaagaatagatatatgggacctattaaaaacattttccgctttaactgttaatatcgacgcggaacgtatcatagacctttacgaagaaattaccgtaaacgaaaaaacagcccttcttatggaacgtcttgaaaacaaaggagaatgcaggtttacggaacttatcgtaagatccggcgcgttggatattgtttgcgcttttctcgcaatgctggaagccgcaaaaatgcgcatgattatcatatttcaaaaccgcctgttcggcgatatacttatcagacccagcgtaagcggagaagcaaattga

SEQ ID NO: 19826 - protein, 186 aa, Unknown
  Obtained from environmental sample
  DOMAIN (1)...(180): ScpA/B protein
  misc_feature (1)..(186): Xaa is any amino acid
MKILPLFHSMAALLLYIKSRTLLPVEMDANADEDPRAELVERLIEYQKYKKYSELLEEKQNENEWGIERRRLQHNLPFADDDQWERIDIWDLLKTFSALTVNIDAERIIDLYEEITVNEKTALLMERLENKGECRFTELIVRSGALDIVCAFLAMLEAAKMRMIIIFQNRLFGDILIRPSVSGEAN

SEQ ID NO: 19827 - DNA, 876 bp, Unknown
  Obtained from environmental sample
  misc_feature (1)..(876): n is a, c, g, or t
gtgactttatcagccactttaagcctattaatcaggattgtcccaaatgcgggcagttcatggtggaaaagtacgataaaaagaacggttcttataagtcctgcattaatcctcactgtgattaccttcattccggtgatgaggaatcgaaagccggtagcgcttccgggggagaggaagatggagaatagccgccgtcttcaggaatatatggattatcttcgggtggttcggggcgtatccgagaggactttggaagcgtaccaaagcgatcttgcgcatttctccgcttactgtgaaaaccacgggctttctccggaaacagccaactctgtggaagtaaaaaactttatcgcggacttaagcgccgaaggcattgcgtcggtgagtgtgaaccgggccctttcttcaatcaggggtttttaccgctggatgctgcggtttggttaccgccgggatgacccttcggatcagttacggaacctaaaaacaccgaaaaccctgccggcctttctctatgaaaaagaaatggccgatttctcagaattacccgataccgcgggtattctctggccagaaagggacaaggccttgatccttgccatgtacaccgcgggtttgcggatttcggaactggttggattaaatttaaagaatgtggagagcgatcttggaggcgccaggatcatcggcaagggcgataaagaacggcaggtttttttctccgatgaggctcgcgaagccctggcggcctatcttccccttaggctggaacgcattaagaaagcaggtcccaaaggagcggaaccgacaggaaggctctttgtcaaaccggaaaggggcgcctatttcggttcccgggggtacggtggataa

SEQ ID NO: 19828 - protein, 291 aa, Unknown
  Obtained from environmental sample
  DOMAIN (67)...(149): Phage integrase, N-terminal SAM-like domain
  misc_feature (1)..(291): Xaa is any amino acid
MTLSATLSLLIRIVPNAGSSWWKSTIKRTVLISPALILTVITFIPVMRNRKPVALPGERKMENSRRLQEYMDYLRVVRGVSERTLEAYQSDLAHFSAYCENHGLSPETANSVEVKNFIADLSAEGIASVSVNRALSSIRGFYRWMLRFGYRRDDPSDQLRNLKTPKTLPAFLYEKEMADFSELPDTAGILWPERDKALILAMYTAGLRISELVGLNLKNVESDLGGARIIGKGDKERQVFFSDEAREALAAYLPLRLERIKKAGPKGAEPTGRLFVKPERGAYFGSRGYGG

SEQ ID NO: 19829 - DNA, 900 bp, Unknown
  Obtained from environmental sample
  misc_feature (1)..(900): n is a, c, g, or t
ttgcccggtcatggtcagtctgcctttgcccttcatgttgctggcctcaatatacagcacctcgccgccgaagggcgtccaggcaaggcccagcgccaaaccgggcttgaaatccttttccttctccgtatccagaaagcgcggaacgccgaggaatttcggcgcctgggccgcccccacgcgaaaggggccttgccgcccctccgccttgcgccgggcgattttacggcacaggctccccaactcgcgctccagattacgcaatccggcttcgcgcgtatattcccggataatccgctcaatagccttcgcgtggatcgacagttctttctcctgcaagccgttgtccttcagcatcttgggcaaaagatgacgctgcgcgatgaccagcttttcctgcatggtatatcccggcagggcgatgacctccatgcggtcgcgcagagcggaaggaatggtttccaggtggttggccgtacagatgaacattaccttggacaaatcaaagggcacgttcagatagtggtcgctgaaactgaaattttgttcgggatcaagcgcttccagaagcgcggacgagggatcgccccggaaatccgtgcccagcttgtccacttcgtccagaacgacgaccggattgcgcgttccggcctgtttcagcgcctgaatgatgcgtccgggcatcgaacctatataggttcgcctatggccgcgtatttccgcctcgtcgcgcatgccgccgagggacagacgctggaagcggcgtttgagggcgcgggcgatggagcggccgagcgaggtcttgcccacgccggggagggccgacaaagcagagaatggggcccttggactccggntgnagcttgcggacgctcaaatattcaagaatgcgatccttga

SEQ ID NO: 19830 - protein, 299 aa, Unknown
  Obtained from environmental sample
  misc_feature (1)..(299): Xaa is any amino acid
MPGHGQSAFALHVAGLNIQHLAAEGRPGKAQRQTGLEILFLLRIQKARNAEEFRRLGRPHAKGALPPLRLAPGDFTAQAPQLALQITQSGFARIFPDNPLNSLRVDRQFFLLQAVVLQHLGQKMTLRDDQLFLHGISRQGDDLHAVAQSGRNGFQVVGRTDEHYLGQIKGHVQIVVAETEILFGIKRFQKRGRGIAPEIRAQLVHFVQNDDRIARSGLFQRLNDASGHRTYIGSPMAAYFRLVAHAAEGQTLEAAFEGAGDGAAERGLAHAGEGRQSREWGPWTPXXACGRSNIQECDP

SEQ ID NO: 19831 - DNA, 984 bp, Unknown
  Obtained from environmental sample
  misc_feature (1)..(984): n is a, c, g, or t
atgtnnggcttattgcgaggatcccgttccattcttgaaagttccctttccgtattatggcccggcgctgcgggctacaatatgcgcgaatcaaaagaaaaaaacaggggccatttccagtggctcccctctgtgggaatggggtttaactttattatcccgtccggcggcaaaagacagccgggggaaaggcgcccctctgacggagatataacatttgacgccgcgttcaagcctttgtattacgatgtttacgcgacaggcgcgggagtgacatggtacgctggttacagagacgatctgcctccgaatattattgttaattatcccgagacccagtatttttcacctaactatgacggaaaatccgatgctcttgtatttcccgtcagaatagtcgatgaccattatgtgatgagctggattatgacaataaaagattcgaatggcaacatagtccgcacataccagaacaaggatcgccggcttgaaatgatgaacgtgagggatatttacgggcgttactatctggaaaagagagcaattgaggttccgccgactatgcgctgggatggtgtttttaccacaggcgagatcgggccggacgggaaatattatttctccatcagcgccgaggatgaaaacggcaatgtcggactcagccccagctacgaggtagtgttgaagaacacgccgccgcaagtcactatagacaacatcaacgatcgggtttttgatccttcgggagggaacagaacatccattaacatcgttccccgcggcactgcggaagataaatggggaagcggtatttacgattccgaaggtaaactgatacggacattcgcgaccagaagcgggagtccgcagccgcaggtttgggacggtaaaacagacgcaggtcagattgccccggaccgcgcttatacctttagaatatcggcccacgaacaaggcacagaacacaggatcccgccgttatga

SEQ ID NO: 19832 - protein, 327 aa, Unknown
  Obtained from environmental sample
  misc_feature (1)..(327): Xaa is any amino acid
MXGLLRGSRSILESSLSVLWPGAAGYNMRESKEKNRGHFQWLPSVGMGFNFIIPSGGKRQPGERRPSDGDITFDAAFKPLYYDVYATGAGVTWYAGYRDDLPPNIIVNYPETQYFSPNYDGKSDALVFPVRIVDDHYVMSWIMTIKDSNGNIVRTYQNKDRRLEMMNVRDIYGRYYLEKRAIEVPPTMRWDGVFTTGEIGPDGKYYFSISAEDENGNVGLSPSYEVVLKNTPPQVTIDNINDRVFDPSGGNRTSINIVPRGTAEDKWGSGIYDSEGKLIRTFATRSGSPQPQVWDGKTDAGQIAPDRAYTFRISAHEQGTEHRIPPL

SEQ ID NO: 19833 - DNA, 417 bp, Unknown
  Obtained from environmental sample
  misc_feature (1)..(417): n is a, c, g, or t
atgaacgtactggtgatcagggaagatgaccagttcagaatacagataccgtccattgtgttccccgctgacagtgcgttctttgacggtttgaatcagagcacactggataacaatatccgcgttattaagcgcgtcgctcagatactcaacaaattcaagaactataaggtaatggttgaaggccatgcgaatccgactacggcccctggccctgcccgtgaacaggaagaatcttcgctgaaggatctcagtgaaagacgcgcgggatatgttcttgagcagcttgtccgcaacagcgtcgccagaaacaggcttacattcaccggcgcaggcggcacaatgccggtggttccttttgatgatcgtgcaggctggtggaagaaccgccgtgtggactttattttgattaggtag

SEQ ID NO: 19834 - protein, 138 aa, Unknown
  Obtained from environmental sample
  DOMAIN (27)...(130): OmpA family
  misc_feature (1)..(138): Xaa is any amino acid
MNVLVIREDDQFRIQIPSIVFPADSAFFDGLNQSTLDNNIRVIKRVAQILNKFKNYKVMVEGHANPTTAPGPAREQEESSLKDLSERRAGYVLEQLVRNSVARNRLTFTGAGGTMPVVPFDDRAGWWKNRRVDFILIR

SEQ ID NO: 19835 - DNA, 564 bp, Unknown
  Obtained from environmental sample
  misc_feature (1)..(564): n is a, c, g, or t
ttgggctaccgaggttctttctttgacgacatcttgcgcatctacgccgccgcgtattacagcattatccgcggaaaaatggcgactgtggaaatacctaatcccgaacatccgtcttctctagttgattataccttaaacctcgactcaacatctttttacggttttgaactggttccagaactttttgtgaacgattatttcagcatgggtatgtcattttcaactataagttataccattaatcaccgcgaagacggagggaaatatcttccttattatccaccgcttgccttaaacggctatatggtcatccgcccctggctgaaagagatttctgttattccccgctgggaatacgccggtttccgttacagcgatatgctgggaaatgaaaaactgcccgaatattttcttctgcatcttaaaataaaagctgatattagcggctatgtatccgtttcggcggctgttaataatattctggatacttcctatgaactcaggcattattcgccccaggaaggccgaagttttcattttaccttggagtgccgttattaa

SEQ ID NO: 19836 - protein, 187 aa, Unknown
  Obtained from environmental sample
  misc_feature (1)..(187): Xaa is any amino acid
MGYRGSFFDDILRIYAAAYYSIIRGKMATVEIPNPEHPSSLVDYTLNLDSTSFYGFELVPELFVNDYFSMGMSFSTISYTINHREDGGKYLPYYPPLALNGYMVIRPWLKEISVIPRWEYAGFRYSDMLGNEKLPEYFLLHLKIKADISGYVSVSAAVNNILDTSYELRHYSPQEGRSFHFTLECRY

SEQ ID NO: 19837 - DNA, 582 bp, Unknown
  Obtained from environmental sample
  misc_feature (1)..(582): n is a, c, g, or t
ttgggggatttggtgttcaaagcctaccccgacaagcgaataatgatgacccgtgaaagcgacattacttgcagcctggaggaacggaccgtcattgccaatgccgttcccatcagaaaaaacgaggctatcatctatatctcaattcacgccaattttgcctcgaacaaaaacgtcaaaggctttgaagtctggcacctcaaacccgacttccggcgcgacgtactggaccagtcgctgttttccgattcccccgaactgcgcaaaataatgaatctgctcacggaagaggcctttatcgcggaaagcatcaaaatagccgaatcaatccttgaatcgttaaaagccacaatgggcgcgtctataccttcccgcggcctcaaagaagaggactggtttgtcgtgcggcgcagccgtatgcccgcagtactggtagaattgggctttgtcagcaacaaagatgacgccctcctgatgaccactgacgcgcacttgcgtaaaatggttgaagcgctgtataaaggaatcgttgaatttgtaggcgattttgagcgttcaggaggattcatcgccggacgatga

SEQ ID NO: 19838 - protein, 193 aa, Unknown
  Obtained from environmental sample
  DOMAIN (1)...(178): N-acetylmuramoyl-L-alanine amidase
  misc_feature (1)..(193): Xaa is any amino acid
MGDLVFKAYPDKRIMMTRESDITCSLEERTVIANAVPIRKNEAIIYISIHANFASNKNVKGFEVWHLKPDFRRDVLDQSLFSDSPELRKIMNLLTEEAFIAESIKIAESILESLKATMGASIPSRGLKEEDWFVVRRSRMPAVLVELGFVSNKDDALLMTTDAHLRKMVEALYKGIVEFVGDFERSGGFIAGR

SEQ ID NO: 19839 - DNA, 411 bp, Unknown
  Obtained from environmental sample
  misc_feature (1)..(411): n is a, c, g, or t
gtgggcagccagggccgcagcgatgctgtcgccatccgtaaggcgggagccgccaacggctgccgcatcgccatgaacggtctgcgccggcgctttttcctgctgttccgccaaaaggcgaatgaactcgcggcgcagatggtgttccgggcggacaaggccagttccgcaagcctgcataccagcctgaaagaactctccggcggcctgtccatcagtaccacaggcatctcccccgcgctgaaggaagccgtcaaggccacgctgcacgaaaacgcgcgcctgatccggagcatcgcggcggaacatctggacaaggtggaaagcgcggtcatgcgatccataacgcaaggcaaggggcttgccgggctatctcatcaactgccgctgccgcatggcgccggtaattga

SEQ ID NO: 19840 - protein, 136 aa, Unknown
  Obtained from environmental sample
  misc_feature (1)..(136): Xaa is any amino acid
MGSQGRSDAVAIRKAGAANGCRIAMNGLRRRFFLLFRQKANELAAQMVFRADKASSASLHTSLKELSGGLSISTTGISPALKEAVKATLHENARLIRSIAAEHLDKVESAVMRSITQGKGLAGLSHQLPLPHGAGN

SEQ ID NO: 19841 - DNA, 468 bp, Unknown
  Obtained from environmental sample
  misc_feature (1)..(468): n is a, c, g, or t
atggacaaactccagttgttaataccggaagtacgttgttactttgaagattttattgaaaagctcgaacagcagagactcagttacaagatactcgaaacgctccgtacaaaagaagttcaggaggcctattatgcgcagggacggctgcccctccaggagatcaacgaactgcgtaaaaaaaccgggctgtaccttttagacgcgaaagaagggagaaatattataaccagaacaatgaattcggttcacctgacaggacgcgcggcggacatcgttccggttataaacggaaaaataccctggaaaattacaaaaggtaacgccgggctgtggcttacattcgggcgtcttggtcaggaagccggtctggaatggggcggtaattgggagcctttcaacaaatttggcatcggctgggacgcgccgcattaccagtattcggagaaggaagaaaagaatacttaa

SEQ ID NO: 19842 - protein, 155 aa, Unknown
  Obtained from environmental sample
  DOMAIN (4)...(150): D-alanyl-D-alanine carboxypeptidase
  misc_feature (1)..(155): Xaa is any amino acid
MDKLQLLIPEVRCYFEDFIEKLEQQRLSYKILETLRTKEVQEAYYAQGRLPLQEINELRKKTGLYLLDAKEGRNIITRTMNSVHLTGRAADIVPVINGKIPWKITKGNAGLWLTFGRLGQEAGLEWGGNWEPFNKFGIGWDAPHYQYSEKEEKNT

SEQ ID NO: 19843 - DNA, 402 bp, Unknown
  Obtained from environmental sample
  misc_feature (1)..(402): n is a, c, g, or t
ttgagcatgagtgattatgttaacttaaaagtaagcccgcgtttcggcgacatagacgcccttggacatgttaacaacaccgtcttcccgatttggtttgaaatggcaagaaaacccgttatgcaaatcttcgatcctgaattaacgcttgagaattttccgcttatcatggcgcacaatgactttgattatttaagccctatttattttaagttcgacgtggaaattaaaacatggatttccaagatagggacaaagtcatttacggtttaccacgaagcatggcaggaaggaaaactttgcacaaaaggaaactgcgtaattgtatatattatcgacggtcagacaactcccttaacggatgacattaaaaagattttatccaagcatatgcctgaatag

SEQ ID NO: 19844 - protein, 133 aa, Unknown
  Obtained from environmental sample
  DOMAIN (21)...(103): Thioesterase superfamily
  misc_feature (1)..(133): Xaa is any amino acid
MSMSDYVNLKVSPRFGDIDALGHVNNTVFPIWFEMARKPVMQIFDPELTLENFPLIMAHNDFDYLSPIYFKFDVEIKTWISKIGTKSFTVYHEAWQEGKLCTKGNCVIVYIIDGQTTPLTDDIKKILSKHMPE

SEQ ID NO: 19845 - DNA, 750 bp, Unknown
  Obtained from environmental sample
  misc_feature (1)..(750): n is a, c, g, or t
ttgccaacgccgacgaaaaccggatccactttcaacggctggttcacggcggccacaggcggcacggaagtgaatataagcagagtatataccgcaaacactaccatatacgcccaatggacggctgaccccgtcaccccgggtcctttcacaataacgttcaaccccaacggcggaacggtcacccctacgtccggcgttacaggcacggacggcaaactcacgtcattgccaacgccgacgaaaaccggatccactttcaacggttggttcacggcggccacaggcggcacggaagtgaatataagcagagtatataccgcaaacactaccatatatgcccaatggacggctgaccccgtcactccgggccttttcacaataacgttcaaccccaacggcgggacggtcacccctacgtccggcactactacggacggcaaacttgctaccatacccacaccgacgagaaccggttacacattcgacgactggtataccgcggcgaccggcggcacagtggtgaatacaagcactgtatttaccgcaaacgctaccatatacgcccggtggacggccgtccccgcggcccccataatagtaacgttcaacgccaccggcggtgtagtatccccggatagcgctcaagtcagctcaaacggtactctcgcaaccctgccaatccctacgcgcgccgagtacatttttgaaggttggttcccaacgcttcaacggcacttatggaggtga

SEQ ID NO: 19846 - protein, 249 aa, Unknown
  Obtained from environmental sample
  misc_feature (1)..(249): Xaa is any amino acid
MPTPTKTGSTFNGWFTAATGGTEVNISRVYTANTTIYAQWTADPVTPGPFTITFNPNGGTVTPTSGVTGTDGKLTSLPTPTKTGSTFNGWFTAATGGTEVNISRVYTANTTIYAQWTADPVTPGLFTITFNPNGGTVTPTSGTTTDGKLATIPTPTRTGYTFDDWYTAATGGTVVNTSTVFTANATIYARWTAVPAAPIIVTFNATGGVVSPDSAQVSSNGTLATLPIPTRAEYIFEGWFPTLQRHLWR

SEQ ID NO: 19847 - DNA, 708 bp, Unknown
  Obtained from environmental sample
  misc_feature (1)..(708): n is a, c, g, or t
ttgacagattcggcccgagactcgctactaatctcatccatagacatagagctccagcggcacgtgcaacgcgaactcgccaatcatcttgaccagctcaaagcccgcgatgtggaaaacggcgcggtgatcgtgcttgataaaaacaacggtcaagtattggcatacgtaggctccggcgggtatttcagttttgataacgggatgcacgactacgcggctataaagagatcgaccggcagcctgatgaagccgttcatctatgcgctcggcatggagaatttggggtacaccgcggccacggttctcaaggacataaactacgatttcggcgagggggcgcgctcgtttattccggtcaacagcgacaggcagtaccaaggccccatattatacaagtacgcgttagccaacagcaggaacattccggcggtgcagttgctgaaagagctgggtataaacaaggtctacggacggctctgcgccctcaaattggcggaagacgacggacgctgggactactacggcctggggctgtcaataagcgagctgtattgcggcctcacatcggtagcaagggcatacatgaccttgggtaatgaccgaagatttggacaactcgcctggctcagagaccaaactagtcaacaacgcaagcaggtgtttaccccctcattcggcgagatgatgtcacgttttctctcctaa

SEQ ID NO: 19848 - protein, 235 aa, Unknown
  Obtained from environmental sample
  misc_feature (1)..(235): Xaa is any amino acid
MTDSARDSLLISSIDIELQRHVQRELANHLDQLKARDVENGAVIVLDKNNGQVLAYVGSGGYFSFDNGMHDYAAIKRSTGSLMKPFIYALGMENLGYTAATVLKDINYDFGEGARSFIPVNSDRQYQGPILYKYALANSRNIPAVQLLKELGINKVYGRLCALKLAEDDGRWDYYGLGLSISELYCGLTSVARAYMTLGNDRRFGQLAWLRDQTSQQRKQVFTPSFGEMMSRFLS

SEQ ID NO: 19849 - DNA, 786 bp, Unknown
  Obtained from environmental sample
  misc_feature (1)..(786): n is a, c, g, or t
gtgaaaaaggaaccgtatttcggcctgttatcgcagagcccgcaaaacaaattcaccgatgccgccggagtgccgtctgccnttaacgcggcgggctttgacaaagcggttatctttggctttggtntcagggatatgggactctgccgttatgtgaatgactatgttattgaagaggtaaaaaaataccccgacaggctcatcggttttatgtccgtgccgccaaacagcggggaacttgaggcggaaattgaccgctgtcacagggccggtttgcggggtataggggaattatttcccgaagggcaggggtttgacattgaggccaagtccgtgatcctttcgggcgcgtgtaaagagcggggcctcccgattattatccacgccaatgagcctgtgggccatgactacccgggtaagacgaaaaccagcctgcgccagtttgaacgttttatcgaaaataatcccggccttgacatcgtgctggcccattggggcggcgggttgatgttttacgaaaccatgccggaactgcggaaaaaatgcgggaacgtgtactacgacaccgcggccacgccgttcctgtacgacccccgtatttaccgcgcggccgccgccctgggcctgacaaaaaaaatcctttttggcagcgactttccgctgctgccgctctcccgttattcgggcgctcttagcgaaagcggcatttccccccaggagcgggacctgattctgggcggcaacgcggaacggctgttaggcctggtatcagaatttaatatttag

SEQ ID NO: 19850 - protein, 261 aa, Unknown
  Obtained from environmental sample
  DOMAIN (24)...(255): Amidohydrolase
  misc_feature (1)..(261): Xaa is any amino acid
MKKEPYFGLLSQSPQNKFTDAAGVPSAXNAAGFDKAVIFGFGXRDMGLCRYVNDYVIEEVKKYPDRLIGFMSVPPNSGELEAEIDRCHRAGLRGIGELFPEGQGFDIEAKSVILSGACKERGLPIIIHANEPVGHDYPGKTKTSLRQFERFIENNPGLDIVLAHWGGGLMFYETMPELRKKCGNVYYDTAATPFLYDPRIYRAAAALGLTKKILFGSDFPLLPLSRYSGALSESGISPQERDLILGGNAERLLGLVSEFNI

SEQ ID NO: 19851 - DNA, 339 bp, Unknown
  Obtained from environmental sample
  misc_feature (1)..(339): n is a, c, g, or t
atgataaagagtattggtcaaagaagggctggctggatacaagccgtccatggaaataaaaggaaaagcggcatgagatacacatacccaacacagggaacctgttcgacggaaattcattttgaaatcaatggtaatgtcataagcgatgtatcatttgaaaaaggctgtaacggcaacctgcaggcgatctcccgccttgttgacggcatgaccgttgacgagatacaggcaaaatgcaaaggcgtcatgtgtatgaaaaacggaaaaagcaaaggaacatcatgcgccgaccagcttgcgcttgcggtcgaaaaagcatatatggaaaatacataa

SEQ ID NO: 19852 - protein, 112 aa, Unknown
  Obtained from environmental sample
  misc_feature (1)..(112): Xaa is any amino acid
MIKSIGQRRAGWIQAVHGNKRKSGMRYTYPTQGTCSTEIHFEINGNVISDVSFEKGCNGNLQAISRLVDGMTVDEIQAKCKGVMCMKNGKSKGTSCADQLALAVEKAYMENT

SEQ ID NO: 19853 - DNA, 417 bp, Unknown
  Obtained from environmental sample
  misc_feature (1)..(417): n is a, c, g, or t
ttgcaaaattttatcattgagtttggcagtgattttgcttttatggacaggcaaaaaaggatttctgttgacaatgaagactattaccttgatttgcttttctatcataggcggctcaaatctttagtcgctatagaattgaaactgggaaattttgaggctgcatataaaggacaaatggaactttacttgcgatggctggataaaaacatgaaacttgacgatgaaaattcgccaatcgggcttattttatgcgcaggaaaaagcgaggaacatatagaacttttacagttagaaaacagcaatattaaggtagcggattacattacacaactgcctgataaaaaactacttgaacagaaattaaggagcgctattgaaatagcgaaacaaaggctggaggcaagagatgattaa

SEQ ID NO: 19854 - protein, 138 aa, Unknown
  Obtained from environmental sample
  DOMAIN (1)...(125): Protein of unknown function (DUF1016)
  misc_feature (1)..(138): Xaa is any amino acid
MQNFIIEFGSDFAFMDRQKRISVDNEDYYLDLLFYHRRLKSLVAIELKLGNFEAAYKGQMELYLRWLDKNMKLDDENSPIGLILCAGKSEEHIELLQLENSNIKVADYITQLPDKKLLEQKLRSAIEIAKQRLEARDD

SEQ ID NO: 19855 - DNA, 477 bp, Unknown
  Obtained from environmental sample
  misc_feature (1)..(477): n is a, c, g, or t
atgggacgcgccgaactgcacccggatcgtatacccgtcaaattaaccggagaaaatgtaatcgcgcgaaaagtgaccatcggcggcgctgattacgagattacctgcgtttctctgggcaatcctcacgccgtggtgttccatgataaactggagcgtcttgcgttaagtgaaataggaccattatttgaaaacgatccgctgtttcccgaccgggtaaacgcggaatttgtcaatgttatggacaggaaccatttaaaaatacgcttatgggaacgcggaagcggtgaaacacgggccagcggtaccgccgcctgcgcttcggctgtggcggcagttctgaacggctgctgcgacaaagacacagatatcaaggtgcaactgcccggcggggatttaatcatccgctataccgatgaggcagtatatatgacgggcgattgtataagagtatttgacgggatggtggagatatga

SEQ ID NO: 19856 - protein, 158 aa, Unknown
  Obtained from environmental sample
  DOMAIN (35)...(151): Diaminopimelate epimerase
  misc_feature (1)..(158): Xaa is any amino acid
MGRAELHPDRIPVKLTGENVIARKVTIGGADYEITCVSLGNPHAVVFHDKLERLALSEIGPLFENDPLFPDRVNAEFVNVMDRNHLKIRLWERGSGETRASGTAACASAVAAVLNGCCDKDTDIKVQLPGGDLIIRYTDEAVYMTGDCIRVFDGMVEI

SEQ ID NO: 19857 - DNA, 816 bp, Unknown
  Obtained from environmental sample
  misc_feature (1)..(816): n is a, c, g, or t
atggctgacaaagcgataatcgccatgtcgggcggcgttgacagttctgtcgccgccgccctcacacttgagaagggctttcaatgtgtcggtataacgcttaaactttacaagggcgaaagccgctgttgttcccttgcggatgtaaatgacgcgaggaatgtggctttcggccttggcatggatcattatgttctaaattttaccgaagaatttgacaaacaggtaatccgccactttatagaaacttatgaacaaggcgcgactcccaatccctgtattgaatgtaaccgccatataaagtttaattctctccttcttcgcgcgcgccagcttgattttgactttcttgttacagggcattacgctcgcataacgcaagatgcggcaaacggaagatatttacttttgaaagcgttagatgaaaaaaaagatcaaagctatgtactttattgccttacccaacaacagcttaaaatgtcccgttttccgctgggagaactttccaaaaatgaagttcgtaaaattgccgaagagcgaaaatttgtaaatgcgacgaagggggagagccaggacatttgttttgtacctgacggtaattacggcaattttatagaaaattacacaggtaaaacatacccgccgggtgacattatcgacaccgaaggaaaaaaatcggcaggcacaaagcattgtacgctacactatcggacaaagaccgggattaggtgtcccggcccatgttcctgtttatgtcaccaaaaagtcaactatagacaatactgtaaccgttgggacggacgaccctctttttag

SEQ ID NO: 19858 - protein, 271 aa, Unknown
  Obtained from environmental sample
  SIGNAL (1)...(20)
  DOMAIN (3)...(270): tRNA methyl transferase
  misc_feature (1)..(271): Xaa is any amino acid
MADKAIIAMSGGVDSSVAAALTLEKGFQCVGITLKLYKGESRCCSLADVNDARNVAFGLGMDHYVLNFTEEFDKQVIRHFIETYEQGATPNPCIECNRHIKFNSLLLRARQLDFDFLVTGHYARITQDAANGRYLLLKALDEKKDQSYVLYCLTQQQLKMSRFPLGELSKNEVRKIAEERKFVNATKGESQDICFVPDGNYGNFIENYTGKTYPPGDIIDTEGKKSAGTKHCTLHYRTKTGIRCPGPCSCLCHQKVNYRQYCNRWDGRPSF

SEQ ID NO: 19859 - DNA, 660 bp, Unknown
  Obtained from environmental sample
  misc_feature (1)..(660): n is a, c, g, or t
atgaaagaattttccatagcggttttgcccggagacggcattggtcccgaagttatgaaagagggcgttaaggttctggaagccgctggcaaaaaattcggtttttcattgaaattagaatgggctccggttggcggtgcggcttacgatttgcataagcacccgcttcccgaaagcacaattaaaattgcagaggccgctggggctatattgtttggctcggttggcggaccaaaatgggaaaaactgccaccggaactccaacccgaaagaggcgcgcttttgccgcttcgcaagcattttaaactttattgcaatttgagacccgcaagagtgtacaaggctctcgctagtgcttgcccattaagaacagatattgtaggcgatggttttgatattctatgcgttagggaattaacaggagatgtatattttgggcagccaaaaggcagagagggcacgggagaaaacgaaaaaggctttgacacaatggtctatagccgctacgaggtggaacgcatagcccgttttgcttttgaagccgcaagcctccgcagaaaaaaacttgcaagcatagacaaagccaatgttttgaccaccagtgttttttggcgcgaagttgttaaggaaatatcaaaggaatacccccaagtgaactga

SEQ ID NO: 19860 - protein, 219 aa, Unknown
  Obtained from environmental sample
  DOMAIN (5)...(219): Isocitrate/isopropylmalate dehydrogenase
  misc_feature (1)..(219): Xaa is any amino acid
MKEFSIAVLPGDGIGPEVMKEGVKVLEAAGKKFGFSLKLEWAPVGGAAYDLHKHPLPESTIKIAEAAGAILFGSVGGPKWEKLPPELQPERGALLPLRKHFKLYCNLRPARVYKALASACPLRTDIVGDGFDILCVRELTGDVYFGQPKGREGTGENEKGFDTMVYSRYEVERIARFAFEAASLRRKKLASIDKANVLTTSVFWREVVKEISKEYPQVN

SEQ ID NO: 19861 - DNA, 852 bp, Unknown
  Obtained from environmental sample
  misc_feature (1)..(852): n is a, c, g, or t
ttgatggccgaggaatccagttggaagatgatgctgaaggcggtggccgtctatagggacggctcgaagatgagccaggccatggcgaccaacctcgatctcttggtaggtgccgaggcggcactggacccagatacgccggcggtggagaagtccgctgcgctggccgcggccatggcgcagaaggtggtgcgctgctaccgtcgcaagatgcccaaccgcaggggcggattcacgcagtcggccaagataggcggccacaagatatacctgcgtacgggcgactacgaggatggcaccctcggcgagattttcttggactcgcacaaagagggcgccgggttcagggccgtgctgaactgcttcgcaatcgccatatcgctgggcctccagtacggcgtgccgctggaggagttctgcgatgcattcatccacaccaagttcgagccgcagggcatagtgcaggagtccgatgcagtgaagctatgcaccagcataattgactacgtcttccgcgaattggcaatcagctacctaggtcgctacgagtacgcgaacatgaccgaggaggaaatagccgccgtcaagaagcagagagcggagcaccacggtcagaggttccaggccccctacaccaaccaggtgccgctgttccccgagaacaacggtgaacatccccccctccgcttggcgcaggacacgcacttcaccgctacgcccgatgcctatgctgtggctagggaaaagggcttcaccggcgacacctgccccgaatgcggcaactttaccatggttcgcaacggcacctgcctaaagtgccagacctgcggtgccacgacggggtgcagttga

SEQ ID NO: 19862 - protein, 283 aa, Unknown
  Obtained from environmental sample
  misc_feature (1)..(283): Xaa is any amino acid
MMAEESSWKMMLKAVAVYRDGSKMSQAMATNLDLLVGAEAALDPDTPAVEKSAALAAAMAQKVVRCYRRKMPNRRGGFTQSAKIGGHKIYLRTGDYEDGTLGEIFLDSHKEGAGFRAVLNCFAIAISLGLQYGVPLEEFCDAFIHTKFEPQGIVQESDAVKLCTSIIDYVFRELAISYLGRYEYANMTEEEIAAVKKQRAEHHGQRFQAPYTNQVPLFPENNGEHPPLRLAQDTHFTATPDAYAVAREKGFTGDTCPECGNFTMVRNGTCLKCQTCGATTGCS

SEQ ID NO: 19863 - DNA, 432 bp, Unknown
  Obtained from environmental sample
  misc_feature (1)..(432): n is a, c, g, or t
atgcgccggggggatttgccgccccggctccctacctcccttccgcggcatccatcagccgctgcgccctgccccgcgcgtcgccgcatcggtcagacgccctcgtgcgggcgggggagtcttggcccccttcccgtcggctgcgcctctcggcctcgccttagggtccggctcaccccgggcggactaaccttccccgggaacccttgggctttcggcgcgcgggctttccacccgcgttttcgcatactcatgccagcattctcattcccgatgcctccagcggccatcgccagccgccttcccaggcctacgggacgctctcctaccactttgcatcgctgcaaaatccacgacttcggcggcgcgcttagccccgataattttaggcgcggcagggcatcgaccagtgagctgttacgctttctttaa

SEQ ID NO: 19864 - protein, 143 aa, Unknown
  Obtained from environmental sample
  misc_feature (1)..(143): Xaa is any amino acid
MRRGDLPPRLPTSLPRHPSAAAPCPARRRIGQTPSCGRGSLGPLPVGCASRPRLRVRLTPGGLTFPGNPWAFGARAFHPRFRILMPAFSFPMPPAAIASRLPRPTGRSPTTLHRCKIHDFGGALSPDNFRRGRASTSELLRFL

SEQ ID NO: 19865 - DNA, 495 bp, Unknown
  Obtained from environmental sample
  misc_feature (1)..(495): n is a, c, g, or t
ttgttgcctccggagccccggctctatctgccttctgctccgtcgcagccctccggaggccccggcgctagaccgccctctaccccgttgcagccttcaggaggccccggcgcaagctcgccccccactccatcgcagccatccggagatcccggcgccagtcagccctctgccccgtcgcagccctccggaggccccggcacaaactcgccccccactccgtcgcagccatccggaggttccggcgctagaccgccctctgccccgtcccaaccctcaggccctggcgctagtccgccctctgccccgtcacaaccctcaggaggccccggcgcaagctcgccttcttctccgtcgcagccatccggaggtccaggcgcgagttcgccctccgcccctgcgcagccctcaggaggccccggcactaatctgccttctgctccgtctcagccttccggaggaggccctggtgctaatccaccacctcgtcggtaa

SEQ ID NO: 19866 - protein, 164 aa, Unknown
  Obtained from environmental sample
  misc_feature (1)..(164): Xaa is any amino acid
MLPPEPRLYLPSAPSQPSGGPGARPPSTPLQPSGGPGASSPPTPSQPSGDPGASQPSAPSQPSGGPGTNSPPTPSQPSGGSGARPPSAPSQPSGPGASPPSAPSQPSGGPGASSPSSPSQPSGGPGASSPSAPAQPSGGPGTNLPSAPSQPSGGGPGANPPPRR

SEQ ID NO: 19867 - DNA, 783 bp, Unknown
  Obtained from environmental sample
  misc_feature (1)..(783): n is a, c, g, or t
ttgctttgggttttcgacatgcaacataatggccagacacttccacccgaaaggttggggacctatcagagggtgggcgagactccgctaggagcaggcggaatgggggtggtctggctgtacagagaaactggcatttcttcgcgcgaggtggccatcaagttcataagggtagaaaaccccgaactcaacaaggccaacctgataaaagacataaaggccctagaggcgcttccgatccatcaaaatatcataaccatgtacacagtcctagaggagaatggaaacattgccctcgtaatggaatacgtgcctggagggatgagtttgaagagcctcatccaagggcatcccaatggactcccaagccccttggtaaaagaaatactgataggcattttgtcaggcgcggcccacgcccacgaacatggcgtgatacacagggacttcaagccagacaatatcctcgtgcgccagccaaaagctggctccacactgagccggagcagcgtaaaaatagtggattttggaatatctaaagtatgccgagaaggcaccaagtcatttaccacaagcgttgcattcacaggtggttatgcggcccccgagcaaataaatggagaggaaacaagcgggttcactgacatttatgccatcggagtcctgctttacgaaatggcgtcgggcagaaaaccatttgacggaaagacagccgaaataataaccggacattgtttcaaactcccccacccatactcaggggcgacgtcccccacggaatga

SEQ ID NO: 19868 - protein, 260 aa, Unknown
  Obtained from environmental sample
  DOMAIN (22)...(251): Protein tyrosine kinase
  misc_feature (1)..(260): Xaa is any amino acid
MLWVFDMQHNGQTLPPERLGTYQRVGETPLGAGGMGVVWLYRETGISSREVAIKFIRVENPELNKANLIKDIKALEALPIHQNIITMYTVLEENGNIALVMEYVPGGMSLKSLIQGHPNGLPSPLVKEILIGILSGAAHAHEHGVIHRDFKPDNILVRQPKAGSTLSRSSVKIVDFGISKVCREGTKSFTTSVAFTGGYAAPEQINGEETSGFTDIYAIGVLLYEMASGRKPFDGKTAEIITGHCFKLPHPYSGATSPTE

SEQ ID NO: 19869 - DNA, 510 bp, Unknown
  Obtained from environmental sample
  misc_feature (1)..(510): n is a, c, g, or t
ttggcaatcgtggtatgcggcggtatcggaagcggcggaagcgtccttgtaggcaagtatcttggcagcggggatatacaatccgccaaaaaagccggaaacaggatatatatatacgctttggtttttgggatactggcgggaatcacaaccctattggcaaggcctcttgtttttaaccttattaatgttaacaaaacagctaaagattatttggatacaatgctcactgtctgtgccgtttactgtataggcaagtcggtaaattcaacgataatcggtgggatattctgcgcgggcggcgacgctaaatttggtttttattgcgatgtagcagtaatgtggggaattatcattccgcttggttttttatgcgcttttgtctggaacgcgccgcccggcttattgtacatggtattatgttccgatgaatttatcaaagcgcctgtcgccttaatcagatttttaaaataccgatggataaggaatatcacaagggatttaacatag

SEQ ID NO: 19870 - protein, 169 aa, Unknown
  Obtained from environmental sample
  misc_feature (1)..(169): Xaa is any amino acid
MAIVVCGGIGSGGSVLVGKYLGSGDIQSAKKAGNRIYIYALVFGILAGITTLLARPLVFNLINVNKTAKDYLDTMLTVCAVYCIGKSVNSTIIGGIFCAGGDAKFGFYCDVAVMWGIIIPLGFLCAFVWNAPPGLLYMVLCSDEFIKAPVALIRFLKYRWIRNITRDLT

SEQ ID NO: 19871 - DNA, 417 bp, Unknown
  Obtained from environmental sample
  misc_feature (1)..(417): n is a, c, g, or t
atggggggcgccgcccttttttgggtagggtattctctgctgacccgcccgctcttttcacgctgttccagaatatatattgtattttggcagtctgtggccggctttatcggtttcatccctttctcgattctggaattaaacaaatggggccgtccggatttgcctgttattcttcatcttgttttccttggcctctgctgttccgcgttaggttactggtattacgcccgttcccttgaagtcctggggctgtcggtctccgcgatatttatcaatctgataccgctggtaacggccattttcggttttatcgtaatgggggatcgtctgacgcctttgcaatggcttggggctgttttagtcattgggggggtgtatctttccatgttccaaagagcaaataataaagaataa

SEQ ID NO: 19872 - protein, 138 aa, Unknown
  Obtained from environmental sample
  DOMAIN (6)...(131): Integral membrane protein DUF6
  misc_feature (1)..(138): Xaa is any amino acid
MGGAALFWVGYSLLTRPLFSRCSRIYIVFWQSVAGFIGFIPFSILELNKWGRPDLPVILHLVFLGLCCSALGYWYYARSLEVLGLSVSAIFINLIPLVTAIFGFIVMGDRLTPLQWLGAVLVIGGVYLSMFQRANNKE

SEQ ID NO: 19873 - DNA, 930 bp, Unknown
  Obtained from environmental sample
  misc_feature (1)..(930): n is a, c, g, or t
ttgggatacgacgaacattctcttcaaaacttggttaccccggctatcggcgttacaacttacgctataatcggttttaacctgatgtatccgggagaggccgattggattattaagagtgttttgggattcggcggctttgggctgaccggtctcagtgacccgggggcgttcacgccggcctacaatccgaattacacgtacctgacggacttcctattccaaagcatgttcgcggccacggcggccacgattgtgtcgggagctgtcgcggagaggataaagctccatgcctacattatattcacggtggtctacgtagcgctggtttatccgttcgtcggcagttggatgtggggcggcggctggcttgccgatatgggcttccacgatttggccggttccaccctcgttcacagcgtgggcggctgggccgcgttggccggcgtgatagtgctcggtccccgcttcggcaggtacgccgccggcaaggtcaaggctatgcccggccacaacctgaccttcgccacaatcggcgtgttcatcctatggttcggctggtggggcttcaacggcggctcggtgctcagcagcagcccgcacgacaccgcgtggattttggtgacgacgaacatggcttgcgtatgcggtatcttgggcgcgatggcgacaagctggttcgtccaagagaagcccgacttaacaatggtattgaacggcgcgctcgccggttggttgccatcaccgccccgcggacatagtcagcgtctgttcgtccccgattatcgcatttgtgggcggtatcataatcgaatttcgcgtctttctttttggatagaagaaaaatcaccacccctgtcggggccgatttcccgtgccttgggtcaccggcaatttgggggacccctcccttgcccaaatcttcggtaa

SEQ ID NO: 19874 - protein, 309 aa, Unknown
  Obtained from environmental sample
  DOMAIN (1)...(301): Ammonium Transporter Family
  misc_feature (1)..(309): Xaa is any amino acid
MGYDEHSLQNLVTPAIGVTTYAIIGFNLMYPGEADWIIKSVLGFGGFGLTGLSDPGAFTPAYNPNYTYLTDFLFQSMFAATAATIVSGAVAERIKLHAYIIFTVVYVALVYPFVGSWMWGGGWLADMGFHDLAGSTLVHSVGGWAALAGVIVLGPRFGRYAAGKVKAMPGHNLTFATIGVFILWFGWWGFNGGSVLSSSPHDTAWILVTTNMACVCGILGAMATSWFVQEKPDLTMVLNGALAGWLPSPPRGHSQRLFVPDYRICGRYHNRISRLSFWIEEKSPPLSGPISRALGHRQFGGPLPCPNLR

SEQ ID NO: 19875 - DNA, 438 bp, Unknown
  Obtained from environmental sample
  misc_feature (1)..(438): n is a, c, g, or t
atggacggcgcttttgagaataacaatctggcccgggtcgttattccgaacgccgttacatcaatcagaaaaaacgcgtttgcgaacaataaattgacaagtataaccattggagacggcgtcacttccattgatgattacgcttttgcgtataataatttaagaagtataaccattggcggcggcgttacattaattggggcttatgcctttatgaacaaccaactttccaatgtcatcattcccaagagcgttacttccattggagactacgctttcaggaacaaccaaattaacagcataaccattggggaagaagtatcgctagacagagattcatttggagacgggtttgaggctttctataacgccaaaagaaaggccgccggcgtttataagcgatccggcgccggctggcagttcagcgccggtatttag

SEQ ID NO: 19876 - protein, 145 aa, Unknown
  Obtained from environmental sample
  misc_feature (1)..(145): Xaa is any amino acid
MDGAFENNNLARVVIPNAVTSIRKNAFANNKLTSITIGDGVTSIDDYAFAYNNLRSITIGGGVTLIGAYAFMNNQLSNVIIPKSVTSIGDYAFRNNQINSITIGEEVSLDRDSFGDGFEAFYNAKRKAAGVYKRSGAGWQFSAGI

SEQ ID NO: 19877 - DNA, 918 bp, Unknown
  Obtained from environmental sample
  misc_feature (1)..(918): n is a, c, g, or t
atgactttgtattcaagcctcaacagcgtggcgttgggcgtttatgattatgtcttgacggacgatgcccttgaagtgcgctattcaatcggcgacattccccgcagttatattattcccccggcggcgccggaacaaaggatgttaacatttctggaaaaaatggaagatgacgaaaggcgccaggtacaggccagttaccggctctacgacatcaacaacctgcgctcgggcgatgacaaaaacgcgcttcttgccaattatcccgacctgagccggacaaaaatatatgtgctgcgtgatactacccaggaatatatgaaagaaattatggaaggattgttcgcgcaggccggttacacctacgatgacttttccgaagactcttccctctacgcggtctccgaagacgcggacaaaccggcgtttaacataacgctgcgctatacgcttgacgggagatccctgctgctccatgtgccttttgacagaatagcgtaccggtcggcgtatcccataacccaattaagccttctgccgtatatgggcgcggggggagttggcgacgaaggttacctgcttgttcctgacggcagcggggcactgatatattttaacaacggcaggcagaatcaaatagcgtataacaacaatgtgtacggctgggatgaggctatgccccggcccggtgacgcgatagtcaatgacaacaaagcccccttcccggcctttggcatacagaaaaacggcagcgctctgttatgcgtcattgaagaaggcgcttcgtatgccggagtgcgggctgacgtatcgggccgtaacagttcatggaacaacgtatattcccgttttagcatagttcacggcgcgataatagacatttcaggccgttctgaccctcgtgccgatctgtcatga

SEQ ID NO: 19878 - protein, 305 aa, Unknown
  Obtained from environmental sample
  misc_feature (1)..(305): Xaa is any amino acid
MTLYSSLNSVALGVYDYVLTDDALEVRYSIGDIPRSYIIPPAAPEQRMLTFLEKMEDDERRQVQASYRLYDINNLRSGDDKNALLANYPDLSRTKIYVLRDTTQEYMKEIMEGLFAQAGYTYDDFSEDSSLYAVSEDADKPAFNITLRYTLDGRSLLLHVPFDRIAYRSAYPITQLSLLPYMGAGGVGDEGYLLVPDGSGALIYFNNGRQNQIAYNNNVYGWDEAMPRPGDAIVNDNKAPFPAFGIQKNGSALLCVIEEGASYAGVRADVSGRNSSWNNVYSRFSIVHGAIIDISGRSDPRADLS

SEQ ID NO: 19879 - DNA, 873 bp, Unknown
  Obtained from environmental sample
  misc_feature (1)..(873): n is a, c, g, or t
ttgatcggcaagctggcgggtaaaaacagcaaccaaaggaatataccgattgccgggtgggtggagatgaaagacaccgtgccgtcgttcagaacgttcagcgacggcgaggacttccgcgccgcgtggcggacggtgctcaattatatgtggcacggcaacccgacctacacctgggatccggtcgttcacgatttcaggcccaacaggccgaacgctttcgagcaagaggccgggacgcgcctcgccaagttcctatgggacaggcggcctacgtggagcaactcgtgcgaaaagataataggggaggggctttggtgggggccctccatgctcaagtaccactactcgccgcagggcgagcaactgtcggagttcacattaaactggttacatggaacgggctcgccctccgccgtaaccgctcaggataccaacctgatggcggagatgtaccgccaagccgagcttgagtgggatgtggatacgccgggcgataggtatctgacgagcgtcccgttctacttccacggaatcttcagggtgctggggctgaacgtcctctccggcaaccaccacgcccccatgaacatgaagcggtcggcgaatatgaaggtctatttggatgtgaataaaacctacgcctttgagggagacaccatcacctatacgatagactataggaactacggggcggaggaggctaggggcgtgcagatagtaaaccgtttgcacagcgacttggtgtttgcgtcggggacgaattcgccgttgtacaacgcctccgcgaataccgttacttggaacataggcagcgtgcccggattcaagacttctaccggtataaatccgacgaggggaactgtactctaa

SEQ ID NO: 19880 - protein, 290 aa, Unknown
  Obtained from environmental sample
  DOMAIN (180)...(254): Domain of unknown function DUF11
  misc_feature (1)..(290): Xaa is any amino acid
MIGKLAGKNSNQRNIPIAGWVEMKDTVPSFRTFSDGEDFRAAWRTVLNYMWHGNPTYTWDPVVHDFRPNRPNAFEQEAGTRLAKFLWDRRPTWSNSCEKIIGEGLWWGPSMLKYHYSPQGEQLSEFTLNWLHGTGSPSAVTAQDTNLMAEMYRQAELEWDVDTPGDRYLTSVPFYFHGIFRVLGLNVLSGNHHAPMNMKRSANMKVYLDVNKTYAFEGDTITYTIDYRNYGAEEARGVQIVNRLHSDLVFASGTNSPLYNASANTVTWNIGSVPGFKTSTGINPTRGTVL

SEQ ID NO: 19881 - DNA, 750 bp, Unknown
  Obtained from environmental sample
  misc_feature (1)..(750): n is a, c, g, or t
gtggcgttaagcaaccgctatctcgtggcggcgtggacgggcaacgccgacaaccgctcaatgaagcgcgtgaccggctacgagggcgcggcgccgcttgtcaaaaaaattctgctgcacctccacccaaacgaacgcgacgggctctacgagggcggatttcccgttccggaagggtggagcccgttctctatctgccgcctgaccggaatgcttgccgacgagaatacgccatacgtaacgagcgactactttgcccccggcacggagcctaaggaggtgagcgccgtatcgcgcggaatgatggtagacaaacgcaacgggctgctagccaaccggaactgccccaagcagtataaagagtacaggcaattcttgtctctgtcgccggagtacgagccgtgggggcgcgcctacgggctgcccatcgccccgcgcctgcatagcccgttgtgtcccggcggcgcgagtttgccggtggactacgccctggagattacctggccgcgctccggcgcacgcttcttcgttgaccccgagtcgccgccggaccaagtgtttctgccggtcaactgcgttgttgagccggaggcgcggagccttttatggtttgtcaacggggaggagcactcggtgacaaatccgccgcacacgttgcggctgccgtttaagagcggtaagtacgcaattcaggcggaggtggcggggacgccggttcgcagcaaggttgttcggtttgaggtttattga

SEQ ID NO: 19882 - protein, 249 aa, Unknown
  Obtained from environmental sample
  misc_feature (1)..(249): Xaa is any amino acid
MALSNRYLVAAWTGNADNRSMKRVTGYEGAAPLVKKILLHLHPNERDGLYEGGFPVPEGWSPFSICRLTGMLADENTPYVTSDYFAPGTEPKEVSAVSRGMMVDKRNGLLANRNCPKQYKEYRQFLSLSPEYEPWGRAYGLPIAPRLHSPLCPGGASLPVDYALEITWPRSGARFFVDPESPPDQVFLPVNCVVEPEARSLLWFVNGEEHSVTNPPHTLRLPFKSGKYAIQAEVAGTPVRSKVVRFEVY

SEQ ID NO: 19883 - DNA, 765 bp, Unknown
  Obtained from environmental sample
  misc_feature (1)..(765): n is a, c, g, or t
atgactgtgggacaaatgctggagatcccctttaggggaaccggctgggtgtacctgggagaactgggaaaccgcagaggcttaagttacgattcaagaaggctggatacccagggcgggaatacccttggacagagttttattttccacgcagaaattgccggaacctacattctgaaattttacaggcaggattttattcaggattatattatcaatgattatgtccaggtaattgtgggcgaggccgacgattccggaaggggaaggcctttttcaaatattgaccgtggaagggtaattgccgaacccaggtggcctttcatcccggaagccgccgattcaacaagtgaagcagtttctccgataacaacgccggctcctgtggcggctgctccttcgcaagccgcctcttcgccttctaccgatctcacacttccgggaacttccgccggacgagcgggagtgagtgaaagtatatctccggatgaatacgttcgccaggcaaagcaggaatttgacgcgggccatgtggaacaggccctcgctgtcctggaccagatgaggcaacattacccttcaggaaccgacgaagcgtggtggcttttgggccagctttacgaagccaacagcccagtccgcgatataaagctgtctctggattgttaccgtacccttgtcagtgaattcccccagagcagccgtgttgacgaagcccgccgtcgtattgcgtatttggagaggtattatctaaatatccggtaa

SEQ ID NO: 19884 - protein, 254 aa, Unknown
  Obtained from environmental sample
  misc_feature (1)..(254): Xaa is any amino acid
MTVGQMLEIPFRGTGWVYLGELGNRRGLSYDSRRLDTQGGNTLGQSFIFHAEIAGTYILKFYRQDFIQDYIINDYVQVIVGEADDSGRGRPFSNIDRGRVIAEPRWPFIPEAADSTSEAVSPITTPAPVAAAPSQAASSPSTDLTLPGTSAGRAGVSESISPDEYVRQAKQEFDAGHVEQALAVLDQMRQHYPSGTDEAWWLLGQLYEANSPVRDIKLSLDCYRTLVSEFPQSSRVDEARRRIAYLERYYLNIR

SEQ ID NO: 19885 - DNA, 327 bp, Unknown
  Obtained from environmental sample
  misc_feature (1)..(327): n is a, c, g, or t
atgctgaccgggagatacacggcgttgtgcggccctgggcgaagaggacatccggcgcatcgtggccattcaggtcgggctcttggccgcccgcctggccgagcgcaagctcgggctcagccttacgcccgaggccgaggccttcctggcccgggccggttacgacccggtttacggggcccggcccttgaagcgggccctccagaccttcctcaaggaccccctggccctgggccttttgaacggcgaaatactggaagggcgggacctgttggtggaactgaacgcccggggggacggcctggccttccggccggcccgggatga

SEQ ID NO: 19886 - protein, 108 aa, Unknown
  Obtained from environmental sample
  misc_feature (1)..(108): Xaa is any amino acid
MLTGRYTALCGPGRRGHPAHRGHSGRALGRPPGRAQARAQPYARGRGLPGPGRLRPGLRGPALEAGPPDLPQGPPGPGPFERRNTGRAGPVGGTERPGGRPGLPAGPG

SEQ ID NO: 19887 - DNA, 342 bp, Unknown
  Obtained from environmental sample
  misc_feature (1)..(342): n is a, c, g, or t
gtggccattcaggtcgggctcttggccgcccgcctggccgagcgcaagctcgggctcagccttacgcccgaggccgaggccttcctggcccgggccggttacgacccggtttacggggcccggcccttgaagcgggccctccagaccttcctcaaggaccccctggccctgggccttttgaacggcgaaatactggaagggcgggacctgttggtggaactgaacgcccggggggacggcctggccttccggccggcccgggatgaaaggttagaggccgaacaggccggaagagccgcggccgaagaagacgaagattcaagcccccggctgctcaattaa

SEQ ID NO: 19888 - protein, 113 aa, Unknown
  Obtained from environmental sample
  misc_feature (1)..(113): Xaa is any amino acid
MAIQVGLLAARLAERKLGLSLTPEAEAFLARAGYDPVYGARPLKRALQTFLKDPLALGLLNGEILEGRDLLVELNARGDGLAFRPARDERLEAEQAGRAAAEEDEDSSPRLLN

SEQ ID NO: 19889 - DNA, 825 bp, Unknown
  Obtained from environmental sample
  misc_feature (1)..(825): n is a, c, g, or t
ttgaaaaacgctctatatgaacatgtttttaacgaaaaaaataacatcgtcagcaatacaaatcaaagacttgacatttttttccatgcggaaaaaaacggcgaattaaacaggttgacggttattgaacaaaacgtaaaagcgcgtataaagcacattaaagattttctggcgcaaaataataccggtataagggatgaatttgaatataaactggacgagttgtcggatttattggaccaaaaagtaaccgaagcgcgggaaaaagccgcgcagtcagaagctttttcggcggatgaacgggagcagcttaacgcccttaaagaagaagaagttaccgacgagcagatacgcgctgtctccaaaaagaacaaccttgaaagatttatcggtttgaatgtgctaaacgtaatcggaatattccttttatttgccggagccgtcgcggcgatgcgttatacatacttaaaattgtccgatttgtttaagggaatagcgatatttattctcggcggaataatgcttgtaacaggggagattttaaacaggaagaaaccgaacgttttttctttgggaatttccgccgggggcatcgcgatattgtacgccgcccttgcgattagttattttgtcctgcaaattttgggtatgtatccggccataataatttgcgtgctgttaactgtcggggcgtttgtgctttcaagccgctataattcgcagataatcgcggcctttgcccttatcggcggatatttgccgattattacgatagatgaaaatattaaatttgtatacggcgcgatggttttttcgcgattctaa

SEQ ID NO: 19890 - protein, 274 aa, Unknown
  Obtained from environmental sample
  misc_feature (1)..(274): Xaa is any amino acid
MKNALYEHVFNEKNNIVSNTNQRLDIFFHAEKNGELNRLTVIEQNVKARIKHIKDFLAQNNTGIRDEFEYKLDELSDLLDQKVTEAREKAAQSEAFSADEREQLNALKEEEVTDEQIRAVSKKNNLERFIGLNVLNVIGIFLLFAGAVAAMRYTYLKLSDLFKGIAIFILGGIMLVTGEILNRKKPNVFSLGISAGGIAILYAALAISYFVLQILGMYPAIIICVLLTVGAFVLSSRYNSQIIAAFALIGGYLPIITIDENIKFVYGAMVFSRF

SEQ ID NO: 19891 - DNA, 849 bp, Unknown
  Obtained from environmental sample
  misc_feature (1)..(849): n is a, c, g, or t
atggccgagacgccgggatcgctctatctcgcgggtctgcttgcggacgaacccctcatactttatgtccgactcgacacccaacgccaaatgcctgtctatccccgatacttccaccgtatcaataatcggctcttccaccgaatctgtatcaatccctatccccatatcgtccaacaagtccgccgtatcaataaccccccccgcgccgccgccctccccgccgcgaaaggcgagcatctccccaataaccccacactcccgcgccaacccctctatccccgcctccggacgcttcagcaaatcccgcgcgctcccgcccgccgcaaccctcacgccctcaagcgcggcggcggcctcgcgcttcctgtcccaaaaccgccgacgctcgtcgtaccgctccgccgaaaccgtccccaacctgtacgctgtcggcatcagacgctcgtcgcagttgtcctgacgcaatatcagacggtactccgcccgcgaggtgaacatcctgtacggctcctccgtgcccttggtcaccaagtcgtccgccaaaaccccgatataggccgcgtcgcgccccaaaaccagcggctcctccccgcgcaaccccaaaaccgcgtttatccccgccaaaaggccctgacccgccgcctcctcgtaacccgacgtcccgttcacctgccccgcgaagaacaagccgcccacgatcttagactccagcgtaggcctaagctgcaacggctggaagtaatcatactctatggcataccccggacgcattatccgcgccccgcgcaacccgtctatactcgccaccatccgctcctgcacgtcgtaggggagggaggtcgataa

SEQ ID NO: 19892 - protein, 282 aa, Unknown
  Obtained from environmental sample
  misc_feature (1)..(282): Xaa is any amino acid
MAETPGSLYLAGLLADEPLILYVRLDTQRQMPVYPRYFHRINNRLFHRICINPYPHIVQQVRRINNPPRAAALPAAKGEHLPNNPTLPRQPLYPRLRTLQQIPRAPARRNPHALKRGGGLALPVPKPPTLVVPLRRNRPQPVRCRHQTLVAVVLTQYQTVLRPRGEHPVRLLRALGHQVVRQNPDIGRVAPQNQRLLPAQPQNRVYPRQKALTRRLLVTRRPVHLPREEQAAHDLRLQRRPKLQRLEVIILYGIPRTHYPRPAQPVYTRHHPLLHVVGEGGR

SEQ ID NO: 19893 - DNA, 939 bp, Unknown
  Obtained from environmental sample
  misc_feature (1)..(939): n is a, c, g, or t
ttgatggccgagagggcgacgagcgcagcctactccggcaaatacgattacaggatgatacagatcaacggtccgaaagtcggcgccgtaactctcagcagcgtaggaaacgcaaggtcaatagatgccggcggaaccctcaagtggaacgccactgccgccggcaaatcccaaaatcagggcatagcattttcggtgggctcccgcagcgacgggaccgggccggtcgcggaaggaaccgccataaccgccgacgggaccctttcggtgtctgtcaacgagaccgcctcttccctctacgtcaaggcggtatctgtgtctgaccctacaaaaaccgacatcaaagaagtacagatcgcaactataaccagtgtaactgttattgccgcgggtgggaatgcaagggtaatgcggggaagcaccctccggttcaacgccgttgtcgccggtaataataaccccgacaacggggtaacctggaaagtcagctcaaccgccgacggcacaggggccgttaccccgggaaccgccataaccaccaatgggacgctctccgtggccgcgactgaggccgccgcgaccctctacgtcattgcggcttccaggataaacgccgaaaaatccggctctatcgtggtgacgcttcccaccgtgaccgaggtaaccattagccccgcaaacccgcaaataaggaggggcgaaggccagacctttacggccagggtacagggtaccggtgatccgggccaggaagtaacctggaaggttgacggtataggcggcgcagcggcaagtataataaccactaacggcatactcgcggtcagcacagcggagacgatgacacagcttcttgtcacggctacttcagtagaagatcccacgaaattcggcgctacagtggtgacaataccggcaagccccgcagcctcttcataa

SEQ ID NO: 19894 - protein, 312 aa, Unknown
  Obtained from environmental sample
  misc_feature (1)..(312): Xaa is any amino acid
MMAERATSAAYSGKYDYRMIQINGPKVGAVTLSSVGNARSIDAGGTLKWNATAAGKSQNQGIAFSVGSRSDGTGPVAEGTAITADGTLSVSVNETASSLYVKAVSVSDPTKTDIKEVQIATITSVTVIAAGGNARVMRGSTLRFNAVVAGNNNPDNGVTWKVSSTADGTGAVTPGTAITTNGTLSVAATEAAATLYVIAASRINAEKSGSIVVTLPTVTEVTISPANPQIRRGEGQTFTARVQGTGDPGQEVTWKVDGIGGAAASIITTNGILAVSTAETMTQLLVTATSVEDPTKFGATVVTIPASPAASS

SEQ ID NO: 19895 - DNA, 438 bp, Unknown
  Obtained from environmental sample
  misc_feature (1)..(438): n is a, c, g, or t
atggcggaacatgtgcatggaatgatgcaggatgatacgtggaggatcttcaggataatggcggagttcgtggagggttttgagaaactctccaaatgcggctcgtgcgtaacgattttcggcagcgcgcggacgccggaggggcatccccactacaagatgacagttgatgtggcgcgagcggttgcgcggagcggattcggagtgattacggggggcggcccgggcatcatggaggccgcgaaccgcggcgctcacgaggagggaggcgtctccatcgggctaaacatccaacttcccttcgaacaatcccccaacccctacataaaaacgatgctctccttcagacacttctttgtacgcaaggtaatgttccttaaatacacctcggcggttatcattatgccgggcggctacggcacttggacgaaatgttga

SEQ ID NO: 19896 - protein, 145 aa, Unknown
  Obtained from environmental sample
  DOMAIN (78)...(145): Possible lysine decarboxylase
  misc_feature (1)..(145): Xaa is any amino acid
MAEHVHGMMQDDTWRIFRIMAEFVEGFEKLSKCGSCVTIFGSARTPEGHPHYKMTVDVARAVARSGFGVITGGGPGIMEAANRGAHEEGGVSIGLNIQLPFEQSPNPYIKTMLSFRHFFVRKVMFLKYTSAVIIMPGGYGTWTKC

SEQ ID NO: 19897 - DNA, 831 bp, Unknown
  Obtained from environmental sample
  misc_feature (1)..(831): n is a, c, g, or t
ttgtacttgcttgacggggcgggaaggactattgattatttgcgtatctctgtcaccgaccgctgtaatctgcgctgtctttactgtatgccaggtgaaggggttggctggattccccatgaggacgtgctgcgttttgaagagattttgagaatttgccgcatacttgccggtatgggaattaagtcagtcagggtgacgggcggcgagcctttgcttcgccgggggcttgcggggttcatcagcggacttaaagccgttaatgggattaaccgggtaggcatgacgactaacggcgttctccttggagaacagcttgaagccctgacaagagcggggcttgacgcggtgaatatcagtattgacacaatggatagagagaaatattcatggctaaccagaatggagaatacggttaacgtgatttctgttattgatcgcgccctggaaatgggccttgaggtaaaggttaatactgtgatgattaaggacgtcaacgagaatgagataacggcgattgccggcctcgtgaaaaacaggaatatagcggcgcgttttattgaattgatgccgcttggcgaggctgcatcgttcaagcctttttacgcgcatgaggcggcggctttgatagaaggagcatacagttccctgctgcctgtggccgcaaaattggggaatgggccggccgagtattacgccatagccggatttgccggacatatcggctttatcagcccgatgagccgccgtttctgcgaaacctgcaacaaactgcggcttacagcgtcccggttttttgaagctctgtctctgcggcgatacaggcattga

SEQ ID NO: 19898 - protein, 276 aa, Unknown
  Obtained from environmental sample
  DOMAIN (182)...(276): Molybdenum Cofactor Synthesis C
  misc_feature (1)..(276): Xaa is any amino acid
MYLLDGAGRTIDYLRISVTDRCNLRCLYCMPGEGVGWIPHEDVLRFEEILRICRILAGMGIKSVRVTGGEPLLRRGLAGFISGLKAVNGINRVGMTTNGVLLGEQLEALTRAGLDAVNISIDTMDREKYSWLTRMENTVNVISVIDRALEMGLEVKVNTVMIKDVNENEITAIAGLVKNRNIAARFIELMPLGEAASFKPFYAHEAAALIEGAYSSLLPVAAKLGNGPAEYYAIAGFAGHIGFISPMSRRFCETCNKLRLTASRFFEALSLRRYRH

SEQ ID NO: 19899 - DNA, 609 bp, Unknown
  Obtained from environmental sample
  misc_feature (1)..(609): n is a, c, g, or t
gtggggcggacggcgggaacggctcttgaccctggcttccgcccccttaggcggccggctccaaaaggccctggcccccctggccgagcttctggccaagatcgccccggagggcctggacctggccatccagacccaggccgtggccgaattctacctgccccggctgcgcgacttgtaccccgacgactggccggaccggcagagcgacctgcgggaacttctgcgcatggccggggagcgggacgacttgcgcctctttctcgacgaactggccctggacccgcccaaccagaagcgggtggccccggaggaaaaaagggagaccctgaccctgtccaccatccactcggccaaggggctggaatggaaggcggtgttcctgctctcggccgtggaaggccgttttcccccggcctactccgcccgcaccgaggccgaactggaagaggaacgccgcctgatgtatgtggccgtgacccgggccgaagacctgttatacatcatgctgcccctgggcctcatcgaccgctggtccggcgccctggccgcccccagccgtttcctggccgacctcccgccgggaagcggcctggccggcctttctga

SEQ ID NO: 19900 - protein, 202 aa, Unknown
  Obtained from environmental sample
  misc_feature (1)..(202): Xaa is any amino acid
MGRTAGTALDPGFRPLRRPAPKGPGPPGRASGQDRPGGPGPGHPDPGRGRILPAPAARLVPRRLAGPAERPAGTSAHGRGAGRLAPLSRRTGPGPAQPEAGGPGGKKGDPDPVHHPLGQGAGMEGGVPALGRGRPFSPGLLRPHRGRTGRGTPPDVCGRDPGRRPVIHHAAPGPHRPLVRRPGRPQPFPGRPPAGKRPGRPF

SEQ ID NO: 19901 - DNA, 378 bp, Unknown
  Obtained from environmental sample
  misc_feature (1)..(378): n is a, c, g, or t
atgacactcacagcttactcaccagtgcaaaacctgaaccgcatttttgattctctgcttgactatgcaaatagcgacgagagagcaaagacggctgcccccaagagctatctttcggagaataatggaatttatactctggaagtagagcttccgggcgttaaaaaagaggatataagcgttaatattgaagccaatctcttgaaaatagccgcaattcgcaagcgcgcggaagaggagattaaatatgaacgcgaataccacctctccagcgaaatggactctgccaacataaaggcgagcaatgaaaacgggattttgactctcgtactcagccgcaagccagaagcccaaagcaagcagatttcaattcaataa

SEQ ID NO: 19902 - protein, 125 aa, Unknown
  Obtained from environmental sample
  DOMAIN (37)...(125): Hsp20/alpha crystallin family
  misc_feature (1)..(125): Xaa is any amino acid
MTLTAYSPVQNLNRIFDSLLDYANSDERAKTAAPKSYLSENNGIYTLEVELPGVKKEDISVNIEANLLKIAAIRKRAEEEIKYEREYHLSSEMDSANIKASNENGILTLVLSRKPEAQSKQISIQ

SEQ ID NO: 19903 - DNA, 831 bp, Unknown
  Obtained from environmental sample
  misc_feature (1)..(831): n is a, c, g, or t
ttggaacttcgcgacgttaccatagaagatgaaattcaaagtcttgataacatgacaatgaattttacagaccttgtaaatgaaattcactactcggcttacggcgctaacggcactacaggaaataatttcttttcagaatatccttttgtaacaaatgtaaacggaaattacgaccgatcgggagacggcgtttttgattcaagctacatttacagaataaacggccaaaacaagcttgaatcgcaggcccagcctggttttgagggcataattacgctttcaggcgcggacggagacataaacgtgccttattatcccaccgatacggttacggacataataacaagaattaacaattcaggcgcggaagttgtagcccgtcttaacagggaaggaaaactttcgttaaaagggactccggcggaaacaatagaaggcagaagagagaatcctgattttgttatacgccatgttgaagattcggggcatttccttgtcggatacgccggcgttctgcttgcttcgggtgcggaaggcgctttttcatgggacagggccgacgcggtagcaagccttcgaggaggagcggaagattacgctcttgcccccgtcgcgcatccttccggctggatagaggtaaatccggcgctgttaaaagaccagtcttcggtagcggccggctttggctacaacggaagggcggctaaccccggaaacggagacgccgcggaggaaattgcgttaatcagaaacagcccggtaatggtaggcaaacttgccacatttgacgattattttgcggattcagtcgcgcgtataggatattag

SEQ ID NO: 19904 - protein, 276 aa, Unknown
  Obtained from environmental sample
  DOMAIN (91)...(141): Flagellin hook IN motif
  misc_feature (1)..(276): Xaa is any amino acid
MELRDVTIEDEIQSLDNMTMNFTDLVNEIHYSAYGANGTTGNNFFSEYPFVTNVNGNYDRSGDGVFDSSYIYRINGQNKLESQAQPGFEGIITLSGADGDINVPYYPTDTVTDIITRINNSGAEVVARLNREGKLSLKGTPAETIEGRRENPDFVIRHVEDSGHFLVGYAGVLLASGAEGAFSWDRADAVASLRGGAEDYALAPVAHPSGWIEVNPALLKDQSSVAAGFGYNGRAANPGNGDAAEEIALIRNSPVMVGKLATFDDYFADSVARIGY

SEQ ID NO: 19905 - DNA, 606 bp, Unknown
  Obtained from environmental sample
  misc_feature (1)..(606): n is a, c, g, or t
atgtataaacaaatcgaaggcggcgcaaaacgctcttatgcagtcgtcaggaggaatagactgatgattctattaattgataattacgatagtttttcctataacctgtatcagtgcattggttcgattgatcccgacattaaagttgtgcgtaacgatgaaatcaccgtggacgatataaaaaaactatctccttcccgcattgtgatctctcccggtcccggtaaaccgtccgatgccggcatttgtatcgaagttataagaaatctttgctctacagcgccgattattggcatctgccttggccatcaggcgattttcgaagcttttggcgggactgtgtcctacgcaagccgtcttatgcacggaaagtcatctgaagtaacgcttgacacaagcaatcctctgttcaaaggtcttccgaagaaaatacaggcggcaaggtatcattctcttgcgggcattaaatcgacattgccggatgtcctgcgcgttatcgccgaaaccgccgacggcgaaattatgggagtatgccacanagactaccccgtctacggtgtacagtttcatcccgaatcaatcctacaccggaagggaagacgataa

SEQ ID NO: 19906 - protein, 201 aa, Unknown
  Obtained from environmental sample
  DOMAIN (22)...(192): Peptidase C26
  misc_feature (1)..(201): Xaa is any amino acid
MYKQIEGGAKRSYAVVRRNRLMILLIDNYDSFSYNLYQCIGSIDPDIKVVRNDEITVDDIKKLSPSRIVISPGPGKPSDAGICIEVIRNLCSTAPIIGICLGHQAIFEAFGGTVSYASRLMHGKSSEVTLDTSNPLFKGLPKKIQAARYHSLAGIKSTLPDVLRVIAETADGEIMGVCHXDYPVYGVQFHPESILHRKGRR

SEQ ID NO: 19907 - DNA, 456 bp, Unknown
  Obtained from environmental sample
  misc_feature (1)..(456): n is a, c, g, or t
atgaagcttatagaacttacaaaaaactgtttttttctcgcttttttaacccttctcctctccataggaactttttacacattcaaggcattgttgccggagaagatttttgctcaagcggtatatgacaacaatatagttgtagatagcctgatgcttcttgctatggctaattcgtcaaatgctgaaaatgacaataccgctgttgagaatatcaattttgacgggttgctacatttttttcaaaaacttttcacgctagaaaaaacaaaaaaaggttctgtgcgaatagcgtatttcggggactcgatgatagaaagcgacttgatagtccagagagttcgcaaaaactaccaaaagaaattcggcgggcagggaatagggtttgtaccgctcagcaaccttacacattatctcagcggatccatacaatatgaatattctcggccgatctga

SEQ ID NO: 19908 - protein, 151 aa, Unknown
  Obtained from environmental sample
  SIGNAL (1)...(29)
  misc_feature (1)..(151): Xaa is any amino acid
MKLIELTKNCFFLAFLTLLLSIGTFYTFKALLPEKIFAQAVYDNNIVVDSLMLLAMANSSNAENDNTAVENINFDGLLHFFQKLFTLEKTKKGSVRIAYFGDSMIESDLIVQRVRKNYQKKFGGQGIGFVPLSNLTHYLSGSIQYEYSRPI

SEQ ID NO: 19909 - DNA, 390 bp, Unknown
  Obtained from environmental sample
  misc_feature (1)..(390): n is a, c, g, or t
gtgtggggcaagggcagcaaagagcgaattgtgccgttgaccaaggaagctatacggtggcttcgcaagtacagggattttcagagcagaaacgccgttccgtgttctcctaaaaactttgtattctcaaaaaacagtgaaaaaccctacaatgtccgcaaactttacagcgatattcacaacttgctccgttcagttggctgggaaggcaaggcaagcccccacgttctaaggcacactttcgcaacccacctgctagaaaacggcgcaaacatagtgaccgtccaaaagcttttagggcatagcaaccccaataccacgcagatttacacgcacgtcagtgccgaaaaattaaaggagagcttgaaacaagcacacccaaggggatag

SEQ ID NO: 19910 - protein, 129 aa, Unknown
  Obtained from environmental sample
  DOMAIN (1)...(120): Phage integrase family
  misc_feature (1)..(129): Xaa is any amino acid
MWGKGSKERIVPLTKEAIRWLRKYRDFQSRNAVPCSPKNFVFSKNSEKPYNVRKLYSDIHNLLRSVGWEGKASPHVLRHTFATHLLENGANIVTVQKLLGHSNPNTTQIYTHVSAEKLKESLKQAHPRG

SEQ ID NO: 19911 - DNA, 807 bp, Unknown
  Obtained from environmental sample
  misc_feature (1)..(807): n is a, c, g, or t
atgtacgatcatgtgttcgaacttttgctcaggttaaaaggcaattacctgtggccggcgatgtggacttcttctttcgcgctggacgggccgggtaacctgaacgaggaattggccgacatatacggcgtattcatcggcaattcgcatcacgagccctgcctgcgggccggcgcggaatgggacaaagtcagggggccggattcaatttacggtaacgactgggattattacataaataaaaacgggcttttaaaatattgggaagacgcccttaaaagaagcggcaaatacgagaagatcattacgatagggatgcgaggggaaaacgacagcgccatacttgataatgacgcgtccgtaaatgaaaatatttctttgctcaaggacataataaagaaccagcgcaaattaataaaaaaacacgttaatcccaagcttgataaagttccgcagcttttggccctttacaaagaagttgaggaatttttctacggcgacgggcgagttgaggggcttaaggactgggacgagcttgacaatgttatctgcatgttctgcgaggacaattacggctttatgcgaaccctgccctggaaagagatacgggggagaaagggcggtttcggaatgtattaccatttcgattaccacggggctccggtttcctacgaatggatgccctccacgtcttttgagagaacatgggaacagatgtgcatggcctacgattacggcattaaagatgtctggattgtaaatgtgggcgatctgaaattcaacgaagtccccctcgcctatttatga

SEQ ID NO: 19912 - protein, 268 aa, Unknown
  Obtained from environmental sample
  misc_feature (1)..(268): Xaa is any amino acid
MYDHVFELLLRLKGNYLWPAMWTSSFALDGPGNLNEELADIYGVFIGNSHHEPCLRAGAEWDKVRGPDSIYGNDWDYYINKNGLLKYWEDALKRSGKYEKIITIGMRGENDSAILDNDASVNENISLLKDIIKNQRKLIKKHVNPKLDKVPQLLALYKEVEEFFYGDGRVEGLKDWDELDNVICMFCEDNYGFMRTLPWKEIRGRKGGFGMYYHFDYHGAPVSYEWMPSTSFERTWEQMCMAYDYGIKDVWIVNVGDLKFNEVPLAYL

SEQ ID NO: 19913 - DNA, 876 bp, Unknown
  Obtained from environmental sample
  misc_feature (1)..(876): n is a, c, g, or t
atgatggagangcggcactcgcgacacggccacagcgtcggctacatgggcgacggcatcaatgacgcagccgccatcaaagcctccgacgtgggcatctccgttgacaacgccgttgacatagccaaagaatccgcagatgtcatccttttggaaaaagacttgatggtgcttgaaagggggataatagaaggccgcaagacatacgccaacatgatcaagtacataaaaatgacggcaagctccaactttggcaacatgctatccgtgcttgccgcaagcgcatttttgccatttttgcccatgaggcccatccacctgatcttgctcaacttgatctacgacctctcctgcacggccatcccttgggacaacgtggacaaagaatatctggctgttccgcgcaagtgggacgctgcatccatcggcaaatttatgatttggatagggcccaccagctcggtctttgacataacgacgtaccttttgatgttctttgtcatctgcccagccgtctgcggcggcatgtaccaccaaatagaagctgacgctgcaacgcgggtgttgttcgttgcggttttccaagcgggctggttcatcgagtcaatgtggagccaaaccttggtcatccacatgatacgcacccccaagatacccttcatccaaagccatgcctccgctgccgttacattcatctcgttcactggcatagccgttttgaccacaatacccttcacacgtttcggcaaatccatagggcttgctgaattgccaacagagtttttcgcctacctggccgcaacggtatttctgtacatggtgttagtgactttcttcaagaggatattcatccccaggtatggggagctgctgtga

SEQ ID NO: 19914 - protein, 291 aa, Unknown
  Obtained from environmental sample
  misc_feature (1)..(291): Xaa is any amino acid
MMEXRHSRHGHSVGYMGDGINDAAAIKASDVGISVDNAVDIAKESADVILLEKDLMVLERGIIEGRKTYANMIKYIKMTASSNFGNMLSVLAASAFLPFLPMRPIHLILLNLIYDLSCTAIPWDNVDKEYLAVPRKWDAASIGKFMIWIGPTSSVFDITTYLLMFFVICPAVCGGMYHQIEADAATRVLFVAVFQAGWFIESMWSQTLVIHMIRTPKIPFIQSHASAAVTFISFTGIAVLTTIPFTRFGKSIGLAELPTEFFAYLAATVFLYMVLVTFFKRIFIPRYGELL

SEQ ID NO: 19915 - DNA, 924 bp, Unknown
  Obtained from environmental sample
  misc_feature (1)..(924): n is a, c, g, or t
ttgggagaatatccgaaaaagaacttggcgttcagaaaaagaaatattgatcaaacaggcgttcttaaaaaaagaccttggaaaagagtatggaagaaaatcaacgacgactttaacaagcttgaacagcgcaaaactgaaattacgcagcttgaagccaagttgacaagcgtcaggcggcttgaagatgaaatcaacancagnatgacaaggttccttaacgaacaacggcgcatagaacaaatggaagaaaaattcaacaacgtcataaaaacttcccagtcattgaaagataaaattgagcaggtttcgtcctccgacgatattatcaccggtttgcaggttcagatacgcaatttggaagattcaatcaaggaagcaaatgaaaaataccagcgtatcgagaaaaagaatgaagtgcttgaacagactaacgaaggcatcgaccgcaactttaagtcactgcaaaaaacagaaaccgcgattaagaacgccgaaaaaattatttcctctcttaccggtcaatttgacaatctacggacatcaatagagcttcttgcgtcgcaaaatgaaaaagcaaacgatgccgttgataaaatagcctctcttgacaactctcttacggaaattgaaaaacgcattgaagtcatgaatggcgcgcgtgaatggcttgcgcgcacagaaactgaacttaaagcgctggataatgacgcaagatctctccttaaattaaccaaaggaataatagacgagaaaaaaagcaaaacgccgtcaaagagtgaaggttcaattactccgcaggagcgcgaagacatactaaaattaaaaagtcaaggctggacgacagaagaaattgcgcaaagcgtcaagcgttccaggggcgaaattgaattactgctggaacttgcttccagaggcgcataa

SEQ ID NO: 19916 - protein, 307 aa, Unknown
  Obtained from environmental sample
  misc_feature (1)..(307): Xaa is any amino acid
MGEYPKKNLAFRKRNIDQTGVLKKRPWKRVWKKINDDFNKLEQRKTEITQLEAKLTSVRRLEDEINXXMTRFLNEQRRIEQMEEKFNNVIKTSQSLKDKIEQVSSSDDIITGLQVQIRNLEDSIKEANEKYQRIEKKNEVLEQTNEGIDRNFKSLQKTETAIKNAEKIISSLTGQFDNLRTSIELLASQNEKANDAVDKIASLDNSLTEIEKRIEVMNGAREWLARTETELKALDNDARSLLKLTKGIIDEKKSKTPSKSEGSITPQEREDILKLKSQGWTTEEIAQSVKRSRGEIELLLELASRGA

SEQ ID NO: 19917 - DNA, 969 bp, Unknown
  Obtained from environmental sample
  misc_feature (1)..(969): n is a, c, g, or t
ttgacaaccgccattaaaaactttaaagatacttcaaacgccgcgattgtacagcagcaaaatgattttacagaaaaacaaagtgaattaacaaccgctattaatgatctgaaagaaacctcaagcgccgcgatcctgcagcagcatgatgaattatcagcttctattaaaggacttaaagaaacttcagattctgcaatcaagcagcagcaaaatgaattaacagcatctcttaaagaattcaaagaaacttcagattcagtcatcaggcagcagcaaaatgaattagcaacatctcttaaaaacattaaagatacatcaaatgcggcagtccggcagcagcatgatgaattatcagccgccattaaagacattaaagacacttcagattctgccattaaactgcagcaaaacgaattagcaacatcactaaagaacatcaaagaaacttcaaacgcggcggtaaggcagcagcaggatgaattaacgtctgcctttaaggaatttaaagaaaaaacaaattccgcaatccgtcttaatcagagcgaacaggaggcggctatcagggaatacaaggaaaaatccgacgccgcgattacaagccagaaagacgaacttaactccgcgttaaacaaacagctggaaacatggaaacagctttgctcggatacggaacataaaattgttgcagctaacgaanaacgtctggatgaatacagcaagagccatgccgaagcgtttaaacagcttacaaatcttgcggatgacgcgncaaaacttgaaaacgaactgcgccctgtcatgcangaaaagcatatcagagtnaaaagtgattttgccgctnttgaaaagaatccgcccgcagcagggacgccgaggctgcngcgttnaacgctcaaactcaatctctgcgcagggaaattgaagaaaacaaacaagaacttgagggttnagaaaacaggctcatga

SEQ ID NO: 19918 - protein, 322 aa, Unknown
  Obtained from environmental sample
  misc_feature (1)..(322): Xaa is any amino acid
MTTAIKNFKDTSNAAIVQQQNDFTEKQSELTTAINDLKETSSAAILQQHDELSASIKGLKETSDSAIKQQQNELTASLKEFKETSDSVIRQQQNELATSLKNIKDTSNAAVRQQHDELSAAIKDIKDTSDSAIKLQQNELATSLKNIKETSNAAVRQQQDELTSAFKEFKEKTNSAIRLNQSEQEAAIREYKEKSDAAITSQKDELNSALNKQLETWKQLCSDTEHKIVAANEXRLDEYSKSHAEAFKQLTNLADDAXKLENELRPVMXEKHIRVKSDFAAXEKNPPAAGTPRLXRXTLKLNLCAGKLKKTNKNLRVXKTGS

SEQ ID NO: 19919 - DNA, 579 bp, Unknown
  Obtained from environmental sample
  misc_feature (1)..(579): n is a, c, g, or t
atgcattcatccaggttccttaccgcagtccttttattttttttatgcttttcatgtacaaaattcaagcctatacaagctttagaaactactgaaacaatcaactcaggtgatgatgagatgaattttaataatcagttggcttcagctctttatgcggcacagttacctgaaagcttatccgcagaaataaaaggaattattggagggaatccctctttcatccttgatctttttgaaattttacaaatagatccttatttatatgttcttgttgacaaggaacatcctttggcggagaattatgagccagaagaccttatagaactgaaaaacggttcctacagggttaacagaacaggattatttctgcgaaaagccgcggcttcatcacttgaagaaatggctgccgccgcaaaaagcgaaggatttacacttaccgcttcttccgcctaccgttcatataattaccaggtgcaagtgtatgagcgcaatgtaaaagaaatggggcagcaggctgccgacagagaatcagcccgtctcgggcacagccagcatcagttggggcctcgtaattga

SEQ ID NO: 19920 - protein, 192 aa, Unknown
  Obtained from environmental sample
  SIGNAL (1)...(27)
  DOMAIN (121)...(191): D-alanyl-D-alanine carboxypeptidase
  misc_feature (1)..(192): Xaa is any amino acid
MHSSRFLTAVLLFFLCFSCTKFKPIQALETTETINSGDDEMNFNNQLASALYAAQLPESLSAEIKGIIGGNPSFILDLFEILQIDPYLYVLVDKEHPLAENYEPEDLIELKNGSYRVNRTGLFLRKAAASSLEEMAAAAKSEGFTLTASSAYRSYNYQVQVYERNVKEMGQQAADRESARLGHSQHQLGPRN

SEQ ID NO: 19921 - DNA, 351 bp, Unknown
  Obtained from environmental sample
  misc_feature (1)..(351): n is a, c, g, or t
atgaatttccctaactggaaacagggagctgtctgcgcccctgtcgccgtcgccgagggctaccccggtccctatcttaaaggcgacgctatctccatagatgtaacagtcctggaaaaaaccggggcaaaagtgtttattagcggggcttttatgggccacgccgttgccgatggcatggaggcaaattcacccgccctatccctgcttacatccggcggcagagtgctgaccgtttccgctttcgggcaaaacgccgacgacgcctatgaccgcgcctacaaaggccttgaggcgatcagctttgacggcatgggcttccgccgggacataggcagagaacaggtataa

SEQ ID NO: 19922 - protein, 116 aa, Unknown
  Obtained from environmental sample
  DOMAIN (10)...(116): Phosphoribosylglycinamide synthetase, C domain
  misc_feature (1)..(116): Xaa is any amino acid
MNFPNWKQGAVCAPVAVAEGYPGPYLKGDAISIDVTVLEKTGAKVFISGAFMGHAVADGMEANSPALSLLTSGGRVLTVSAFGQNADDAYDRAYKGLEAISFDGMGFRRDIGREQV

SEQ ID NO: 19923 - DNA, 342 bp, Unknown
  Obtained from environmental sample
  misc_feature (1)..(342): n is a, c, g, or t
atgnctctggaagcccatctgncagcggaagccaaagcccggcccgaaaacctgcttgaagatgtagacattgccgcccgccagattatcacaaagtacggctacggtgaatactttacacaccgtaccgggcacggtctgggcatcgacgttcacgagggcgattctgccaataccggggtcaaggtccccataaaacctggcatggtgttttccattgagccgggcatttaccttcccggccggttcggcgtgcggatcgaaaacctggtagcaatcggtgaaaacggccccgaagtcctgcacagctatccccgcgagctaaaagttattgagccataa

SEQ ID NO: 19924 - protein, 113 aa, Unknown
  Obtained from environmental sample
  DOMAIN (1)...(103): metallopeptidase family M24
  misc_feature (1)..(113): Xaa is any amino acid
MXLEAHLXAEAKARPENLLEDVDIAARQIITKYGYGEYFTHRTGHGLGIDVHEGDSANTGVKVPIKPGMVFSIEPGIYLPGRFGVRIENLVAIGENGPEVLHSYPRELKVIEP

SEQ ID NO: 19925 - DNA, 927 bp, Unknown
  Obtained from environmental sample
  misc_feature (1)..(927): n is a, c, g, or t
ttggacagattggccgagatagcctacgatgtagtgaacgaagccgcaagcgacggcggcaacggcggccctagaacggcaggcaacggcgacggtaaatccatgtgggttcaggtatatggtgataattcttttatagagaaagcctttacgtatgcccgcaaatacgctccggcgaccaccaaattgttctataacgattacaacgaatacatccaggggaaaagagattatatagccaattctataataaaaccgctcaaacaaaagggccttcttgacggaatgggaatgcagtctcacctcgacgtgaggacgggaaacgacgcctatcctacggcctcttcttacggacaagccataacaatctttaagaatttaggcgttgaaatacacgtgtcggaattggacgcgaccgttaacgacggcaacgacagctacttaccggcgcaagcgacatactataagaatataatgaacgaaattctcaccaaaggcggcagcgccgttacggccgtcgtcgtgtggggcatacaagacgatcaatcttggcgcaaacccaaaaaaccgttgctctttgacgcctccgccggcaaaaaggccgcgtacaccgaacttgtcaaactcattccacaatcggattggggcgacgggaacaatccggtcggcggcggtacaatcgagcctccccctccccctccgcctgtcaaccccgacacaaacgggtttttcttctaccacccgtttgaaacgagcacgcacgattgggccggcagaggcgcggcaactgtcgcccgcagcaccgcgcagaaagccaacggttcaagctcgctatccgtaagcggacgcaccgccgagtggaacgggggctcttattacctaaacacaagcgccttcgccccggataaaactacagtttcagcgtga

SEQ ID NO: 19926 - protein, 308 aa, Unknown
  Obtained from environmental sample
  DOMAIN (1)...(210): Glycosyl hydrolase family 10
  misc_feature (1)..(308): Xaa is any amino acid
MDRLAEIAYDVVNEAASDGGNGGPRTAGNGDGKSMWVQVYGDNSFIEKAFTYARKYAPATTKLFYNDYNEYIQGKRDYIANSIIKPLKQKGLLDGMGMQSHLDVRTGNDAYPTASSYGQAITIFKNLGVEIHVSELDATVNDGNDSYLPAQATYYKNIMNEILTKGGSAVTAVVVWGIQDDQSWRKPKKPLLFDASAGKKAAYTELVKLIPQSDWGDGNNPVGGGTIEPPPPPPPVNPDTNGFFFYHPFETSTHDWAGRGAATVARSTAQKANGSSSLSVSGRTAEWNGGSYYLNTSAFAPDKTTVSA

SEQ ID NO: 19927 - DNA, 741 bp, Unknown
  Obtained from environmental sample
  misc_feature (1)..(741): n is a, c, g, or t
atgcggacaataaaattaataatagcctatgacggaacggattttctcggctggcagaggcaagcggggcaggctcgcacggtacaggccgtcattgaggcggcgctggaaaagatgcacggtcatcctgtagcgctggccggggcgggccgcactgattcgggcgtccacgccagggcgcaggccgcaagtttccaaaccgacattgaaagcatcaatccatgcaaatttgttccggccctgaacagccttttgcccgccgatataagaattacggactcaagtgaagccgcggcggatttccacgcccgttttgacgcgcgcatgagactctaccggtattttttcatagccggccgccaggccctgccccatgaaagccgttataatctgcaactctggcgccgtcctgacattaatgtacttaactcctattgccgccttttgcccggcgagcgtgactgcgcgatcttcgccggctcgggcgatacaagcaaatccacctggaggaacatcacccatgccgcttttttggcggaaggcgatcgtttaatctttgagatcagcgcgaacgccttcctgttgaaaatggtgcgctccgtcgccggcaccttcctccattacgaggaacgcgccgccgcacccgcccggcttggtgacattatcgcctcccgcgaccgaagcctcgccggccccacattacccccacagggtttgtttttgtggaaggtagagtactag

SEQ ID NO: 19928 - protein, 246 aa, Unknown
  Obtained from environmental sample
  DOMAIN (145)...(246): tRNA pseudouridine synthase
  misc_feature (1)..(246): Xaa is any amino acid
MRTIKLIIAYDGTDFLGWQRQAGQARTVQAVIEAALEKMHGHPVALAGAGRTDSGVHARAQAASFQTDIESINPCKFVPALNSLLPADIRITDSSEAAADFHARFDARMRLYRYFFIAGRQALPHESRYNLQLWRRPDINVLNSYCRLLPGERDCAIFAGSGDTSKSTWRNITHAAFLAEGDRLIFEISANAFLLKMVRSVAGTFLHYEERAAAPARLGDIIASRDRSLAGPTLPPQGLFLWKVEY

SEQ ID NO: 19929 - DNA, 531 bp, Unknown
  Obtained from environmental sample
  misc_feature (1)..(531): n is a, c, g, or t
atgactgaagctattgagttaattaataagctaacagaaaaattaattcttaatgattgcaaaattgtatctggctttggattgggaataggttcttttgtaattaatagcgctatacaaacaataaataaatctaaatatagacactatgatgagtatttagaaataaatccatttccattccaattatctgacgatgatagattagaattcaataaaaattatcgaaatcaaatattacgccattgtggtatagccatatttatatttggaaataaaaaaaagaataatgacatcattattgcggatggtgttttagaagaatttaaaatttcaaaagaaaatggattatttgtaataccaattggttcgactggatttgcatcttctcaattatctaatgaaataaaaaataatcttgatgattataagtatttacaaacagaaattaatacacttgattcatctaaaaatattgatgatatagtagattctgtattatcaataatcaaaggaataataagaagataa

SEQ ID NO: 19930 - protein, 176 aa, Unknown
  Obtained from environmental sample
  misc_feature (1)..(176): Xaa is any amino acid
MTEAIELINKLTEKLILNDCKIVSGFGLGIGSFVINSAIQTINKSKYRHYDEYLEINPFPFQLSDDDRLEFNKNYRNQILRHCGIAIFIFGNKKKNNDIIIADGVLEEFKISKENGLFVIPIGSTGFASSQLSNEIKNNLDDYKYLQTEINTLDSSKNIDDIVDSVLSIIKGIIRR

SEQ ID NO: 19931 - DNA, 375 bp, Unknown
  Obtained from environmental sample
  misc_feature (1)..(375): n is a, c, g, or t
gtgaggtcgcagacgcttaccataaagcagcgcaattacgttgaacgcgcccgctcgcttggggcgtcaagcgcgtacataatgttcaggcacatactgccaaacattttcccgctgatattttccgaaatcattttgctcgttcaaaacgccataatcgcggagtcgacgctcgcgttcctgggaataggcgatccgtccatccccacctggggtcagcttctccgcagcgcacgtgaacagggttccattttggtcggttcctggtggctctttgttccggcgggtatctgtatattccttttggcttcatcatttgtttttatcagctacgggtttgatgaaatcctcaacccaaaattaaggaagaggtga

SEQ ID NO: 19932 - protein, 124 aa, Unknown
  Obtained from environmental sample
  misc_feature (1)..(124): Xaa is any amino acid
MRSQTLTIKQRNYVERARSLGASSAYIMFRHILPNIFPLIFSEIILLVQNAIIAESTLAFLGIGDPSIPTWGQLLRSAREQGSILVGSWWLFVPAGICIFLLASSFVFISYGFDEILNPKLRKR

SEQ ID NO: 19933 - DNA, 426 bp, Unknown
  Obtained from environmental sample
  misc_feature (1)..(426): n is a, c, g, or t
gtgataacgatgcccgacaaattgcttgaagtcagcgatctgaaaacctattttaaaattcagcagggcgaagtcaaggctgtggacggcgtaagttttacgctttacaaaggcgaatcactcggacttgtcggcgaatcgggctgcggtaaaacaactaccgcgctgtcggtcatcaaattgctgcctgataacggatatattgccgacggcaaagtcgttttcctcgggcgggatataacgaacctggatgacgagcatctttaccagttccgctggaaagaagcctcaatgatcttccagggcgcgatgaacgccttgaacccggtcaagaggatttctgatcagataacggaagccatttttctgcacgagaaaaaaaacacaaagagccaggcgcttgaccgcgtaaaggaagtgttttga

SEQ ID NO: 19934 - protein, 141 aa, Unknown
  Obtained from environmental sample
  misc_feature (1)..(141): Xaa is any amino acid
MITMPDKLLEVSDLKTYFKIQQGEVKAVDGVSFTLYKGESLGLVGESGCGKTTTALSVIKLLPDNGYIADGKVVFLGRDITNLDDEHLYQFRWKEASMIFQGAMNALNPVKRISDQITEAIFLHEKKNTKSQALDRVKEVF

SEQ ID NO: 19935 - DNA, 582 bp, Unknown
  Obtained from environmental sample
  misc_feature (1)..(582): n is a, c, g, or t
atgttcgacactcactgccacctacaggatgaaaggatctcagcccgtaccggcgaaatcgtcgccgccgccaaccgcgccggcgttgccggcatgctctgctgcggcagcgacgtagcggactgggacgatgtcgcgcgcatcggagcggcatacgcggacagcggcgtggtctgcgcgtacggagtacaccccttttacgtcgaaagcatcgatcccggcggcaatgattggactgacgagctttcaagacgccttgccgacgacccgtctgcggccgtcggcgaaatcggccttgaccgcgccgtaacaccacgcgacgacaagagacaagcggaggtcttcgtccgccaactacagatcgcggagcggtacgaacgcccggtatcgatacactgccgcaaagcattcgggacaatgctgccgatattacgcgacaaccacggcctgaaattcggcggcgcaatccactcctacagcggcccgcccgaacttattgacgaacttgtggaattaggatgctacatatccttctccggatcgatactaataccaaactgcaaacgggcgatagcatcgtga

SEQ ID NO: 19936 - protein, 193 aa, Unknown
  Obtained from environmental sample
  DOMAIN (1)...(193): TatD related DNase
  misc_feature (1)..(193): Xaa is any amino acid
MFDTHCHLQDERISARTGEIVAAANRAGVAGMLCCGSDVADWDDVARIGAAYADSGVVCAYGVHPFYVESIDPGGNDWTDELSRRLADDPSAAVGEIGLDRAVTPRDDKRQAEVFVRQLQIAERYERPVSIHCRKAFGTMLPILRDNHGLKFGGAIHSYSGPPELIDELVELGCYISFSGSILIPNCKRAIAS

SEQ ID NO: 19937 - DNA, 690 bp, Unknown
  Obtained from environmental sample
  misc_feature (1)..(690): n is a, c, g, or t
ttgagggatcgcgcctcagaggaatgcgccgccgcggacaatgccatgcgccttacccttgtcaaacctctgccgggcaggcaggctcaaattgaaatggccccggcctatcgcgccggcagtctgctggaagagccgtccgcgccgcccggcgccgtggatgcggctgtgcttgtgctgctcacgccaaccaatacgggtctgcgcccgcaagacctgttggagtggaaaacgctgctcattcgccgcaacacctatgtgggcgcgcattcggggcagatagcctttcccggcggcaggcgtgaagccgcagacagcgatctgtgggctgccgcctgccgcgaagcccatgaagaagccggcgtcgatcgggagcaactggcaatggcaggcgcgcttaccagcctctatgtgccgcccagcaattttatcatccatccctttctcgcggtcaataaggaggtccgccccgtgcgtctggattccagggaagccgtgagctacagaaacattcccgcgcgcgcgtttgaccccggccgcgccgcgtggctggaattcgagtatccggacgggaggcggcgcctcgccccggcctggcggcgcgcgggctttaccatttggggggccacggccatgattctggccgaattgtaccgtctgatcgagaatgaggccctcgtgtggaaatag

SEQ ID NO: 19938 - protein, 229 aa, Unknown
  Obtained from environmental sample
  DOMAIN (52)...(194): NUDIX domain
  misc_feature (1)..(229): Xaa is any amino acid
MRDRASEECAAADNAMRLTLVKPLPGRQAQIEMAPAYRAGSLLEEPSAPPGAVDAAVLVLLTPTNTGLRPQDLLEWKTLLIRRNTYVGAHSGQIAFPGGRREAADSDLWAAACREAHEEAGVDREQLAMAGALTSLYVPPSNFIIHPFLAVNKEVRPVRLDSREAVSYRNIPARAFDPGRAAWLEFEYPDGRRRLAPAWRRAGFTIWGATAMILAELYRLIENEALVWK

SEQ ID NO: 19939 - DNA, 624 bp, Unknown
  Obtained from environmental sample
  misc_feature (1)..(624): n is a, c, g, or t
atgatagtccacgttccggtgctgttggaacaggttctgcactacctggcgccgaggggcgggaatgagctgttaatagacgcgaccctgggagagggcggtcacagctatgagtttttgtcccgtttcagggacctttacgcggtcggcgttgacgccgaccctgatattcaggcggtcgcaagggaacggctggccggatttggggaacggatgcggttttataccggctggtcccaggatttttttgcggattacccttccgatcttgagcgccccgacacggtgctcatggatttaggcgtaagcgtgtaccactacgaaaaaagcgggagggggtttagtttctcaggagtggagaaacttgacatgaggctggatacctcgcaaggattttcggcagcgcagatattggcgcaaagacctgagaaggaaattgccgatattctatataacaactcaggtgagcgttactcgcggcgtatagcgagggcgattgcgctggagcggtcaaggggggcaatttccaccgccgaggctctttcggaactggtaaacgggcggtaccggccctctacaggcacggaccggtacacccggcaaccagggtattcatggcgctga

SEQ ID NO: 19940 - protein, 207 aa, Unknown
  Obtained from environmental sample
  DOMAIN (1)...(203): MraW methylase family
  misc_feature (1)..(207): Xaa is any amino acid
MIVHVPVLLEQVLHYLAPRGGNELLIDATLGEGGHSYEFLSRFRDLYAVGVDADPDIQAVARERLAGFGERMRFYTGWSQDFFADYPSDLERPDTVLMDLGVSVYHYEKSGRGFSFSGVEKLDMRLDTSQGFSAAQILAQRPEKEIADILYNNSGERYSRRIARAIALERSRGAISTAEALSELVNGRYRPSTGTDRYTRQPGYSWR

SEQ ID NO: 19941 - DNA, 900 bp, Unknown
  Obtained from environmental sample
  misc_feature (1)..(900): n is a, c, g, or t
atggtcagattggccgagatgtcgctttaccgttccataaaattaagggagcagccagtacctgtggaacagttgcttcgtaattcttcttcgctcccaaaaattctcaaggggtttgcgatatgccttgttgttctggcccttgttggcggcgcaggttactatatttaccgtttgccaaaaaaacccaacgtcccccaacagacggtaaggacagccgctgagtatgtgctgaacaacgatttttttgagcgcaggctgtatccgggggactctattctggttgttgaaggatctgactcttataagctggtattctcaagtttaagtgacgcgattacaattaccacccccagagggcctgttatgttggatctgggccaggaagtaaccgtcgatttaaacagcgacgggtttggagaactgcggattttagcggcggactttgtcaaaaacgataatctggccggagctctgcttcgttttgaacaggaggttccgccgcagatggcggctgcgtcccctgaattccccatagaaacccttagctccggcagtgaagcgcccttggttctacttaacacaccaaatgcctttccctttacccttcaggccgtattccagggctattgcctgttccgccacgagatcctttttgagcgtgacaagccgggtcgtaacgagcagttctatcagcgatcggatgaaatcaacattaccgccatgaacggaatccggctgggcatctcaaacgcccaggcggttaagctccaggtgattggcgcaggccggactgtgccttttgaggccggcggcgcangcgaagtggtagccgctgatctacgctgggtgcgggacgatgaaaaccgttaccgcctggtactgctccggctgggatag

SEQ ID NO: 19942 - protein, 299 aa, Unknown
  Obtained from environmental sample
  misc_feature (1)..(299): Xaa is any amino acid
MVRLAEMSLYRSIKLREQPVPVEQLLRNSSSLPKILKGFAICLVVLALVGGAGYYIYRLPKKPNVPQQTVRTAAEYVLNNDFFERRLYPGDSILVVEGSDSYKLVFSSLSDAITITTPRGPVMLDLGQEVTVDLNSDGFGELRILAADFVKNDNLAGALLRFEQEVPPQMAAASPEFPIETLSSGSEAPLVLLNTPNAFPFTLQAVFQGYCLFRHEILFERDKPGRNEQFYQRSDEINITAMNGIRLGISNAQAVKLQVIGAGRTVPFEAGGAXEVVAADLRWVRDDENRYRLVLLRLG

SEQ ID NO: 19943 - DNA, 915 bp, Unknown
  Obtained from environmental sample
  misc_feature (1)..(915): n is a, c, g, or t
atgcggattttttttgacgcttttagaatgcagcggggtttttcgcgaccaggaaaatctaaagagggaaggcgcgagccttttttttccaaagggggctttgttagcgttcccncctgcgccgcggcaagctcaatgaagatacctgtttttacccacgagtccgatttttcaccgggtctggctacgcggcttaactctagatttgccgaaagggtattcgttccatataaggaatctgccgcttttttttcaggcagggcggcaaaaaaaaccatcgtttcaggaaaccccgttcgtcaacagttcgcggcggcagatcccgcaaagggccgcgcttttctcggcctgggagaaagcgaaaggatactccttgtacttggcggcagccttggctccagggagatcaacgatctagtaaaagcctgcctgaaaaattttacggaattctttaccgtagtgcatcaaaccggagaggataacattgaagacgctctaaaagagaatgagcggtacaagccgtacgcttattttagggatgaaattccgcatgttatcgcggcggctgagctggtgctttgccgcagcggcgctggcactatctgggaatgcaagtttttaaagaagcccatggtgcttattccccttcgtggtccgagtacgcggggggatcaggtagagaacgcccgcctttttgaaaaggccggcgccgccgtttgtttcgtacctgaaaattcaggaagttcttccgcggaaaagctttccgaactcattgcttctcttgcgcaaaattccgaaaagcttaagtccatggcggaagcaaatatcggcgggtcttatggggacggtgcggtggacgccgctgatttcatagcgagggaaatagctgaaaggataagggggaaagatgggtaa

SEQ ID NO: 19944 - protein, 304 aa, Unknown
  Obtained from environmental sample
  DOMAIN (123)...(291): Glycosyltransferase family 28 C-terminal domain
  misc_feature (1)..(304): Xaa is any amino acid
MRIFFDAFRMQRGFSRPGKSKEGRREPFFSKGGFVSVPXCAAASSMKIPVFTHESDFSPGLATRLNSRFAERVFVPYKESAAFFSGRAAKKTIVSGNPVRQQFAAADPAKGRAFLGLGESERILLVLGGSLGSREINDLVKACLKNFTEFFTVVHQTGEDNIEDALKENERYKPYAYFRDEIPHVIAAAELVLCRSGAGTIWECKFLKKPMVLIPLRGPSTRGDQVENARLFEKAGAAVCFVPENSGSSSAEKLSELIASLAQNSEKLKSMAEANIGGSYGDGAVDAADFIAREIAERIRGKDG

SEQ ID NO: 19945 - DNA, 732 bp, Unknown
  Obtained from environmental sample
  misc_feature (1)..(732): n is a, c, g, or t
atggccgagatccccattcgacggaatcatgtagtcgcatatggcaaagacaagtttgtcgccgtggacacggacggcacaattgcgtattcttccgacggcgtaaaatggacagaagcaaaggacagccttgacatcattgtcttagaaatcgtatacggcaaagacaagtttgtcggcgggggggaacagggcaaaatagtgtattcgtctgatggcataaaatggacagaagcagatgtcagcaacatattcggaaaaagcaacatctacgcaatcgcatacggcaaggacaagtttgtggcaagcgtctatggaggcaaaatggcgtattcgtccgatggcgtaaaatggacagcagtagatgtcagcagcatattcggtgcaagctctacatcctacccaactatcgcctggggcaaagacaagtttttagtaggtggcactgggggccaaatggcgtattcggccgacggcgtaaaatggacaaccgtaaaggacaacccattcggcaagcacggcgtctggaagattggctgggtcgacggcaggtttattgcgggagatagtgatggcaatattgcatattcttttgacggcataacatggaaaaaagaaacgggcaaatttttcggcaacgataccattgacgcaatcgcattcggcaacggcacggttgttgtagggggtggaactggatccggcaaaataatgtattcaacgggcaagtaa

SEQ ID NO: 19946 - protein, 243 aa, Unknown
  Obtained from environmental sample
  misc_feature (1)..(243): Xaa is any amino acid
MAEIPIRRNHVVAYGKDKFVAVDTDGTIAYSSDGVKWTEAKDSLDIIVLEIVYGKDKFVGGGEQGKIVYSSDGIKWTEADVSNIFGKSNIYAIAYGKDKFVASVYGGKMAYSSDGVKWTAVDVSSIFGASSTSYPTIAWGKDKFLVGGTGGQMAYSADGVKWTTVKDNPFGKHGVWKIGWVDGRFIAGDSDGNIAYSFDGITWKKETGKFFGNDTIDAIAFGNGTVVVGGGTGSGKIMYSTGK

SEQ ID NO: 19947 - DNA, 333 bp, Unknown
  Obtained from environmental sample
  misc_feature (1)..(333): n is a, c, g, or t
ttgatttttttgaagagtcggaaaaacccgcagaaaaaccggcggcgaaataacagggagataaaaatgaaaatagcgttaatcggttacggaaaaatgggaaagatgatagagcaaatcgctcttgctcaagggcatactattgccgctattgtcgaacctgccgcaaaagacacgccggccggagttcccgtaagcaaaagcatcagtgaagcaaaccttgattctgttgatgccgcgattgagttttccgtaccggctaccgcctgcgcgaacatcacatctctcgcgcaaagaaaaattcccacggtcgtggaacaacaggctggctga

SEQ ID NO: 19948 - protein, 110 aa, Unknown
  Obtained from environmental sample
  DOMAIN (23)...(108): Dihydrodipicolinate reductase, N-terminus
  misc_feature (1)..(110): Xaa is any amino acid
MIFLKSRKNPQKNRRRNNREIKMKIALIGYGKMGKMIEQIALAQGHTIAAIVEPAAKDTPAGVPVSKSISEANLDSVDAAIEFSVPATACANITSLAQRKIPTVVEQQAG

SEQ ID NO: 19949 - DNA, 624 bp, Unknown
  Obtained from environmental sample
  misc_feature (1)..(624): n is a, c, g, or t
ttgcgtatacgggcgctcaggtgcttcacccnaagggcgatgcagctttgcatgaaaacgggaacgcctgtgcttgtaaaaaattcctacaatgtagaagcgcccggcacgcgtattgaacatgcgcaggcatccgctgggaaaaacaggccggtgcgcgcgattacctcgcgcagaaatgtaacgcttgtcgacgttgtatcaacaagaatgctggggcagtacggatttctggcggaagttttttcgattttcgcaaggcacaatatttctatagacatggtagctacaagcgaagtttcggtttctattactctggacaccaactacgatctaaccgaagtaaaaaaagaattgagcaagatcgctcaggtggaagttaaaaccggaagggcgattgtttcgatcataggaaatgtcaggcgctcttcggaaattttggtcagggcgttcaggatatgccagttcatcggagttactgtgcagatgatttcacagggcgcgagcaaagtgaacataggttttattgtgaacgataccgaggcggcggaagtcgtcaaagctcttcatcttgatttttttgaagagtcggaaaaacccgcagaaaaaccggcggcgaaataa

SEQ ID NO: 19950 - protein, 207 aa, Unknown
  Obtained from environmental sample
  DOMAIN (132)...(199): ACT domain
  misc_feature (1)..(207): Xaa is any amino acid
MRIRALRCFTXRAMQLCMKTGTPVLVKNSYNVEAPGTRIEHAQASAGKNRPVRAITSRRNVTLVDVVSTRMLGQYGFLAEVFSIFARHNISIDMVATSEVSVSITLDTNYDLTEVKKELSKIAQVEVKTGRAIVSIIGNVRRSSEILVRAFRICQFIGVTVQMISQGASKVNIGFIVNDTEAAEVVKALHLDFFEESEKPAEKPAAK

SEQ ID NO: 19951 - DNA, 561 bp, Unknown
  Obtained from environmental sample
  misc_feature (1)..(561): n is a, c, g, or t
gtgatggcggcccttacggctcaagcaaaatctttctgccctcataaaaaatatatgctactccctataaatagaatgcaaaacagaacctgccaatttcacaaagggataataatttcaaagagcacaggttttgaagtttgcagtttatgctggaacgcagaagatactttgcacatagttgaagaacattactcgccctctgttagaaacgagctgaggaaaacaggaagggaaccaaaagcagagactttgcacaatccgagctgcctcgctaaaaaagagggaattcagttttccattgtttatcccgaaaatggcgcaaggctttttttgccaagcagcgatgctttgagcgaaatgggttttatagccatcgccgcccacaagcaacgtgatgcggaattgcaatggtttttagacggaaattttttgggtacaacaaaatccgagcataaaatggcggtgactgttggtagcggcgaacaccgcattggagttcaggatacgcttgggatttatttggaaactcggttcagggtacgggcgaaaattttctag

SEQ ID NO: 19952 - protein, 186 aa, Unknown
  Obtained from environmental sample
  DOMAIN (88)...(179): Penicillin-Binding Protein C-terminus Family
  misc_feature (1)..(186): Xaa is any amino acid
MMAALTAQAKSFCPHKKYMLLPINRMQNRTCQFHKGIIISKSTGFEVCSLCWNAEDTLHIVEEHYSPSVRNELRKTGREPKAETLHNPSCLAKKEGIQFSIVYPENGARLFLPSSDALSEMGFIAIAAHKQRDAELQWFLDGNFLGTTKSEHKMAVTVGSGEHRIGVQDTLGIYLETRFRVRAKIF

SEQ ID NO: 19953 - DNA, 837 bp, Unknown
  Obtained from environmental sample
  misc_feature (1)..(837): n is a, c, g, or t
gtgtacgccaggtggaagccggttcctgcaaatagcataacgattaccttcgacaccaatgggggcacgcccaagcctgcgcccaaggtgttaaccgttggctcatcctatggcacgcttccgactgtttcaaaaaccggatgcaaattcctatcctgggctaacgatataggcgaagtaaaatcaacgacaaaaatatccgtcgccggtaaccacacgctttacgcgatctgggataaacctacacctactcctccgccgacacttaaatgcaccgtaaccttccataggaacggcgggacttccgctgcaatcccgcaaacacaagcccctcacaacggcagaataactttacccacgcctcccaccagagagggctacacttttgacggctggaacaccaaggccgacggcaccgggacggcctttaccgcgagtacgctcgttacagcggacatcgcggtatacgccaagtggaagccggttcctaaaaagatggtaacggttaccttcagcgcaaacggcggcagtacgcccaaccccgcgaaaaaagaactaaccgccggatcttcctgcggctctttgcccgccgccacgacccgggcaggctgcgtttttgaaggctggaataccaaggccgacggcagcgggacagtatttaccgcgagcactccagtcgatgcggcaatcaccgtgtatgccaagtggaaggggaatacctacaccgtaacctttcataggaacggcgcgacttgcgatgcaatcccgcaagtacaagcccctcacacagtaaaatatctttgccacacctcccatcagacaggactttacttttga

SEQ ID NO: 19954 - protein, 278 aa, Unknown
  Obtained from environmental sample
  misc_feature (1)..(278): Xaa is any amino acid
MYARWKPVPANSITITFDTNGGTPKPAPKVLTVGSSYGTLPTVSKTGCKFLSWANDIGEVKSTTKISVAGNHTLYAIWDKPTPTPPPTLKCTVTFHRNGGTSAAIPQTQAPHNGRITLPTPPTREGYTFDGWNTKADGTGTAFTASTLVTADIAVYAKWKPVPKKMVTVTFSANGGSTPNPAKKELTAGSSCGSLPAATTRAGCVFEGWNTKADGSGTVFTASTPVDAAITVYAKWKGNTYTVTFHRNGATCDAIPQVQAPHTVKYLCHTSHQTGLYF

SEQ ID NO: 19955 - DNA, 453 bp, Unknown
  Obtained from environmental sample
  misc_feature (1)..(453): n is a, c, g, or t
atggccgagcgactgctgtccgatgcgataggtgtgatatacgtggaattgagcaaacttgatcagatagtaaataagcctgtcaatgacatgacagagttggagaagtggtcggtgttttttgaatatgcagccatacccagtcagcgggagactgtaaacaagataattgaatcaaaggaggctcttcaaatggccggagatttattgatgagtataagccaggacgaaaaggaacgggcagtatttcgcagccgcaggatgttccagactgatatggcatcagacatggcaaccgctgaggatcgggaagaaaaaagaggcagagcagaagaaaaattagccatcgctcagaacatgatgaaacgcaacaggccaatagaggatattattgaggataccggcttgacccgtgaggaagtggagaacctgagtgtcaatactcatcattga

SEQ ID NO: 19956 - protein, 150 aa, Unknown
  Obtained from environmental sample
  misc_feature (1)..(150): Xaa is any amino acid
MAERLLSDAIGVIYVELSKLDQIVNKPVNDMTELEKWSVFFEYAAIPSQRETVNKIIESKEALQMAGDLLMSISQDEKERAVFRSRRMFQTDMASDMATAEDREEKRGRAEEKLAIAQNMMKRNRPIEDIIEDTGLTREEVENLSVNTHH

SEQ ID NO: 19957 - DNA, 420 bp, Unknown
  Obtained from environmental sample
  misc_feature (1)..(420): n is a, c, g, or t
atgaaattttcagataaccccgaaaagacgacaaaccccggcataaaacaagtttggcggctcagggataaaacgggagccgcgatagcggacgtgttgagcatagacgaagatgacgatgaaataaaaaacggacagacttattccttctggcatccttccgcggattaccgtcattttgtacacactgtcgaaggaagcgcgacggcgatgttgaaaaaacgcatagaaaacggcgcgctgaccgcggaacagccttcgcttacggaaattaaagcctacgccgccgccgatcttgaaagttttgacgcgacatacaaaaggctgttgaatccccatatttacaaagtgtcgataaccgataaattgcgttctctaaaacttgagttgatacaaaaattgcaaggctcagaaaagtaa

SEQ ID NO: 19958 - protein, 139 aa, Unknown
  Obtained from environmental sample
  misc_feature (1)..(139): Xaa is any amino acid
MKFSDNPEKTTNPGIKQVWRLRDKTGAAIADVLSIDEDDDEIKNGQTYSFWHPSADYRHFVHTVEGSATAMLKKRIENGALTAEQPSLTEIKAYAAADLESFDATYKRLLNPHIYKVSITDKLRSLKLELIQKLQGSEK

SEQ ID NO: 19959 - DNA, 708 bp, Unknown
  Obtained from environmental sample
  misc_feature (1)..(708): n is a, c, g, or t
atgacagataacagaaaaaagatactaattatagaagatgatcctgacatagccgcattgaaaaaagattatcttgaaatggataattttgaggttgttattgaaagaaacggacgcaggggcatggagcgcgcgttaaaagaacaatntgcgttaatcctgcttgatcttatgcttcccggaaaagacggaatggcagtctgccgcgatattcgggataaagttgacatacccattctaatggtaacagcccgaattgaggatatcgacaaggtgcgcggacttggactgggcgctgacgattatatcacaaaaccttttgcaccggcggagcttgcggcgagagtaaaatcccatatcgcccgttatataaggcttacgaaaaaacaggtggaagcaaaagaatttgatgaacttgatttcggcggacttaggataaacaattccactcatcaggtttttgttgacgaaacggaaataacacttacccgcaaagaatttgagcttctctattttcttgccgttaacagagaaattgtattcagcaaagaacaactatacgacaggatatggggcgaagatatgtacggcgatataaaaacggtagcggtacatatcaaacgccttagagaaaaaatagagaagaatccttctgaacctgtacacctgcaaaccgtttggggaacgggctacagattcacaggataa

SEQ ID NO: 19960 - protein, 235 aa, Unknown
  Obtained from environmental sample
  DOMAIN (157)...(233): Transcriptional regulatory protein, C terminal
  misc_feature (1)..(235): Xaa is any amino acid
MTDNRKKILIIEDDPDIAALKKDYLEMDNFEVVIERNGRRGMERALKEQXALILLDLMLPGKDGMAVCRDIRDKVDIPILMVTARIEDIDKVRGLGLGADDYITKPFAPAELAARVKSHIARYIRLTKKQVEAKEFDELDFGGLRINNSTHQVFVDETEITLTRKEFELLYFLAVNREIVFSKEQLYDRIWGEDMYGDIKTVAVHIKRLREKIEKNPSEPVHLQTVWGTGYRFTG

SEQ ID NO: 19961 - DNA, 399 bp, Unknown
  Obtained from environmental sample
  misc_feature (1)..(399): n is a, c, g, or t
atgtttgaagaagccggacgcgcctatgtttacttaatttacggcatgtaccattgtcttaatatcgtaagcgggaaaaagggagagggagaggctgtccttatccgcgcccttgagcctgttacgggcatagagataatgcaaaaaaggcgcaaaacaaaaaaaatggaaaacctgtgcaacgggcctggcaaattaacgcaggctttcggcataacgcgcaaacaaaacaatttaagccttttaagcggagatttccgtatttacgacagcaaaataaatcctgaaatttcaacaagcacaagaatcggtctttctttaggcaaggaactcccgctgcgtttttttattacagggaatcgctttgtttctaaattttactcaagcggcgggaaataa

SEQ ID NO: 19962 - protein, 132 aa, Unknown
  Obtained from environmental sample
  DOMAIN (1)...(122): Methylpurine-DNA glycosylase (MPG)
  misc_feature (1)..(132): Xaa is any amino acid
MFEEAGRAYVYLIYGMYHCLNIVSGKKGEGEAVLIRALEPVTGIEIMQKRRKTKKMENLCNGPGKLTQAFGITRKQNNLSLLSGDFRIYDSKINPEISTSTRIGLSLGKELPLRFFITGNRFVSKFYSSGGK

SEQ ID NO: 19963 - DNA, 420 bp, Unknown
  Obtained from environmental sample
  misc_feature (1)..(420): n is a, c, g, or t
ttgcgtcttgcggcgaccgaccttctgtccgccgctccaaaaagatcggttgtgtatataggcagcggcaacgtaggggagcttgcgttngaacagtacagcctttcggaactttcaagttatcttgcaaataactgtattgtgtttaacgctataatcataggaacggggcaggcttccgccgctgttgaatatctttgcagggaaacaggcggaaaggcgatgcatctttacaggccgcagggaatagggccgctaatcaaaagcatagcggacactccttcgggattgtacagcttctcgtttacttccggtcttcctaccgattttggaagagcgtggcttccggttgagatcgaagttcatttgatggaaagatccggccgcgacaataccggttatttcccgccgcttgagtaa

SEQ ID NO: 19964 - protein, 139 aa, Unknown
  Obtained from environmental sample
  misc_feature (1)..(139): Xaa is any amino acid
MRLAATDLLSAAPKRSVVYIGSGNVGELAXEQYSLSELSSYLANNCIVFNAIIIGTGQASAAVEYLCRETGGKAMHLYRPQGIGPLIKSIADTPSGLYSFSFTSGLPTDFGRAWLPVEIEVHLMERSGRDNTGYFPPLE

SEQ ID NO: 19965 - DNA, 471 bp, Unknown
  Obtained from environmental sample
  misc_feature (1)..(471): n is a, c, g, or t
atgtttacattctgccctaaatgcgcttcaaaaaatatcacttttaagaacgggaattcttttcattgccctgattgcggttttgtatactatcacaataccgccgccgctacaggctgtgttatcgacgcggacgggcgcctgttgtttctggtgcgcggaaaggaaccgtcaacaggcaagctggacctgtgcggcggatttgtcgatccgggtgaaggcgcgcttgagggcctgtacagggaaataaaggaagaacttggctggtcgccgcccattccgcagggcgcgccgcttagcgaagtatttaccttctttgcctcgtttcacaatcgctatccatataaaaacattatttacaatacttgcgatatgtatttttaccttcgtgcgccggacctgcgcgagcgcgatctgacccttgaaaaaaccgagatcgccgccgtccgtttcctgaaacccgaagaatag

SEQ ID NO: 19966 - protein, 156 aa, Unknown
  Obtained from environmental sample
  DOMAIN (33)...(152): NUDIX domain
  misc_feature (1)..(156): Xaa is any amino acid
MFTFCPKCASKNITFKNGNSFHCPDCGFVYYHNTAAATGCVIDADGRLLFLVRGKEPSTGKLDLCGGFVDPGEGALEGLYREIKEELGWSPPIPQGAPLSEVFTFFASFHNRYPYKNIIYNTCDMYFYLRAPDLRERDLTLEKTEIAAVRFLKPEE

SEQ ID NO: 19967 - DNA, 675 bp, Unknown
  Obtained from environmental sample
  misc_feature (1)..(675): n is a, c, g, or t
ttggaagatttgggcaaaaaaactactaaggtctttaacggtcagaatgggcaggtttccgatatggatgcccttgccatgcattgcagcttgccagataataaatatgccatgatttccaccataaacatttacgaggcggataagagagctacaatagttttcccgaacagcggttttgaagtgggcgattgccttatcaatggcgagcagagaaatatagtcagctatatgaaaggaaacaacatagattttaagtatcctattgtttccagtttccaatttggctctgcaatatccaaaaggctggatacttcgggttatacatcttttaccgaatatccgccagttcccgaccacagcggcaactacgtaaacgtatccttcgcaaacatcaaagacgacaaagcccagctttacgcacctatattcaaagatgtaaaatattactttgccaaacccgcggattatttaaccgagttcaacaagaatttgaccgctgtctctgatgaaatggctttctctttcagttgtattttgaattacatgaattcaaatttagaaggcaaaatcacaaaagggatgtacggtccgtttacatttggagagatagcttaccagttgctcaaccaaactttggtgtatttagatataaaaacaaaaggtagccattga

SEQ ID NO: 19968 - protein, 224 aa, Unknown
  Obtained from environmental sample
  misc_feature (1)..(224): Xaa is any amino acid
MEDLGKKTTKVFNGQNGQVSDMDALAMHCSLPDNKYAMISTINIYEADKRATIVFPNSGFEVGDCLINGEQRNIVSYMKGNNIDFKYPIVSSFQFGSAISKRLDTSGYTSFTEYPPVPDHSGNYVNVSFANIKDDKAQLYAPIFKDVKYYFAKPADYLTEFNKNLTAVSDEMAFSFSCILNYMNSNLEGKITKGMYGPFTFGEIAYQLLNQTLVYLDIKTKGSH

SEQ ID NO: 19969 - DNA, 576 bp, Unknown
  Obtained from environmental sample
  misc_feature (1)..(576): n is a, c, g, or t
atgacatttctggcggaatcccttatcggcgtgccgcacatcatggaagcctaccgcgcggggaatgtcgcgataataaacgcacccggcaacggcgtagcggacgacaagggcatttattatttcgtaccaaaaatgataaaatattacctgaacgaaaaaccgattctgaaaaacgcgccgacatatctgcccttctacgaggacgatctaaagtttacgcttgataacatcaagcgccttgtcataaaagacgtgtcggaagccggcggctacggcgttgtgttcggcagtgagttgtccaaagacaaattatccgaaatcaaggctcaaataaaaaatgagcccagacggtttatatcacaggaggtcatagattttatagaccttgatattatggacgaaaacggcggcactatacccagaaaggcggacttaagggcgtttgtgctgacgggcaaaactacgcgcgtttgggcaagcgggcttacgcgtttctcgcgcattaaaggatcgttcattgttaattcttcgcaaggaggaggttttaaagacacatgggtactatttcgatag

SEQ ID NO: 19970 - protein, 191 aa, Unknown
  Obtained from environmental sample
  DOMAIN (46)...(190): Domain of unknown function (DUF407)
  misc_feature (1)..(191): Xaa is any amino acid
MTFLAESLIGVPHIMEAYRAGNVAIINAPGNGVADDKGIYYFVPKMIKYYLNEKPILKNAPTYLPFYEDDLKFTLDNIKRLVIKDVSEAGGYGVVFGSELSKDKLSEIKAQIKNEPRRFISQEVIDFIDLDIMDENGGTIPRKADLRAFVLTGKTTRVWASGLTRFSRIKGSFIVNSSQGGGFKDTWVLFR

SEQ ID NO: 19971 - DNA, 642 bp, Unknown
  Obtained from environmental sample
  misc_feature (1)..(642): n is a, c, g, or t
gtgcgcgcccgcgcctccgaactctatatcgtgggcgacttcttcgacttctgggttgaatacgaaaacgccgtccgcccggaatacttccccatcctgcacgagttgcgctgtatcgtcgaggccggcgtgccggtgcgctacgtcgcggggaaccacgacttcgccgtggagagcttcttggaaaaacacgtagggctgacgttccaccggggctgcgttgacgcggaattgcaggggcgccgactccacatcagccacggtcacaaggtcggcaggaaacccttgcagcgccgctttgacgcattgctcggcaacaaaacgctgcaatggttctacaaactgctgcacccgaatatcggcgtgaggctgggcgaattcatttcggggatttcgaagatgaaacaccgcaagaccggggttccgccggccgcgctcgaaaagtaccgccgggcggcgcgggcgcggctcaggtcgggcaagagcgacttggtggttttcgcccacacccactacggcgaagtcctgcgcttcagcgagggggagtactgcaacataggttcgtggatggaccgctacgactacgccgttttgagcggtggcaagattcagctgttgaaatggggcgacagcgcgtcgtag

SEQ ID NO: 19972 - protein, 213 aa, Unknown
  Obtained from environmental sample
  misc_feature (1)..(213): Xaa is any amino acid
MRARASELYIVGDFFDFWVEYENAVRPEYFPILHELRCIVEAGVPVRYVAGNHDFAVESFLEKHVGLTFHRGCVDAELQGRRLHISHGHKVGRKPLQRRFDALLGNKTLQWFYKLLHPNIGVRLGEFISGISKMKHRKTGVPPAALEKYRRAARARLRSGKSDLVVFAHTHYGEVLRFSEGEYCNIGSWMDRYDYAVLSGGKIQLLKWGDSAS

SEQ ID NO: 19973 - DNA, 543 bp, Unknown
  Obtained from environmental sample
  misc_feature (1)..(543): n is a, c, g, or t
ttgacaaatcagggaaatttattttctgcaaagaaaatcgccgattattttaaaagccaaaacagaagcgttgatatcgaaaccgtttacaattacttaaatgcattggaacaggcatttgtggtgaaaaaagttttgcgttttgatattaaaggaaaagaagttttaaaaacacaggaaaaatattttgcgggtgaccattcgcttgtatattcaattatgggctttaaagatagattcatttctggcattttggaaaatgtggttatgcacgaaatggagaggagaggctacagggtttttgtgggcaaattgaatggcacggaaatagattttgtgggagagaagcaaaacaaaaaaatttacgtgcagatatgttatcaattaaattctcaagaaaccataagcagggaattttcaccgctggaacttataaaagataatcatccaaaatttgttgtttctatggattcgttctttaaagacaacataaatggcattaaacatcggttcgcgggatactttttgctagaaaaatggtaa

SEQ ID NO: 19974 - protein, 180 aa, Unknown
  Obtained from environmental sample
  misc_feature (1)..(180): Xaa is any amino acid
MTNQGNLFSAKKIADYFKSQNRSVDIETVYNYLNALEQAFVVKKVLRFDIKGKEVLKTQEKYFAGDHSLVYSIMGFKDRFISGILENVVMHEMERRGYRVFVGKLNGTEIDFVGEKQNKKIYVQICYQLNSQETISREFSPLELIKDNHPKFVVSMDSFFKDNINGIKHRFAGYFLLEKW

SEQ ID NO: 19975 - DNA, 300 bp, Unknown
  Obtained from environmental sample
  misc_feature (1)..(300): n is a, c, g, or t
gtgataggattggccgagcctcaccagaagacaaattggcaatgctggccgcccccgccgtggcgccggatgggggcgcgggggctgcggcccccgcccagaccgagggagggcttcgcccgaccgagggcaaggccggcgcggtggccgccgccgactccattcaggacaccgccctcaacggggcacaggtcacggccctgctgtcactgctggacagcgccgcgaccggctccctccccaaggaagccgtcaaagccaccatccaagcggcgttcccaatgctcgccgccaagctga

SEQ ID NO: 19976 - protein, 99 aa, Unknown
  Obtained from environmental sample
  misc_feature (1)..(99): Xaa is any amino acid
MIGLAEPHQKTNWQCWPPPPWRRMGARGLRPPPRPREGFARPRARPARWPPPTPFRTPPSTGHRSRPCCHCWTAPRPAPSPRKPSKPPSKRRSQCSPPS

SEQ ID NO: 19977 - DNA, 552 bp, Unknown
  Obtained from environmental sample
  misc_feature (1)..(552): n is a, c, g, or t
ttggcaatgctggccgcccccgccgtggcgccggatgggggcgcgggggctgcggcccccgcccagaccgagggagggcttcgcccgaccgagggcaaggccggcgcggtggccgccgccgactccattcaggacaccgccctcaacggggcacaggtcacggccctgctgtcactgctggacagcgccgcgaccggctccctccccaaggaagccgtcaaagccaccatccaagcggcgttcccaatgctcgccgccaagctgatagacgcgatggtggaccccatcgaaatcagggagccgccgccgttggcggttcccgaaccagaaccagccgccgaaccagaacccccagtcgacgcagaccaagacgaccccccgccgcgaagcggcgccgcacccgacccggggaacgccccaagtggcacttgggcccccgacgctgcccgtgcagcgtcgggcgttagtgccactaagggcgttggggcgttgcccaccgccccggccgagggagggcttcgcccgaccaaggccgaaacaacaggagactga

SEQ ID NO: 19978 - protein, 183 aa, Unknown
  Obtained from environmental sample
  SIGNAL (1)...(18)
  misc_feature (1)..(183): Xaa is any amino acid
MAMLAAPAVAPDGGAGAAAPAQTEGGLRPTEGKAGAVAAADSIQDTALNGAQVTALLSLLDSAATGSLPKEAVKATIQAAFPMLAAKLIDAMVDPIEIREPPPLAVPEPEPAAEPEPPVDADQDDPPPRSGAAPDPGNAPSGTWAPDAARAASGVSATKGVGALPTAPAEGGLRPTKAETTGD

SEQ ID NO: 19979 - DNA, 456 bp, Unknown
  Obtained from environmental sample
  misc_feature (1)..(456): n is a, c, g, or t
atggttttgttgccttggccggttttggcatgtcagtctcctgttgtttcggccttggtcgggcgaagccctccctcggccggggcggtgggcaacgccccaacgcccttagtggcactaacgcccgacgctgcacgggcagcgtcgggggcccaagtgccacttggggcgttccccgggtcgggtgcggcgccgcttcgcggcggggggtcgtcttggtctgcgtcgactgggggttctggttcggcggctggttctggttcgggaaccgccaacggcggcggctccctgatttcgatggggtccaccatcgcgtctatcagcttggcggcgagcattgggaacgccgcttggatggtggctttgacggcttccttggggagggagccggtcgcggcgctgtccagcagtgacagcagggccgtgacctgtgccccgttgagggcggtgtcctga

SEQ ID NO: 19980 - protein, 151 aa, Unknown
  Obtained from environmental sample
  misc_feature (1)..(151): Xaa is any amino acid
MVLLPWPVLACQSPVVSALVGRSPPSAGAVGNAPTPLVALTPDAARAASGAQVPLGAFPGSGAAPLRGGGSSWSASTGGSGSAAGSGSGTANGGGSLISMGSTIASISLAASIGNAAWMVALTASLGREPVAALSSSDSRAVTCAPLRAVS

SEQ ID NO: 19981 - DNA, 399 bp, Unknown
  Obtained from environmental sample
  misc_feature (1)..(399): n is a, c, g, or t
atgtccgccgccgacaagagacgccgcattcaggaagtgctgcaggaagtgggctacagaaggggcactgacatcaggccttcgcagctttcaatgggcgagcagaaacttattgcctttgcgtgggcactgatgtgcaggccgaatctgcttttccttgacgagtggacagagtcgctggacgactccggggcaaaccgccttatcaggcttgttgagcgccatcaaaaagaaaaaaaaactgtgatttttgtgaatcatgattttaagattattaaaagcctttccgattatattgtgatgattgttgacgggaaattatcgtccgttttctcccgcgaacagattgaaaaggacgtgaatctggcccatgtaattgaagaaggtatcatgtcatga

SEQ ID NO: 19982 - protein, 132 aa, Unknown
  Obtained from environmental sample
  DOMAIN (4)...(105): ABC transporter
  misc_feature (1)..(132): Xaa is any amino acid
MSAADKRRRIQEVLQEVGYRRGTDIRPSQLSMGEQKLIAFAWALMCRPNLLFLDEWTESLDDSGANRLIRLVERHQKEKKTVIFVNHDFKIIKSLSDYIVMIVDGKLSSVFSREQIEKDVNLAHVIEEGIMS

SEQ ID NO: 19983 - DNA, 477 bp, Unknown
  Obtained from environmental sample
  misc_feature (1)..(477): n is a, c, g, or t
atgaaattcaatatacggcgtttcgcggatcaaattgtcggagtttttattattatctcttttgtcgcgcttgcctttgtcattgttatgctggcgaaatcccagagatggttcgccaaagatgtcgagttttccacggttttcccttccgccggcggattgagccggaacatggcggttcagtacaaaggttttaccatagggagcgtaaaatcttttcgtctgacggatgatgataatgtagaagtaatttttgtcataaatgaagaatacagggacagggttaaacgaggttcaatcgtggaattacaggtcagtcctatcgggcttggcaaccaatttctattttacacgggaaaaggcgaagttcttgaagaaggctcttttatcccgccgtatggttccgcgcgcgcgagggaattggagcgccagggcctggctgaagattacagcgcgatgatagtatcagcgtgctga

SEQ ID NO: 19984 - protein, 158 aa, Unknown
  Obtained from environmental sample
  SIGNAL (1)...(25)
  DOMAIN (40)...(120): mce related protein
  misc_feature (1)..(158): Xaa is any amino acid
MKFNIRRFADQIVGVFIIISFVALAFVIVMLAKSQRWFAKDVEFSTVFPSAGGLSRNMAVQYKGFTIGSVKSFRLTDDDNVEVIFVINEEYRDRVKRGSIVELQVSPIGLGNQFLFYTGKGEVLEEGSFIPPYGSARARELERQGLAEDYSAMIVSAC

SEQ ID NO: 19985 - DNA, 678 bp, Unknown
  Obtained from environmental sample
  misc_feature (1)..(678): n is a, c, g, or t
gtgcttgacgccgttctgaacatcgcttcaaaaagcatgggcctgcccgtcgagattgaatttgcggtcagcaagcaaaacgagacgcggattttttatcttctgcaaattaagccgcttatccaaaataccggaaagcaggaaaccaatatcgacttacaggatattgacagatgctttgttttttccggcaggagcatgggtaacggcagggataacacgatcagggacattgtatgggttgatcctgaaactttttccccagcgaatactgccgcaatcgcgaaggaaattgaaacgctcaatttgatgttaaaggcgcagggtcggcgttacgtccttgtcggccccgggcgttggggaaccagggatcattcccttggaattcccgtaaatttcccgcagatttcattttcgcgcgttatcgtagaaaccaacctgcccaatttcaacgtcgagtcgtcccttgggagccattttttccataacgttaccagcatgaatatcggttatctgtcggtgtcgccaggccatgacagggatcatgttgattgggaatggcttaggtcgctcaagtgcgaagagaaaacgcagttttgtaaatggagcaaaaccagggagcccatggatattgtcatggacgggcggattgccaacacggtgatttacaagcgctag

SEQ ID NO: 19986 - protein, 225 aa, Unknown
  Obtained from environmental sample
  misc_feature (1)..(225): Xaa is any amino acid
MLDAVLNIASKSMGLPVEIEFAVSKQNETRIFYLLQIKPLIQNTGKQETNIDLQDIDRCFVFSGRSMGNGRDNTIRDIVWVDPETFSPANTAAIAKEIETLNLMLKAQGRRYVLVGPGRWGTRDHSLGIPVNFPQISFSRVIVETNLPNFNVESSLGSHFFHNVTSMNIGYLSVSPGHDRDHVDWEWLRSLKCEEKTQFCKWSKTREPMDIVMDGRIANTVIYKR

SEQ ID NO: 19987 - DNA, 837 bp, Unknown
  Obtained from environmental sample
  misc_feature (1)..(837): n is a, c, g, or t
atgatcaaatacattgaagatctgcgtaatgttgataatgacacgctaatcggcatggttccggtaatccttcttatcgaggattccatccgctactactcgcgctacctgcctgagctttactcggtagttttgaatcagactaaaattcttcttgaggaagaacgctctgtcgaaacaaacaaaataataaggatgagatggcggcccaagatccttttggcatccagctacgaagaagctttggatttgtacaagcgttatgaaccgtatctattgacggtaatttccgatgtccgctatccggttaacggcgttgacgatccagaagccgggttcaagttccttgccgaagttaaggcaagaaggccggaaacccccattctcctgcaatccagcgaagaaataaaccgggaaaaagcttacgcgatgggcgccgcgtttgtcgataaaaactcaaaaactctgggccatgacatggttgtgtattttcagacgcacctgggctttggcccttttattttcagaaaaccggacgggcaggaactgtcgcgcgccgcaacaatggatgagtttgaaaacaggttaagaacaattccggtcgattcgatctattatcacagccgcatgaatcatttttcagcatggctaatggcaaggggggaagtaagaattgccagagttatgcgaaagttcagcgccgatgatttcgactctaccgagatcattcggatttatttaataggaagtatcgaagagaataaagctgccaaacgcggggcagtatctcgactcttgatccccagaacgcatggagcggggatcggattctgctaa

SEQ ID NO: 19988 - protein, 278 aa, Unknown
  Obtained from environmental sample
  misc_feature (1)..(278): Xaa is any amino acid
MIKYIEDLRNVDNDTLIGMVPVILLIEDSIRYYSRYLPELYSVVLNQTKILLEEERSVETNKIIRMRWRPKILLASSYEEALDLYKRYEPYLLTVISDVRYPVNGVDDPEAGFKFLAEVKARRPETPILLQSSEEINREKAYAMGAAFVDKNSKTLGHDMVVYFQTHLGFGPFIFRKPDGQELSRAATMDEFENRLRTIPVDSIYYHSRMNHFSAWLMARGEVRIARVMRKFSADDFDSTEIIRIYLIGSIEENKAAKRGAVSRLLIPRTHGAGIGFC

SEQ ID NO: 19989 - DNA, 813 bp, Unknown
  Obtained from environmental sample
  misc_feature (1)..(813): n is a, c, g, or t
gtggatggctcggttcttattggagccgcgggccgttccggtggcgttggttacgacggcatcgtctatcttccctgtacaaaggctaacggttttttcccggatctttcccggctcccgtcaaaaagccttttgtatttttgctcgccgaataatcccaccggcgcggtggcggacagggaacagctttccgtccttgtgaaaacctgcatggaaaaaggcgctcttgtcgtctttgacgcggcctacagcgaatacatccgcgacccgaaatttcctaaaagcatttacgagattgaaggcgcaaacaagtgcgccattgaagttaattcattctccaaatcagcgggttttaccggtgtgcgcctcggatggacagttgttccggcggagatcaaatatgaaggcggcgagagtgtcaacgccgactggagccgcgtctgctccacgatattcaacggggcttccaatatcgcgcaggccggagggcttgccgcgttagacgatgagggtctgaaggaaatccgcgggcttaccgatttttatctcggcaacgcgcggctgatacgcgaggcgctgaaagacttaaatgtagaaaccacgggcggggacaattccccgtacatttgggcttatttcccgaacagggacagttgggaagttttctcgcagatactcgaaaaatgccaggtagtaacaacgcccggggcgggatttggccctgcggggaacggctatgtccgcttctccgcttttggccaccgcgccgacgtggaagaggcatgcgaaagattaaaggggttcagggtctag

SEQ ID NO: 19990 - protein, 270 aa, Unknown
  Obtained from environmental sample
  DOMAIN (1)...(265): Aminotransferase class I and II
  misc_feature (1)..(270): Xaa is any amino acid
MDGSVLIGAAGRSGGVGYDGIVYLPCTKANGFFPDLSRLPSKSLLYFCSPNNPTGAVADREQLSVLVKTCMEKGALVVFDAAYSEYIRDPKFPKSIYEIEGANKCAIEVNSFSKSAGFTGVRLGWTVVPAEIKYEGGESVNADWSRVCSTIFNGASNIAQAGGLAALDDEGLKEIRGLTDFYLGNARLIREALKDLNVETTGGDNSPYIWAYFPNRDSWEVFSQILEKCQVVTTPGAGFGPAGNGYVRFSAFGHRADVEEACERLKGFRV

SEQ ID NO: 19991 - DNA, 831 bp, Unknown
  Obtained from environmental sample
  misc_feature (1)..(831): n is a, c, g, or t
atggacggtttgtttgagctggctgaaaaaattgaagccgatgagcggtatttgcgggacagttgccgggggaagctgatggtggcgctcttttttgagcccagtaccagaacgcgccttagttttgaagcggcaatgcttcgtttggggggaagctgtctgggctttgccgattctgggtcaagttcagcatctaaaggggaaagccttgccgacactatccgtatggcatcaagttacgcggatgtaattgttatgcgaaaccccaaagaaggttccgcgcttttggcaaagcagtattcttcagtgcctgtgataaatgccggagacgggggccatcaccatccgacacagacgcttaccgatttgcttacaatcaggcgcgaacatggcgctgttagaaatataaccgtcggtttttgcggcgacctcaagttcgggcgtaccgttcattctcttgcaaaagcgcttgcgcgttacgaaaaaattaaaatggtttttatttcacctgacgagctgtcgccgcctgattatattattcattatctgaatgaacaaaaaatagaatttagcgaaacgagaagccttgaagaagcgatgcccgcgcttgacgtgctgtacatgaccagggtgcagagggagcgcttcttcaatgaagaagattatatacgcctaaaggatacttatgttttaaacaatgagaaagtggctcttggcaaaaaagaccttatcattcttcatcctttaccccgtgtaaatgaaatttccgtagaagtagatgccgatccgcgtgcggtatattttaaacaggcaagtacgggatgtatgtaa

SEQ ID NO: 19992 - protein, 276 aa, Unknown
  Obtained from environmental sample
  DOMAIN (133)...(273): Aspartate/ornithine carbamoyltransferase, Asp/Orn binding domain
  misc_feature (1)..(276): Xaa is any amino acid
MDGLFELAEKIEADERYLRDSCRGKLMVALFFEPSTRTRLSFEAAMLRLGGSCLGFADSGSSSASKGESLADTIRMASSYADVIVMRNPKEGSALLAKQYSSVPVINAGDGGHHHPTQTLTDLLTIRREHGAVRNITVGFCGDLKFGRTVHSLAKALARYEKIKMVFISPDELSPPDYIIHYLNEQKIEFSETRSLEEAMPALDVLYMTRVQRERFFNEEDYIRLKDTYVLNNEKVALGKKDLIILHPLPRVNEISVEVDADPRAVYFKQASTGCM

SEQ ID NO: 19993 - DNA, 504 bp, Unknown
  Obtained from environmental sample
  misc_feature (1)..(504): n is a, c, g, or t
ttggccgagtttctgcggatatttcaagatcatttttgcacgaggggggcaagacccaggctcggttcatcaagcatgagcatcttagggtgtgacataaggccgcgggcaacggcaagcatctgctgctcgccgcctgagagagtacccccgtgctggcggtggcgttctttaagacgcgggaaaagttcaaaacagcgctggcggtcctgttttataccctctttatcgctgcgggcatacgcgcccagggaaagattttcgtcaacggtaagattgggaaaaatgcgccggccctcgggtatcatcacaaggccgccggaaacaatgtccctgggatcgccgcgtgttatatctttgtcattccaggtgatttttcccgactcgggttttaccaggccgacaatcgaattaagcatagtgctcttgcccgcgccgttagccccgattaaggtgatgattttaccatcagggacttccatgtctataccgcgcagggcgtga

SEQ ID NO: 19994 - protein, 167 aa, Unknown
  Obtained from environmental sample
  DOMAIN (22)...(60): Protein of unknown function (DUF1602)
  misc_feature (1)..(167): Xaa is any amino acid
MAEFLRIFQDHFCTRGARPRLGSSSMSILGCDIRPRATASICCSPPERVPPCWRWRSLRRGKSSKQRWRSCFIPSLSLRAYAPRERFSSTVRLGKMRRPSGIITRPPETMSLGSPRVISLSFQVIFPDSGFTRPTIELSIVLLPAPLAPIKVMILPSGTSMSIPRRA

SEQ ID NO: 19995 - DNA, 516 bp, Unknown
  Obtained from environmental sample
  misc_feature (1)..(516): n is a, c, g, or t
gtgttaaaactggaaggcctctcggtattttacggcggtattcacgccctgcgcggtatagacatggaagtccctgatggtaaaatcatcaccttaatcggggctaacggcgcgggcaagagcactatgcttaattcgattgtcggcctggtaaaacccgagtcgggaaaaatcacctggaatgacaaagatataacacgcggcgatcccagggacattgtttccggcggccttgtgatgatacccgagggccggcgcatttttcccaatcttaccgttgacgaaaatctttccctgggcgcgtatgcccgcagcgataaagagggtataaaacaggaccgccagcgctgttttgaacttttcccgcgtcttaaagaacgccaccgccagcacgggggtactctctcaggcggcgagcagcagatgcttgccgttgcccgcggccttatgtcacaccctaagatgctcatgcttgatgaaccgagcctgggtcttgcccccctcgtgcaaaaatga

SEQ ID NO: 19996 - protein, 171 aa, Unknown
  Obtained from environmental sample
  DOMAIN (27)...(171): ABC transporter
  misc_feature (1)..(171): Xaa is any amino acid
MLKLEGLSVFYGGIHALRGIDMEVPDGKIITLIGANGAGKSTMLNSIVGLVKPESGKITWNDKDITRGDPRDIVSGGLVMIPEGRRIFPNLTVDENLSLGAYARSDKEGIKQDRQRCFELFPRLKERHRQHGGTLSGGEQQMLAVARGLMSHPKMLMLDEPSLGLAPLVQK

SEQ ID NO: 19997 - DNA, 339 bp, Unknown
  Obtained from environmental sample
  misc_feature (1)..(339): n is a, c, g, or t
ttgggaaactgcgatgacaacgccgtgtcactgccttatggcaaacagcgccgccttgagattgtccgcgcgctggcgaccgacccaaagctctttctgcttgacgagcctgccgcggggatgaacccgcaggaatcctacgaacttatggacttcatcgtctcggttcgtgacaaattcaaaatttccgtgctgcttatcgaacaccatatgcaggtggtaatgggtatctgcacacggctgtatgtgcttgattatggcattaccatagccgagggaaccccgcaggagattcgtaaaaatcaggatgttattgacgcctatctgggggttgagtag

SEQ ID NO: 19998 - protein, 112 aa, Unknown
  Obtained from environmental sample
  DOMAIN (4)...(87): ABC transporter
  misc_feature (1)..(112): Xaa is any amino acid
MGNCDDNAVSLPYGKQRRLEIVRALATDPKLFLLDEPAAGMNPQESYELMDFIVSVRDKFKISVLLIEHHMQVVMGICTRLYVLDYGITIAEGTPQEIRKNQDVIDAYLGVE

SEQ ID NO: 19999 - DNA, 726 bp, Unknown
  Obtained from environmental sample
  misc_feature (1)..(726): n is a, c, g, or t
atgaataacttgccgagaattacaaagcaaattgtaaaagataaagggaagcttctcataccgtctttcgcaatcgagaggacacaggaactggtttattatttccatttgcttacagatagaggaatcatacccgagattcccatatttgtcgattcgccaatggcgactaacgccaccacaatcttccaggtgcatccggaatgttacggagaggagatcaaggaagcttttattaaacatcacaaaaacccatttgggtttaattcacttcattttaccacaagtgtcattgagtccaaggctctaaacgaccgccccgggccgcttattataatttccgcagacggaatgtgcgaagcaggacgcattcagcaccacctgatccacaacatcgcaagtcccaatactaccatcctgatcgtagggttcatggcggaaaatacgcttggacgccgtatccttgaaaaagccgacgaggtaaagattcacggcaattggattaagcgccgtgccgctgtcgagaagatcaatgctttcagcgctcacgctgattacagcgaggcgataaactggctaaaatcactggacacttcccgcctgaaaaaaatcttcatggttcacggtgaacctaaaggtcaggctgtttttaaaaagcaccttggtgaagcgggctttcctaatgtggatattgtgaagtacgggcagatttatgatttgatgtaa

SEQ ID NO: 20000 - protein, 241 aa, Unknown
  Obtained from environmental sample
  DOMAIN (166)...(212): RNA-metabolising metallo-beta-lactamase
  misc_feature (1)..(241): Xaa is any amino acid
MNNLPRITKQIVKDKGKLLIPSFAIERTQELVYYFHLLTDRGIIPEIPIFVDSPMATNATTIFQVHPECYGEEIKEAFIKHHKNPFGFNSLHFTTSVIESKALNDRPGPLIIISADGMCEAGRIQHHLIHNIASPNTTILIVGFMAENTLGRRILEKADEVKIHGNWIKRRAAVEKINAFSAHADYSEAINWLKSLDTSRLKKIFMVHGEPKGQAVFKKHLGEAGFPNVDIVKYGQIYDLM

SEQ ID NO: 20001 - DNA, 927 bp, Unknown
  Obtained from environmental sample
  misc_feature (1)..(927): n is a, c, g, or t
atgctccgtaagcctactattttggaacttaactccattgacaataccgaacagaaagccctgataatggccctgctgcttatcagcatcggcgtctatacgaaaaacaaccagttaggcgacggaaaattaaagaatattattctgattgacgaggcccatgtgctgttgggagggggagcgtcagccaatcaggacggcgcggacgttcaaaccgcgacaatcaaatcgctacaggacatgatcgcggaaatccgttcttatgggacagggataattatagcggatcagtcgcccaccaaagtaagccgcgaggtaatagccaacactgatataaaaatttctttccggctggttcaatcatctgaaaaagatttgatagctgacagcaccaacatggacaagaacgcgagccagcggatttcgagattgaaacctggcgaagcctacgtgtatttcagccgtctggaaaatccccagttgcttatgacagaggatattcgtgaaaaagaaaaaatccgcttaagcgtcccgaatgaagaaatcgcaaatataatgagctattgggaaaagaggaaagcaaaattaaagccctttactgagtgtaatttttgcgaagcgtgtaaaaccggatgtgatttttcattaagggcaaaagccgattactatgcgaacaggtttatgttaacgaatcaggataaaataaaagacgctaaaactttaaaagtttatatgcttggtgtggaaaaatttttaagcaaaataactgaacaaatggaagcagaacaaaaaatacggatgataaaatgcacaactatacgctttatgcgtaaaatacagcttggaacttcgataaggattccaaccaccgaagcaaaacaattcttggttaggaggacagaacaatggatgaaggtcttgatgtaa

SEQ ID NO: 20002 - protein, 308 aa, Unknown
  Obtained from environmental sample
  misc_feature (1)..(308): Xaa is any amino acid
MLRKPTILELNSIDNTEQKALIMALLLISIGVYTKNNQLGDGKLKNIILIDEAHVLLGGGASANQDGADVQTATIKSLQDMIAEIRSYGTGIIIADQSPTKVSREVIANTDIKISFRLVQSSEKDLIADSTNMDKNASQRISRLKPGEAYVYFSRLENPQLLMTEDIREKEKIRLSVPNEEIANIMSYWEKRKAKLKPFTECNFCEACKTGCDFSLRAKADYYANRFMLTNQDKIKDAKTLKVYMLGVEKFLSKITEQMEAEQKIRMIKCTTIRFMRKIQLGTSIRIPTTEAKQFLVRRTEQWMKVLM

SEQ ID NO: 20003 - DNA, 948 bp, Unknown
  Obtained from environmental sample
  misc_feature (1)..(948): n is a, c, g, or t
atggaaaaactaaaggcggccattatcggcctggcccgcattgccagcctgctcgaagaagacagcctgcgggaaaaaccctgcacgcatgcgggcgcaatcgccgccaaccccgactgcgtcctagtcgccgggtgcgatattgacgaagagcgccgcaggctttttgcggagaagtggcgcataccggtttatgcggatgccgcccaaatgctctgcgttcacgctccgcgaattctgtctgtcgctacccaccccgacagccattaccattattgccgtcttgccgccgattttaacgttcctgtgataatctgcgaaaagcccctagccgacacaattagggaagcacgcaaaattgcccggcttgccagcgcagattcagggggaaaaggccgggaccgtagtcctgtcattatcaccaaccacgagcgccgttattcgcaagactacatcagggcaagggagattctggagcaggaaaaattgggcgggcttttgggcgtacacgcaaacctctacatggggaaaaacaagcggcttttggatgtgttgtggcacgatggaacccaccttgcggacgcaatcatgtttctgtccaattcggttttgaagcacaaacgatgctggggcgcaagactcaattcccggaccggaactgcctggctacagggagaattgctcaaggggaaaaaacagccgccaatcccggttgtcctggaaatcggggccgggcgagattatcttgtgtttgaaacgggattttcctgcgaaaaaggccgactgcggatcggtaacgggatctttgaagtgtgggaaagcgcaccaagcccctacgctgaaaatttccattccctcaaacagaccggcgaaactttttccggccccacaggctactttgccaatatgttaaaagacgccgcctcctgcgcgcctcggccaatctga

SEQ ID NO: 20004 - protein, 315 aa, Unknown
  Obtained from environmental sample
  DOMAIN (4)...(143): Oxidoreductase family, NAD-binding Rossmann fold
  misc_feature (1)..(315): Xaa is any amino acid
MEKLKAAIIGLARIASLLEEDSLREKPCTHAGAIAANPDCVLVAGCDIDEERRRLFAEKWRIPVYADAAQMLCVHAPRILSVATHPDSHYHYCRLAADFNVPVIICEKPLADTIREARKIARLASADSGGKGRDRSPVIITNHERRYSQDYIRAREILEQEKLGGLLGVHANLYMGKNKRLLDVLWHDGTHLADAIMFLSNSVLKHKRCWGARLNSRTGTAWLQGELLKGKKQPPIPVVLEIGAGRDYLVFETGFSCEKGRLRIGNGIFEVWESAPSPYAENFHSLKQTGETFSGPTGYFANMLKDAASCAPRPI

SEQ ID NO: 20005 - DNA, 528 bp, Unknown
  Obtained from environmental sample
  misc_feature (1)..(528): n is a, c, g, or t
atgaaaacttcggtatattttaagccaccgacggtacaaagaaaattttttgctcctttaaggcgtgatatgggtactacggtggtttttaagccgacgagagtacaacgtaaagctcttgccttgcttaaaagcggggctaaacatattttgctttttggcggttcaaggtcgggaaaaactactgtattggttatgtgtatcattttccgcgctttgatgtatgcgggcagccgtcatcttatttgccgatacagggcgaaagatgcccggtcttctgtcttaagagaaaccttattaccgtggcttgataatactattggcaaaaatggttacacctatttagcgcatgaaagcatgattacactttataacggctctgaaatatggataggtggtttaggcgatagggagcaagcggacaagattttgggacacgaatattgcaccatatattttaatgaaatttcacaattaagttatatcgctgttactaccgcttattccangctcgncatgcgggtttaa

SEQ ID NO: 20006 - protein, 175 aa, Unknown
  Obtained from environmental sample
  misc_feature (1)..(175): Xaa is any amino acid
MKTSVYFKPPTVQRKFFAPLRRDMGTTVVFKPTRVQRKALALLKSGAKHILLFGGSRSGKTTVLVMCIIFRALMYAGSRHLICRYRAKDARSSVLRETLLPWLDNTIGKNGYTYLAHESMITLYNGSEIWIGGLGDREQADKILGHEYCTIYFNEISQLSYIAVTTAYSXLXMRV

SEQ ID NO: 20007 - DNA, 657 bp, Unknown
  Obtained from environmental sample
  misc_feature (1)..(657): n is a, c, g, or t
ttgaatcccgcgccggaaatctgccgtttctgccatgaacggggcatcatcaccattgttgacgcggtgagcgccttcgccgccatacccatagatatggaccgcgaggcctttgatttcatggcctccacctccaacaaaaacatccagggcatggccggggtgggatttgtgttctgccgtaaagaagctttggagaaaatctccggctatcccccgcggaactactatctgaatctttgggaccaatacatccatttcaagaaaaacaggcaaacccgttttaccccgccggttcaagccctttacgccctgcgccaggccatactcgaagccaggcgcgagggaatggaaaaccgttacgcccgttacgtttcatgctggaatgtgctggttgcggccatcaaaaaaatcggtctttccatgctggtccccgaggcggcccagtccaaactcattacggcgatacttgatccgccttcgcccaattattcctttgagtcgctgcacgatctggcccgaagccggggcttcaccatttatccgggcaagctttccgaggccgatactttcagaatcgccaacatcggggatatccgtcctgaagagatgatcgttttcaccgaagtgcttgaaaattacctgaactcgctttga

SEQ ID NO: 20008 - protein, 218 aa, Unknown
  Obtained from environmental sample
  misc_feature (1)..(218): Xaa is any amino acid
MNPAPEICRFCHERGIITIVDAVSAFAAIPIDMDREAFDFMASTSNKNIQGMAGVGFVFCRKEALEKISGYPPRNYYLNLWDQYIHFKKNRQTRFTPPVQALYALRQAILEARREGMENRYARYVSCWNVLVAAIKKIGLSMLVPEAAQSKLITAILDPPSPNYSFESLHDLARSRGFTIYPGKLSEADTFRIANIGDIRPEEMIVFTEVLENYLNSL

SEQ ID NO: 20009 - DNA, 384 bp, Unknown
  Obtained from environmental sample
  misc_feature (1)..(384): n is a, c, g, or t
atgaaggagagaaacatgaattttccagccgatctgaagtacagcaaaacccacgagtgggtaaaagatttgggaaacggcctttatgaaatcggtctttccgattatgcccaaaaggaattgggggatatagtatacgtaaatcttccgcaaatcggggatgaactgaaagcggaaaaagcttttggggatgtggaatccgtcaaggcggtgtcggatattatcagccccataaacggaaaagtaaaggaaataaacgaggctatcgcgtccgcgcctgattccataaataaatcgccctacgaggtttggctcatccgcgccgaaggttctgttggagaagcgcttctttctgccaaggactacgaagcgtcgctatcctaa

SEQ ID NO: 20010 - protein, 127 aa, Unknown
  Obtained from environmental sample
  DOMAIN (12)...(127): Glycine cleavage H-protein
  misc_feature (1)..(127): Xaa is any amino acid
MKERNMNFPADLKYSKTHEWVKDLGNGLYEIGLSDYAQKELGDIVYVNLPQIGDELKAEKAFGDVESVKAVSDIISPINGKVKEINEAIASAPDSINKSPYEVWLIRAEGSVGEALLSAKDYEASLS

SEQ ID NO: 20011 - DNA, 813 bp, Unknown
  Obtained from environmental sample
  misc_feature (1)..(813): n is a, c, g, or t
atgcccgtaaaggccgacgcctacggacacggcgctgttccggttgcccgatgcgccctggaggcgggggtggaataccttgccgtggcgcttgtttccgagggcagggaactgagggcggcgggaatcacttcccctatactgcttcttgcccaggcaatgtccgaggagttgccggaaatcgtctctctgggccttattccccatatcggcgacggcgagtttattgacgcggcagttttggccgcagaaaaagcggggaaaaagctgacaatccacctcaaagtagatacgggcatgggacggcttggctgccgccctgaagaagcggcggccctggcctctaaaattgcttcaagcaagtctctttcccttggaggggtagtcacacatcttgcggtttcagattccatagaccctgacgagatcgcgttcaccaaagcacagctcagtcggcttagggaagccgttgcttctatagaaaaagcaggaatcgatcccggcattgtccacgccgccaattccggggctttggtttttcacgaggattcttattttgacatgattcgtccgggaatttttctttacggctattctccggcggactggcttgtaaagacggggcaggccgattctttaagcggttatctatccgccgaaccgctgatggagctgcggagcgccgtggtttcagttaaaaagatgaaaaaaggggagtccgtctcgtacggcagactctggacagcgccggaagatacctatgtcggaatagttccggcaggctacgccgacggctttcgccgaagcctttaa

SEQ ID NO: 20012 - protein, 270 aa, Unknown
  Obtained from environmental sample
  DOMAIN (222)...(270): Alanine racemase, C-terminal domain
  misc_feature (1)..(270): Xaa is any amino acid
MPVKADAYGHGAVPVARCALEAGVEYLAVALVSEGRELRAAGITSPILLLAQAMSEELPEIVSLGLIPHIGDGEFIDAAVLAAEKAGKKLTIHLKVDTGMGRLGCRPEEAAALASKIASSKSLSLGGVVTHLAVSDSIDPDEIAFTKAQLSRLREAVASIEKAGIDPGIVHAANSGALVFHEDSYFDMIRPGIFLYGYSPADWLVKTGQADSLSGYLSAEPLMELRSAVVSVKKMKKGESVSYGRLWTAPEDTYVGIVPAGYADGFRRSL

SEQ ID NO: 20013 - DNA, 651 bp, Unknown
  Obtained from environmental sample
  misc_feature (1)..(651): n is a, c, g, or t
atggcggacttaaaaagcggcgggcttgccagggccgcaaaaggcagttatacggtgattgggcagcttagcgggttaagagaaagccgggataaaaacggtgaggagatggcatttggcgccatacaggactttgagggtgaaattgacctggtattctgggcaaaaacatggaaagaaagccgcgaattactgaacctgggcgagtttgtggcccttaaggggaaccttgatccggaaaaagaccgcaatccgcagaagcccagcctgaaggtaagcaaggttgatgatcttgcggcgttaagccgttccgcggcgcgaaaagcggaagccggggagcagccaaaagttcctccgctggaaatacctgcaaaaaatgaaaattctactaacacagaacagtccgccgcgccgttaaacgaaatccatatccggctggaagacggcgccgccgacagggacgaaagcatacagcccctggggaattaccttatgggtaatcccggtccctgtcccgtgtttatccacattggggaaaaaattatccgggccaaaaaaggtttgagtcttgaagccgaaaaggaggcgctgggcgtgctggaaggcntgtatcggcngttgcccggtcatggagaggaacaatgcaaataa

SEQ ID NO: 20014 - protein, 216 aa, Unknown
  Obtained from environmental sample
  DOMAIN (17)...(98): OB-fold nucleic acid binding domain
  misc_feature (1)..(216): Xaa is any amino acid
MADLKSGGLARAAKGSYTVIGQLSGLRESRDKNGEEMAFGAIQDFEGEIDLVFWAKTWKESRELLNLGEFVALKGNLDPEKDRNPQKPSLKVSKVDDLAALSRSAARKAEAGEQPKVPPLEIPAKNENSTNTEQSAAPLNEIHIRLEDGAADRDESIQPLGNYLMGNPGPCPVFIHIGEKIIRAKKGLSLEAEKEALGVLEGXYRXLPGHGEEQCK

SEQ ID NO: 20015 - DNA, 945 bp, Unknown
  Obtained from environmental sample
  misc_feature (1)..(945): n is a, c, g, or t
atgccgttggatttgacttggcaacgcatggggcttcctggcacccctaatcattttttggtggatttttacttaaatggttcttacaaaggcatttatcaattaacagacatagttcaagttaataaaggtagagtggaagtggacgaaaaagaaggctggcttgctgaatttgattatcattgcccaagcgatgcagacgaagttgattttaacaccgattatccatcaaacgctaagttgcatacatacataaagtcaccagagaccaactacgattttgtgaaaaaggacttaaataaccttacgaccactatgtttaataaatctggttttccagaaaatggataccgcgatttaatagacttggagagcatggcaaagtatgtgctgattcagatgtttatggacaattttgatttcaacaacaaagctatggcggcaggtactgcagtgggaggcagcaatgtagcacagcctggttccaactttatgcacaaagacaaaggtaaaaaaatggttgccggacctctttgggacttggatttatccgctggcgtggacaatcagcagaattttccaaagcactatcagtactataattacccaataaagcccaagcatccgttttatttgaaattctttgatgaccccgtgtttttagctaaatggaaaaagaactgggataaatatctaaacgatttcagagatatgacaagagttatggattccatagctacttatgcagaaggttctgtagaaaagaatttcgcgttgcnaaatggtggcggtaatactcagccttgcactaatcctatggggtgcggtggtggctttgggggcatgaatccagaagctccagcaactaagtcagcatacaaagacgaagttggcaagttaaagacttggtggaataatagaattagtttncttccagcagactaa

SEQ ID NO: 20016 - protein, 314 aa, Unknown
  Obtained from environmental sample
  misc_feature (1)..(314): Xaa is any amino acid
MPLDLTWQRMGLPGTPNHFLVDFYLNGSYKGIYQLTDIVQVNKGRVEVDEKEGWLAEFDYHCPSDADEVDFNTDYPSNAKLHTYIKSPETNYDFVKKDLNNLTTTMFNKSGFPENGYRDLIDLESMAKYVLIQMFMDNFDFNNKAMAAGTAVGGSNVAQPGSNFMHKDKGKKMVAGPLWDLDLSAGVDNQQNFPKHYQYYNYPIKPKHPFYLKFFDDPVFLAKWKKNWDKYLNDFRDMTRVMDSIATYAEGSVEKNFALXNGGGNTQPCTNPMGCGGGFGGMNPEAPATKSAYKDEVGKLKTWWNNRISXLPAD

SEQ ID NO: 20017 - DNA, 870 bp, Unknown
  Obtained from environmental sample
  misc_feature (1)..(870): n is a, c, g, or t
ttgggaagcagagaaatgttacgcgcgattatagcgtcgtccgcaactaccctttgcgttttcattcctcttattatttataaaaacgacttaaaagaaatggggctgatgttcagcgatcttatttttacggtagtaatatcgcttacagtctcgctctttgtggcgattacccttgtcccaagcctttcaggcgcggtattaaaactcaatacaagaattcaaaaaccgataaaaaaccgtatccttcgcctgattgacgataaaacggaatctttcttatgcgccatggaagataaataccatacggcacttgagttctgtctttcgcacaggcttataatcgtcctgcttgtcgtctcgctccttgctttctcccttaggcaatttacgggcggaatgaatatgtatgtccgcatgagaacggacgacaatgtgtcaattaatgtcgctatgccgcggggaaccgccattgaagttaccgaaaaaacgttatttgacattgaggaaattattaaagaagaagtacagggctatataaatatagttcttacggcgacgcgcagcggaaacaaccagggttcgatacagattaccctgcctcctccggcaaaacaaatcgacactcccgacacaattattcgcaaacttactccgtatctgaatacaattcccggctcaagaataagtttcagggcggggcgcggagtcggaaccgccgatcccattgaaattgccgtaagctcaaggaattataacgatattatggctacagccgaagatattcaaaatataatgagaaaataccttcctgaaattgaaaaaccccgtgataaacgtagacgagggagcgccccagcttcagattga

SEQ ID NO: 20018 - protein, 289 aa, Unknown
  Obtained from environmental sample
  misc_feature (1)..(289): Xaa is any amino acid
MGSREMLRAIIASSATTLCVFIPLIIYKNDLKEMGLMFSDLIFTVVISLTVSLFVAITLVPSLSGAVLKLNTRIQKPIKNRILRLIDDKTESFLCAMEDKYHTALEFCLSHRLIIVLLVVSLLAFSLRQFTGGMNMYVRMRTDDNVSINVAMPRGTAIEVTEKTLFDIEEIIKEEVQGYINIVLTATRSGNNQGSIQITLPPPAKQIDTPDTIIRKLTPYLNTIPGSRISFRAGRGVGTADPIEIAVSSRNYNDIMATAEDIQNIMRKYLPEIEKPRDKRRRGSAPASD

SEQ ID NO: 20019 - DNA, 591 bp, Unknown
  Obtained from environmental sample
  misc_feature (1)..(591): n is a, c, g, or t
atgtctgtgggcggtcttatttggtttgattttttaaatgttatagacgctaaaggtattcttgcccctatttacgcccgcgttccatttttacctaagatactcaaaatacccggagtgagcagaactcagccgaaaacaaaatctgatgaaatactcgatctaaacaacgaaaggcttgcggtaaggctggaagctcttgaattcctgagacaggaaatggaaacgcaaaagcgggatttggagaaccagaacggggaaattgagcagaaggcgcaggagcttgaagaacgtcagaaagcgcttgacgaacaggaaaattccctcagagtgaaggcgcaggatgccgaaaataaggataggaatgtcgagcagaatgcccggtatctgacaggtatgccgccgcaaaatgcggttgatataattgccaagctggatgatcaggatgcgatagacgttctccgaaagaccgaggaaattgcgaagaccgaaggtacggtttcaatcgtatcattctggttctcgctgatggaaccgggtagggcggctgaactgcaaagaaaaatggcaagcaggccttcccaactttaa

SEQ ID NO: 20020 - protein, 196 aa, Unknown
  Obtained from environmental sample
  misc_feature (1)..(196): Xaa is any amino acid
MSVGGLIWFDFLNVIDAKGILAPIYARVPFLPKILKIPGVSRTQPKTKSDEILDLNNERLAVRLEALEFLRQEMETQKRDLENQNGEIEQKAQELEERQKALDEQENSLRVKAQDAENKDRNVEQNARYLTGMPPQNAVDIIAKLDDQDAIDVLRKTEEIAKTEGTVSIVSFWFSLMEPGRAAELQRKMASRPSQL

SEQ ID NO: 20021 - DNA, 651 bp, Unknown
  Obtained from environmental sample
  misc_feature (1)..(651): n is a, c, g, or t
gtgtctacttatgaaaccaatgttataggaactgtaaatattcttgaagcaatacgtttaacatcatcagtgaaatcatttgtaaatgttaccactgataaagtgtatgaaaacacggagcgagacagcggataccgtgaaaatgaaaatttatgcggacatgatccatattccaacagcaagtcatgcagtgagttggtaacatatagttatcgtaattctttttttaataatgttaactctcctgctatttctacggcgcgttcaggtaatgtcataggcggcggcgattacgctgtggatagaattattcccgattgtattagggcagtaattgaaaaaaaagaaataattgtgcgtaatccgcattctatccgcccctaccagcatgtattggaatgtctttgtggttatctggttttggcggagaaacaatataacgataaatcgcttcaaggggcgtataactttggtcccgatgacgaaagctgtattaccaccggagaccttgccgggcttttttgcgaggcttggggttcaggcgctacttggcaggttcaaggagacggcggtcctcatgaggcgaattttttgaaactgagattgttcaaaagcaaaaaccgtattaggtggaaaccatatggaacataa

SEQ ID NO: 20022 - protein, 216 aa, Unknown
  Obtained from environmental sample
  misc_feature (1)..(216): Xaa is any amino acid
MSTYETNVIGTVNILEAIRLTSSVKSFVNVTTDKVYENTERDSGYRENENLCGHDPYSNSKSCSELVTYSYRNSFFNNVNSPAISTARSGNVIGGGDYAVDRIIPDCIRAVIEKKEIIVRNPHSIRPYQHVLECLCGYLVLAEKQYNDKSLQGAYNFGPDDESCITTGDLAGLFCEAWGSGATWQVQGDGGPHEANFLKLRLFKSKNRIRWKPYGT

SEQ ID NO: 20023 - DNA, 714 bp, Unknown
  Obtained from environmental sample
  misc_feature (1)..(714): n is a, c, g, or t
gtggatattactactactggagatcaaacatataacggagcggtaacgcttggcggaactattaatttagatggacaagttataacgcttggaacaattacaggaaatacaaattcattgacaattacaggtaacgctgttttaaatggcgggagcgatattaataatttatcagtaaccggcacttctgctattaacgcggatattaacaccaccggaatacaaaattacggaaacggaaacgtaacgcttggcggtacgggaacaataacattgacaggttcaactataacgcttggagcaattacaggaaattcacattcgttaacgataacaggcagcggcgttttaaacggcggaagcgatattaatgttttaacattaaacggaactgcaactcttaacgcggatattactactacaggaaatcaaacatatacaggagcggtaacgcttggcggtactggtacgcggacattacagggaacaaccgtaatacttggagggggtattataggatcgggattatcattaacaattacaggcaacgctgttttaaacggcgggagcggtattgataaattatcagtatctggcacttncactattaacgctaatattacctctacaggagatcaaacatataacggagcggtaacgcttgacaatgatgtaaactttancagcgatgcgggcagtaatatagatttttaa

SEQ ID NO: 20024 - protein, 237 aa, Unknown
  Obtained from environmental sample
  misc_feature (1)..(237): Xaa is any amino acid
MDITTTGDQTYNGAVTLGGTINLDGQVITLGTITGNTNSLTITGNAVLNGGSDINNLSVTGTSAINADINTTGIQNYGNGNVTLGGTGTITLTGSTITLGAITGNSHSLTITGSGVLNGGSDINVLTLNGTATLNADITTTGNQTYTGAVTLGGTGTRTLQGTTVILGGGIIGSGLSLTITGNAVLNGGSGIDKLSVSGTXTINANITSTGDQTYNGAVTLDNDVNFXSDAGSNIDF

SEQ ID NO: 20025 - DNA, 321 bp, Unknown
  Obtained from environmental sample
  misc_feature (1)..(321): n is a, c, g, or t
gtggaagagatttttgtaaacattgcgaattacgcctacgccgccgacggcggcgacagccctggcaccggagacggcggcgccgatggcgccgttgtcatatttatttccgtcaccgataaaatcgtcatcaggtttgaagacacgggcaaatcttataaccctcttgagaatcccgatccggatctggacaaaccgctgatggaacgcgatataggcggattgggcgttttccttgtaaagaagatgatggacaatgtggagtacagccgcgttgggaatagaaatgttcttgttatgaccaagggaatggagaattga

SEQ ID NO: 20026 - protein, 106 aa, Unknown
  Obtained from environmental sample
  misc_feature (1)..(106): Xaa is any amino acid
MEEIFVNIANYAYAADGGDSPGTGDGGADGAVVIFISVTDKIVIRFEDTGKSYNPLENPDPDLDKPLMERDIGGLGVFLVKKMMDNVEYSRVGNRNVLVMTKGMEN

SEQ ID NO: 20027 - DNA, 372 bp, Unknown
  Obtained from environmental sample
  misc_feature (1)..(372): n is a, c, g, or t
gtgctgcgcaggttcgaggctattgactcaggcgtaaagacggtggcggatcaggaagagaatatccgcaacgctatggaagaacagggcgaagggagcaaacaagtcctgaatggcgtcagcagtttgaatgagcttacccaaaatgtaagtagcagttccgaggaaatgctgaacggcagccaggaagttgtaagagaaagccagaatctggaaaaggtaactcaggagataacaggcggtatgaacgaaatgtctaccggagcggagcaaataaacctagctgtaaataatatcaacgagatgaccgccaaaaaccgcgaagctatcaacgatttgttaaaagaggtttcgcgtttcaaagtggagtaa

SEQ ID NO: 20028 - protein, 123 aa, Unknown
  Obtained from environmental sample
  misc_feature (1)..(123): Xaa is any amino acid
MLRRFEAIDSGVKTVADQEENIRNAMEEQGEGSKQVLNGVSSLNELTQNVSSSSEEMLNGSQEVVRESQNLEKVTQEITGGMNEMSTGAEQINLAVNNINEMTAKNREAINDLLKEVSRFKVE

SEQ ID NO: 20029 - DNA, 903 bp, Unknown
  Obtained from environmental sample
  misc_feature (1)..(903): n is a, c, g, or t
atggatcagaatcggcacnagntgacaatcaagggtggcgatataaagagccaaacaaaaaccaatttgcaagactgggttgaagggcaaacaatttccaaagactggaagctggtaaaaattccattgaagaaattccaagatgcgggcaagtattgggatgccaacaaggggggagaagttaccaaaaacgtgcagtggaacaaaattcaggaagttcgtttttcagttggcaaagcagataacaaacgcgatggccgccaagacgaccctgtaactatatatgttgaccaaatcacctttaccgaaaacatagactgggtggatccagatttaaaatgggattctttcaaaagcaatgcgccagatttggttttgcacgattttgaaaacaaccctggttttgaaccatccacaggtccaaagtccaaagtatcttttgatatcagcaaaggtcatttagacggcaagtctttaaatgtttctcattatatgctgggcgactgggttgacattgtttatgattttgaaaagcagaaagcgaaaaaagagctcacagactggacaaagcactggggtattatgtttgatatttacacagataaggcttggcagggcataacagttcaagtaggtgataaaggcagggaaatttttgttagtagcactggtgcgccaagaggcaaaagcacagttattgttcctttccgttcattcacaaaattcccgtattatcaaccacctgaggcaattcaaaacggtacttttgatttagacggagtaaaagttttggactttaaacccagcggagaaagctccgaaagttctttccaaatagacaacgtgaagctcaccaatttgcgtgaagtgccgcgtccaaaattccagaaagtgccagcttaa

SEQ ID NO: 20030 - protein, 300 aa, Unknown
  Obtained from environmental sample
  DOMAIN (120)...(295): Carbohydrate binding domain (family 11)
  misc_feature (1)..(300): Xaa is any amino acid
MDQNRHXXTIKGGDIKSQTKTNLQDWVEGQTISKDWKLVKIPLKKFQDAGKYWDANKGGEVTKNVQWNKIQEVRFSVGKADNKRDGRQDDPVTIYVDQITFTENIDWVDPDLKWDSFKSNAPDLVLHDFENNPGFEPSTGPKSKVSFDISKGHLDGKSLNVSHYMLGDWVDIVYDFEKQKAKKELTDWTKHWGIMFDIYTDKAWQGITVQVGDKGREIFVSSTGAPRGKSTVIVPFRSFTKFPYYQPPEAIQNGTFDLDGVKVLDFKPSGESSESSFQIDNVKLTNLREVPRPKFQKVPA

SEQ ID NO: 20031 - DNA, 537 bp, Unknown
  Obtained from environmental sample
  misc_feature (1)..(537): n is a, c, g, or t
ttgagaaaaccggcaaaatcctgtaaacttaagaccatgcgtgatattaccaaagatcaagtattaaaaataatggatagttacgggaacgatccccagcagttgatagccgtattattggacattcaggccgcgtccggaaaaaactgcgtggaaaaacagtgggcggaattggcctccgtcgtcctgaacgtccctctttccaaaatattcgacgtgcttactttttacgccatgttcagcacacagccgcgcggcgaatatgtaatcgaaatttgcagaagcgccccctgcttcttttcccgttcgtctgaagccgtggaatggtttgaaaaagcggcaggcgtcaaagtagggcagaccactgcggacggcaaaataaccctgttttacacaagctgtgtgggttcctgcgacataggccctgtggcgaaaatcggcgacgatgtgttcggcaatttaaccgaagacaaggtgaaattgttggtagaacgctgccgcgaaggaaaggagctgttatcgttatgtcaaaactaa

SEQ ID NO: 20032 - protein, 178 aa, Unknown
  Obtained from environmental sample
  DOMAIN (12)...(167): Respiratory-chain NADH dehydrogenase 24 Kd subunit
  misc_feature (1)..(178): Xaa is any amino acid
MRKPAKSCKLKTMRDITKDQVLKIMDSYGNDPQQLIAVLLDIQAASGKNCVEKQWAELASVVLNVPLSKIFDVLTFYAMFSTQPRGEYVIEICRSAPCFFSRSSEAVEWFEKAAGVKVGQTTADGKITLFYTSCVGSCDIGPVAKIGDDVFGNLTEDKVKLLVERCREGKELLSLCQN

SEQ ID NO: 20033 - DNA, 417 bp, Unknown
  Obtained from environmental sample
  misc_feature (1)..(417): n is a, c, g, or t
atgattgattgtctgaatatggcaataaaattatacaaggattttttaaaagaggtgtttccagagcacgagaaggttcgcaaggtttctcttaatgctgggtttagttgccctaatttggatgggacggttgggaaaggggggtgcgcttattgcgataataagtcttttagcacggtggctacatccgagctttctgttatggagcagttggaagatggcatgagaggtgccaagaactgcgggattctcgcttattttcagagctacactaatacgcacgctcctgtggaaaagctccgcgaggtttttatgcctgtgattatgcacagcagggttatagggatttccgttggaacgcgcccggattgtttgagccacgaagttgtaagtttgcttgctgacctaacaaaataa

SEQ ID NO: 20034 - protein, 138 aa, Unknown
  Obtained from environmental sample
  misc_feature (1)..(138): Xaa is any amino acid
MIDCLNMAIKLYKDFLKEVFPEHEKVRKVSLNAGFSCPNLDGTVGKGGCAYCDNKSFSTVATSELSVMEQLEDGMRGAKNCGILAYFQSYTNTHAPVEKLREVFMPVIMHSRVIGISVGTRPDCLSHEVVSLLADLTK

SEQ ID NO: 20035 - DNA, 441 bp, Unknown
  Obtained from environmental sample
  misc_feature (1)..(441): n is a, c, g, or t
gtggcggcgcacgaggtggggcacgctattcagcatgcgcagaattattttcctatgtgggttcgttctactattgttcctttggcaaatatagggagcaatttgggacctttgatcattattgtgggtattatgcttggggctggggcagaagttaattcggggctggggcactttattgctgctcttggggttgctctgtttgctatggcaaccgcttttactttggtaaccgttcccgttgagttcgatgcttctgcgcgggcaaagcggcagttggagaatttgagcattgttaggccgggcaccgaggctaatactgtttcttctgttttaaccgccgcgggcctcacttatgtggcggcggctatcaattccattgctatgcttttgtactgggcttataaagccggtttgataggcggcaggcggaatgattga

SEQ ID NO: 20036 - protein, 146 aa, Unknown
  Obtained from environmental sample
  DOMAIN (2)...(141): Putative neutral zinc metallopeptidase
  misc_feature (1)..(146): Xaa is any amino acid
MAAHEVGHAIQHAQNYFPMWVRSTIVPLANIGSNLGPLIIIVGIMLGAGAEVNSGLGHFIAALGVALFAMATAFTLVTVPVEFDASARAKRQLENLSIVRPGTEANTVSSVLTAAGLTYVAAAINSIAMLLYWAYKAGLIGGRRND

SEQ ID NO: 20037 - DNA, 867 bp, Unknown
  Obtained from environmental sample
  misc_feature (1)..(867): n is a, c, g, or t
gtgggcgggtttcggttggagcttatacgtgagataccggaggtgcgcggcgccgggtatcagtttgttcacgccaagacgggggcgcggctcattcacctgttcaatgacgacgacaacaacctcttctccatcgccttccgtacgcctgtgagcgacagtacgggcgtgcctcacatcttggagcactccgtactctgcgggtccaagcgttttccggtgaaagacccgtttcaggagatgctcaaggggtcgctgcaaacctttctgaacgcaatgacctaccccgacaagaccgtctacccggtctcctcgcaggtcgagaaagatttctataacttggtggacgtctactgcgacgcggtcttgaatccgcttcttaccgagaataccttctatcaggaggggtggcactacgaccttgagagtcccgacgaccctatcgggataaaggggatagtctacaacgagatgaagggcgttttctccgacttttcgagccatgtggggcgggggatcacatcaaagctgttcccggacaccacgtatttccacgagagcggcggggatccggagcatataacggatcttacatacgagcagttcaaagacttccataggcaattctaccatccctcgaactcgttcatattcgtctacgggaacataccctccgagaagacgcttaattttatagacgagaggtatttgcgggagtttgacgcccagcccgtagactcgtcggtcgcgccgcagccgttgtgggatgagccgcggtcggtggtaatggaggctccggccccgtctttcgaggaggaggggagcgtttcggtggtctgctcgtggatagtgggtcaaagcgtctga

SEQ ID NO: 20038 - protein, 288 aa, Unknown
  Obtained from environmental sample
  misc_feature (1)..(288): Xaa is any amino acid
MGGFRLELIREIPEVRGAGYQFVHAKTGARLIHLFNDDDNNLFSIAFRTPVSDSTGVPHILEHSVLCGSKRFPVKDPFQEMLKGSLQTFLNAMTYPDKTVYPVSSQVEKDFYNLVDVYCDAVLNPLLTENTFYQEGWHYDLESPDDPIGIKGIVYNEMKGVFSDFSSHVGRGITSKLFPDTTYFHESGGDPEHITDLTYEQFKDFHRQFYHPSNSFIFVYGNIPSEKTLNFIDERYLREFDAQPVDSSVAPQPLWDEPRSVVMEAPAPSFEEEGSVSVVCSWIVGQSV

SEQ ID NO: 20039 - DNA, 951 bp, Unknown
  Obtained from environmental sample
  misc_feature (1)..(951): n is a, c, g, or t
gtggccgagttcgtgacgcccaacgaactagccaatatgatgaacgtcacccctaacgacgtgataacgaagtgctggaatttgggcatgttcgtcaccataaaccagcggctcgactttgagaccatagaactcgtggtggacgagttcggctacacggcaagcctgatggaggagtacgttccgagcgacgatataagcgccgaagcggacgaagtgtccggtgcgcttttgccacgcgcgccggtggtgacggtgatggggcacgtcgaccacgggaagacctccctgctcgactacataaggaagacaaacgtgatagccggggagtcgggcgggatcacgcagcatatagcggcgtacgaggttaagacgaagcagggccccgtgaccttcctcgacacgcctggccacgaggcctttaccgcgatgcgagccaggggttcgcagatcacggacgtcatagtgctggtggtggccgccgactccgcagtgatgccgcagacgcgggaggccatagaccacgcgaaggcggcgagcgtgccgctggtggtggccatcaacaagatcgacctgccaacggcgaatcctgagaagatcaagggcgaacttgccagttacaacgtgctggtggaggagtacggcgggcagacctcctgcgtggaaatatcggcgaagaccggtcaaggtatcgatagattgcttgaagtgctggccctggagactgaaatattggagttgaaagcgaccccggagggacgcgcgcacggcgtggtcatcgaggcggaactcgacaaaggcaaaggccccatcgccacagtattgatacagaggggcacgctcaagaaggggaacgccttcgtgacgggcatccacagcgggcgcgtgcgggagctgcacaacgagcgcggctccatagtggaaaacgcgggcccgagccagccggtatga

SEQ ID NO: 20040 - protein, 316 aa, Unknown
  Obtained from environmental sample
  DOMAIN (82)...(191): GTPase of unknown function
  misc_feature (1)..(316): Xaa is any amino acid
MAEFVTPNELANMMNVTPNDVITKCWNLGMFVTINQRLDFETIELVVDEFGYTASLMEEYVPSDDISAEADEVSGALLPRAPVVTVMGHVDHGKTSLLDYIRKTNVIAGESGGITQHIAAYEVKTKQGPVTFLDTPGHEAFTAMRARGSQITDVIVLVVAADSAVMPQTREAIDHAKAASVPLVVAINKIDLPTANPEKIKGELASYNVLVEEYGGQTSCVEISAKTGQGIDRLLEVLALETEILELKATPEGRAHGVVIEAELDKGKGPIATVLIQRGTLKKGNAFVTGIHSGRVRELHNERGSIVENAGPSQPV

SEQ ID NO: 20041 - DNA, 873 bp, Unknown
  Obtained from environmental sample
  misc_feature (1)..(873): n is a, c, g, or t
gtgcagctcccgcacgcgcccgctgtggatgcccgtcacgaaggcgttccccttcttgagcgtgcccctctgtatcaatactgtggcgatggggcctttgcctttgtcgagttccgcctcgatgaccacgccgtgcgcgcgtccctccggggtcgctttcaactccaatatttcagtctccagggccagcacttcaagcaatctatcgataccttgaccggtcttcgccgatatttccacgcaggaggtctgcccgccgtactcctccaccagcacgttgtaactggcaagttcgcccttgatcttctcaggattcgccgttggcaggtcgatcttgttgatggccaccaccagcggcacgctcgccgccttcgcgtggtctatggcctcccgcgtctgcggcatcactgcggagtcggcggccaccaccagcactatgacgtccgtgatctgcgaacccctggctcgcatcgcggtaaaggcctcgtggccaggcgtgtcgaggaaggtcacggggccctgcttcgtcttaacctcgtacgccgctatatgctgcgtgatcccgcccgactccccggctatcacgtttgtcttccttatgtagtcgagcagggaggtcttcccgtggtcgacgtgccccatcaccgtcaccaccggcgcgcgtggcaaaagcgcaccggacacttcgtccgcttcggcgcttatatcgtcgctcggaacgtactcctccatcaggcttgccgtgtagccgaactcgtccaccacgagttctatggtctcaaagtcgagccgctggtttatggtgacgaacatgcccaaattccagcacttcgttatcacgtcgttaggggtgacgttcatcatattggctag

SEQ ID NO: 20042 - protein, 290 aa, Unknown
  Obtained from environmental sample
  misc_feature (1)..(290): Xaa is any amino acid
MQLPHAPAVDARHEGVPLLERAPLYQYCGDGAFAFVEFRLDDHAVRASLRGRFQLQYFSLQGQHFKQSIDTLTGLRRYFHAGGLPAVLLHQHVVTGKFALDLLRIRRWQVDLVDGHHQRHARRLRVVYGLPRLRHHCGVGGHHQHYDVRDLRTPGSHRGKGLVARRVEEGHGALLRLNLVRRYMLRDPARLPGYHVCLPYVVEQGGLPVVDVPHHRHHRRAWQKRTGHFVRFGAYIVARNVLLHQACRVAELVHHEFYGLKVEPLVYGDEHAQIPALRYHVVRGDVHHIG

SEQ ID NO: 20043 - DNA, 306 bp, Unknown
  Obtained from environmental sample
  misc_feature (1)..(306): n is a, c, g, or t
ttgatcttctcaggattcgccgttggcaggtcgatcttgttgatggccaccaccagcggcacgctcgccgccttcgcgtggtctatggcctcccgcgtctgcggcatcactgcggagtcggcggccaccaccagcactatgacgtccgtgatctgcgaacccctggctcgcatcgcggtaaaggcctcgtggccaggcgtgtcgaggaaggtcacggggccctgcttcgtcttaacctcgtacgccgctatatgctgcgtgatcccgcccgactccccggctatcacgtttgtcttccttatgtag

SEQ ID NO: 20044 - protein, 101 aa, Unknown
  Obtained from environmental sample
  SIGNAL (1)...(26)
  misc_feature (1)..(101): Xaa is any amino acid
MIFSGFAVGRSILLMATTSGTLAAFAWSMASRVCGITAESAATTSTMTSVICEPLARIAVKASWPGVSRKVTGPCFVLTSYAAICCVIPPDSPAITFVFLM

SEQ ID NO: 20045 - DNA, 813 bp, Unknown
  Obtained from environmental sample
  misc_feature (1)..(813): n is a, c, g, or t
atgattgtaagcggcgacgacggcaaactttcgttgctgccgataccgagactcagcctttacgcctttgacgcctggtacacggcgcccacgggcggcgagaaggtaacgctgaatacggtgtttaccggagacgcggcggtctttgcccgttggatccctctctacattataaggttcaacgccaacggcggcacggtttccatcgcggcggacacaaccggcgcggacggaaaattggcggctctgcctacgcctgtccccgccaacaacggcgagacgttcaagggttggttcaccgcgctggcgagcggcgagagggtgacggcaagcacggtgttcaccggcgacgccacgctctacgcccagtggtcgccagcggctgtatcgtacactgtgacgttcaaccccaacggcggtttggtaaatccgacctcccgcgtaacgaccggcgacggaacgctcgcggcgctgccgataccggcgagagagaattacgcctttaccggctggttcacgtcggcgacggtaggcagcacggaggtgacgacggattacgtgttcaccggaaacacgacgatctacgcccgttggacgcctatctatacggtaacgttcaaccccaacaacggcactgtcaacccgacgtcggctaaggtcaacatcgaagggttgattgaaggaacattgcctacgcctacaagggccggttacaagttcgacggctggttcacgacgtcngcggcgaccggcggtttggaggtgacggaggattacgtgttcagcgcgaacaccaccatctacgctcggtga

SEQ ID NO: 20046 - protein, 270 aa, Unknown
  Obtained from environmental sample
  misc_feature (1)..(270): Xaa is any amino acid
MIVSGDDGKLSLLPIPRLSLYAFDAWYTAPTGGEKVTLNTVFTGDAAVFARWIPLYIIRFNANGGTVSIAADTTGADGKLAALPTPVPANNGETFKGWFTALASGERVTASTVFTGDATLYAQWSPAAVSYTVTFNPNGGLVNPTSRVTTGDGTLAALPIPARENYAFTGWFTSATVGSTEVTTDYVFTGNTTIYARWTPIYTVTFNPNNGTVNPTSAKVNIEGLIEGTLPTPTRAGYKFDGWFTTSAATGGLEVTEDYVFSANTTIYAR

SEQ ID NO: 20047 - DNA, 486 bp, Unknown
  Obtained from environmental sample
  misc_feature (1)..(486): n is a, c, g, or t
gtgaattccaccggctcttccctgctctggtcatccaatttttccctcggggtaaatcttttttaccgtatagcatgttatgccgcacgcctggcggacccatttaaggagtatgatgtggcgggttttgaaacccaccacaacaacaaagcggacagcccttcaggtaccgcaaagaccctggttgatttggtgttgggtcagatgaccaggaaaaagagagctgtgtaccagacgctggaaagaaaaccggaagaggatgagcttcactttgccagcctccgcctcggttcagtgccgggaacgcacagccttatctttgattcaaacgcggataccatcgagataacgcacacagccaggaaccgcgaaggctttgcggcgggcgcggttatggcggcagaatggcttaccgcccaaaaacgtacaggaatttttacaatggacgatgttttaaacaatgtcctaaaggaactactaaaatga

SEQ ID NO: 20048 - protein, 161 aa, Unknown
  Obtained from environmental sample
  DOMAIN (17)...(153): Dihydrodipicolinate reductase, C-terminus
  misc_feature (1)..(161): Xaa is any amino acid
MNSTGSSLLWSSNFSLGVNLFYRIACYAARLADPFKEYDVAGFETHHNNKADSPSGTAKTLVDLVLGQMTRKKRAVYQTLERKPEEDELHFASLRLGSVPGTHSLIFDSNADTIEITHTARNREGFAAGAVMAAEWLTAQKRTGIFTMDDVLNNVLKELLK

SEQ ID NO: 20049 - DNA, 342 bp, Unknown
  Obtained from environmental sample
  misc_feature (1)..(342): n is a, c, g, or t
atggcttaccgcccaaaaacgtacaggaatttttacaatggacgatgttttaaacaatgtcctaaaggaactactaaaatgaaagatttatcaggcgcatataccgctcttgttacccccatgaaagaaaacggagacgtggactatgacggcttcaggaggctgattaatttccagcttgagcagggaatagacggcctggtcccccttggtaccaccggggagacccccacactggacgaagatgaagaagaaaagctcatccgcatagcagtcgatgaggttaagggcgctgtcccttttaatatcggatcaggatcaacgacaccaggcacatggtga

SEQ ID NO: 20050 - protein, 113 aa, Unknown
  Obtained from environmental sample
  misc_feature (1)..(113): Xaa is any amino acid
MAYRPKTYRNFYNGRCFKQCPKGTTKMKDLSGAYTALVTPMKENGDVDYDGFRRLINFQLEQGIDGLVPLGTTGETPTLDEDEEEKLIRIAVDEVKGAVPFNIGSGSTTPGTW

SEQ ID NO: 20051 - DNA, 834 bp, Unknown
  Obtained from environmental sample
  misc_feature (1)..(834): n is a, c, g, or t
gtgttttccgccctgagatgggcaaggatgaatccgcgccctgaaaattcttacgccgcctccaacttgccggtaatttccaacgcgtcagcccatcgctggactgacgacgtgccggtgcttgttgccgaagtgaaccaccagcacacggaaattattcccacccagcggaaaaagcgcggctgggacaagggtttcatagcggtaaaacctaactgctccatacaatgctacaccacggcgctttacgcgctgataagtgcaggttacgaaatcaggcggcttatcgtttctacccttcaggctgtgtcaggcgcgggctatcccggcgtcgccagccttgacatgatcgacaatgtcgtcccttacatcggcggggaggaagaaaaatcagagctggagccgcttaaaattctgggcacgatcgaggggggcgtttttaaaaacgcagtttttccgaaaatctcagcccattgtaaccgagtcccggtaaccgatgggcacatagcctgcgtcagcctggagttcggtgaaaagaaaccttctatagaagaagtaaaaaaaatctggactaattttacaagccttccacaagagctgaacttcccgatggccccccagcggcccatcattgtccgggaagaaaacaaccgcccccagccacggaaggacagggacactgacaaggctatggcggttacaatcgggaggatcagaccctgcaatgtctttgatctccgcttcgtgggcctgtcccacaacactgtgcgcggcgcggcaggcggcggcatacttaacgcggaactcttaaaacgcaaggggtatctggactga

SEQ ID NO: 20052 - protein, 277 aa, Unknown
  Obtained from environmental sample
  DOMAIN (82)...(257): Semialdehyde dehydrogenase, dimerisation domain
  misc_feature (1)..(277): Xaa is any amino acid
MFSALRWARMNPRPENSYAASNLPVISNASAHRWTDDVPVLVAEVNHQHTEIIPTQRKKRGWDKGFIAVKPNCSIQCYTTALYALISAGYEIRRLIVSTLQAVSGAGYPGVASLDMIDNVVPYIGGEEEKSELEPLKILGTIEGGVFKNAVFPKISAHCNRVPVTDGHIACVSLEFGEKKPSIEEVKKIWTNFTSLPQELNFPMAPQRPIIVREENNRPQPRKDRDTDKAMAVTIGRIRPCNVFDLRFVGLSHNTVRGAAGGGILNAELLKRKGYLD

SEQ ID NO: 20053 - DNA, 774 bp, Unknown
  Obtained from environmental sample
  misc_feature (1)..(774): n is a, c, g, or t
gtgccgattaaaaggattgcgcttaacgtggtgagtcatgccgtttttctggggattgttttttcaggtggttatctgggaattgacccttcgataaaaggaagcctgtttctggcggccctgtccttcgggatgctggtggggacttttgtgtatgtggcgggagacggccttgtctcccgtaccctgcttgcccacaattttaccaggtatccccccgactgccgggaaaaacggcaggaagcaaaggcatggatcattcctattatggcaattctgttaaccctcttttttacctattccgttaccatgctcggtattcataagaccggggggactctggacgcgatgaaaggaagcgcactgtcatcaatatggttcccgttagttgttttttttatcagcgtttccgccctggccttcaccctaaaaaggaactcgggggttatttacacttcggtaatcgcgcagcttgaaaatctttcttccgagcagaaggaccttacaaagagaatatcaatttgttccgtggatgagctcggtacaatcgccggcatggtgaacgctttttgcgaacaccttggcggcggtataaaaaacatcaggaacgaaacggatgttttgtctgacattggcattgacctttcttccaacatgaatgacaccgccgccgcggtgaaccagattaccgccaatgtgcaaagcatcaaaagccgtataataaaccagagcgccagcgtaagcgaaacccacgctacaatggaacagctgtag

SEQ ID NO: 20054 - protein, 257 aa, Unknown
  Obtained from environmental sample
  misc_feature (1)..(257): Xaa is any amino acid
MPIKRIALNVVSHAVFLGIVFSGGYLGIDPSIKGSLFLAALSFGMLVGTFVYVAGDGLVSRTLLAHNFTRYPPDCREKRQEAKAWIIPIMAILLTLFFTYSVTMLGIHKTGGTLDAMKGSALSSIWFPLVVFFISVSALAFTLKRNSGVIYTSVIAQLENLSSEQKDLTKRISICSVDELGTIAGMVNAFCEHLGGGIKNIRNETDVLSDIGIDLSSNMNDTAAAVNQITANVQSIKSRIINQSASVSETHATMEQL

SEQ ID NO: 20055 - DNA, 300 bp, Unknown
  Obtained from environmental sample
  misc_feature (1)..(300): n is a, c, g, or t
gtgcgcgacggcaaagtggtggcctttggcaagggcatggactgccacaaagcgaattgtgagtacgtcggcctagcccgcatccaaggcaactttatcgccgagtgcaagcagcatttggaagctatggcggccaaccaaaggcatggcgactggtgggagcagatactgtacgacatggttaacacccgcccaatctgggcagttgacatagccgggcagttttgggccgaggtggatttcattgaggactacgaccgcattttgaactacgtaaaacagaagaaaggcaaatattga

SEQ ID NO: 20056 - protein, 99 aa, Unknown
  Obtained from environmental sample
  misc_feature (1)..(99): Xaa is any amino acid
MRDGKVVAFGKGMDCHKANCEYVGLARIQGNFIAECKQHLEAMAANQRHGDWWEQILYDMVNTRPIWAVDIAGQFWAEVDFIEDYDRILNYVKQKKGKY

SEQ ID NO: 20057 - DNA, 891 bp, Unknown
  Obtained from environmental sample
  misc_feature (1)..(891): n is a, c, g, or t
gtgctatgccacgaagacggcacaggtttccaagcggcccgaaccagggggcttgttgaggccaagggcgtatttgtcacattcattgacgcagatgattacattttccccggcatgtttggcgcgatgcacgaaagggccgtagagcaaaacctcgatatcctgtgctgcggcgccaaaaaggacttgggcggacaagatataggacagatggacgactacgcaaaatttgaagacgaattgtttgttgtcgctccacataaccagcgcgactacatgtacaaattggccttgaatggtagagctatattgccgtggggaaaattttacaggcgcagctttttggaagaaaagcaactgcgctttcacccagaggcttacgcagatgatactgtcttcaatttcaattgctattcaaaagcaacgcgagttgcaacaatgtccggccaatattatgtatggtatgatcgccctggctcgcgcctctatacatccaacatatcagacgttgagaggagcgcagaaataatctggacgctctaccttggctacaatggcgaggccgcccaagacgtgtgggctttcgcatccacaaaaattgtcagctcgacattattgtttaacctaaaattaaaaccattggacccggaaaaaatttgcgaaatcacttggggtatgatccaaaaattggggctacccccacacctgctccgcgcctgcgacagggcaaaattcgatgagtacgcaaaagccatcgggatgagcgaaacagccgccgaaaactaccgcctgttcatcgaatccctgcaaagctacgattctatgctggcatggcaaacgcgctacaaacagatcgaagagaaggtgggcaaatggaatatgtcgaagtga

SEQ ID NO: 20058 - protein, 296 aa, Unknown
  Obtained from environmental sample
  misc_feature (1)..(296): Xaa is any amino acid
MLCHEDGTGFQAARTRGLVEAKGVFVTFIDADDYIFPGMFGAMHERAVEQNLDILCCGAKKDLGGQDIGQMDDYAKFEDELFVVAPHNQRDYMYKLALNGRAILPWGKFYRRSFLEEKQLRFHPEAYADDTVFNFNCYSKATRVATMSGQYYVWYDRPGSRLYTSNISDVERSAEIIWTLYLGYNGEAAQDVWAFASTKIVSSTLLFNLKLKPLDPEKICEITWGMIQKLGLPPHLLRACDRAKFDEYAKAIGMSETAAENYRLFIESLQSYDSMLAWQTRYKQIEEKVGKWNMSK

SEQ ID NO: 20059 - DNA, 618 bp, Unknown
  Obtained from environmental sample
  misc_feature (1)..(618): n is a, c, g, or t
gtggcgggtcgtttcggaaattgtggagccgccgttcgggcttcccgtgaaagtttgggttctgttcccgtaacgataaaaatccgttcaggctgggacagtaaatcgatcaactacgccgaatgcgcaaggattgccgtcgaggcgggagcggcaatgatcagtttgcacccgcgcacacgagcgcaaaattacggcggcaaaagcgactggtctcacatatcggatttagtttcccgcctgtccgtccccgttacaggttcgggcgatctttacacacccgaaaatgcgcagaaaatgctgaaagatacaggctgtgcggcggtaatgttcgcaaggggtgcgcagggcaatccgtttattttttcgcaaacacgttctcttctggaaacaggctcatgggagcaagcttcggtttccgcgcggatagcagccgccatgcgtcacttggaaatgcttgccgttgacataggagagcgaaccgcctgccttgaaatgcgaaaacaattctgcgcttatacaaaaggcgttgtaggcggagcggttctgcgtgaaaaagcggttcatgccgaaactattgaagagtatcggcggattactgaagaagcgtttacataa

SEQ ID NO: 20060 - protein, 205 aa, Unknown
  Obtained from environmental sample
  DOMAIN (1)...(204): Dihydrouridine synthase (Dus)
  misc_feature (1)..(205): Xaa is any amino acid
MAGRFGNCGAAVRASRESLGSVPVTIKIRSGWDSKSINYAECARIAVEAGAAMISLHPRTRAQNYGGKSDWSHISDLVSRLSVPVTGSGDLYTPENAQKMLKDTGCAAVMFARGAQGNPFIFSQTRSLLETGSWEQASVSARIAAAMRHLEMLAVDIGERTACLEMRKQFCAYTKGVVGGAVLREKAVHAETIEEYRRITEEAFT

SEQ ID NO: 20061 - DNA, 891 bp, Unknown
  Obtained from environmental sample
  misc_feature (1)..(891): n is a, c, g, or t
gtgggcaagacggcgtactcggtaatggagcagggaaaaatcgaccaggtgctttcctcaaagcccgatgaacggcgatacttgtttgaggaggccgccgggattacccgctacaaggtgaggggcgcagaagtggaacggaaccttgccaaaacaagcgagaatatgcaccaggtcgaactggttctgaacgaggtgaagcgttcatacgacacgctaaaagtccagtcagaaaagaccctgaaataccgcgccctccgtgacgaaatcttcaactgtgaacttgatattcaactgctcagactaaagcatttcaagtatgaaagggacgagcgcaacgaaacgctcagaaggcgcaccgctgaccgcgatagaattcgccagcaaatggaagaggaaagcaaggcccttgacgcgcacatggacgaggtgaactccatggaggcgcggcttgtagagatgcagagaaacatttacggccttgccctggagaaaaacgccaaagaaaacgaggcgcggcttttaggagagcggcgtaacgaaggcaagaccaagattgaacagagcgaagtaagggaaaaacagataaataacaagatagaagagctaaatgatgacgcggcagggcaagatgaagttgtttctgaattgagaaaaaaagctgcgagtatagaagagaacatacgatcttttgaggaaaatatccggcttgcctcaacccgcataggcgacaacgaanaagctatacataaggccgactccgaaatacacagtcttgaaaaagagcaggctcaatttgaagtacagttagcgcggataaccgatgacattgttacggaactggatgccggactgaaaaaagccgggttattcagcctcggagcgccgtaa

SEQ ID NO: 20062 - protein, 296 aa, Unknown
  Obtained from environmental sample
  misc_feature (1)..(296): Xaa is any amino acid
MGKTAYSVMEQGKIDQVLSSKPDERRYLFEEAAGITRYKVRGAEVERNLAKTSENMHQVELVLNEVKRSYDTLKVQSEKTLKYRALRDEIFNCELDIQLLRLKHFKYERDERNETLRRRTADRDRIRQQMEEESKALDAHMDEVNSMEARLVEMQRNIYGLALEKNAKENEARLLGERRNEGKTKIEQSEVREKQINNKIEELNDDAAGQDEVVSELRKKAASIEENIRSFEENIRLASTRIGDNEXAIHKADSEIHSLEKEQAQFEVQLARITDDIVTELDAGLKKAGLFSLGAP

SEQ ID NO: 20063 - DNA, 600 bp, Unknown
  Obtained from environmental sample
  misc_feature (1)..(600): n is a, c, g, or t
atgttccgccgtctttttggcggtggcagagcggaactccagctttcagacaataaccatgtgcttgaatcaggcatagaaatttttgcccagccgcccgggaaaaaactggagcacatttccctgctntcaggcggcgagcgttccatgaccgctgtggccttgctttttgctacatacatggtaaaaccaagccccttctgtctgttggacgaaattgacgccgccctggacgaggccaacgtaggccgttttgtccagcttttgcgtgagttctccaataccagccagttcatcgtgattacccacaacaagaaaacagtagccggcgcgggaaccctcctcggagttacaatggaagaatccggcgttacaaagctgatttccgtgcggcttgaaaatgaagaccttgccattgccgaagagactccgtctcaacagggactatgggacagtgatggcaattttgaggaagaggacgtggaaaacgaagaaggacggcagttgcccgctggcgtggatgatcccaaaaaagttagcgcggagcaacttaggcctataagagcgcggtcaaagccggtaacggaagaagcgcagtaa

SEQ ID NO: 20064 - protein, 199 aa, Unknown
  Obtained from environmental sample
  DOMAIN (1)...(126): RecF/RecN/SMC N terminal domain
  misc_feature (1)..(199): Xaa is any amino acid
MFRRLFGGGRAELQLSDNNHVLESGIEIFAQPPGKKLEHISLLSGGERSMTAVALLFATYMVKPSPFCLLDEIDAALDEANVGRFVQLLREFSNTSQFIVITHNKKTVAGAGTLLGVTMEESGVTKLISVRLENEDLAIAEETPSQQGLWDSDGNFEEEDVENEEGRQLPAGVDDPKKVSAEQLRPIRARSKPVTEEAQ

SEQ ID NO: 20065 - DNA, 825 bp, Unknown
  Obtained from environmental sample
  misc_feature (1)..(825): n is a, c, g, or t
atggcacacatgttctatgaaaaagactgcgatttgggaatgttaaagagtaaaaccattgcggttataggttacggttcccaggggcacgcgcacgccctgaacatgaaggaatccggattgaaggttatcgtgggtctttacgaaggttcaaaatcatggaagaaagctgaggaggctggctttcaggtgatgacggcgaaggacgcggctcaggcggcggactttatcatgatcttgattaacgatgaaaagcaggcggccctttacagggaatcaatcgcgcccgcgttaaaaaaaggaaaaaccctttcttttgcccacgggtttaacatccactttgggcagatagttccgccgcaggatgtcaatgttgtgatgatagcgcccaaagggccgggtcataccgtgcgcgagcagtacaagaacggcgcgggcgttccatgccttatcgcggttcatcaggatgcaagcggggacgcgaaaaaattggcgctggcttacgcggcgggcataggcggagcgcgggcgggagttctggagacaacttttaaggaagagaccgagaccgatcttttcggcgaacaggctgtcctttgcggaggcgtatccgcgctgatgaaggcgggctacgaggtgcttgtggaagcgggctaccagcctgagagcgcctactttgaagttatgcatgagatgaagctcatcatcgatcttgtaaaccgcggcgggctttcatttatgcgctattcaatttccgatactgcggaatacggcgactatgttacggggccgaagatcatcaccgatgaaacaaaaacacaatga

SEQ ID NO: 20066 - protein, 274 aa, Unknown
  Obtained from environmental sample
  DOMAIN (184)...(274): Acetohydroxy acid isomeroreductase, catalytic domain
  misc_feature (1)..(274): Xaa is any amino acid
MAHMFYEKDCDLGMLKSKTIAVIGYGSQGHAHALNMKESGLKVIVGLYEGSKSWKKAEEAGFQVMTAKDAAQAADFIMILINDEKQAALYRESIAPALKKGKTLSFAHGFNIHFGQIVPPQDVNVVMIAPKGPGHTVREQYKNGAGVPCLIAVHQDASGDAKKLALAYAAGIGGARAGVLETTFKEETETDLFGEQAVLCGGVSALMKAGYEVLVEAGYQPESAYFEVMHEMKLIIDLVNRGGLSFMRYSISDTAEYGDYVTGPKIITDETKTQ

SEQ ID NO: 20067 - DNA, 525 bp, Unknown
  Obtained from environmental sample
  misc_feature (1)..(525): n is a, c, g, or t
atggggttgaaggttattgacattgtgtttctggtgattatcgcaatttttgcgcttcgttgcgcgttgcggggtcttgtcagcgagctcatgtcaatggcggcgctggttttgggcctgttggcggcaatatttacattcagaaaaacagcggagttagtccggggcaaatttatacccgatataaaggcgcttcccgagatagtatcctttattgcggtttttcttgccgttttcgccttcataaaaatacttgaaacgatattaaaagatattattgacaggatacaactcggcgggccggatcgtttccttggttttttcctcggcattgccgaaggattagttatcgtctgcctgctccttttcctgatacttgtccagccctttgtcgaacctgatctcgtacttgaaggcagctttcttgcgaaattactaatgccgtttatcattggaaccaaaaaagagttatttgaatctgtcgcccgattcagcggggcaacagggggaggcaccggtgtttga

SEQ ID NO: 20068 - protein, 174 aa, Unknown
  Obtained from environmental sample
  DOMAIN (5)...(160): Colicin V production protein
  misc_feature (1)..(174): Xaa is any amino acid
MGLKVIDIVFLVIIAIFALRCALRGLVSELMSMAALVLGLLAAIFTFRKTAELVRGKFIPDIKALPEIVSFIAVFLAVFAFIKILETILKDIIDRIQLGGPDRFLGFFLGIAEGLVIVCLLLFLILVQPFVEPDLVLEGSFLAKLLMPFIIGTKKELFESVARFSGATGGGTGV

SEQ ID NO: 20069 - DNA, 627 bp, Unknown
  Obtained from environmental sample
  misc_feature (1)..(627): n is a, c, g, or t
atgagggacgatatcaacaccgccacgcacaagcgtttcgggcagaggtgggtgcgtaatttttcgcgtaacatcgaggctgtccgtgattatccggggatttcccgattgtcaaatcttgcggcggcggacgctgacaataagccgctttctgtatttcttgccgctgcgggaccgagtttagacaaaattaaacctttgttacacgacatttatgaaagatgcgttattgtcgccgtagacacaaaccttcgtttttttgtaaaaaacaacattcagcccgattttgttcttgtagtagaccctcaattttggaacagccgtcatcttgatcgatgtatccgcaaagaaaataatttgcaaacagcgttgattgccgagcctgccgtttatccgcccgtattaaaacttcctttcaaaaacaaatttctttgcggctctatgcttccgcttggaaaatttatcgaacgcaaagttgacgaanaaacaaagctgggcgcgggcggttctgtcgcttccacagcgtgggatttcgcccgtttcctcggcgctttggaaatttggatagccggtttagacctttcgtttcccgatttggaaacgcatttccgaggcgcgcgtttttga

SEQ ID NO: 20070 - protein, 208 aa, Unknown
  Obtained from environmental sample
  DOMAIN (35)...(194): Protein of unknown function DUF115
  misc_feature (1)..(208): Xaa is any amino acid
MRDDINTATHKRFGQRWVRNFSRNIEAVRDYPGISRLSNLAAADADNKPLSVFLAAAGPSLDKIKPLLHDIYERCVIVAVDTNLRFFVKNNIQPDFVLVVDPQFWNSRHLDRCIRKENNLQTALIAEPAVYPPVLKLPFKNKFLCGSMLPLGKFIERKVDEXTKLGAGGSVASTAWDFARFLGALEIWIAGLDLSFPDLETHFRGARF

SEQ ID NO: 20071 - DNA, 726 bp, Unknown
  Obtained from environmental sample
  misc_feature (1)..(726): n is a, c, g, or t
ttggagatactgcgctctttccctgaaaattcggtagatatgatttttgccgatccgccttatatgctgtcaaatgacggatttacttgccagaacgggaaaatggttaatgtgaacaaagggaagtgggacaaaagcaatggttttgaaaacgatacggtgtttcataatgagtggatttccgcttgcagacgagttatgaaacctgaaggaacaatttggatttcggggacatatcacagcatttatcaatgcggctatcttctgcaaaaaaatgattttcatattttaaatgacataacatggtttaaacctaacgcatcgcctaacttgagctgccgtttttttacagcgtcgcacgaaacgcttatttgggctcgcaaagataaaaaagcaaaacacacatttaattacgatgaaatgaaaaacggtcttttccccgaagataaattaaaaaatgaaaacacgcaaatgagatctgtttggtcaataccaactcccaaaagcaacgaaaaagaacacggaaaacacccgacgcaaaaaccgttagaccttttaaaacgcattgtacttgcgtcgacaaacgaaaacgccgttgtactcgatccattttgcggaagcggaacgacaggagccgcctgcaaatgtttaccggacaggttttttatcggcattgagattgataaaacatactgcgaattggcgaaaaaaagattaagcgaataa

SEQ ID NO: 20072 - protein, 241 aa, Unknown
  Obtained from environmental sample
  DOMAIN (12)...(237): DNA methylase
  misc_feature (1)..(241): Xaa is any amino acid
MEILRSFPENSVDMIFADPPYMLSNDGFTCQNGKMVNVNKGKWDKSNGFENDTVFHNEWISACRRVMKPEGTIWISGTYHSIYQCGYLLQKNDFHILNDITWFKPNASPNLSCRFFTASHETLIWARKDKKAKHTFNYDEMKNGLFPEDKLKNENTQMRSVWSIPTPKSNEKEHGKHPTQKPLDLLKRIVLASTNENAVVLDPFCGSGTTGAACKCLPDRFFIGIEIDKTYCELAKKRLSE

SEQ ID NO: 20073 - DNA, 954 bp, Unknown
  Obtained from environmental sample
  misc_feature (1)..(954): n is a, c, g, or t
ttgggacccgcgaaattcgtgggcctcggcatgtttacggcaaaagaaagaaccttcccgcagggtcgaggaaccttaactccgcctctaaattgtcgacaccgacgcggacgttggttgcagctcgctcaggtgagcgggaagctcggcaaatccgacgcggagcttgccgcctacaagaagtactctacgctcaagccgcaggacctaaccgtaacccgccgcatcggcgagttgctgtacgataaaaagcagtactccgaagccatcacaaacttggaggtgttccttaccacaaacgataaggacgtgaaggtgctgataatgctggccgacgcctacgaggccacgaaccgccatcaaaagacgacggaactgctggctaaggcgaagaacctgaagggcgacgaccccgaggttcgcgagcgcctatacaagatgtacaagagggatggcaagaaagacgccgccgaaacggagatcagggaattggttgagatcaccaaggacaacaagcaccgcctgatgctttgcggagacttaatagaggccgggaaacttgatgaggctgcaagagtcgctaacgaggtgaagaagagcgacccgaccaaccgcgaggggcttatggccttggccggaatccagaggatgcagaagaagtacagcgacgccatagagacctacaaacttgtcttgtttgccgacaacaattacgcccccgcttgcgcaggccgcgccgaggcgcatttcttgcttgccgagtacgacagggcggagacttactacaaaaaagcgcttgaactcgaccccaagatggcctctgcggagctaggcctttcgagggtctacaaggtcaccaagcagaaggatctgcaggtgcagcacctgaatagggccaagttgcttgatccgaacaacaaggcggttcaagacgagttgagactgcttaaatag

SEQ ID NO: 20074 - protein, 317 aa, Unknown
  Obtained from environmental sample
  DOMAIN (239)...(272): Tetratricopeptide repeat
  misc_feature (1)..(317): Xaa is any amino acid
MGPAKFVGLGMFTAKERTFPQGRGTLTPPLNCRHRRGRWLQLAQVSGKLGKSDAELAAYKKYSTLKPQDLTVTRRIGELLYDKKQYSEAITNLEVFLTTNDKDVKVLIMLADAYEATNRHQKTTELLAKAKNLKGDDPEVRERLYKMYKRDGKKDAAETEIRELVEITKDNKHRLMLCGDLIEAGKLDEAARVANEVKKSDPTNREGLMALAGIQRMQKKYSDAIETYKLVLFADNNYAPACAGRAEAHFLLAEYDRAETYYKKALELDPKMASAELGLSRVYKVTKQKDLQVQHLNRAKLLDPNNKAVQDELRLLK

SEQ ID NO: 20075 - DNA, 543 bp, Unknown
  Obtained from environmental sample
  misc_feature (1)..(543): n is a, c, g, or t
atggccgagagccatttttttgtttcggagcatctgcaaaagtacgcttacgatgattcacccctgcctatcggtttggcccagacaatttcacagccctacattgtcgcgtacatgagcgagcagcttcagccgttcaaagggatgaaaatcctggaaatcggaaccgggtcaggctatcaatccgcgattctctcctgcctcggctgcgaagtctgtacggtagaattgctggaagaacttgccaatagggctgaaaaagttttcaaaaaactcaacttaagcggcataaaaacaaaatgcgccaacggctattccggttggccggaagaagcccctttcgacgccataattattaccgccgcccccgaaaaaatccccgaaaaactcatcgaccaattagccgaaggcggcaaaatgatcctccccgtcggccccgccaattccgttcagtatctgaagctcgtcataaaacaaagcggcaagattattgagaaggaactgcttccggtcaggtttgtccccctggtagactctgcttaa

SEQ ID NO: 20076 - protein, 180 aa, Unknown
  Obtained from environmental sample
  DOMAIN (3)...(180): Protein-L-isoaspartate(D-aspartate) O-methyltransferase (PCMT)
  misc_feature (1)..(180): Xaa is any amino acid
MAESHFFVSEHLQKYAYDDSPLPIGLAQTISQPYIVAYMSEQLQPFKGMKILEIGTGSGYQSAILSCLGCEVCTVELLEELANRAEKVFKKLNLSGIKTKCANGYSGWPEEAPFDAIIITAAPEKIPEKLIDQLAEGGKMILPVGPANSVQYLKLVIKQSGKIIEKELLPVRFVPLVDSA

SEQ ID NO: 20077 - DNA, 777 bp, Unknown
  Obtained from environmental sample
  misc_feature (1)..(777): n is a, c, g, or t
atgcatcgcaaggattttgcctttacactcggttcgggaactaatgtttacaaattcgacgatgacataatcgggatgaaaaaaggcgaaacaaaagaatttacaaagaagtttgagaaagatcattttgataccgcgcttgcgggcaattcaagaaaaatacaggtaacgcttaccgcgctcaaagagaaaaaactccctgagcttgacgacgatttggcgcaggacgttgatgaaaagtttaaaactcttgacgatcttaaaaacagcataaaagacaaattgaccaaaactctggaataccgcctgcgggaaagaaagctaagcgagctattaaagaaaattatggaaaatacgcccgtcgttctgcccgaatccatgattagggcggaagttgagggacgctggcggaggcttgcacgctactacaacatgaacgccgaaacaatcgcccagatgatgagcggtgaagaaaaaagcaaagaatggcgcgacgcggcggaaaaggcactccactcaagattgataatcgaaactttaatggaagagcaaaaaattgaggtttcggacaatgatgtagaagaagaatttaagtcgattgccgcggcaaacggagccgatattgaagaagttaaaaagcattataacgaggaagcggttttctaccctaaagaagacatcngaagaaagaaaattacagatatgatgtttgcggaaaacaacttaaaacaagggaaaaaggagaattatctggattttatgtcagaatatggttaa

SEQ ID NO: 20078 - protein, 258 aa, Unknown
  Obtained from environmental sample
  DOMAIN (60)...(233): Bacterial trigger factor protein (TF) C-terminus
  misc_feature (1)..(258): Xaa is any amino acid
MHRKDFAFTLGSGTNVYKFDDDIIGMKKGETKEFTKKFEKDHFDTALAGNSRKIQVTLTALKEKKLPELDDDLAQDVDEKFKTLDDLKNSIKDKLTKTLEYRLRERKLSELLKKIMENTPVVLPESMIRAEVEGRWRRLARYYNMNAETIAQMMSGEEKSKEWRDAAEKALHSRLIIETLMEEQKIEVSDNDVEEEFKSIAAANGADIEEVKKHYNEEAVFYPKEDIXRKKITDMMFAENNLKQGKKENYLDFMSEYG

SEQ ID NO: 20079 - DNA, 846 bp, Unknown
  Obtained from environmental sample
  misc_feature (1)..(846): n is a, c, g, or t
gtggcatggggcggtgacagtacagaggcggccttcaggaaaggtatcgcggcacggccccttggcgtgtgctgcgattttaacggctcggcaagatgtcagtccattgacagggatttcttcgccggtctgggaatacatttcgaggctataaacgcaaagccaagcgagatcgtccacaggatcatacccgaaggtgagtcccttgagccttgccggatcctgcttgaggaaacccaccgacgcgacccttgcttcacgctgggttatgtaccggactgcgacggcgacaggggcaatcttgtcgtatgggacgaaaagttacagaaagcccgcgcccttgaagcccaggaagttttcgccattgcctgtgtcgccgaactcgcccagctcgcgcgggccgccggtacgtcacctaacaaaaaaacactgtcgcgtaccgccattgcggtaaatgatcccacctctttccgcatcgaccgcatagcgcaagccttcggcgcttcggttttccgcgccgagacaggcgaggccaacgtggtggcccttgcccgcaagctgcgcaatgaaggttatacggtacgtatccttggcgaaggctcaaacggaggcaacatcacacacccctctgcggtacgggatccgctcaataccgtgctggccctggcaaaactccttatggtaacttcggcggatggtaaacctggcctgtttgaactttggtgcaatttgacaggaagtctataccgccctgatttcagcatgggcgatataattgcgagcctgccccccttcactactacagcggcatccgcgccggaagcggctcttaaatcaccagcgtga

SEQ ID NO: 20080 - protein, 281 aa, Unknown
  Obtained from environmental sample
  misc_feature (1)..(281): Xaa is any amino acid
MAWGGDSTEAAFRKGIAARPLGVCCDFNGSARCQSIDRDFFAGLGIHFEAINAKPSEIVHRIIPEGESLEPCRILLEETHRRDPCFTLGYVPDCDGDRGNLVVWDEKLQKARALEAQEVFAIACVAELAQLARAAGTSPNKKTLSRTAIAVNDPTSFRIDRIAQAFGASVFRAETGEANVVALARKLRNEGYTVRILGEGSNGGNITHPSAVRDPLNTVLALAKLLMVTSADGKPGLFELWCNLTGSLYRPDFSMGDIIASLPPFTTTAASAPEAALKSPA

SEQ ID NO: 20081 - DNA, 549 bp, Unknown
  Obtained from environmental sample
  misc_feature (1)..(549): n is a, c, g, or t
atggtacgtccaggtcgggacaggctttcagggcgtgttgaagttgatgaaacatatttcggagccccagaaaaaggtggaaaacgtggtcgaggtactgaaaacaaggtattagctgctattgcggtagaaacgaacgaaaagattgtaggccgtattcgtgtcagtatgctgacagatgcatctcaagacagcctccataaattcatacaagaaagtgtggaatctgggagcacggtagtaactgatggatggcttggatatagtggtcttgaagcaattggatataatcatgaaataatagttcatcaggatttagatgctttacttccatatgtccacactgttatttctttgatgaaacggtggattatgggaacgcttcaaggttcttgttctagcgaacatcttcaatattattttgatgagtatacctttcgtttcaaccgtcgaaaatcaaaaagtaggggacagttgttttatcgcttgcttcaaaacgctgttcaaatagaaccggtaatttacaaaaatattattgctaaacattaa

SEQ ID NO: 20082 - protein, 182 aa, Unknown
  Obtained from environmental sample
  misc_feature (1)..(182): Xaa is any amino acid
MVRPGRDRLSGRVEVDETYFGAPEKGGKRGRGTENKVLAAIAVETNEKIVGRIRVSMLTDASQDSLHKFIQESVESGSTVVTDGWLGYSGLEAIGYNHEIIVHQDLDALLPYVHTVISLMKRWIMGTLQGSCSSEHLQYYFDEYTFRFNRRKSKSRGQLFYRLLQNAVQIEPVIYKNIIAKH

SEQ ID NO: 20083 - DNA, 663 bp, Unknown
  Obtained from environmental sample
  misc_feature (1)..(663): n is a, c, g, or t
gtgacaatggacaatctgcatgacatgataagcgacggcactattcaggaattaaaagttatcattaaagcggacgttcaggggtcggcggaagcgttaaagtcaagtttggaaaaattaagcaccaaagaaatacgccttcatgtaatacaggcgcttcccggtcctgttaacgaaggcgacgttgaccttgcgatagcgtccaaagcgataattatcagctttaacgtccgtccgctgcccaaggcgaaaatcctcgccgatcaggaaaaagtagacatcagaaaatacaatgttatctacagggcggtagatgaaataagaatggctatggaagggatgttaaaaccggatacaaaggaagaagtaataggaaccgtggaagtccgcaatacgttcaaagtgccgaaagtcggcactatcgccggttgttatgtgcaaacggggcttataaagcgcatctgtaccgtcaatgtcctgcgtgatcaggttgttattcacaccggaaaaatcgcgtcgctcaagcgctttaaggatgacgcgcgcgaagttgctgcgggctatgaatgcggccttgggctggacaattttgacgatattcgcgtcggcgatacgcttgaagttattgaaattgtggaaatcgcccgaaaattgagttcttaa

SEQ ID NO: 20084 - protein, 220 aa, Unknown
  Obtained from environmental sample
  DOMAIN (139)...(207): Elongation factor Tu domain 2
  misc_feature (1)..(220): Xaa is any amino acid
MTMDNLHDMISDGTIQELKVIIKADVQGSAEALKSSLEKLSTKEIRLHVIQALPGPVNEGDVDLAIASKAIIISFNVRPLPKAKILADQEKVDIRKYNVIYRAVDEIRMAMEGMLKPDTKEEVIGTVEVRNTFKVPKVGTIAGCYVQTGLIKRICTVNVLRDQVVIHTGKIASLKRFKDDAREVAAGYECGLGLDNFDDIRVGDTLEVIEIVEIARKLSS

SEQ ID NO: 20085 - DNA, 822 bp, Unknown
  Obtained from environmental sample
  misc_feature (1)..(822): n is a, c, g, or t
gtggaaactacctcgctgggactgcacatggacggaaaacttatgtttacatcccttgtagcctgccattgttcgctcggcacttttcttacaaacaagccggtacgttttattctcaacagggaagaagattttttgtactctccaaaacgctgtaaaaccaatattgacctggttaccaccatagacgacaagggcaatataaccgccgcggaagcggacattgttgttaaccttggtgcgcatggggttaacggcgaggaaatactggatcagatttgtcttggcgtcataggctataataatgttgaaaattttaaaataaccgcaagggcgtatgtttcaaatataccgccccagggcccgttttcggggttcggtctcgctcagggctttttcgccatgcagcgccatttagcccaaatcgcggataccgtacaaaccaaccctctggaatggcgaaaaacgcactacaaccctttcatggttctgccttcgggtacaaatcccaaaaatcatatctctgttgataaacttgtaagcgccgttacaaatataggcgattataaccgtaaatgggcttcttacgaactattgaaacaaagcaggcgtgaaaagactttagcgtatgaaaaaggcgaaaatttaagaggaataggattgacggtaggatttcagggaaacggccttctctacaacggcgaggacaagggaatttacagcgtggaagttactttgacaaaggatggtttccttgaaataaaacaagcattacaagctcggaagaagattatgtcagaatatgggcaaaaatcgctttag

SEQ ID NO: 20086 - protein, 273 aa, Unknown
  Obtained from environmental sample
  misc_feature (1)..(273): Xaa is any amino acid
METTSLGLHMDGKLMFTSLVACHCSLGTFLTNKPVRFILNREEDFLYSPKRCKTNIDLVTTIDDKGNITAAEADIVVNLGAHGVNGEEILDQICLGVIGYNNVENFKITARAYVSNIPPQGPFSGFGLAQGFFAMQRHLAQIADTVQTNPLEWRKTHYNPFMVLPSGTNPKNHISVDKLVSAVTNIGDYNRKWASYELLKQSRREKTLAYEKGENLRGIGLTVGFQGNGLLYNGEDKGIYSVEVTLTKDGFLEIKQALQARKKIMSEYGQKSL

SEQ ID NO: 20087 - DNA, 945 bp, Unknown
  Obtained from environmental sample
  misc_feature (1)..(945): n is a, c, g, or t
ttggtaggcgacggcatggccgactttcccattccgtcactcaacggcaagactcctttagagtccgcctccacgcccaatatggacaagatagccgcagcgggccgcgtaggcctcctgtccacgatccccgacggtttcctccccggcagcgacatcggcaacatgtcgctcctgggatacgacccgcgccgctacttctgcggccgcgctcccatagaggcggcgagcatgggaatccccataggccccgaagacgttgtcttccggtgtaatttggtgactattgaaaacggcacaatgatggactactccgccggccacatatcgaccgaggccgcgcataccgttattaacgcgctacaaaaatccctcggcatcgacggagaattgaaattccacccgggagtaagttatcgccacctattgacggtgaggaaaatcggcgcgaaactgaagtgcacaccgccccacgatatcaccggtcagaagattgatccgtatttgcctaacggcgacgacgtcggcggcagagattacgtattatcgttaatgaaccgcgcgaaacccgtcgtagccgaaacgaaagctaaaggctgcgaccacgccgcgaccgacatctggctctggggccaaggtcccgccgtaaccttgcctacgttaaaagagcgctacggcataaccggttcggtgatctccgccgtcgacttagtgcgcggcctgggaaaattggccggcctgaaagtgcgcattatagacggcgcgacaggctacttaggaacgaactacgccggaaaagtagccgccgcgacagacgccttcgattccggcgaagatttcgtctacctgcacgtgggagcccccgacgagaccagccacgagggatcattggagaaaagatccagccatagaggatttgacaatacgtggtgggagagaatgtga

SEQ ID NO: 20088 - protein, 314 aa, Unknown
  Obtained from environmental sample
  misc_feature (1)..(314): Xaa is any amino acid
MVGDGMADFPIPSLNGKTPLESASTPNMDKIAAAGRVGLLSTIPDGFLPGSDIGNMSLLGYDPRRYFCGRAPIEAASMGIPIGPEDVVFRCNLVTIENGTMMDYSAGHISTEAAHTVINALQKSLGIDGELKFHPGVSYRHLLTVRKIGAKLKCTPPHDITGQKIDPYLPNGDDVGGRDYVLSLMNRAKPVVAETKAKGCDHAATDIWLWGQGPAVTLPTLKERYGITGSVISAVDLVRGLGKLAGLKVRIIDGATGYLGTNYAGKVAAATDAFDSGEDFVYLHVGAPDETSHEGSLEKRSSHRGFDNTWWERM

SEQ ID NO: 20089 - DNA, 405 bp, Unknown
  Obtained from environmental sample
  misc_feature (1)..(405): n is a, c, g, or t
atgtatatcgacgctgagagccggggcggtccgcagtgggcgtctaaaaacgatcctcggatacgcccggtggggcggtttatcaggaagaccagattggacgaactgccgcagttttttaatgtattgaaaggcgagatgagtttggttgggccgcgtccggagaggccgttttttgtggagaaactcaagcaggagataccgtggtacgtaaggagaataaagatgaagccggggatcacggggtgggcgcaggtcaaacatgagtatgattcttctattgaggatgtcaagcagaaagtgttgtatgatttatattattttgagaatatgtctatagcgttggatataaagatattgattcggactgttattgtggtgttgacggggaagggggcgcattga

SEQ ID NO: 20090 - protein, 134 aa, Unknown
  Obtained from environmental sample
  DOMAIN (1)...(134): Bacterial sugar transferase
  misc_feature (1)..(134): Xaa is any amino acid
MYIDAESRGGPQWASKNDPRIRPVGRFIRKTRLDELPQFFNVLKGEMSLVGPRPERPFFVEKLKQEIPWYVRRIKMKPGITGWAQVKHEYDSSIEDVKQKVLYDLYYFENMSIALDIKILIRTVIVVLTGKGAH

SEQ ID NO: 20091 - DNA, 432 bp, Unknown
  Obtained from environmental sample
  misc_feature (1)..(432): n is a, c, g, or t
atgaagaaagaagaaaaaggttataaagcaatcagcagattccttatcggctccccttacaagatcaggcctgtagccgaccttgtccgcagaaggacgtaccccgaagctatttccattctggaaaatatgcctcataagggggcgaagttaattcgcaagacggttaaatccgcggcttccaacgcattggcggataacaaaaaacttgacgaggatatgctttatgttaaagaaatttttattgatgacgggccgcgccttaaaagggtttggttccggggcaggggcagagcggatatgcaggtaaagcggatgtgtcacataactgtagtggttgatgaaactgcagtttcacagggcgatgcggctaaagcgaagaaaagcggcgcgtcaaaaggcgataaaccttcaaaaaaggcggctaaataa

SEQ ID NO: 20092 - protein, 143 aa, Unknown
  Obtained from environmental sample
  DOMAIN (10)...(115): Ribosomal protein L22p/L17e
  misc_feature (1)..(143): Xaa is any amino acid
MKKEEKGYKAISRFLIGSPYKIRPVADLVRRRTYPEAISILENMPHKGAKLIRKTVKSAASNALADNKKLDEDMLYVKEIFIDDGPRLKRVWFRGRGRADMQVKRMCHITVVVDETAVSQGDAAKAKKSGASKGDKPSKKAAK

SEQ ID NO: 20093 - DNA, 408 bp, Unknown
  Obtained from environmental sample
  misc_feature (1)..(408): n is a, c, g, or t
atgggacaaaaagttaacccgacagggcttagaatcggtattaataaaacttggggttcccgctggtatgtcgatcctaaagaatatgtggacgcgcttcatgaagatttatatctgcgcaagctcattatgggtatgccggaaaccaagggtgcagatattgccgaattggaaattatccgtcatccgcaaagaattacaattacaatccataccgcgcgtccgggagtaatcatcggcgttaagggcgctaatatagaaaaaatcggtaatgatttacagaagaaaataaacaaaaaagtacagataanaattaaagaagtgcgaaatgccgacaacaacgcgcagattgtcgcgcagaatatcgcgcgtcagcttttggcaggtcgtctttcangcgcacgatga

SEQ ID NO: 20094 - protein, 135 aa, Unknown
  Obtained from environmental sample
  DOMAIN (1)...(64): Ribosomal protein S3, N-terminal domain
  misc_feature (1)..(135): Xaa is any amino acid
MGQKVNPTGLRIGINKTWGSRWYVDPKEYVDALHEDLYLRKLIMGMPETKGADIAELEIIRHPQRITITIHTARPGVIIGVKGANIEKIGNDLQKKINKKVQIXIKEVRNADNNAQIVAQNIARQLLAGRLSXAR

SEQ ID NO: 20095 - DNA, 447 bp, Unknown
  Obtained from environmental sample
  misc_feature (1)..(447): n is a, c, g, or t
ttgtcttttccggcgattacctggacagtatcttcttttttcagtttaaatttatgtaatgcttcagccatgtcctactcctataaaacctctggggcaagagaaacgattttcataaattcgcttttctccctcaattcgcgcgccacaggcccgaagatacgttttccctttgggtttaacgcggcgtcaataatgacgcaggcgttatcatcaaacctgatatatgtcccgtcggggcggcggtactctttatgtgtgcgcactacaaccgctttttccacagttcccttttttattacggacgtgggcagcgcttcttttaccgccactacgacaatatcgccaatacccgcatatctgcgttttgtgccgcccaaaacttttatgcattggacaagcttggcgcctgaattatcagccacattcaggaagctctctacttga

SEQ ID NO: 20096 - protein, 148 aa, Unknown
  Obtained from environmental sample
  SIGNAL (1)...(25)
  misc_feature (1)..(148): Xaa is any amino acid
MSFPAITWTVSSFFSLNLCNASAMSYSYKTSGARETIFINSLFSLNSRATGPKIRFPFGFNAASIMTQALSSNLIYVPSGRRYSLCVRTTTAFSTVPFFITDVGSASFTATTTISPIPAYLRFVPPKTFMHWTSLAPELSATFRKLST

SEQ ID NO: 20097 - DNA, 372 bp, Unknown
  Obtained from environmental sample
  misc_feature (1)..(372): n is a, c, g, or t
atgattcaagtagagagcttcctgaatgtggctgataattcaggcgccaagcttgtccaatgcataaaagttttgggcggcacaaaacgcagatatgcgggtattggcgatattgtcgtagtggcggtaaaagaagcgctgcccacgtccgtaataaaaaagggaactgtggaaaaagcggttgtagtgcgcacacataaagagtaccgccgccccgacgggacatatatcaggtttgatgataacgcctgcgtcattattgacgccgcgttaaacccaaagggaaaacgtatcttcgggcctgtggcgcgcgaattgagggagaaaagcgaatttatgaaaatcgtttctcttgccccagaggttttatag

SEQ ID NO: 20098 - protein, 123 aa, Unknown
  Obtained from environmental sample
  DOMAIN (1)...(123): Ribosomal protein L14p/L23e
  misc_feature (1)..(123): Xaa is any amino acid
MIQVESFLNVADNSGAKLVQCIKVLGGTKRRYAGIGDIVVVAVKEALPTSVIKKGTVEKAVVVRTHKEYRRPDGTYIRFDDNACVIIDAALNPKGKRIFGPVARELREKSEFMKIVSLAPEVL

SEQ ID NO: 20099 - DNA, 885 bp, Unknown
  Obtained from environmental sample
  misc_feature (1)..(885): n is a, c, g, or t
atgaaattcctgcgggagatagcccacttaagcccaaggacaaacactttcggcgcggtgctgaggctcngcagccgtatggcctttgccatccacgagtattttaccgcgcgcggctttcaatatatccatacgccgattattaccccaggcgacgccgaaggcgcgggcgcgatgttccaggtgacaacccttgatcttgaggcgctggcgaaagccggcagcgcgcaggccggaatcaactatgacagggatttttttggcaagaaaacctttcttaccgtttccggtcagctggaagcggagacctgcgccacggccctttcacgcgtatatacattcggcccgactttccgcgcggaaaattcaaataccacaaggcatcttgccgagttctggatggtcgagcctgaaatcgccttcgccgatcttggcgacgatatggcgttagctgaagattttctgaaattcattttcaaaaaggcgcttgaggactgtattgacgaccttaaattctttgacgcgcacatagagaatggcattattgataccttaacccatgtggtgaattcaaaattcgcgcacattacctacacggacgccgttaaggaactggaaaaagcggtaaatagtggaacggtttttgagttcaatccttgttggggctgtgacttgcagagcgagcatgagaagttccttaccgagaaagttgccgcgggcccggttatcgttaccgattacccgaaaaacattaaggctttttacatgaagcaaaacgatgacggtaagaccgtcagggcgatggatgtgctggttccccgtcttggcgagattatcggcggctcacagcgcgaggaaaaccttaaaaactcatttcccgcatga

SEQ ID NO: 20100 - protein, 294 aa, Unknown
  Obtained from environmental sample
  DOMAIN (1)...(294): tRNA synthetases class II (D, K and N)
  misc_feature (1)..(294): Xaa is any amino acid
MKFLREIAHLSPRTNTFGAVLRLXSRMAFAIHEYFTARGFQYIHTPIITPGDAEGAGAMFQVTTLDLEALAKAGSAQAGINYDRDFFGKKTFLTVSGQLEAETCATALSRVYTFGPTFRAENSNTTRHLAEFWMVEPEIAFADLGDDMALAEDFLKFIFKKALEDCIDDLKFFDAHIENGIIDTLTHVVNSKFAHITYTDAVKELEKAVNSGTVFEFNPCWGCDLQSEHEKFLTEKVAAGPVIVTDYPKNIKAFYMKQNDDGKTVRAMDVLVPRLGEIIGGSQREENLKNSFPA

SEQ ID NO: 20101 - DNA, 783 bp, Unknown
  Obtained from environmental sample
  misc_feature (1)..(783): n is a, c, g, or t
atggcaagctggttctacacatgcggcgacaaggagaccgcggtgcgcgtgctcacatccatcgccgatttggaactcgaaaacgccgccctctatagattgctgggctataggctaaaggagttcggcgagtacgcgctcgaaaagttcgtctgtcaaaaggtagtccaatggcgccctatggaaccgcaaagccaccgcgactacgccaatgccctcgccgacaacggagaggcgcaagcggcgctcaacacgctctacggagcgctgttaaaaacctattcgacatacaacagaggccgcagccgcgggatagaagagatcgtggtcacggagataaatcgcttggtaaccaaaaacaatctgaataagtcaaagatttacaagcgtttgctgactaacattcccgttgatattcgcgtggttataaactggaatatgaacaacaccgacatcgacctgcacgtggtagaccctacaggcgttgagtgctactacggcaacagcaaaacaaagatcggcggacgcctaagcccggacatcacgcagggttacggcccggaacaattccttttgaaaaaggccgtaaaaggaaaataccgcgtctacgtagactactacggcgacaacaaagtcaccgacgccggcccggcgaccgtcatggcggaaatctacatcaaatacaccggcaaagccgaacgccgcaaagtcgtatgcttgcagatgtcaaacgcgaaacagagagaggacgggactgtgcagattgcagaatttgaattttga

SEQ ID NO: 20102 - protein, 260 aa, Unknown
  Obtained from environmental sample
  misc_feature (1)..(260): Xaa is any amino acid
MASWFYTCGDKETAVRVLTSIADLELENAALYRLLGYRLKEFGEYALEKFVCQKVVQWRPMEPQSHRDYANALADNGEAQAALNTLYGALLKTYSTYNRGRSRGIEEIVVTEINRLVTKNNLNKSKIYKRLLTNIPVDIRVVINWNMNNTDIDLHVVDPTGVECYYGNSKTKIGGRLSPDITQGYGPEQFLLKKAVKGKYRVYVDYYGDNKVTDAGPATVMAEIYIKYTGKAERRKVVCLQMSNAKQREDGTVQIAEFEF

SEQ ID NO: 20103 - DNA, 825 bp, Unknown
  Obtained from environmental sample
  misc_feature (1)..(825): n is a, c, g, or t
atgtcaaaaacttattctttgctttactacatatcattcacgttcaagaaatccaaatttggtgcaagctttaatgtcattttgaaaatagccactgctcttattccaatcgcgcaaataccgatattggctaatttcatcgacagtactacagaagctctgggcaggggtaggattactgacagccttattcaagcggctttgttttttattggaatacttttgcttgggtatgtcgtgaatatattcagcgcgtttgccaaagcaaaaacaagcgcgatagtcggggcagcgtatgaaaggcagcttttggagaaacagagcagtttgagctatgaagtgatagagaatagcgaagcccatgagcttatcaatcgtgttgcagaagactgttcggacaaatttttcaaaggttttgacaatcttatgactatatgcgagtacgctatacggatagcgggcatcgcaataacggtgatgagcgcgaacatggtggtcggggctatatgtttccttatcatggtcataatcatccccatagctaaaaaatgcggcgaggaagattacgacgcctatgaagcttcttccggcaaattcagacgggcaagatactttaggaacattctttccgaaagggactatgcggacgagcgcaaaatttttaattttagcgggcctgtaaatgaaatatggaaagagaaattcggcgaaggcataaaaatatcccgcaaagcgacaaaaaagaacttcattagaattaagtccgccagttgcggcacggcaatttcttcctgccttatagccggtttattgctgtgcccctga

SEQ ID NO: 20104 - protein, 274 aa, Unknown
  Obtained from environmental sample
  misc_feature (1)..(274): Xaa is any amino acid
MSKTYSLLYYISFTFKKSKFGASFNVILKIATALIPIAQIPILANFIDSTTEALGRGRITDSLIQAALFFIGILLLGYVVNIFSAFAKAKTSAIVGAAYERQLLEKQSSLSYEVIENSEAHELINRVAEDCSDKFFKGFDNLMTICEYAIRIAGIAITVMSANMVVGAICFLIMVIIIPIAKKCGEEDYDAYEASSGKFRRARYFRNILSERDYADERKIFNFSGPVNEIWKEKFGEGIKISRKATKKNFIRIKSASCGTAISSCLIAGLLLCP

SEQ ID NO: 20105 - DNA, 555 bp, Unknown
  Obtained from environmental sample
  misc_feature (1)..(555): n is a, c, g, or t
atgaccgaccaattacaggaaatcggagcgcggctgggagcgttgcgggatgtnttcgacatctctgttgaaaaaatggccgagaaaatgaaagtttccgttgatgaatactccgcgtatgaacacggacagcgggatttttcattcagctttttgcagaatgcggcgcaggttttcaacgtagacgtagtggatattatttcaggcgaatcgccgaaacttaccaaatgcgctttggtcagaaacgggcagggattagacattgagcgccgcaaagcctacgactacaagcatctcgcctttaccttcagcaacaagaaggcggaaccgtttatggtaaccgtggagcaaaaacagggtgagaagccgacgcttcactcgcacgaagggcaggagtttgactatatgctttccggtaaaatggaattttattttgacgatataatttacgggcttaatgagggcgacagcgtatattttgattcaagcgtgcctcatgccatgaaagctataggcggccaggcggcaaaatttcttgccatcgtgataaaataa

SEQ ID NO: 20106 - protein, 184 aa, Unknown
  Obtained from environmental sample
  DOMAIN (12)...(66): Helix-turn-helix
  misc_feature (1)..(184): Xaa is any amino acid
MTDQLQEIGARLGALRDVFDISVEKMAEKMKVSVDEYSAYEHGQRDFSFSFLQNAAQVFNVDVVDIISGESPKLTKCALVRNGQGLDIERRKAYDYKHLAFTFSNKKAEPFMVTVEQKQGEKPTLHSHEGQEFDYMLSGKMEFYFDDIIYGLNEGDSVYFDSSVPHAMKAIGGQAAKFLAIVIK

SEQ ID NO: 20107 - DNA, 546 bp, Unknown
  Obtained from environmental sample
  misc_feature (1)..(546): n is a, c, g, or t
ttgtatatggagggaagatgggctgcacgggtagacatngataaaaggcaaaaaaagattctggaaaaagcccttgccgtttttatggaagaaggctatgaagacgctacttatcagaaaatagccgataagtgcggaattaccagaacaatactgtatctttactttaaaaataaaaaagaaatatttacctacagcattaaacattttttattaaccattgaggagcatattaacgcaatacgcgccaataattcattaagttgtcaggaaaagcttactaaagtgatttttgagatttttaaacttttggaacaaaataacaaactggtttctgttttacttgagtatattttgtacattgcaaaaaaagatattaacccggcaacgcgggtgcggcgcagagtattaaaacttcagcatattatatcgacaattattattgacggtgtaaaatccggagaactaaaaaaagttaacataaaaaaaacaaggaattatttatactgttttattgaatcggcaatttatcagttggctctttga

SEQ ID NO: 20108 - protein, 181 aa, Unknown
  Obtained from environmental sample
  DOMAIN (20)...(66): Bacterial regulatory proteins, tetR family
  misc_feature (1)..(181): Xaa is any amino acid
MYMEGRWAARVDXDKRQKKILEKALAVFMEEGYEDATYQKIADKCGITRTILYLYFKNKKEIFTYSIKHFLLTIEEHINAIRANNSLSCQEKLTKVIFEIFKLLEQNNKLVSVLLEYILYIAKKDINPATRVRRRVLKLQHIISTIIIDGVKSGELKKVNIKKTRNYLYCFIESAIYQLAL

SEQ ID NO: 20109 - DNA, 594 bp, Unknown
  Obtained from environmental sample
  misc_feature (1)..(594): n is a, c, g, or t
gtgcagggctctgccgaagctctgcgttcaagtttagagaagctttcaaccaaagaaataaggcttcatgttatccaggctttgcctggagccattaacgaaggggacgtggatctgtccattgcgtctaacgcgataataatcggctttaacgtgcggcctgtccccaaagccaaagcccttgcggagcaggaaaaagtcgagatacgccgctacaacgtaatttacaaggcggtggaagaaatccagctggcgatggaaggaatgctcaagcctgaaaccaaagaagaaataatcgccaccgtggaagtcagggatacgtttaaaacgccgaaattcggcgttgtcgccggctgttacgtgctgacaggaaacgtcaagcggagcggcagcatacatataatccgtgataacattgttatttatacaggtaaaattggctcgctcaggcgttttaaggacgatgtaaaggaagttgccgccggttatgaatgcgggataggtctcgaaggctttgacgatgtcaaggtaggagatcagtttgaggtctttgagatgatagaaattgccagaaaactgaaagatacaaattaa

SEQ ID NO: 20110 - protein, 197 aa, Unknown
  Obtained from environmental sample
  DOMAIN (114)...(182): Elongation factor Tu domain 2
  misc_feature (1)..(197): Xaa is any amino acid
MQGSAEALRSSLEKLSTKEIRLHVIQALPGAINEGDVDLSIASNAIIIGFNVRPVPKAKALAEQEKVEIRRYNVIYKAVEEIQLAMEGMLKPETKEEIIATVEVRDTFKTPKFGVVAGCYVLTGNVKRSGSIHIIRDNIVIYTGKIGSLRRFKDDVKEVAAGYECGIGLEGFDDVKVGDQFEVFEMIEIARKLKDTN

SEQ ID NO: 20111 - DNA, 366 bp, Unknown
  Obtained from environmental sample
  misc_feature (1)..(366): n is a, c, g, or t
ttgataaaaaatgaaaataaaataatggcaaagaaaaacgaaattgatgaaaaatatgtttttaagctgatgagtagtaatattaaacgccttagatctcttcagaatatgtcacaattaaatcttgccctcagtacgggacttacccataattttattaatgatattgaaaactgtaaaaaaggagtctcagcaaaaacattagcaaaactttcaattgcgttgaatgccgaaccgtatcaattctttctgcccgatgcgatggcaaacaatgaggttatgagttatgtaaaagattttaatgattctttacataaggtcgtaagcgagttgactcaacagtacttagccggagaaagaaaatag

SEQ ID NO: 20112 - protein, 121 aa, Unknown
  Obtained from environmental sample
  DOMAIN (28)...(82): Helix-turn-helix
  misc_feature (1)..(121): Xaa is any amino acid
MIKNENKIMAKKNEIDEKYVFKLMSSNIKRLRSLQNMSQLNLALSTGLTHNFINDIENCKKGVSAKTLAKLSIALNAEPYQFFLPDAMANNEVMSYVKDFNDSLHKVVSELTQQYLAGERK

SEQ ID NO: 20113 - DNA, 405 bp, Unknown
  Obtained from environmental sample
  misc_feature (1)..(405): n is a, c, g, or t
ttggagcgcaccctgggtcaggacaatctcccgcgactgagggagtatgtatttgtgccggtctttgcatggcccccacttttccgcatccgcgccgatctcggaaaaatttacagtttcaaatcgtttcaggacagccgcggcgaattattctctctctgctgcgagccggaagaaacgcttgttatccccgaaaggcccttctcaataactgacaagctccccttcttaaaagaagcgggcttcaggcgtttcattattgaccttagcggcccgcccctgaaaaagaaggcctacaaagacctgatgcgctccatagaaaactgcgtaccgctgcccgacataagcaggtttaactggaaagacggcttctataccaatgaacaagtaacaagtaacaaataa

SEQ ID NO: 20114 - protein, 134 aa, Unknown
  Obtained from environmental sample
  misc_feature (1)..(134): Xaa is any amino acid
MERTLGQDNLPRLREYVFVPVFAWPPLFRIRADLGKIYSFKSFQDSRGELFSLCCEPEETLVIPERPFSITDKLPFLKEAGFRRFIIDLSGPPLKKKAYKDLMRSIENCVPLPDISRFNWKDGFYTNEQVTSNK

SEQ ID NO: 20115 - DNA, 342 bp, Unknown
  Obtained from environmental sample
  misc_feature (1)..(342): n is a, c, g, or t
gtgtctttctttgatgtgnaaacctgggcaaagctcgctgatacctgcagcagcataggcaagaaggggcgcggcgtaagggtggtaggccgcctgaaacaggacaggtggacagataacgacggtaagccccgctcgcgtgttaccattgtcgcggagcacgtcgaattccgccccgaattcaaaaaagaggctgacgctgaaaaggacaaaaatgaggcgtacagcgacagccttgccgccgaggccgccgaacccgtcgaagtagtacaggactatgacgaagcgccggtaatgagggaatacgaggagagtccggtgttggcggaggcggtgttttaa

SEQ ID NO: 20116 - protein, 113 aa, Unknown
  Obtained from environmental sample
  misc_feature (1)..(113): Xaa is any amino acid
MSFFDVXTWAKLADTCSSIGKKGRGVRVVGRLKQDRWTDNDGKPRSRVTIVAEHVEFRPEFKKEADAEKDKNEAYSDSLAAEAAEPVEVVQDYDEAPVMREYEESPVLAEAVF

SEQ ID NO: 20117 - DNA, 489 bp, Unknown
  Obtained from environmental sample
  misc_feature (1)..(489): n is a, c, g, or t
ttgtacccctttgatggaatcggcatctacgacagggagcgatttattcgcctgaacggattcgatccttacattaaaaatttctactggcagctcatggattttggtttccgttccagcctttggggagaagaaatcgcctctacggctctgattaagctttcatacgaaggtcttgttcccgaagaggacagtacggccgatgaaggctttttaagattttttctgaaaaacctggctccggtttttaagggcgattatgcccacattccgttgcgacgttttctgggatacctaaaaatgaggggcggccttttagccgcatgggacgaattttcttccgcccgtacctgggtcaaaaccaaccgctttcgttttagctctgacgctggaattatgacagagcttttcgcttcgattgaaactgaagctgagactgaagctgaaagcggggacgagcgagatgagttagcaatggagggaaagtga

SEQ ID NO: 20118 - protein, 162 aa, Unknown
  Obtained from environmental sample
  misc_feature (1)..(162): Xaa is any amino acid
MYPFDGIGIYDRERFIRLNGFDPYIKNFYWQLMDFGFRSSLWGEEIASTALIKLSYEGLVPEEDSTADEGFLRFFLKNLAPVFKGDYAHIPLRRFLGYLKMRGGLLAAWDEFSSARTWVKTNRFRFSSDAGIMTELFASIETEAETEAESGDERDELAMEGK

SEQ ID NO: 20119 - DNA, 654 bp, Unknown
  Obtained from environmental sample
  misc_feature (1)..(654): n is a, c, g, or t
ttggagaatgtcttngagaatattactcttgacgttagtgcgggtacatccatttcccttgtcggttcgtcgggggtgggaaagacaacgctctgctctctcattccaaggttttatgagttaaactcaggaaagatacttcttgacggcagggatattcgggaaattgatcttgaaaccttgcggcaaaatataggagtagtcgcgcaggatgtgtacctttttaacggaaccgtgattgaaaacattgcttacggaaaaccttccgcccggcgtgaagaaataattcaagcggctaaaatggcgaaggcgcacgactttatcatggaattgcctgatgcttatgaaacgaaaatcggccagcgcggcatacgcctttcaggaggacagcgccagcgcttatctattgcgagagcatttcttaaggacgcgcctgcactgatccttgacgaagcgaccagcgcccttgactataccaatgagaaggctatccacgaaagccttgacagtttcttaaaagacagaaccgtgtttattatcgctcatcggctttcaactgtaaaaaaggccggaagggttgttcgtctttcagagcgtggctcagagcgtggcattgaagaaacaagcaattacggggacggcgatgtagtataa

SEQ ID NO: 20120 - protein, 217 aa, Unknown
  Obtained from environmental sample
  DOMAIN (15)...(199): ABC transporter
  misc_feature (1)..(217): Xaa is any amino acid
MENVXENITLDVSAGTSISLVGSSGVGKTTLCSLIPRFYELNSGKILLDGRDIREIDLETLRQNIGVVAQDVYLFNGTVIENIAYGKPSARREEIIQAAKMAKAHDFIMELPDAYETKIGQRGIRLSGGQRQRLSIARAFLKDAPALILDEATSALDYTNEKAIHESLDSFLKDRTVFIIAHRLSTVKKAGRVVRLSERGSERGIEETSNYGDGDVV

SEQ ID NO: 20121 - DNA, 480 bp, Unknown
  Obtained from environmental sample
  misc_feature (1)..(480): n is a, c, g, or t
atgggcaagctgatggaatttgttgatatttgcatttcaaacgaagaagacgcagcggatgttttcggtattcacgcaagcggcgctgatgtaacgtcaggaaaaatcagccatgatggctacaaggaagttgcgtcagcccttgttaaacgttttggttttaagcagactgcgattactctgcgggaatcaatatccgcagacaacaataactgggctgctatgttttatgacggaaaagatttttatttttcaaaaaaatatgaaattcatatagtagatagggtaggcggcggcgacagtttcgcggccggattaatatatgcctctcttaagggtatgccgccgcaggacatgctggaatttgccgttgccgcaagctgccttaaacattccattgaaggcgattttaattttgtaagtattgatgaagttgagaaacttgcaggcggcaacgcttcaggcagggttcagcggtag

SEQ ID NO: 20122 - protein, 159 aa, Unknown
  Obtained from environmental sample
  misc_feature (1)..(159): Xaa is any amino acid
MGKLMEFVDICISNEEDAADVFGIHASGADVTSGKISHDGYKEVASALVKRFGFKQTAITLRESISADNNNWAAMFYDGKDFYFSKKYEIHIVDRVGGGDSFAAGLIYASLKGMPPQDMLEFAVAASCLKHSIEGDFNFVSIDEVEKLAGGNASGRVQR

SEQ ID NO: 20123 - DNA, 333 bp, Unknown
  Obtained from environmental sample
  misc_feature (1)..(333): n is a, c, g, or t
ttggacggcggcttggcggaggtcaaagcttttttgagcagatgcctattcggcagaataggcgcgttttggggcgacgagagcaacgtaaactataaaagcaaaatactggagatgtcgcagcgcgacggtttcgggataccgagatacgttactacggaagccgagggcccggatcacgcgaagcgtttcaccgtgaagatatacgtcggcggcacggaactgggcgagggtataggcccgagcaaaaaagccgcccagcaagcggcggcgcagaacgccggtacgaattacgataaagagaagatagcggcggggcaaaaagtggcgtaa

SEQ ID NO: 20124 - protein, 110 aa, Unknown
  Obtained from environmental sample
  DOMAIN (32)...(98): Double-stranded RNA binding motif
  misc_feature (1)..(110): Xaa is any amino acid
MDGGLAEVKAFLSRCLFGRIGAFWGDESNVNYKSKILEMSQRDGFGIPRYVTTEAEGPDHAKRFTVKIYVGGTELGEGIGPSKKAAQQAAAQNAGTNYDKEKIAAGQKVA

SEQ ID NO: 20125 - DNA, 519 bp, Unknown
  Obtained from environmental sample
  misc_feature (1)..(519): n is a, c, g, or t
gtggttgtgggcagaaatcagataaagggcgtcaatataaagagccttctggatgattttttggcgaggaattatccgaaagccaaggtcaagacgtactttgccggatgcataccatgcggctaccgccgaggcaacatggcgctgcccggccttataaagtgcggcgacgcggcgaacgcgacgaacccgatctcccgcgccggaatagtggaagcgctgatgtcgggagggctggccggcagcgcggcctttgacatgctcggcgcggagaacggcaagcgtatgaagaaaatatgcgccgattatgagaaagcctggctggagaagcggggggcgaggcatttgaaattggcgaaagccaaagactcgttagccaaggtgccggatgaggattacaacatagcggcaaagacgcttggcgcgctctccgccgaaaaggtatcaatggcaagaattttcggtttgagcctaagcaggtttccgaggatcgtttgggctatgaggcatttgatgtaa

SEQ ID NO: 20126 - protein, 172 aa, Unknown
  Obtained from environmental sample
  misc_feature (1)..(172): Xaa is any amino acid
MVVGRNQIKGVNIKSLLDDFLARNYPKAKVKTYFAGCIPCGYRRGNMALPGLIKCGDAANATNPISRAGIVEALMSGGLAGSAAFDMLGAENGKRMKKICADYEKAWLEKRGARHLKLAKAKDSLAKVPDEDYNIAAKTLGALSAEKVSMARIFGLSLSRFPRIVWAMRHLM

SEQ ID NO: 20127 - DNA, 357 bp, Unknown
  Obtained from environmental sample
  misc_feature (1)..(357): n is a, c, g, or t
gtgcttgatccggcaagccgcacanctgcgtataaggggtcccgctttgttaacaggacgggcggcggcgcggtagacacgcggattaaggccgggatgttcgcgacgatcagccttgtcaccagaaccagggccaacgtgcctgtcataccaaggacttcggtaatcaacacatacggttcatggatagcctttataatagatgaaaacaacatcgcccgccggcgcgcgctggaattgggcatagaaaacgaaagattttttgaggtgataagcggcatcgaccttggggaacggattgtaaccgccggacagaactttcttacggacggcgaccctgtccgcgttgtggaataa

SEQ ID NO: 20128 - protein, 118 aa, Unknown
  Obtained from environmental sample
  misc_feature (1)..(118): Xaa is any amino acid
MLDPASRTXAYKGSRFVNRTGGGAVDTRIKAGMFATISLVTRTRANVPVIPRTSVINTYGSWIAFIIDENNIARRRALELGIENERFFEVISGIDLGERIVTAGQNFLTDGDPVRVVE

SEQ ID NO: 20129 - DNA, 705 bp, Unknown
  Obtained from environmental sample
  misc_feature (1)..(705): n is a, c, g, or t
gtgcaggacctttgccgtatgctgnttatgatgggcgcgcaaatcgaaggcattggttcaaacatactcactatcaccggtgtaaaaaaactttccggctgcgattttacaatcggtgctgattacatggaggtcggttcctttatcggacttgccgccgtcaccggaggagatctccacatcgaagggacatgcccccaggatcttcgcccggcgaaaatcgcctttggcaagctgggtatttcatgggcgcatgagggaacaactatacatgtcccccagaaacagccactagcagttaattgcgacttagggggcatgattcccaagatcgacgacgcgccctggcccggctttccccccgaccttaccagcattatcaccgttgtagccacgcaggtaaaaggaacggtgttgatccacgaaaaaatgtttgaatcgcggatgttctttgtggacaaactcatcggcatgggggcgcggatagtgttatgcgatccccaccgggccgttgtttccggtcccgcaaaactgcacggctcggaacttatcagcccggatgtccgcgccggcatggcaatgctcatagccgccctttgcgccgagggcaggagcgttatacgcaacgtctaccagattgagcgcggctacgaacgcctcgtggaaaggctttccgccctgggagcgttacttctccggcattag

SEQ ID NO: 20130 - protein, 234 aa, Unknown
  Obtained from environmental sample
  misc_feature (1)..(234): Xaa is any amino acid
MQDLCRMLXMMGAQIEGIGSNILTITGVKKLSGCDFTIGADYMEVGSFIGLAAVTGGDLHIEGTCPQDLRPAKIAFGKLGISWAHEGTTIHVPQKQPLAVNCDLGGMIPKIDDAPWPGFPPDLTSIITVVATQVKGTVLIHEKMFESRMFFVDKLIGMGARIVLCDPHRAVVSGPAKLHGSELISPDVRAGMAMLIAALCAEGRSVIRNVYQIERGYERLVERLSALGALLLRH

SEQ ID NO: 20131 - DNA, 420 bp, Unknown
  Obtained from environmental sample
  misc_feature (1)..(420): n is a, c, g, or t
gtggaaatggtttattttgcccaccccgaaaagagctacgaaaaccacgaggaattggtagcctgcggtgaaaagcttttgcaggatttagggctcccgcatagggttatttcgctatgcaaaggtgatttggggtttggagcagcaaagtgctacgatttggaggtgtttgcccctgttgaaaagaaatggcttgaagtaagctcggtttccaactttgaggactatcaggcgcgcagggcgaatatccgcacaaaaataaatggcaaaaatacctttgtgcataccttgaacggttcggggcttgcaaccccgcgtgttatggttgcaatttgcgaacaataccagcagtcggatggctcgcttgtgattccgcaggttttaaggccgtatatgggcggtatggaaaaaattgtgtaa

SEQ ID NO: 20132 - protein, 139 aa, Unknown
  Obtained from environmental sample
  misc_feature (1)..(139): Xaa is any amino acid
MEMVYFAHPEKSYENHEELVACGEKLLQDLGLPHRVISLCKGDLGFGAAKCYDLEVFAPVEKKWLEVSSVSNFEDYQARRANIRTKINGKNTFVHTLNGSGLATPRVMVAICEQYQQSDGSLVIPQVLRPYMGGMEKIV

SEQ ID NO: 20133 - DNA, 327 bp, Unknown
  Obtained from environmental sample
  misc_feature (1)..(327): n is a, c, g, or t
atggtaagccgcgagggcaatacctgggaagaaaaagtgctgcttgacaccctcaaactggtcgaattcgagcttgaccgctaccttgaaaaacaaggctccagcctgtaccgggaaagcgacacctcgggaccagccatggtaattgagcaaggcaagcggccaaaggtcatccagggctttgtcgaggccgcgaatgttgatcccgtggtcgagatggtgcagatgatcgaggtgaaccgttcatacgaagcgaaccaaaaaataatccaggttgaagaggccgcccttggcaccctgatcaaccaggtaatgaaattcggctga

SEQ ID NO: 20134 - protein, 108 aa, Unknown
  Obtained from environmental sample
  DOMAIN (65)...(103): Domain of unknown function (DUF1078)
  misc_feature (1)..(108): Xaa is any amino acid
MVSREGNTWEEKVLLDTLKLVEFELDRYLEKQGSSLYRESDTSGPAMVIEQGKRPKVIQGFVEAANVDPVVEMVQMIEVNRSYEANQKIIQVEEAALGTLINQVMKFG

SEQ ID NO: 20135 - DNA, 429 bp, Unknown
  Obtained from environmental sample
  misc_feature (1)..(429): n is a, c, g, or t
atggcttattttacgaagaaacaggctgagaaagaattcataaaatattcagggaatgttaccgaggacgacgtttccggcattttaagaaaggaaaaagcaattctgcataaagctcatggaccgctgagaaaatttttcaaaaacatcgagctccttttttctgtagtcaaggattatgcgaacgggaaatatagggaaataccgtgggcaacaatagcggccgcaattggcgcgttaatatatatttttagcccgatagatttaattccggattttatacccatacttggattaaccgatgatgccctggtacttggtttgtgtttgaccgctatagagaccgacttaaaaaaatatgaaatatggaaaagtcaatatgtcgaatatgagataattgaggaaaaaaaagaaggtacggatgcttaa

SEQ ID NO: 20136 - protein, 142 aa, Unknown
  Obtained from environmental sample
  DOMAIN (60)...(117): Protein of unknown function (DUF1232)
  misc_feature (1)..(142): Xaa is any amino acid
MAYFTKKQAEKEFIKYSGNVTEDDVSGILRKEKAILHKAHGPLRKFFKNIELLFSVVKDYANGKYREIPWATIAAAIGALIYIFSPIDLIPDFIPILGLTDDALVLGLCLTAIETDLKKYEIWKSQYVEYEIIEEKKEGTDA

SEQ ID NO: 20137 - DNA, 801 bp, Unknown
  Obtained from environmental sample
  misc_feature (1)..(801): n is a, c, g, or t
atgattgtgcaaaatcctgaagaactggaacggctgtaccttgcggaactgggtcttgaaccttcggaacattcaacccagcttgttgaacctgagtatttgctgcggctgctgctggaattcaataccgcctttggaatcatcgccaaccttgccgatgatttgcgtaatttgcagcgcagtgaaatcggggaactgcgggaaggttttgccgcggatcaggtcggttcttccaccatgccgcaaaaacgcaatccctggaattcggaacatattaaaagtttatggaaggcctttatgccgcgagtgaataccttttttatggatcagataagcgaacatcagcgggacctttccaattcggcaagccagcgctttattgccgattacatcgccggtttctgtctggcaatctcccgcatgacgggggtaatcaaagggttgggcgcggatcgggaacggctgcttgctaatttgcgcggcggtaccggcggccctgccggcggccttaccggcggagtattggcggaacccgcatatatactgctggctgaagccggcgtgtccgatgcccacgaagtaatccgtaaaattacccttaacgccgagaaagcgaatataagttttgcccaagcccttaccaaagagtcggatgtgttacaacggattggcggcaaaatggcggaactgggtttggttgcttcggctgatgatgctctgtcattctttgaaaaaccggaacgatataacggtcttgcggtgncaaaagcgcaatcattagcgcgcaaatataaaacataa

SEQ ID NO: 20138 - protein, 266 aa, Unknown
  Obtained from environmental sample
  misc_feature (1)..(266): Xaa is any amino acid
MIVQNPEELERLYLAELGLEPSEHSTQLVEPEYLLRLLLEFNTAFGIIANLADDLRNLQRSEIGELREGFAADQVGSSTMPQKRNPWNSEHIKSLWKAFMPRVNTFFMDQISEHQRDLSNSASQRFIADYIAGFCLAISRMTGVIKGLGADRERLLANLRGGTGGPAGGLTGGVLAEPAYILLAEAGVSDAHEVIRKITLNAEKANISFAQALTKESDVLQRIGGKMAELGLVASADDALSFFEKPERYNGLAVXKAQSLARKYKT

SEQ ID NO: 20139 - DNA, 495 bp, Unknown
  Obtained from environmental sample
  misc_feature (1)..(495): n is a, c, g, or t
ttggactgtgccgaggaagcggcaaaatcgggtattccggttattgccgacggcggcataaaattctcaggcgatattaccaaggccataggcgccggagccaatgtagtgatgattggcaacctttttgccggactcaaggaagcgccgggcagagaaataatttatgatggcagaattttcaaggaataccggggcatgggcagcatgggtgctattgccgacggggcgggtgaccgttaccaaataggcaaagatgaagagccggttcccgaaggcatagaaggccgcgttccctacaaaggtgaattgtctgtctacataaaccagcttatctcgggccttcgcaaaggaatgggttactgcggctgtcataatattgaagaactgaagaagtaccgcaaatttgtaagaattaccgccgccggtctgcgggaaagccacgcccacgacattaccattactcaggaagctcccaattattcgcgggcttaa

SEQ ID NO: 20140 - protein, 164 aa, Unknown
  Obtained from environmental sample
  DOMAIN (1)...(150): IMP dehydrogenase / GMP reductase domain
  misc_feature (1)..(164): Xaa is any amino acid
MDCAEEAAKSGIPVIADGGIKFSGDITKAIGAGANVVMIGNLFAGLKEAPGREIIYDGRIFKEYRGMGSMGAIADGAGDRYQIGKDEEPVPEGIEGRVPYKGELSVYINQLISGLRKGMGYCGCHNIEELKKYRKFVRITAAGLRESHAHDITITQEAPNYSRA

SEQ ID NO: 20141 - DNA, 411 bp, Unknown
  Obtained from environmental sample
  misc_feature (1)..(411): n is a, c, g, or t
gtgtttgtgaatgcggaaatcccctttataaccaagctgtataattcgggcataataaatatcgcgcaactgcacggcagcgaaagcgaagattatataaatacgcttaaaaaaacttgcgatgtgcctgttataaaagctgtgaacatagaaagcgcaaagcctgcaaatgcagactacctgctttttgataatggcaaaggcggaacgggcaaatcttttgattggaatttaatccctaaatgcgacaaggaatttttcttggctggcggcataaatttgaataacattaaagaagccgtaaagctgaacccctacggcatagatttgagcagcggcgtagaaaatgaaaaaggcgaaaaagacagggaaaaaatcatagaagcctgccggattgtgaaaaaaggttaa

SEQ ID NO: 20142 - protein, 136 aa, Unknown
  Obtained from environmental sample
  DOMAIN (2)...(135): N-(5'phosphoribosyl)anthranilate (PRA) isomerase
  misc_feature (1)..(136): Xaa is any amino acid
MFVNAEIPFITKLYNSGIINIAQLHGSESEDYINTLKKTCDVPVIKAVNIESAKPANADYLLFDNGKGGTGKSFDWNLIPKCDKEFFLAGGINLNNIKEAVKLNPYGIDLSSGVENEKGEKDREKIIEACRIVKKG

SEQ ID NO: 20143 - DNA, 723 bp, Unknown
  Obtained from environmental sample
  misc_feature (1)..(723): n is a, c, g, or t
atgcggcttgagggaaaaacagcgttaatcagcggggcggcgcaggggctgggcgcggcaatggcgcggcgctttgcggaagaaggcgcgcgggttttcatcggagacctcaaagcggaagcaggaaacgcagtcgcagcggaaatctgcgggaaaggcggcaaggcggcctttttaagccttgatgttaccaatgaacagagctgggtagacgcgatggcggcggtgcggcaggaggccgggcggcttgacattttggtgaacaacgcggggatcaatatccgcgagccgattacaacaatgaaagttgaaagccttgacctaatgctagcggtaaacgtaaagggcccgtttttgggtaccaaacacgccattcccctgatgcaggaatcgggcggagggctgattatcaacatatcttcggtctgcgggcttatcgggcacgcgttcaccacggaggcctacaccatgaccaagggggcgttaaccctgttgaccaagtcaatcgccgttcgctacgcgaaggacaatatccgctgcaacagcatccatcccagcacggtgaataccccgctgatgcaggagctgttcaaggaccctgtaaaaaagaagcagcgttatgacgaagtgcccctgggacggcttgccaccgaagcggacgttaccaacgccgcgctttccttgcctccacgaggcgcttttaaacggagtgctctgcgataa

SEQ ID NO: 20144 - protein, 240 aa, Unknown
  Obtained from environmental sample
  SIGNAL (1)...(26)
  DOMAIN (6)...(174): short chain dehydrogenase
  misc_feature (1)..(240): Xaa is any amino acid
MRLEGKTALISGAAQGLGAAMARRFAEEGARVFIGDLKAEAGNAVAAEICGKGGKAAFLSLDVTNEQSWVDAMAAVRQEAGRLDILVNNAGINIREPITTMKVESLDLMLAVNVKGPFLGTKHAIPLMQESGGGLIINISSVCGLIGHAFTTEAYTMTKGALTLLTKSIAVRYAKDNIRCNSIHPSTVNTPLMQELFKDPVKKKQRYDEVPLGRLATEADVTNAALSLPPRGAFKRSALR

SEQ ID NO: 20145 - DNA, 558 bp, Unknown
  Obtained from environmental sample
  misc_feature (1)..(558): n is a, c, g, or t
atggttcccattgtcatgaatgtntcagagttaaaacttatcgcttacggtaaaaaaatcgaaggttcaaactaccttggtattgttgatattgaggaagcgttaagaaaagaattaaaggcaaaagaagttgattataaaatcggcacaatgatagaactgccggcggcggctcttggcgcgggagaaatcgcaaggtacggacgtttcttcagtttcggaacaaacgatttaacgcagacaacgttgggcatttcaagggacgattttaccgcttttatgccggattatactctgtttgatcttatcgacggcaacccgttcagcacgctggacaagagggtaaaagaactgattacaatagcggcagatcgcggacgtattacgcggcctgatcttgtctgcggcttgtgcggcgaacatggcgcgaatccagcaaacgtgcgtttctgcatggaggccggtttaaactatgtttcctgttccccgtattctgtaccgatagctctgcttgcgatagcccagacggaaattgaaaagtctgaagctaaagcataa

SEQ ID NO: 20146 - protein, 185 aa, Unknown
  Obtained from environmental sample
  DOMAIN (1)...(178): PEP-utilising enzyme, TIM barrel domain
  misc_feature (1)..(185): Xaa is any amino acid
MVPIVMNVSELKLIAYGKKIEGSNYLGIVDIEEALRKELKAKEVDYKIGTMIELPAAALGAGEIARYGRFFSFGTNDLTQTTLGISRDDFTAFMPDYTLFDLIDGNPFSTLDKRVKELITIAADRGRITRPDLVCGLCGEHGANPANVRFCMEAGLNYVSCSPYSVPIALLAIAQTEIEKSEAKA

SEQ ID NO: 20147 - DNA, 957 bp, Unknown
  Obtained from environmental sample
  misc_feature (1)..(957): n is a, c, g, or t
gtggacggcgacgtgataacgggccgtccctggctgaggggcagggctatgtacgtcaagccgccgcaccccgacggcaggccctacaaccgcgccgagatttcgcgctacgctgtcacgaaggtggagataagctacgacaacgggcgcaccttcgcgcaggcccttggcaagggcgactggcgctggcggctggagccgctggatcttccgcaggggacgcagcctgttgtggtcagggccagctttgaaaacggcgagaacgcggtgcgccgcgttctcctgttcatggaccctgatgacccgaccgctgaaacaaccgccccgcgcgagaagagcgtgcaccgcgacgagcttaacgtctttggcgcggccgacgacaattttgagcttaacgaagttaacataaatttgcgcccctacggcaagttctggtacgaggtaccctacgcgatacgcggcctgtactttgacattaagaccctgggcgcgacttactttgacgttggcgtgggcctgagtttttttgacggcaacgtgcgcctgcaggggcagtacggcaaagcgcccccctggggcgaagttgggttaatggtcgagggcggccgctacgtcggcgacgtcgtgggtttcaagctggtagcgaatataggctccatcccctttgactggcttttcaaggacagggactgggagttttacaaggtaaacttcggccttggcgccaatttttcctggttcgagatggactggcgctcctctctgtacatgggttcggtgctgatgcagatagacatagcaaacgtggagatcaggtacatataccccaactggaaatacttccacatcgtttcattttacttacagcccgaagcctggttcgcctcatccgacgccctcgacgacggcttcggcaacaaggtaccaaaggtataccgaggatttcgattgggttag

SEQ ID NO: 20148 - protein, 318 aa, Unknown
  Obtained from environmental sample
  misc_feature (1)..(318): Xaa is any amino acid
MDGDVITGRPWLRGRAMYVKPPHPDGRPYNRAEISRYAVTKVEISYDNGRTFAQALGKGDWRWRLEPLDLPQGTQPVVVRASFENGENAVRRVLLFMDPDDPTAETTAPREKSVHRDELNVFGAADDNFELNEVNINLRPYGKFWYEVPYAIRGLYFDIKTLGATYFDVGVGLSFFDGNVRLQGQYGKAPPWGEVGLMVEGGRYVGDVVGFKLVANIGSIPFDWLFKDRDWEFYKVNFGLGANFSWFEMDWRSSLYMGSVLMQIDIANVEIRYIYPNWKYFHIVSFYLQPEAWFASSDALDDGFGNKVPKVYRGFRLG

SEQ ID NO: 20149 - DNA, 339 bp, Unknown
  Obtained from environmental sample
  misc_feature (1)..(339): n is a, c, g, or t
ttgggtttatggccgaggggagcggcagcagaatacgagcttattgtcgcggctttgggagaaaacggaaaggcagcgcagttgtgtgctgacctgaatgttaacgggtataatgactggttttttccgagcagggatgaactgaatttgatgtacgagaacctgaaacggatggaacttggcagttttaaagacgacctttactggtcttcgtcgcagtacgatttcaacctcaactacgcgtggatgcagaggttcagtgacggttcccagagcaacatcaccaacagcggctacaaggatcgtacgtatttcgtccgggctatccgggctttttaa

SEQ ID NO: 20150 - protein, 112 aa, Unknown
  Obtained from environmental sample
  misc_feature (1)..(112): Xaa is any amino acid
MGLWPRGAAAEYELIVAALGENGKAAQLCADLNVNGYNDWFFPSRDELNLMYENLKRMELGSFKDDLYWSSSQYDFNLNYAWMQRFSDGSQSNITNSGYKDRTYFVRAIRAF

SEQ ID NO: 20151 - DNA, 381 bp, Unknown
  Obtained from environmental sample
  misc_feature (1)..(381): n is a, c, g, or t
atgtgcaaaggtaaaccggcccgggacgaagggataatcagcctggagttggaaattcggggcatgaaaaaaaattctgaaacccgctaccgtttaattgagagcttcagagacgatttttcccttatggaactggaactggggacaggcaggatgcaccagatacgccgccatcttgccctgacaggcaaccccgtccttggcgatgacaagcacggtgattttaccctgaaccatctgctccgcaagacaatgaagcttaacaaactcctcctgcatgcgtctcagctaatcatcccggaaaccccggataatccccgccttgacctgagcgcgcccttgccggaatattttagcgaattcattattcagatcaggtaa

SEQ ID NO: 20152 - protein, 126 aa, Unknown
  Obtained from environmental sample
  misc_feature (1)..(126): Xaa is any amino acid
MCKGKPARDEGIISLELEIRGMKKNSETRYRLIESFRDDFSLMELELGTGRMHQIRRHLALTGNPVLGDDKHGDFTLNHLLRKTMKLNKLLLHASQLIIPETPDNPRLDLSAPLPEYFSEFIIQIR

SEQ ID NO: 20153 - DNA, 735 bp, Unknown
  Obtained from environmental sample
  misc_feature (1)..(735): n is a, c, g, or t
ttggcgaagcttcatcctgatataataaaaataaatattgattatattcacaacagcgaacattcatatcattaccgtgagtatttacgcgccattgccgttttcgccgattcagtaggcatcgaagttctgcatgaaggggtggagactgaacgccaacttgatatttgcatttcctcaaaaggaaggttttatcagggattcctgcttgcatccccccaggcgtccatgcgcgatccggttgtaaattcatttgttttttccgcgttaatcgcaaccgcctataacgccatacaaaccaggacggccgatgcggaatcattaaaaaattccctggatattcaagttgaacgtttccttcatggaaacccgttcgatagcgaaaagataaacgacgacgaatacctaataaaacttttctgtgacttgaaggatgtgatacggatttatttgtgcaataaaaaaggcgtccagctctccaataatattgagcgggaatcggataatatcatatgccgcgattataaaaataaaatttgggcatggcgcggattttttcatgaaacaatgaaggcctttatccgaggcagaaaaagctgtttatcaaacccgtaccgtgattttacgacaaaagaaaaaatatgcacctactgttacgcgataaccgatgatatattcttatttgcggatatgttaaaaaattcggaggagacaaaagattatgccgttagatag

SEQ ID NO: 20154 - protein, 244 aa, Unknown
  Obtained from environmental sample
  misc_feature (1)..(244): Xaa is any amino acid
MAKLHPDIIKINIDYIHNSEHSYHYREYLRAIAVFADSVGIEVLHEGVETERQLDICISSKGRFYQGFLLASPQASMRDPVVNSFVFSALIATAYNAIQTRTADAESLKNSLDIQVERFLHGNPFDSEKINDDEYLIKLFCDLKDVIRIYLCNKKGVQLSNNIERESDNIICRDYKNKIWAWRGFFHETMKAFIRGRKSCLSNPYRDFTTKEKICTYCYAITDDIFLFADMLKNSEETKDYAVR

SEQ ID NO: 20155 - DNA, 972 bp, Unknown
  Obtained from environmental sample
  misc_feature (1)..(972): n is a, c, g, or t
ttgatgacgagcagatatgtccccttccgtctggggctttccctttcgcccattatggcccagatgttatgcgacgatcttctccaaaaaaaatataccgcttatctggatcatcaaattgatttcggcaaacaggagattgaacgtctccgcggaaaacccgcgctgcgcctgctcgcgcagcattattttgacgaagccgttgaccggcgcgccgccttgagtacccgttatgaaggcaatattttcagggcgcttgaacattatcagcagaaaagaaacatagaattgctcgccgctccggcgacccatgcttttcttccctttttttgttcctttcccgaagcattacaggcgcagatagaaacagccctcgctttttaccgttattcgtttggtatcacccctcagggtttttggcttcccgaactgggctggtcaaaagagcttgacccgttcctgcgctcatataattttaattacaccattgttgatagtcatggctttgtgctgggaaacccgccgccgtcgcggggcagtttttttcccgtcaggacgccgcagaacatcattatacttgcccgtgatttttacgcatgttccgatataagcagaatgtcacgggaagggccgtaccgtgacaacaaccgggacattggctatgaacttcccatcgaaatgataagtccctttattgcccaaaacggggcgcgatgtcagaccggttataaatactggcaggtatcggagggcgatgataaggtctatgatccggccgcggcgcangaagccgcggaagaacacgcgcgggcttttcttgaaaattgctgtaccagatttgaagatgcccggcggttttatgaagaagatcccctttccctctgcgccttttacgcggacagttttggacgccattggcatgaagggccccaattctggaaagcttttcccgctttgcggcggctaccgtga

SEQ ID NO: 20156 - protein, 323 aa, Unknown
  Obtained from environmental sample
  DOMAIN (2)...(319): Glycosyl hydrolase family 57
  misc_feature (1)..(323): Xaa is any amino acid
MMTSRYVPFRLGLSLSPIMAQMLCDDLLQKKYTAYLDHQIDFGKQEIERLRGKPALRLLAQHYFDEAVDRRAALSTRYEGNIFRALEHYQQKRNIELLAAPATHAFLPFFCSFPEALQAQIETALAFYRYSFGITPQGFWLPELGWSKELDPFLRSYNFNYTIVDSHGFVLGNPPPSRGSFFPVRTPQNIIILARDFYACSDISRMSREGPYRDNNRDIGYELPIEMISPFIAQNGARCQTGYKYWQVSEGDDKVYDPAAAXEAAEEHARAFLENCCTRFEDARRFYEEDPLSLCAFYADSFGRHWHEGPQFWKAFPALRRLP

SEQ ID NO: 20157 - DNA, 891 bp, Unknown
  Obtained from environmental sample
  misc_feature (1)..(891): n is a, c, g, or t
gtggtaaacatcgccgtaaatatccttatccgaaacatagcccgtgctgattttaccatcaaaaagggcggcaacgacattgataacggcccaatttttgatttattccgcagaccaaattcatttttaagccgatatgacctctggaaagaaaccgcagcttggtggtttattgaaggcgaagcgttttggtggttcggccccgattattcggcggggcttccaaaagagatttatatacttgacccccgaaaaatgcggcatgagggagaactgcaaggcggcatagcctttgatttttataacaagccccgccgctggttttaccattccggtactgaactaatccctatactttcagatgaaataatccactttcgggaatggaacccgtggaaccctgtaaggggcgttaatcctttgctgtctatggctatggaattagaacaggattactacgccaataaagcgaattcgcaacttttaaaaaacaacgccataccgcaagggatattaaaaacagagcagacattaaggccggaggaagcagaccagcttgaaaggaggtgggaaagcaagtatggggctgtaaagtcggggcgcaagattgcggtactcggaaagggaacgagctttgaaccgctgtcatttacgccggaagtaataaaactgtttgaactgaaacgctggaacctctacacgatattggcgaagtacggtataccgcccagagttgccaacataagcgacaagtctaccgccctttccggcaaggataccgccgaacagcacagcgcattttggaaatatacgttaatccctattctccggcaatatgagcaaattctgaaagccaatttttatcaggctcggcaacctcggccgatctga

SEQ ID NO: 20158 - protein, 296 aa, Unknown
  Obtained from environmental sample
  DOMAIN (2)...(294): Phage portal protein
  misc_feature (1)..(296): Xaa is any amino acid
MVNIAVNILIRNIARADFTIKKGGNDIDNGPIFDLFRRPNSFLSRYDLWKETAAWWFIEGEAFWWFGPDYSAGLPKEIYILDPRKMRHEGELQGGIAFDFYNKPRRWFYHSGTELIPILSDEIIHFREWNPWNPVRGVNPLLSMAMELEQDYYANKANSQLLKNNAIPQGILKTEQTLRPEEADQLERRWESKYGAVKSGRKIAVLGKGTSFEPLSFTPEVIKLFELKRWNLYTILAKYGIPPRVANISDKSTALSGKDTAEQHSAFWKYTLIPILRQYEQILKANFYQARQPRPI

SEQ ID NO: 20159 - DNA, 813 bp, Unknown
  Obtained from environmental sample
  misc_feature (1)..(813): n is a, c, g, or t
gtggccgcgggctggatagcctcggggcttgatcctgagaaggttattttttaccgacagagttccattcccgaagtttttgaactcaccgttataatcatggcgtctaccgctaagggccttttgaaccgggcccatgcctacaaggccgcggtgcaggcaaacgccgaaaagggcaacgatcccgatgccggaattaacatggggctttttacctatccggcgcttatggcggcagacataattctctttgattccgatgttgtaccggttggcgaagatcagatgcagcacattgagatagcccaggatattgcgcaggcgtttaacgccaactacggtaaggttctcaaagttccgcaagccgcaatacaggaagaagttgcggtactgcctggccttgacggccggaagatgagcaagagctacggcaacactattcctctctttgcgcctgaaaaagagctttacaaaaccattatgcgtatcgttactaattcgcaggttgtggcagacaagaaagatcccgacacttctcagatatacaactattacaagctctttgctactcctgacgagcaggccgcgctggcctcacgcctgcgcgccggcggcatgggctggggtgatgcaaaggaagagcttttcagggtggcaaaccgcgaactcacgcccaagaggcagaagtacgatgagctcatggcgaatcccagagtgcttgatgaaatcctcgcgaagggagccgaacgcgccaggcccattgccgccgcaacggttaaacgcgccagaaaagccacagggattgactcgtag

SEQ ID NO: 20160 - protein, 270 aa, Unknown
  Obtained from environmental sample
  DOMAIN (1)...(224): tRNA synthetases class I (W and Y)
  misc_feature (1)..(270): Xaa is any amino acid
MAAGWIASGLDPEKVIFYRQSSIPEVFELTVIIMASTAKGLLNRAHAYKAAVQANAEKGNDPDAGINMGLFTYPALMAADIILFDSDVVPVGEDQMQHIEIAQDIAQAFNANYGKVLKVPQAAIQEEVAVLPGLDGRKMSKSYGNTIPLFAPEKELYKTIMRIVTNSQVVADKKDPDTSQIYNYYKLFATPDEQAALASRLRAGGMGWGDAKEELFRVANRELTPKRQKYDELMANPRVLDEILAKGAERARPIAAATVKRARKATGIDS

SEQ ID NO: 20161 - DNA, 516 bp, Unknown
  Obtained from environmental sample
  misc_feature (1)..(516): n is a, c, g, or t
gtgggattggtttttcaggaggcggacacccagattctgggtgaaaccgtggaagaggacatacgcttcggccccgaaaacctaaagctcccaaaggaagaaattgagagccgtgttgaagaaaccctctcgcttttggaactttcagaaaagcgcggtttcgcgtcccgtcatctttcaggcggggaaaagcggcgccttgccgtggcgggggtgctggctatgggctgccagacaatcatcatggacgaaccattcgcaaacctggactggcccggagtaacccaggtcttgaacataatcagccttttgaaacagggcggcaaaaccgtcatcatccttacgcatgaacttgaaaaagttctggccttcgctgaccgccttgtgatcctctggaaagggaaggtcagggattcaggtgatgccgaagcggtgttggaaagattaaaggccgaatggggagtgagagacccaagaaaaacttacaaaaacgcgagagattgtacctggttatga

SEQ ID NO: 20162 - protein, 171 aa, Unknown
  Obtained from environmental sample
  DOMAIN (3)...(134): ABC transporter
  misc_feature (1)..(171): Xaa is any amino acid
MGLVFQEADTQILGETVEEDIRFGPENLKLPKEEIESRVEETLSLLELSEKRGFASRHLSGGEKRRLAVAGVLAMGCQTIIMDEPFANLDWPGVTQVLNIISLLKQGGKTVIILTHELEKVLAFADRLVILWKGKVRDSGDAEAVLERLKAEWGVRDPRKTYKNARDCTWL

SEQ ID NO: 20163 - DNA, 687 bp, Unknown
  Obtained from environmental sample
  misc_feature (1)..(687): n is a, c, g, or t
atgatcgtaaccataaaagacctctggaaaatctaccccatgggcggccttgaagttcaagccctaaaaggcgtaaatcttgaaatctccgaaggcgatttcgtcgccgtcgcgggtccttccggttccggaaaaaccacgctaatgaacatcataggcttaatcgacagttttaccaggggcagccttacaattaacaatcttgaaattaattcccaaaaacgaagggaacttgcccgtctgcgccgcgatcttttaggctttatcttccagtcctttaaccttctgcctgtgttaaatgtttttgaaaatgtggaacttccgcttattatctccggcaaaggcggaacaaaggcgcagaggcgggacagggttaattatttgctggaagaagtcgggcttgcggacagaagccgccatattcccactgaactttccggcgggcagcagcagcgtgtcgctatcgcgcgggcgctggttacaagtcccagaatcgttatcgcggatgaacctaccgcaaacctggactcgaaaaccggagaaaaagttttaagccttatgaagcagataaaccgggatgaaaaaacaactttcatcttttccacgcacgaccctgaaatttggaaaatggcggatcatgttatcttcttgcaggatggtcttattaaatcggagcaaaggcagtaa

SEQ ID NO: 20164 - protein, 228 aa, Unknown
  Obtained from environmental sample
  DOMAIN (32)...(220): ABC transporter
  misc_feature (1)..(228): Xaa is any amino acid
MIVTIKDLWKIYPMGGLEVQALKGVNLEISEGDFVAVAGPSGSGKTTLMNIIGLIDSFTRGSLTINNLEINSQKRRELARLRRDLLGFIFQSFNLLPVLNVFENVELPLIISGKGGTKAQRRDRVNYLLEEVGLADRSRHIPTELSGGQQQRVAIARALVTSPRIVIADEPTANLDSKTGEKVLSLMKQINRDEKTTFIFSTHDPEIWKMADHVIFLQDGLIKSEQRQ

SEQ ID NO: 20165 - DNA, 894 bp, Unknown
  Obtained from environmental sample
  misc_feature (1)..(894): n is a, c, g, or t
atggttcttgataaatttttcttgccggaaccgcaccgttataccctgctggcggttttcgtcgcggcgtacctgattctcggcggcaatgttgtctttagggcgttaaaaaacattgcgcgagggcaggtttttgatgaaaattttctgatgagcattgccaccatcggggcgtttgcaatcggtgaatatcccgaagcggcgggggttatgctcttttatcagattggggagatgtttcaggatttggcggttagacggtcgaaaaaatccattaccagcctgatggacattcgccccgattatgccaacctcaggaaaggcggcggcattgaaaaggttgcgcctgatacggtaagcgttggcgatattattattgtcaaatcgggagaaaaaattcctctggacggcattgtcgttgatggtatttccatgcttgacacttcagcgctgaccggggaatccattccccgaaaagcggaaaccggagacgcggtattgtcgggcagcgttaatcagagcggcgtgctgacaatagaagttacaaaaaatttcggcgaatcaaccgtttcaaaaattatagaccttgttgaaaacgcctcaggtaaaaaagcgaaaaccgaaaactttatcaccacatttgcgcggtattatacgcccgttgttgtcgttcttgcggtgttgatcgccgtcctgccgcctctgatttttgacgtgtctgcgggcagtgtatggcgtgactggataaaccgagctcttgtttttcttgttatatcctgcccctgcgcccttgtctttatcattccgatgggctttttcgccggtataggcagggcggcaaagaaaggtattttggtaaaaggaagtattaccctgaggcttttacagccttga

SEQ ID NO: 20166 - protein, 297 aa, Unknown
  Obtained from environmental sample
  DOMAIN (69)...(294): E1-E2 ATPase
  misc_feature (1)..(297): Xaa is any amino acid
MVLDKFFLPEPHRYTLLAVFVAAYLILGGNVVFRALKNIARGQVFDENFLMSIATIGAFAIGEYPEAAGVMLFYQIGEMFQDLAVRRSKKSITSLMDIRPDYANLRKGGGIEKVAPDTVSVGDIIIVKSGEKIPLDGIVVDGISMLDTSALTGESIPRKAETGDAVLSGSVNQSGVLTIEVTKNFGESTVSKIIDLVENASGKKAKTENFITTFARYYTPVVVVLAVLIAVLPPLIFDVSAGSVWRDWINRALVFLVISCPCALVFIIPMGFFAGIGRAAKKGILVKGSITLRLLQP

SEQ ID NO: 20167 - DNA, 492 bp, Unknown
  Obtained from environmental sample
  misc_feature (1)..(492): n is a, c, g, or t
ttgcaaaaaacggtatggttacccggggataatccgcacattgccggggctgtcgccgccgaattgaaattggacgaagtgtatggtgttctgttgccccatgaaaaagttgagaagatggaaatctttaacggcaaaaanagcgccaaaggtaaacttgcttttgtgggagacggcataaatgacgcgcctgttctcgcaatggcggatataggcgtggcgatgggcggtctcggttccgatgccgctgttgaagccgctgatgtcgtgttaatgaccgacgagccttcaaaactttgtgaagctgttgatattgcccgttttaccaaaaaaatcgtatggcaaaacattgtttttgtgttaggtgtaaaaggtgtttttctggcgctcggcgcttttggcattgccacaatgtgggaggcggtctttgccgatgttggggtatcgcttctggcagtaattaacgcgatgagaataatgggggcaaaatga

SEQ ID NO: 20168 - protein, 163 aa, Unknown
  Obtained from environmental sample
  misc_feature (1)..(163): Xaa is any amino acid
MQKTVWLPGDNPHIAGAVAAELKLDEVYGVLLPHEKVEKMEIFNGKXSAKGKLAFVGDGINDAPVLAMADIGVAMGGLGSDAAVEAADVVLMTDEPSKLCEAVDIARFTKKIVWQNIVFVLGVKGVFLALGAFGIATMWEAVFADVGVSLLAVINAMRIMGAK

SEQ ID NO: 20169 - DNA, 792 bp, Unknown
  Obtained from environmental sample
  misc_feature (1)..(792): n is a, c, g, or t
atgcgctttaaaattcatgaggcggacgagcgcgtaaggctcatgctggacacgtcccctctttgctgcattctctgggataaaaatatcaatatcatcgaatgtaacgaggcggcggtcaagcttttcaatctgaacaataaacaggaatatatgaacaggtttttcgaattgtcgccggaacgccaggccaacggggagctttcctacgtgctgtcggtcagacatatcaaaaaagcgtttaacgaaggcagatgcgtatttcaatggacgcaccaaatgctggacggcacgccgatcccggcggaaatcacgctggtgcggatcagctatggcggagattacgtcgtagccgggtacacgcgggatctgcgcgaacataaaatgatgatgcaaaacatccgcgaaagcgccgcggaactggaggcggcgcttgaaaaggcccaggccgccaaccgcgccaaaagcaacttcctgtcaaatatgagccatgagatgcggactcccatgaacgccattatcggcatgacgctgatcggcaaatcggcgtccgacattgaaaaaaaggattacgcttttgaaaagatagagggcgcctcaacccatcttctgggcgttatcaacgacgttcttgacatgtcaaaaattgaggccggcaaattcgatttgtcctgtgaggatttcaattttgaaaaactgctgcaaaaggttataaacgtcatcaatttccgcgtggatgaaaaacatcagcgcctgacggttaatactgacccgaatattccaataatttga

SEQ ID NO: 20170 - protein, 263 aa, Unknown
  Obtained from environmental sample
  DOMAIN (10)...(124): PAS fold
  misc_feature (1)..(263): Xaa is any amino acid
MRFKIHEADERVRLMLDTSPLCCILWDKNINIIECNEAAVKLFNLNNKQEYMNRFFELSPERQANGELSYVLSVRHIKKAFNEGRCVFQWTHQMLDGTPIPAEITLVRISYGGDYVVAGYTRDLREHKMMMQNIRESAAELEAALEKAQAANRAKSNFLSNMSHEMRTPMNAIIGMTLIGKSASDIEKKDYAFEKIEGASTHLLGVINDVLDMSKIEAGKFDLSCEDFNFEKLLQKVINVINFRVDEKHQRLTVNTDPNIPII

SEQ ID NO: 20171 - DNA, 693 bp, Unknown
  Obtained from environmental sample
  misc_feature (1)..(693): n is a, c, g, or t
ttggaggcaaagaataatctacctgcctgtcgtggaaggcatccacatttgcatcagtatgaaggatgtgatgaagaaccgcatactattttgttaggggcgactaatggctggtttcctgttactgtttcaatcttagcaataccgttggaacaaaatgtattagaacaattacttcttgacggctgggaatattttgaagatgcggcatctgctgacgaagttaatataataataaagacattgcaaaagaagaacagtttaccaggaatagaaagatttgatccccgagatgtttggcaagcaattgaagaaaaaagaaaaggaacaaaaaaacaagcagcaatttctgatagtgatattaaaggaccggaatggaatgttctgatttctgacaaaccgtctattggatggcctcatttttcatgttctgccggagttgtgcctgaaaattttcaacgttatttttcaaaaatagttttacttgaccgactacgtgaggtaaatgctctggttggatatacccgtgtagattctccagatgatgcaagcgattctggtgaaggtcctgaaatggcaagtttatgcagggatcaaccagaatgggttccttctgttgatgtacatggtgaaggcattttctttaagttaacgaaagctgtatttctgaatgggaaaaaacaaagacgttaa

SEQ ID NO: 20172 - protein, 230 aa, Unknown
  Obtained from environmental sample
  misc_feature (1)..(230): Xaa is any amino acid
MEAKNNLPACRGRHPHLHQYEGCDEEPHTILLGATNGWFPVTVSILAIPLEQNVLEQLLLDGWEYFEDAASADEVNIIIKTLQKKNSLPGIERFDPRDVWQAIEEKRKGTKKQAAISDSDIKGPEWNVLISDKPSIGWPHFSCSAGVVPENFQRYFSKIVLLDRLREVNALVGYTRVDSPDDASDSGEGPEMASLCRDQPEWVPSVDVHGEGIFFKLTKAVFLNGKKQRR

SEQ ID NO: 20173 - DNA, 711 bp, Unknown
  Obtained from environmental sample
  misc_feature (1)..(711): n is a, c, g, or t
gtgttttacgatactgccggcgcgcaaatagcgagagcgcagatagtattaggtataaacgagttcagaatacttgaatttgaaaatcctatttccgaggactggctggaaaagtacggacatgttcccttgccgccgtatataaaacgtgaagacgctccgtccgacgcgcagcgttatcagacaatttacgcgaaggagacaggctccgcggcggcccctacggcaggtttgcattttacgcgggaaattctggaccgtctttgcgcaaacggaatagaaagcgtttttatcacgcttcatgtggggatgggaactttctatcccgtaagaagcgaaaacattgaagatcatcccatgcacagcgaggcgttcagcatagatgaagataccgcgcaaaaaataaaggcggcaaaagaggccggacggaaaattattgcggtagggacaacaagcgtgcgtactttggaaagcgcgtggagcgaagggaaaattataacaggcgagggaagcacatcaatttttatttatcccggttataaatttaaaatagcggacgcgatttttacaaattttcacacacccgaatccacgctgttaatgcttgtatccgcgtttgcgggaagagaacttattttggaaagctacgcggaagctgtaagtgaaaggtatcgttttttcagctatggcgacgcgatgttaattttttaa

SEQ ID NO: 20174 - protein, 236 aa, Unknown
  Obtained from environmental sample
  DOMAIN (1)...(112): Queuosine biosynthesis protein
  misc_feature (1)..(236): Xaa is any amino acid
MFYDTAGAQIARAQIVLGINEFRILEFENPISEDWLEKYGHVPLPPYIKREDAPSDAQRYQTIYAKETGSAAAPTAGLHFTREILDRLCANGIESVFITLHVGMGTFYPVRSENIEDHPMHSEAFSIDEDTAQKIKAAKEAGRKIIAVGTTSVRTLESAWSEGKIITGEGSTSIFIYPGYKFKIADAIFTNFHTPESTLLMLVSAFAGRELILESYAEAVSERYRFFSYGDAMLIF

SEQ ID NO: 20175 - DNA, 330 bp, Unknown
  Obtained from environmental sample
  misc_feature (1)..(330): n is a, c, g, or t
ttgaggtcacaaattgtgacctcaaactcaaagagcaatagaggcggtaggcgttatgttccttatgtttttaccgaacaaggcgtttcaatgctgtccagtgtaattaattcggaacgtgcaataaaagtaaatatcaatatcatgaggacttttgtacagttaagacattatgtgcttgataaatcaggcactaatgaacaaatagcggaattgcgtaaactgcttatgctctacatcgaaaaaaatgataaacgggtgaatgaaatcattattgctctcaataaccttattgaaaagccgccgaagactaaaaggattggattttaa

SEQ ID NO: 20176 - protein, 109 aa, Unknown
  Obtained from environmental sample
  misc_feature (1)..(109): Xaa is any amino acid
MRSQIVTSNSKSNRGGRRYVPYVFTEQGVSMLSSVINSERAIKVNINIMRTFVQLRHYVLDKSGTNEQIAELRKLLMLYIEKNDKRVNEIIIALNNLIEKPPKTKRIGF

SEQ ID NO: 20177 - DNA, 435 bp, Unknown
  Obtained from environmental sample
  misc_feature (1)..(435): n is a, c, g, or t
atgtatcacaagcacacgggaattatcgctatagtaaaagattngaaaagcattgccgctctgccgcttgaaggctgtatcaaaggaatgtttatcgccgatccttctttgcacgacaaagtgcggcaaaaattcaaggagcgtttcggcgacaaaatagatatagtgcgcagttacccgacatttttggaagttataaacaacggagtttccaaaggcgaaggtttaaagatagcgatggaacacagggggctgaaacccgaagaagtaatcgccttcggcgacgaagaaaacgatgtgccgatgttcccgatagccggttttgccgccgcccccgaaaacgctagagaaaaaattcgtgaacaggcggattttgtttacgggtcgaatacaaaggaaggactggcgacttatttggaaaaagtttttttgtag

SEQ ID NO: 20178 - protein, 144 aa, Unknown
  Obtained from environmental sample
  DOMAIN (2)...(139): haloacid dehalogenase-like hydrolase
  misc_feature (1)..(144): Xaa is any amino acid
MYHKHTGIIAIVKDXKSIAALPLEGCIKGMFIADPSLHDKVRQKFKERFGDKIDIVRSYPTFLEVINNGVSKGEGLKIAMEHRGLKPEEVIAFGDEENDVPMFPIAGFAAAPENAREKIREQADFVYGSNTKEGLATYLEKVFL

SEQ ID NO: 20179 - DNA, 405 bp, Unknown
  Obtained from environmental sample
  misc_feature (1)..(405): n is a, c, g, or t
atgatcagatggccgagcattgagatgacgcgcgggatatccccgatctcgtgccaatattgtccgtggtcgccgccgtggccgatggaaccacctgttattcgcaacgccggaagactgcgtaccaaagaaagcgacagacttgccgccgtaagcgacatattacgcagtctgggcgcggacgcggtcgagacggaagacggacttgtcatacacggcggaaaggctttcaaaggcggacaggtatcgtcccgcggggatcaccggatcgccatgtccgcggcaatcgccgcgacagtgtgcgaggggccggttgttattcagggcgcgcaggcggtcaataaatcgtaccccggtttttttgacgatctgcgttcgcttggcccattggtcgaagcgatataa

SEQ ID NO: 20180 - protein, 134 aa, Unknown
  Obtained from environmental sample
  misc_feature (1)..(134): Xaa is any amino acid
MIRWPSIEMTRGISPISCQYCPWSPPWPMEPPVIRNAGRLRTKESDRLAAVSDILRSLGADAVETEDGLVIHGGKAFKGGQVSSRGDHRIAMSAAIAATVCEGPVVIQGAQAVNKSYPGFFDDLRSLGPLVEAI

SEQ ID NO: 20181 - DNA, 798 bp, Unknown
  Obtained from environmental sample
  misc_feature (1)..(798): n is a, c, g, or t
atgacgaaaggaaagccagccggaaagcgcgtatatatcgggaaggacatacaagatgttatggaactgccggatcttattgatattcagttaagttcctatgaacgttttctgcaaagggaaaaggcaagaaacggcgataaaatcgccccgcagggactggaagatgtatttcagtctacctttccgatagacagccccaatggggacatgaggctgacgtatgacggctattctcttgatgaaagcagcatcaaattttccgagctggactgcaagcaaaaaggcataacctacgcggtttccctgaaagcaaaagtcaatttgatctttcagcagaccggtgaaatacggcagaaagatatttacatgggcgacatccccatcatgaccgagcgggggacgtttatcatcaatggcgccgagcgggtggttgtttcgcagattcaccgttcccccggcgttattttcagccacgaaaaaggcgtgtattcttcccggatcattccctaccggggaagctggctggaatttgaaattgaccagaagcgggaattaatttacgccaaggtagaccggaaaaagcgcatactgggaaccatttttctccgcgctctgggctacagcagccgtgaagaaattatcaaggctttttacattaccgaaacttttaagattaaagacgaccgtgaaaccagagaaaaaatttccggccgggtgcttgccgccccggtgtggataccggatgaggccgccgaacagaaaagcggtaaacaactgacgaacacgaggggatga

SEQ ID NO: 20182 - protein, 265 aa, Unknown
  Obtained from environmental sample
  DOMAIN (25)...(209): RNA polymerase beta subunit
  misc_feature (1)..(265): Xaa is any amino acid
MTKGKPAGKRVYIGKDIQDVMELPDLIDIQLSSYERFLQREKARNGDKIAPQGLEDVFQSTFPIDSPNGDMRLTYDGYSLDESSIKFSELDCKQKGITYAVSLKAKVNLIFQQTGEIRQKDIYMGDIPIMTERGTFIINGAERVVVSQIHRSPGVIFSHEKGVYSSRIIPYRGSWLEFEIDQKRELIYAKVDRKKRILGTIFLRALGYSSREEIIKAFYITETFKIKDDRETREKISGRVLAAPVWIPDEAAEQKSGKQLTNTRG

SEQ ID NO: 20183 - DNA, 846 bp, Unknown
  Obtained from environmental sample
  misc_feature (1)..(846): n is a, c, g, or t
atggtcagaatttgccgagagccgccggcgacaccggtcataacggatacgggtacagtcaaattgcctgttgtcgcacctgtcaatcaacagagcaatgcgccgaaaccgccgccggcggcaccggccgtagctgatacggggatggtcaaactacctgttgtcgcatcggtcaaccaacaaagcaatacgccgaaaccgccggcggcgacaccggccgtaaccgatacggggatggtcaaactacctgttgtcgcatcggtcaaccaacaaagcaatacgccgaaaccgtcggcggcgacaccggccgtaaccgatacggggatggtcaaactacctattgtcgcacctgtcaatcggcaaagcaacgccgtaaaggttgacagcgtaaagacgcaaccgaaaccggcagcgacggcaacgtctgccagtacccctgccgcacctgtcaatcaacaaaccaatacggtaaaggttgacagcgtaaaggcacaaccgaagccggcggcgacggtaacgccggcaacgcctatcagtccccctgtcgcaccagtcaatcaacaaaccaataccgtgaaagcggacagcgtaaaagcgccgccaaaacctacgggaccggcctttacgatacaggtcggcgcgttcgcctcaaaagataacgccgacaatctggttaagcggctcaccggcaaatacgatgacattaccgtctccaccacgggagtcggcgaccaaacgctctacagggtgcgcgtagggacgttccagaagaaagaggacgcgaccgcgtacgccgacnagctcataatagaagctggcctgtcggcgcgggttacggaaaaataa

SEQ ID NO: 20184 - protein, 281 aa, Unknown
  Obtained from environmental sample
  DOMAIN (204)...(280): Sporulation related domain
  misc_feature (1)..(281): Xaa is any amino acid
MVRICREPPATPVITDTGTVKLPVVAPVNQQSNAPKPPPAAPAVADTGMVKLPVVASVNQQSNTPKPPAATPAVTDTGMVKLPVVASVNQQSNTPKPSAATPAVTDTGMVKLPIVAPVNRQSNAVKVDSVKTQPKPAATATSASTPAAPVNQQTNTVKVDSVKAQPKPAATVTPATPISPPVAPVNQQTNTVKADSVKAPPKPTGPAFTIQVGAFASKDNADNLVKRLTGKYDDITVSTTGVGDQTLYRVRVGTFQKKEDATAYADXLIIEAGLSARVTEK

SEQ ID NO: 20185 - DNA, 804 bp, Unknown
  Obtained from environmental sample
  misc_feature (1)..(804): n is a, c, g, or t
gtgacgcttgagggggggcttgcccgtatagcgaacggggagctcgacacgcagatcagcctgaagaccggcgacgagatagagcagcttggcgacagcgtaaattccatggcgcgggagctgaagaagtacataggcaatctgcaacaggtaactgccgagaaggagcgcatatcggtggagctgggcgtggctactaagatacaggcgagtatgctgccaagcgtcttcccgccctttccgaaccgcgaggagttcgacatctacgcctccatgcagccggccaaagaggtcggcggcgacttctacgatttcttctttatcaatgacaacaccctcgccgtgatagtcgccgacgtgtccggcaagggcgtgccggcggcgctgttcatggtcgtagccaaaacgctcataaaaaacaacgcgcagtcgggcaagagcccgggcgaggtctttgagaaagtgaataacatgttgtgcgagggcaacgacacagggatgttcgtcaccgcgtttatgggttacttgtatatagacataggaatatttcaatacgtcaacgccggccacaccccgcctatcttgatcaagggcggcaagtgcgcgatggtaggcgtaaaacccggtttcgtgctggccggcttggagggcacccgctacacggagggcgaactgttgatgcggaggggcgacgagttgttcctatatacagacggaataactgaagccgtaaacggtcaaaacgcgctgttcggcgagaagcgcttgattgacgccgtgagcgtgtacaacgtctgccgttaa

SEQ ID NO: 20186 - protein, 267 aa, Unknown
  Obtained from environmental sample
  DOMAIN (109)...(267): Stage II sporulation protein E (SpoIIE)
  misc_feature (1)..(267): Xaa is any amino acid
MTLEGGLARIANGELDTQISLKTGDEIEQLGDSVNSMARELKKYIGNLQQVTAEKERISVELGVATKIQASMLPSVFPPFPNREEFDIYASMQPAKEVGGDFYDFFFINDNTLAVIVADVSGKGVPAALFMVVAKTLIKNNAQSGKSPGEVFEKVNNMLCEGNDTGMFVTAFMGYLYIDIGIFQYVNAGHTPPILIKGGKCAMVGVKPGFVLAGLEGTRYTEGELLMRRGDELFLYTDGITEAVNGQNALFGEKRLIDAVSVYNVCR

SEQ ID NO: 20187 - DNA, 348 bp, Unknown
  Obtained from environmental sample
  misc_feature (1)..(348): n is a, c, g, or t
atggatgatgaccccagaatattaaaacacggcggggcatttttgcggcgtcatagcttggacgaattgccgcaatttttcaatgtgctaaaaggcgatatgagcctagttgggccaagacctccaactacagatgagataaaaaaatatgaggcttggcactacataagactttctgttaaaccaggtcttacatgtttttggcaaaccagcggacgcaatgacattagttttgacgagtggatgcggcttgataataaatacatacgtgaccgtagtactttggtggatttgaatttgaaattgaaaactcttgaagttatgttaagtggaaagggggctagttag

SEQ ID NO: 20188 - protein, 115 aa, Unknown
  Obtained from environmental sample
  DOMAIN (1)...(115): Bacterial sugar transferase
  misc_feature (1)..(115): Xaa is any amino acid
MDDDPRILKHGGAFLRRHSLDELPQFFNVLKGDMSLVGPRPPTTDEIKKYEAWHYIRLSVKPGLTCFWQTSGRNDISFDEWMRLDNKYIRDRSTLVDLNLKLKTLEVMLSGKGAS

SEQ ID NO: 20189 - DNA, 441 bp, Unknown
  Obtained from environmental sample
  misc_feature (1)..(441): n is a, c, g, or t
atggccgaaatggcggcaaccatcacccgccttggacgctgggtggattttgacaacgattataaaacaatgaactcggattacatggaatcaatctggtgggtaatgaaatccctctgggataaaggactcctctacgaaggccactacatccttccgtactgcccccgctgttccacggttttgtctaaccacgaactcaatctcggtggttataaagatgtacacgatcccgcgattaccgtacggttcaaggttttagggaatggggagttgggagtanggagtagggaagatgactcgaaactcctaatgcctcccaacacttacttgctggcatggacaaccaccccctggacattgccctcgaacctggacctcaccctcggcgcggacattgactatcttttaattaaagacattccaagtcccagctcctaa

SEQ ID NO: 20190 - protein, 146 aa, Unknown
  Obtained from environmental sample
  misc_feature (1)..(146): Xaa is any amino acid
MAEMAATITRLGRWVDFDNDYKTMNSDYMESIWWVMKSLWDKGLLYEGHYILPYCPRCSTVLSNHELNLGGYKDVHDPAITVRFKVLGNGELGVXSREDDSKLLMPPNTYLLAWTTTPWTLPSNLDLTLGADIDYLLIKDIPSPSS

SEQ ID NO: 20191 - DNA, 630 bp, Unknown
  Obtained from environmental sample
  misc_feature (1)..(630): n is a, c, g, or t
atgaaaagcctaatggctgatgaatctgaatttaacgatcagttagtcgtcagccaaatagtttcggggcaaagaaatttgttccgtattttagtacggcagcatgaaaaagccgtctttggaatgggtatgagcttcttccgcaataaggatgatgcgtcggattttacccaggaagtgtttttaaaagcgtatcggaacctttccgcttttgagggaagaagccgattttccacttggctgtataaaattgcctataacacggcaataaacgaggtgagcagaaggaaggagtatctcacccttgcggaagaagacgctgaaaaacttgtaaacagcggggaaacccctgagagaataacgctccgcaacgcggcaaaagaagccgtttgcgcggcagtaaaagagcttcctgatcgttacaggatttgcattgacttgtactttttttacgaccgttcgtaccaagagattgaggttattacaggttttcctgttaacacgataaaatctcatgtgtttagggcgaaggcgttattaaaagaaaagttagacagcttatcggaagtatttgagaagaaggggaatggtatgagttacacaaaagttaggatgctcggccgaatctga

SEQ ID NO: 20192 - protein, 209 aa, Unknown
  Obtained from environmental sample
  DOMAIN (133)...(182): Sigma-70, region 4
  misc_feature (1)..(209): Xaa is any amino acid
MKSLMADESEFNDQLVVSQIVSGQRNLFRILVRQHEKAVFGMGMSFFRNKDDASDFTQEVFLKAYRNLSAFEGRSRFSTWLYKIAYNTAINEVSRRKEYLTLAEEDAEKLVNSGETPERITLRNAAKEAVCAAVKELPDRYRICIDLYFFYDRSYQEIEVITGFPVNTIKSHVFRAKALLKEKLDSLSEVFEKKGNGMSYTKVRMLGRI

SEQ ID NO: 20193 - DNA, 426 bp, Unknown
  Obtained from environmental sample
  misc_feature (1)..(426): n is a, c, g, or t
ttggccgatcgtatgggtatcataagcgcgccgttaatcccaacaactttctttgacggtatagacgcggttataccggtgccgttgcaccgccgaaggcaacggcgcagggggtacaatcaggcggaacattttgcccgcggcgttttgacgggcctgggtatcaatgccgcgttattgcgtaccgatttgctgatgcgcgttaggaacaccaagacgcagacgcggctggatagggaggatcgccaaaagaaccttgccggcgctttcgcggtgaacgacctaacggcttgcgggcttgcgggggcgcgggtggctttggttgacgatatctttacgacgggggcgaccacggaggcctgcgcgcaggcgttgcttagggcggggtgcgcgtcggtaatcgtgcttgccatggggcgggattga

SEQ ID NO: 20194 - protein, 141 aa, Unknown
  Obtained from environmental sample
  misc_feature (1)..(141): Xaa is any amino acid
MADRMGIISAPLIPTTFFDGIDAVIPVPLHRRRQRRRGYNQAEHFARGVLTGLGINAALLRTDLLMRVRNTKTQTRLDREDRQKNLAGAFAVNDLTACGLAGARVALVDDIFTTGATTEACAQALLRAGCASVIVLAMGRD

SEQ ID NO: 20195 - DNA, 378 bp, Unknown
  Obtained from environmental sample
  misc_feature (1)..(378): n is a, c, g, or t
atggctgttatagtcaaagaacntgaaagagatttgattatacaattaacccaaaacgccgaaatggtctctcntgatatggtttcttatgagattgcaaatgctttaaccaaaatgatgaaaaagaaaattatcgagaaggaacgtatgattaacgcaataaaatatttcaaagagatacccattaaaactattgaaattgatattgaaagagcgcttgaaattgcatgggattataaaatttatgcttatgatgcctgctatttggaatcagcaaagagattaaatttaccattattgacttttgatggcaacatgataaaagtaggaaaggaacttggtataaatatattaggagggaaaaatgttggtatttga

SEQ ID NO: 20196 - protein, 125 aa, Unknown
  Obtained from environmental sample
  misc_feature (1)..(125): Xaa is any amino acid
MAVIVKEXERDLIIQLTQNAEMVSXDMVSYEIANALTKMMKKKIIEKERMINAIKYFKEIPIKTIEIDIERALEIAWDYKIYAYDACYLESAKRLNLPLLTFDGNMIKVGKELGINILGGKNVGI

SEQ ID NO: 20197 - DNA, 849 bp, Unknown
  Obtained from environmental sample
  misc_feature (1)..(849): n is a, c, g, or t
ttggacagaatcggccgagagagctttctatcgcgttccagggacagcttaaacggttcagtttcactggcccttaaggaattggatcgcttaaaaggctaccccgaggcggaatactggctgggagagacttacagagttgaaggggaactcgtccttgcgcttcgccagtacgaaaaggcctggaacgaaagggaacttcttgaaactcccggatttgaaatagaaattctttataaaattaccgagcttcacaggatacgtggaaattatcaggaaatggaaaggaaggcaaatgaaattatcgaaggggtaggagccaacggccttcccagggacagcctttgggccggaaattcccaggggtcttcaaatcagatccgggccgccatggcaaggatcctggaaaacgaaggggtaagccgctttctaaccttataccgttatagcaacaccgacacggaaagggctcaccgtcttttgggttttttttactattcctcaagcaggtatacccaggcaatggaacacctgatgtttgccttcttaatccagaattccgtactcatagaagaactaatccgccgggactatgactttactttttccactctggagaatttgataatgcttgttcaaaggcgtccggaacttgccgcttttatcgaagaaacggaatattatagaaccatctattaccttgccaccgctttgtacgcctcaggaaaaacaaggcccgctacccagctctgggcttttctgtccggcagcaataacgccggagagtggggaaatcgcgcgagaagaaatccaacgccctatattgaaaggctgcgggaaaggttctga

SEQ ID NO: 20198 - protein, 282 aa, Unknown
  Obtained from environmental sample
  misc_feature (1)..(282): Xaa is any amino acid
MDRIGRESFLSRSRDSLNGSVSLALKELDRLKGYPEAEYWLGETYRVEGELVLALRQYEKAWNERELLETPGFEIEILYKITELHRIRGNYQEMERKANEIIEGVGANGLPRDSLWAGNSQGSSNQIRAAMARILENEGVSRFLTLYRYSNTDTERAHRLLGFFYYSSSRYTQAMEHLMFAFLIQNSVLIEELIRRDYDFTFSTLENLIMLVQRRPELAAFIEETEYYRTIYYLATALYASGKTRPATQLWAFLSGSNNAGEWGNRARRNPTPYIERLRERF

SEQ ID NO: 20199 - DNA, 393 bp, Unknown
  Obtained from environmental sample
  misc_feature (1)..(393): n is a, c, g, or t
atgaacggtttgatttacgccacacggatattaggctatgtcaacgccccggccctcatgcagcgcatagtggctgaacttaccgatgccgcggttgacgtaggcgtttacgcccgcaggcgtgacgccttcacggcagttctggatgaagccggaattgaatacgccgtgccggaaggggcgttctacctgttctgtaaagtacccgcgaaacggggcggcggctcgggcgatgatttggaattcgtgaaccatttaaaacaacatttgattcttggcgttcccggatcaggtttcggcaagtccggctggctgcgtttcgcctactgcgtggatgagaaaaacataaaagccagcgccgaggctttcaagaaggcgatggagacatggtaa

SEQ ID NO: 20200 - protein, 130 aa, Unknown
  Obtained from environmental sample
  misc_feature (1)..(130): Xaa is any amino acid
MNGLIYATRILGYVNAPALMQRIVAELTDAAVDVGVYARRRDAFTAVLDEAGIEYAVPEGAFYLFCKVPAKRGGGSGDDLEFVNHLKQHLILGVPGSGFGKSGWLRFAYCVDEKNIKASAEAFKKAMETW

SEQ ID NO: 20201 - DNA, 375 bp, Unknown
  Obtained from environmental sample
  misc_feature (1)..(375): n is a, c, g, or t
gtgggttcgtccatcggccttgaccgcatgctcgccgcgcttgaaagcctgaacaagcttacccctgtaagcggatttgccgcggcggctatcgcntgcgtaaagctggaagatacggggctgtaccaggcccttgccgcgaggttcaggcaggcaggcatcccctgcgaagtttttacggacgaggcggcaggcgacagcaaaaaccttgttaaacaatttatgttagccgaaaagaaaggccatcgctggatgatcatccccggcgaagcccccctgcgcggcccgctgacattgcgaaatcttataacaaggcaaaaccaggaaaatttgtcagtcgaacaagccataattcaaataacagatatcaaataa

SEQ ID NO: 20202 - protein, 124 aa, Unknown
  Obtained from environmental sample
  misc_feature (1)..(124): Xaa is any amino acid
MGSSIGLDRMLAALESLNKLTPVSGFAAAAIACVKLEDTGLYQALAARFRQAGIPCEVFTDEAAGDSKNLVKQFMLAEKKGHRWMIIPGEAPLRGPLTLRNLITRQNQENLSVEQAIIQITDIK

SEQ ID NO: 20203 - DNA, 681 bp, Unknown
  Obtained from environmental sample
  misc_feature (1)..(681): n is a, c, g, or t
atgcaagcggcgtccgccgcgcaacgttgggccgccgcccccgccgcgcngcagacagcgccgcagacagcgttgcagacagcgccgacgacggcgcaaacggcaacagctccggcggcgcccaaagccgcgccggccgagtccgaagaagacgcgagactgcggatgcgccttatatcgaacttcctcaaggataacaagacaaaggacgaggagattaagaacgccctggccgccggcgacatcaaactggcgcaccggctggcgcacaccctgaaaggtgtcgccggtttagtggcgcaacccggcttgcaaagcgcctcctacgtcatagaaaacgccctaaactccaacgacaccgacacagcctcaaaaggcctcgggaagctgtcggaagagcttaaaaaggctttggcggaactcacggcgatctccgattccgctcagaagcaagaggcggccaacacagaaccggccgtaacgctcgacaaatttgaagctctggaactcatagacaagctccgtacgctgttagaaaacggcgattccgactgcatgagccttatagacggcttacgctccataccggaatcaaagaaattgatagagcaagtagaagactatgatttcgaaccggccttagaaacgcttgagggaataaggaagaatttggcgacgtaa

SEQ ID NO: 20204 - protein, 226 aa, Unknown
  Obtained from environmental sample
  DOMAIN (57)...(144): Hpt domain
  misc_feature (1)..(226): Xaa is any amino acid
MQAASAAQRWAAAPAAXQTAPQTALQTAPTTAQTATAPAAPKAAPAESEEDARLRMRLISNFLKDNKTKDEEIKNALAAGDIKLAHRLAHTLKGVAGLVAQPGLQSASYVIENALNSNDTDTASKGLGKLSEELKKALAELTAISDSAQKQEAANTEPAVTLDKFEALELIDKLRTLLENGDSDCMSLIDGLRSIPESKKLIEQVEDYDFEPALETLEGIRKNLAT

SEQ ID NO: 20205 - DNA, 900 bp, Unknown
  Obtained from environmental sample
  misc_feature (1)..(900): n is a, c, g, or t
ttggacgtttgcctgctgcttttggattctatgctttctttgagctaccagctatgggtatggggctccgctatgatttggaatgtcaaccaaaaaatgaagggcggccagcagaaggaatatcccgatgaatggttgcgctatccaaacccttgggaatttgcacgcactgcaggcgtgatgcaggttcattttggtgggcatgttgaaagctacatcgaaaacggcgaaactctccaccactggcatgccgccgaaagcgtggaggcaatgccttacgatacccctatcccagggtataataacaatacggtaaatacgctccgcttgtggagcgcgcaatcaaaccaattcaacctgcaaaccttcaatgaaggcaggtatgttgatgctgcttccaaaacggaagaatgggaatccataacaaaagttttgtacccaaacgactcctctgtgaatggcaaacaacttcgcttaaagcagcagtacttcctctgttccgcttcgctccaagacataatccgccgctatgagcgtggcaacgatgttcaagctgcaattgaaaaattggcaaaggagaacaaagtttcttcagcaaacctaacgcttttgagtttagaccataacgaatgtaggcagcttcttatgaaactccctaaaaaaattgcgattcagttaaacgatacacatcctgcaatagcaatcccagaactcatgcgcctattgctggacatttataaactctcttggtcagatgcttggggaataacgactcaggtttttgcctataccaatcatacccttatgccagaagctctggaaaaatggtctgtgagcctgttcgaggaactattgccacgtcacttgcaaatcatttacgaaatcaatgcgaaattctga

SEQ ID NO: 20206 - protein, 299 aa, Unknown
  Obtained from environmental sample
  DOMAIN (1)...(299): Carbohydrate phosphorylase
  misc_feature (1)..(299): Xaa is any amino acid
MDVCLLLLDSMLSLSYQLWVWGSAMIWNVNQKMKGGQQKEYPDEWLRYPNPWEFARTAGVMQVHFGGHVESYIENGETLHHWHAAESVEAMPYDTPIPGYNNNTVNTLRLWSAQSNQFNLQTFNEGRYVDAASKTEEWESITKVLYPNDSSVNGKQLRLKQQYFLCSASLQDIIRRYERGNDVQAAIEKLAKENKVSSANLTLLSLDHNECRQLLMKLPKKIAIQLNDTHPAIAIPELMRLLLDIYKLSWSDAWGITTQVFAYTNHTLMPEALEKWSVSLFEELLPRHLQIIYEINAKF

SEQ ID NO: 20207 - DNA, 753 bp, Unknown
  Obtained from environmental sample
  misc_feature (1)..(753): n is a, c, g, or t
ttgtcggagaggcttgaggaggcgagagttcaaatagatgagtgcgtcgatcacataaagaaagataacacgccgtttgcgctgattgtgcgaaaggataccttcgcgccgtatacgtcaaacagaaacgacgccgctgacgcgcgccgcgaatcggaaatgagccgcgaggaaactatcgagcatattatacggtcatcagcgccaggtgaaatctttgtttccaccacaggaatggcgtcgcgggagttgtacgagttgcgggagaaatatcttatggggcacgagcgggatttcctgacggtcggttcaatggggcacgccttgtcgctggctctggccatagcggtgcaaaagccgttgctacgggtgaattgcatagacggtgatggcgcggcgctcatgcatttgggtggtatggcggctgtcggggcgctctcgccggcaaatctgcggcatatagtcttgaataacggcgcgcacgattcggtcggcgggcagccgaccattgcccgacagattgaccttgccggcattgcccgctactgcggctatgtcggtgtatattccgtcaaaacggcggaagagttgcggcggatacttagcgaaaccgccggcaaaaccgatggagctgtttttattgaggtatttgtccgtaaaggcaaccgcggcgatttggggcggcccaaatcaagccctattgagaacaaggaatcttttatgcgttttatcgcctatgggggggatgcatga

SEQ ID NO: 20208 - protein, 250 aa, Unknown
  Obtained from environmental sample
  DOMAIN (76)...(216): Thiamine pyrophosphate enzyme, C-terminal TPP binding domain
  misc_feature (1)..(250): Xaa is any amino acid
MSERLEEARVQIDECVDHIKKDNTPFALIVRKDTFAPYTSNRNDAADARRESEMSREETIEHIIRSSAPGEIFVSTTGMASRELYELREKYLMGHERDFLTVGSMGHALSLALAIAVQKPLLRVNCIDGDGAALMHLGGMAAVGALSPANLRHIVLNNGAHDSVGGQPTIARQIDLAGIARYCGYVGVYSVKTAEELRRILSETAGKTDGAVFIEVFVRKGNRGDLGRPKSSPIENKESFMRFIAYGGDA

SEQ ID NO: 20209 - DNA, 513 bp, Unknown
  Obtained from environmental sample
  misc_feature (1)..(513): n is a, c, g, or t
ttgactcgtcgaaagggcgccttcaggttctgctggataacctacttccccatgttcgagtacaacgatgaactcaagaagatagacttctcccacaaccccttctccatgccgcagggcgggcttgcggcgcttacggagaaggatccgctcgaaatcctcgcctaccagtacgatatagtctgcaacggcatagagctgtcgagcggcgcgatccgcaaccatcgcccagacatcatgtacaaggccttcgagatagccgggtacggcaaggaggaggtggacgcgagattcggcgccatgataaacgccctgagcttcggcgccccgccccacggagggatcgcccccggggtcgacagaataataatgctcttggccgacgaacctaacataagggaggtgattgccttcccgatgaaccaaaaggcgcaggatttgatgatgaaggcgccggcggagccgacggagaagcagttgaaagagctgcatatccgcgtggttgatatttaa

SEQ ID NO: 20210 - protein, 170 aa, Unknown
  Obtained from environmental sample
  DOMAIN (1)...(143): tRNA synthetases class II (D, K and N)
  misc_feature (1)..(170): Xaa is any amino acid
MTRRKGAFRFCWITYFPMFEYNDELKKIDFSHNPFSMPQGGLAALTEKDPLEILAYQYDIVCNGIELSSGAIRNHRPDIMYKAFEIAGYGKEEVDARFGAMINALSFGAPPHGGIAPGVDRIIMLLADEPNIREVIAFPMNQKAQDLMMKAPAEPTEKQLKELHIRVVDI

SEQ ID NO: 20211 - DNA, 354 bp, Unknown
  Obtained from environmental sample
  misc_feature (1)..(354): n is a, c, g, or t
gtggaaagaagatatggtaaaaaaaagtattcacccgaacgcggggatattgtatggttaaattttaatccccaatctgggcatgaacagaaagggaaaagaccagcggtagttatttcacccagagagtataatgaaaaagttggattaggacttttttgtcctataaccagcaagataaaaagttatccttttgaggtaaaaattgagaataaaaaaattgatggtgttattctgtcagaccaaattaaaagccttgattggaagacacgagagatagaatatattacaaaaataccctccgaaaaaatcaacgaagttattaataaaattaatgttttgttatttgagtaa

SEQ ID NO: 20212 - protein, 117 aa, Unknown
  Obtained from environmental sample
  DOMAIN (13)...(116): PemK-like protein
  misc_feature (1)..(117): Xaa is any amino acid
MERRYGKKKYSPERGDIVWLNFNPQSGHEQKGKRPAVVISPREYNEKVGLGLFCPITSKIKSYPFEVKIENKKIDGVILSDQIKSLDWKTREIEYITKIPSEKINEVINKINVLLFE

SEQ ID NO: 20213 - DNA, 441 bp, Unknown
  Obtained from environmental sample
  misc_feature (1)..(441): n is a, c, g, or t
atgctttacttgatgacgaccttacctccaacctcctcgatcttcttcttgatcgactcggcctcatccttttggcagccctcttttatgggcttcggcgcgccctcaaccaagtccttagcctctttcaagcccaagccggtgatctcgcgcacgactttgatgaccttaatcttctccgcgccggcgctctcgaggacagcgtcgaactccgtcttctcctcggcgggagcggcggcgccgccgccgacggcgggagcggcggcgacggccacaggggccgcggccttaacgtcaaacttctcctcgatagccttaatgagatcggagagctctaaaaccgtcatgtttccgatcgcggctacaaattcatcctttgtgagtgtggacacaataaacctccgttatgttttgtatgttgactattattttatcaattag

SEQ ID NO: 20214 - protein, 146 aa, Unknown
  Obtained from environmental sample
  misc_feature (1)..(146): Xaa is any amino acid
MLYLMTTLPPTSSIFFLIDSASSFWQPSFMGFGAPSTKSLASFKPKPVISRTTLMTLIFSAPALSRTASNSVFSSAGAAAPPPTAGAAATATGAAALTSNFSSIALMRSESSKTVMFPIAATNSSFVSVDTINLRYVLYVDYYFIN

SEQ ID NO: 20215 - DNA, 387 bp, Unknown
  Obtained from environmental sample
  misc_feature (1)..(387): n is a, c, g, or t
gtgtccacactcacaaaggatgaatttgtagccgcgatcggaaacatgacggttttagagctctccgatctcattaaggctatcgaggagaagtttgacgttaaggccgcggcccctgtggccgtcgccgccgctcccgccgtcggcggcggcgccgccgctcccgccgaggagaagacggagttcgacgctgtcctcgagagcgccggcgcggagaagattaaggtcatcaaagtcgtgcgcgagatcaccggcttgggcttgaaagaggctaaggacttggttgagggcgcgccgaagcccataaaagagggctgccaaaaggatgaggccgagtcgatcaagaagaagatcgaggaggttggaggtaaggtcgtcatcaagtaa

SEQ ID NO: 20216 - protein, 128 aa, Unknown
  Obtained from environmental sample
  DOMAIN (61)...(128): Ribosomal protein L7/L12 C-terminal domain
  misc_feature (1)..(128): Xaa is any amino acid
MSTLTKDEFVAAIGNMTVLELSDLIKAIEEKFDVKAAAPVAVAAAPAVGGGAAAPAEEKTEFDAVLESAGAEKIKVIKVVREITGLGLKEAKDLVEGAPKPIKEGCQKDEAESIKKKIEEVGGKVVIK

SEQ ID NO: 20217 - DNA, 309 bp, Unknown
  Obtained from environmental sample
  misc_feature (1)..(309): n is a, c, g, or t
ttgatcggccgtcaaatactcgatcttgccggtggccacgccgttctcaatcttctgataaggcgtctcgatgaacccgaactcgttgacgcgcgcgaaagtgctgagcgacgcgatgaggccgatgttcggcccttccggcgtttcaatagggcacagacgcccgtagtgggtatggtgcacgtcgcgaacctcgaaaccggcgcgctccctcgtgagaccgccgggaccgagagcgctgacgcggcgtttgtgcgtaagctccgagagcgggttggtctgatcaaggaactgcgacagctggcttga

SEQ ID NO: 20218 - protein, 102 aa, Unknown
  Obtained from environmental sample
  misc_feature (1)..(102): Xaa is any amino acid
MIGRQILDLAGGHAVLNLLIRRLDEPELVDARESAERRDEADVRPFRRFNRAQTPVVGMVHVANLETGALPRETAGTESADAAFVRKLRERVGLIKELRQLA

SEQ ID NO: 20219 - DNA, 903 bp, Unknown
  Obtained from environmental sample
  misc_feature (1)..(903): n is a, c, g, or t
gtggatcccgcgaataacagtatctatgaacttgacggtcagggaacgcaaaggattatccctgcggaaggaatagaaaaaaaagacggcgcggcctgggttgtaagcgaccgggggcgtgtaacgcttgtaaacggcaatatggaaagcgttcaggggtttcctgtagttaccggattaaggctctccgccccgcctcgggcattcgggggcaaagtatatctttgcgatgaagacggaagagtccatacagttgatgaaaacggcgtacagaatacctggggaactccatttaatgcggctctccgttctccgccttctttcctgtccttttccgtaaaaaatgttatgcgcaattacgcggctgtttacccaaaaagtttcttcggtgaaatctggcttcttgacgctgacgggaaagcttttcccaactggcctgtacccatttctcttgacgatatttcaagcattggcttcggttcgcctgagttgttttcgtataatgacaaagtatattcggcttttatctgccagaccggagaattgctggtttacgatgaaaatgcctctcttgtttcgccgtttccgatgtatctaaacggaatattttatctccagcctgtttttgacggagaatatctctggctcgtttcatcggaagggacgcttttccgcgtaagcataaacggcgaacttttgtatcaaaatatttcaagattttccgtaaaagaagaaggttatatttctatctttgactgtgacggcgataaaatacctgaaatctttatcaccggcgaaggaaacgccatgtacgcctttacacgcaatttccgttctctggaaggctttcctctgccggtatggggaagaccgcatttttttaaagcgcgagggaaacaataa

SEQ ID NO: 20220 - protein, 300 aa, Unknown
  Obtained from environmental sample
  misc_feature (1)..(300): Xaa is any amino acid
MDPANNSIYELDGQGTQRIIPAEGIEKKDGAAWVVSDRGRVTLVNGNMESVQGFPVVTGLRLSAPPRAFGGKVYLCDEDGRVHTVDENGVQNTWGTPFNAALRSPPSFLSFSVKNVMRNYAAVYPKSFFGEIWLLDADGKAFPNWPVPISLDDISSIGFGSPELFSYNDKVYSAFICQTGELLVYDENASLVSPFPMYLNGIFYLQPVFDGEYLWLVSSEGTLFRVSINGELLYQNISRFSVKEEGYISIFDCDGDKIPEIFITGEGNAMYAFTRNFRSLEGFPLPVWGRPHFFKARGKQ

SEQ ID NO: 20221 - DNA, 552 bp, Unknown
  Obtained from environmental sample
  misc_feature (1)..(552): n is a, c, g, or t
atggagagctttaggacaacctgcgcggccctttccgcctatccggttgttaaggggagctttgagcaggaaaaaatcctaaaccgccttaaacgctccttaaagtcatcaggcaattttatcatttctatcggacagggaatggtgtgggataccgtaaagccttttccttccgccctcgcgcttggaaaagattaccttgtgcagtcaaggccaggcggggagagaactgtcctgagcgctgcgggaaatgaaacatttatccgcatggcggaagttataaacgcggttttttcaggcaatatcaacgagcttttggagagcttcaaggttttttattccggcgttccttccgaatgggagcttgggttgttgcctctggacaaggccataaataatttcgcgttaaagatcgtcatgaaaggggactcggatgtaaaatcgattacggtatacgagcaaagcggcgatacgattatttacggtttgtcgaaccatagctattcatccgatctgggtgttcatgagaaagcctttttttcatttccatga

SEQ ID NO: 20222 - protein, 183 aa, Unknown
  Obtained from environmental sample
  misc_feature (1)..(183): Xaa is any amino acid
MESFRTTCAALSAYPVVKGSFEQEKILNRLKRSLKSSGNFIISIGQGMVWDTVKPFPSALALGKDYLVQSRPGGERTVLSAAGNETFIRMAEVINAVFSGNINELLESFKVFYSGVPSEWELGLLPLDKAINNFALKIVMKGDSDVKSITVYEQSGDTIIYGLSNHSYSSDLGVHEKAFFSFP

SEQ ID NO: 20223 - DNA, 300 bp, Unknown
  Obtained from environmental sample
  misc_feature (1)..(300): n is a, c, g, or t
gtgctttgcggcttcagggtttacccccttgacgccgcgctgaaaataaccagaaatccctttatggacaggcgcatgggttttgacgcggaaatcctggtacgcctttactggaaaaaggtgttccctgttttttacccggtaaaagtaagttacccctctggcggcgtttccaatttccgggtcttccaggataatctacgaataagctggatgttcaccaggctttctgtggggatgcttctgcgctttcccatgttaataattttgcgcgttaagcgcaatgcagggctgttatga

SEQ ID NO: 20224 - protein, 99 aa, Unknown
  Obtained from environmental sample
  misc_feature (1)..(99): Xaa is any amino acid
MLCGFRVYPLDAALKITRNPFMDRRMGFDAEILVRLYWKKVFPVFYPVKVSYPSGGVSNFRVFQDNLRISWMFTRLSVGMLLRFPMLIILRVKRNAGLL

SEQ ID NO: 20225 - DNA, 534 bp, Unknown
  Obtained from environmental sample
  misc_feature (1)..(534): n is a, c, g, or t
atgatggcgcagaatgacgggcattggtcgcggcaaaaagaaaaggccgccggttactggcatataaagttcatgctctttttgttcaggatctttccggtagttgttctgcgcatattggcttttccggtcggttttttttattttattttttctaaaaaagccaggactttttcaaggcgctttttaatgaaagtagcgccctttattaataatcctgagacgcaaaaaaaatgccgttccttttttgctcccttaaggcacatcgtttccttctcgcttgccctggtggaaaaactccagtcatggggcggcaagtatctctttaagaataatcattatcagaatgataacgttacggagctagtaacggatttggaaaacaaaaagggcgtatttgttatcacaagccaccttggaaacaccgagcttttaaggggacttatcaatctcgacagaacaagcgtttctcgaaaagtaccgataacggcgattattaatttagctgttaccaaaactttaaccgaatggtaa

SEQ ID NO: 20226 - protein, 177 aa, Unknown
  Obtained from environmental sample
  misc_feature (1)..(177): Xaa is any amino acid
MMAQNDGHWSRQKEKAAGYWHIKFMLFLFRIFPVVVLRILAFPVGFFYFIFSKKARTFSRRFLMKVAPFINNPETQKKCRSFFAPLRHIVSFSLALVEKLQSWGGKYLFKNNHYQNDNVTELVTDLENKKGVFVITSHLGNTELLRGLINLDRTSVSRKVPITAIINLAVTKTLTEW

SEQ ID NO: 20227 - DNA, 555 bp, Unknown
  Obtained from environmental sample
  misc_feature (1)..(555): n is a, c, g, or t
atggtctcggcgggtggaaacttaaaaacctacttgaatctgctttccacctttcacatggacggagcctcaaaaattaatgaaataaaaacttacattgaaaccggcaatatacggttatatacaattaatgtccatgcgttaaagagcgcctgcgcgaacattggagccagcgagttgtccgaagcagccgccgcgttggagatggcggggaagaagggagatttatcctttattcgtgataataacgcagtatttgtatcgaatttagagacgattcttaataatatcaatattgcgttgatggaagaggcaaaggaaagcaaaaaaaaccatattgacagaaatttgctaaaaactgagctttccaatctaaaaacggcgcttgttgattttgattatttcaagatagaagactcggtaactaacttacaagattttacgcaggatgcggacgttggcgatacggtaaaggctatattgaaaaaaatacttactggggagtacgaggaagccgtatcaatgacggacgatcttctccatttttcacaataa

SEQ ID NO: 20228 - protein, 184 aa, Unknown
  Obtained from environmental sample
  DOMAIN (13)...(100): Hpt domain
  misc_feature (1)..(184): Xaa is any amino acid
MVSAGGNLKTYLNLLSTFHMDGASKINEIKTYIETGNIRLYTINVHALKSACANIGASELSEAAAALEMAGKKGDLSFIRDNNAVFVSNLETILNNINIALMEEAKESKKNHIDRNLLKTELSNLKTALVDFDYFKIEDSVTNLQDFTQDADVGDTVKAILKKILTGEYEEAVSMTDDLLHFSQ

SEQ ID NO: 20229 - DNA, 453 bp, Unknown
  Obtained from environmental sample
  misc_feature (1)..(453): n is a, c, g, or t
ttgaaaatgttatcgcaaaacaaggtgtgcgtatctatggaaattgatacaacccttgaatggttctttcttgccgatgcggactttgacagcgctcaaatactcaataacgcttatcgtaagcacagcgggataatttgctttcattgtcaacaagctgttgaaaaatatttaaaagcatttttatgttataatggcgtaattccgccaaagattcatgtgcttgagacattatgcgcgttatgttcggagtttgattcatcttttaatgacatcgcaaaggattgcgcctacttatctccatttgctgttcatgcccgctacccgcttgaattggaaattaacgacgtaaatatgataaagtctctggagattacccaaaagattaaagatttcacaccgatagccggattaaaaacaaaacttctcaataaaaaagaaaatcattgttaa

SEQ ID NO: 20230 - protein, 150 aa, Unknown
  Obtained from environmental sample
  DOMAIN (20)...(138): HEPN domain
  misc_feature (1)..(150): Xaa is any amino acid
MKMLSQNKVCVSMEIDTTLEWFFLADADFDSAQILNNAYRKHSGIICFHCQQAVEKYLKAFLCYNGVIPPKIHVLETLCALCSEFDSSFNDIAKDCAYLSPFAVHARYPLELEINDVNMIKSLEITQKIKDFTPIAGLKTKLLNKKENHC

SEQ ID NO: 20231 - DNA, 750 bp, Unknown
  Obtained from environmental sample
  misc_feature (1)..(750): n is a, c, g, or t
gtgcagtcatccgcaaggtatgttgaggatggcagccagaaactctcgtcaggcacaagcgcgcaggccgccgccgtggaacagattgccgcgtcgcttgaagagatctcttcgatggtcaaaaacaatgccgataacgcgatcgaagcgaatacgcttaccgaaagcgcggcgctggtggtcgatgatacctataaagcgatgcagcgctccatgcaggcgaatgaggagatacaaaaggcgagcggcgaaaccttcaagataatcaagaccattgatgagatagcttttcaaacgaacctgctttcgttgaacgcggcggtcgaggccgcgcgcgcgggcgaggttggcgccggatttgccgtggttgccgatgaggtgcgcggtctttcgatgcgctccgccgaagccgcgaagcacacatcggaaatgatagaggaaacgatcacgaaggtgcgcgggggcatagaaatattcaaggaaaccgagaagagcattgagtcggttgtcgagcaaacgcataagaccaaacagatcatcgccgacatcgcccatgcctcaggcgaacaagccaagggaatagagcatattaaacgcggcgtggcggaaatggctaaggtcattcaggcgaacgtccagaactccgagtcaagctccgtctccgcccaaatgctccataaacattccgccgagatgatagaagatgtgcagttggtcaatgactttatctttggggataaatcccgatag

SEQ ID NO: 20232 - protein, 249 aa, Unknown
  Obtained from environmental sample
  DOMAIN (20)...(245): Methyl-accepting chemotaxis protein (MCP) signaling domain
  misc_feature (1)..(249): Xaa is any amino acid
MQSSARYVEDGSQKLSSGTSAQAAAVEQIAASLEEISSMVKNNADNAIEANTLTESAALVVDDTYKAMQRSMQANEEIQKASGETFKIIKTIDEIAFQTNLLSLNAAVEAARAGEVGAGFAVVADEVRGLSMRSAEAAKHTSEMIEETITKVRGGIEIFKETEKSIESVVEQTHKTKQIIADIAHASGEQAKGIEHIKRGVAEMAKVIQANVQNSESSSVSAQMLHKHSAEMIEDVQLVNDFIFGDKSR

SEQ ID NO: 20233 - DNA, 333 bp, Unknown
  Obtained from environmental sample
  misc_feature (1)..(333): n is a, c, g, or t
atgaccttagccatttccgccacgccgcgtttaatatgctctattcccttggcttgttcgcctgaggcatgggcgatgtcggcgatgatctgtttggtcttatgcgtttgctcgacaaccgactcaatgctcttctcggtttccttgaatatttctatgcccccgcgcaccttcgtgatcgtttcctctatcatttccgatgtgtgcttcgcggcttcggcggagcgcatcgaaagaccgcgcacctcatcggcaaccacggcaaatccggcgccaacctcgcccgcgcgcgcggcctcgaccgccgcgttcaacgaaagcaggttcgtttga

SEQ ID NO: 20234 - protein, 110 aa, Unknown
  Obtained from environmental sample
  SIGNAL (1)...(25)
  misc_feature (1)..(110): Xaa is any amino acid
MTLAISATPRLICSIPLACSPEAWAMSAMICLVLCVCSTTDSMLFSVSLNISMPPRTFVIVSSIISDVCFAASAERIERPRTSSATTANPAPTSPARAASTAAFNESRFV

SEQ ID NO: 20235 - DNA, 411 bp, Unknown
  Obtained from environmental sample
  misc_feature (1)..(411): n is a, c, g, or t
gtgttcgcgggtctgcggcataagaccgtccgctgcggaaaccacaaggatagcgccgtccatctgcgccgcgccggtaatcatgttctttacgtagtcggcgtgaccgggacagtcaacgtgcgcgtaatggcgctctttggactcatactcaacatgcgcggtgttgatcgtgataccgcgcgccttttcctcgggagcgttatcaatttcatcaaaacgctttgcggtttttgtgaggccgacagcctgcccaacggtcgtgattgcggccgtgagtgtggttttgccgtgatcgatatgcccaatggtgccaacgttaatgtggggttttgttcgttcaaatttttcttttgccatcttattcctcctgtactttcagccactccgcagatggtatatataaaataa

SEQ ID NO: 20236 - protein, 136 aa, Unknown
  Obtained from environmental sample
  misc_feature (1)..(136): Xaa is any amino acid
MFAGLRHKTVRCGNHKDSAVHLRRAGNHVLYVVGVTGTVNVRVMALFGLILNMRGVDRDTARLFLGSVINFIKTLCGFCEADSLPNGRDCGRECGFAVIDMPNGANVNVGFCSFKFFFCHLIPPVLSATPQMVYIK

SEQ ID NO: 20237 - DNA, 393 bp, Unknown
  Obtained from environmental sample
  misc_feature (1)..(393): n is a, c, g, or t
ttgctctatcggggaaatgatcatcctgtcttcgatgaaatctcccaagtgactgtcttcctcttcgcctattggggtttcaaggctgataggttcttgagctattttcataacttttcgcactttggcgactggcatatccatagctttggcgatctcttcgctagtcggttccctgccaagcctttggacctgctctctttgggtgcggatcagcttgttgatggtttcgatcatgtgtacggggattcggatcgtacgcgcttgatcggcaatggcccttgtgatcgcctgtcgtatccaccatgtcgcgtatgtgctgaacttgaagcccctagaatattcaaatttgtccaccgccttcataaggccgatgttgccttcttgtattag

SEQ ID NO: 20238 - protein, 130 aa, Unknown
  Obtained from environmental sample
  misc_feature (1)..(130): Xaa is any amino acid
MLYRGNDHPVFDEISQVTVFLFAYWGFKADRFLSYFHNFSHFGDWHIHSFGDLFASRFPAKPLDLLSLGADQLVDGFDHVYGDSDRTRLIGNGPCDRLSYPPCRVCAELEAPRIFKFVHRLHKADVAFLY

SEQ ID NO: 20239 - DNA, 699 bp, Unknown
  Obtained from environmental sample
  misc_feature (1)..(699): n is a, c, g, or t
atgacagaatcggcacgaggaatttctgtacttgatcgcggctttgtccgcttggttgaccacatgggtaccgacctgactgtggtgaacgcggcccgagtttcgtttggcaagcgcaaggaaacattcgacgacaaagacggagagctggtgacatacctcgcggcgcacgagcacacggctccatttcgccacgcttacttcacctttcacgtaaaggccccaatatttgtcttccgccagtggatgaagcacaggatagcttctgacttcaacgaaatttcaggccgatacgttgagttctctcccgacgagttctatgtcccagagctttttcgccagcaggccaaaatgaacaaacagggaagtgagggcgagatacccgaagaatcccgaaatgcggcaatggacgcttatactgcagcctgccgcaactccgtgacccagtacaaagcgctcatcgaattgggcgtgtgcagggagcaggccagatgtgtgctgcccttggcactttattctgaggtctattggacggtcagcctacaggctgtggcccattttttgcacttgcggctggattcacacgcccaatgggagataaggcaattcgccaaagcggtgcgcgacttggcggagcctattttccccaatagcctgcaagcacttatggaggccgttgccaagatgcccaatagatag

SEQ ID NO: 20240 - protein, 232 aa, Unknown
  Obtained from environmental sample
  DOMAIN (11)...(221): Thymidylate synthase complementing protein
  misc_feature (1)..(232): Xaa is any amino acid
MTESARGISVLDRGFVRLVDHMGTDLTVVNAARVSFGKRKETFDDKDGELVTYLAAHEHTAPFRHAYFTFHVKAPIFVFRQWMKHRIASDFNEISGRYVEFSPDEFYVPELFRQQAKMNKQGSEGEIPEESRNAAMDAYTAACRNSVTQYKALIELGVCREQARCVLPLALYSEVYWTVSLQAVAHFLHLRLDSHAQWEIRQFAKAVRDLAEPIFPNSLQALMEAVAKMPNR

SEQ ID NO: 20241 - DNA, 657 bp, Unknown
  Obtained from environmental sample
  misc_feature (1)..(657): n is a, c, g, or t
atgaccggtgcttattttgacatgataaaaagtaatttcaatattattactcccgaagacggcctgaaacctatttcactgacatcaaacaggggcggcgcatacaactggtcttactcggatcaaatggtgtatcggatgctggaaaacggaatacccgttcatggccatgttctggtgtggcatgattggactcccgaatggatgaccaaagggacaaagacggaagcagaagacaacctcaaaaatcatattactgatgtattagcgcattatcatggcagaattaattcatgggatgtggtaaacgaggcgattagagacggcctttcccctgccgatgccgccggagactggaaaaaatgcctgcgtactgatgccccctggtatcgcgtgttaggcgcaggttatatagaaaccgcctttcgtaccgctcgggaagccgaccctgacattaccctctattacaatgattatggcctggaattcccccagaaagccgaagcggcacgaaaaatgatcaatgacataaataaccggtataaaaaagaaaccggacaggatcgaaaccttattgaaggcttgggtattcaagcccattaccaaatcaaaagtttcgatgaaaatagaatacgttcatcattggaaaaattgtaa

SEQ ID NO: 20242 - protein, 218 aa, Unknown
  Obtained from environmental sample
  DOMAIN (1)...(218): Glycosyl hydrolase family 10
  misc_feature (1)..(218): Xaa is any amino acid
MTGAYFDMIKSNFNIITPEDGLKPISLTSNRGGAYNWSYSDQMVYRMLENGIPVHGHVLVWHDWTPEWMTKGTKTEAEDNLKNHITDVLAHYHGRINSWDVVNEAIRDGLSPADAAGDWKKCLRTDAPWYRVLGAGYIETAFRTAREADPDITLYYNDYGLEFPQKAEAARKMINDINNRYKKETGQDRNLIEGLGIQAHYQIKSFDENRIRSSLEKL

SEQ ID NO: 20243 - DNA, 417 bp, Unknown
  Obtained from environmental sample
  misc_feature (1)..(417): n is a, c, g, or t
ttggcaattgcgcgtacagcatcgtccagatctttcttttcatttttacgaagccgcttgagagcttttaaaaaagatgaagaacaaacaaattatagttgtgtctatatttatagtacggaaacgccagcacaactttgtaatacattcgatccttttaaaattaatgaagtcaagcgttatgttcctaaacatttggataaaagaataatcgcacaagaaggattattttcggttcataatgacccacttgtcccctgggaaccagcaggtttggaaacaatattaattaacaaagaaatacgcaaaaaaatcaagtggatattatatagattgggaataaatgccagcgctctttttcctggtattgatggaatagcaaaatatgtagaatggctacgttctggttcacattaa

SEQ ID NO: 20244 - protein, 138 aa, Unknown
  Obtained from environmental sample
  misc_feature (1)..(138): Xaa is any amino acid
MAIARTASSRSFFSFLRSRLRAFKKDEEQTNYSCVYIYSTETPAQLCNTFDPFKINEVKRYVPKHLDKRIIAQEGLFSVHNDPLVPWEPAGLETILINKEIRKKIKWILYRLGINASALFPGIDGIAKYVEWLRSGSH

SEQ ID NO: 20245 - DNA, 795 bp, Unknown
  Obtained from environmental sample
  misc_feature (1)..(795): n is a, c, g, or t
atgttcagagggatttttaattcgcccatcgttgacgaagtcgattccattctcatcgacgaggcccgtacgcccctcatcatttccggcccggccgaaaaatccaccgatctctacctccgggccgaccgggtgattccccagttgaaccgggatgaagactacaccctggacgaaaaaggacgtaacgccaatttaaccgaagagggcgtggcccgggccgaggaaatcctgggcctccccaacctctatgacccctccaacatagaaatcctccaccacctgacccaggccttgaaggcccacaccatcttcaccagggacaaggactacatagtcaccaaggacaagcaggtggtcattgtcgatgagttcaccggccgcctcatgatcggccgccgctattcagacggcctgcaccaggccctggaagccaaggaaaaggtcaagatcgaaagcgaaaaccagaccctggcttccataaccttccagaattatttccggatgtatgaaaaactggccggcatgaccggcacggccgataccgaggcggccgagttcgccaagatatacaagctgggcgtcaccgtcatccccacccaccgccgcatgatccgcttggatcaccaggacgtcatctaccgcacctcccgggaaaaatacaacgcggtggtggaagagatagaagccctccaccagaagggccagccggttctggtgggcaccatctccatcagccattcggaacagatttccgaaatgctcaagaaacggggcgtgcctcacaatgtctga

SEQ ID NO: 20246 - protein, 264 aa, Unknown
  Obtained from environmental sample
  DOMAIN (1)...(188): SecA DEAD-like domain
  misc_feature (1)..(264): Xaa is any amino acid
MFRGIFNSPIVDEVDSILIDEARTPLIISGPAEKSTDLYLRADRVIPQLNRDEDYTLDEKGRNANLTEEGVARAEEILGLPNLYDPSNIEILHHLTQALKAHTIFTRDKDYIVTKDKQVVIVDEFTGRLMIGRRYSDGLHQALEAKEKVKIESENQTLASITFQNYFRMYEKLAGMTGTADTEAAEFAKIYKLGVTVIPTHRRMIRLDHQDVIYRTSREKYNAVVEEIEALHQKGQPVLVGTISISHSEQISEMLKKRGVPHNV

SEQ ID NO: 20247 - DNA, 381 bp, Unknown
  Obtained from environmental sample
  misc_feature (1)..(381): n is a, c, g, or t
gtgaggcacgccccgtttcttgagcatttcggaaatctgttccgaatggctgatggagatggtgcccaccagaaccggctggcccttctggtggagggcttctatctcttccaccaccgcgttgtatttttcccgggaggtgcggtagatgacgtcctggtgatccaagcggatcatgcggcggtgggtggggatgacggtgacgcccagcttgtatatcttggcgaactcggccgcctcggtatcggccgtgccggtcatgccggccagtttttcatacatccggaaataattctggaaggttatggaagccagggtctggttttcgctttcgatcttgaccttttccttggcttccagggcctggtgcaggccgtctga

SEQ ID NO: 20248 - protein, 126 aa, Unknown
  Obtained from environmental sample
  misc_feature (1)..(126): Xaa is any amino acid
MRHAPFLEHFGNLFRMADGDGAHQNRLALLVEGFYLFHHRVVFFPGGAVDDVLVIQADHAAVGGDDGDAQLVYLGELGRLGIGRAGHAGQFFIHPEIILEGYGSQGLVFAFDLDLFLGFQGLVQAV

SEQ ID NO: 20249 - DNA, 435 bp, Unknown
  Obtained from environmental sample
  misc_feature (1)..(435): n is a, c, g, or t
ttgacaggtttggtaatcctcacttccggcgtaagcagctttgaagcaggcgttggcgccacaaactttgtcggcgggctcttttcgggcgctgaccttaccatggccgcgttctccgcaacatttggccaggcaggcggcatatttgtaaccctgggcatacttctctttgccctttcaaccatactgggctggtcttactatgggcagcagagccttggatacctcacaaacaacaataaagcatgggactggatctacaagttcatcttcaccgtcctgaccattgttggcgctataggagggttgacattaatttgggatatcgccgataccctgaacgggcttatggccatccccaaccttatcgctgtactccttctctgcaaaacagtctttgctctgacgaaagaatacgtcgcaaagaataaataa

SEQ ID NO: 20250 - protein, 144 aa, Unknown
  Obtained from environmental sample
  DOMAIN (1)...(144): Sodium:alanine symporter family
  misc_feature (1)..(144): Xaa is any amino acid
MTGLVILTSGVSSFEAGVGATNFVGGLFSGADLTMAAFSATFGQAGGIFVTLGILLFALSTILGWSYYGQQSLGYLTNNNKAWDWIYKFIFTVLTIVGAIGGLTLIWDIADTLNGLMAIPNLIAVLLLCKTVFALTKEYVAKNK

SEQ ID NO: 20251 - DNA, 813 bp, Unknown
  Obtained from environmental sample
  misc_feature (1)..(813): n is a, c, g, or t
ttggtcaggatcggcacgagaatcggcgaccccatctccgggcaccgcgccaattctgttttacaggcagttcgtgttgccgtccgatgggctgtagacaatgatgagataccgtccgacccattccgcaagctaggtgatgtaacagaatttctgaaagaaaaaggcgtacttactcttgaagaaagaaacaacttaattaacttgcccatagatgattatcgtagccgtctctttatgctattaggctgtttgtgtggaatgagaaggggtgagatgagaggtctccaatggggcgatattgaagacaacctaattcatatcaaacacaattacgttgacaatgaagatgtaaaaaatccaaagtacaattcggtcaggaaagtacccatacctacagcagtacaagagcttcttgaaatagcccgagaaaacgcttttgacatttctccatccagttttgtattggcaagccccatccgcaaggacaaaccgcttaacaataatttctttagggaaggcgttaaaaaagaattgtcagcattaggcattagcgaagcacagcagaaagaacgctttattacctgccacagcctacgccatacctttattacccttgcccaaattaccggcgttcctgatgtagtaatcagcgcattggcgggacacaagagccttaaaactactggtaagtatagccatataccacaagtcatagactttaacgatgncagaagaaagatagacagttcttacttgcctcanagcattgaacagcctggaaagcctgaaaaagaagccgtcaatcaataa

SEQ ID NO: 20252 - protein, 270 aa, Unknown
  Obtained from environmental sample
  DOMAIN (51)...(246): Phage integrase family
  misc_feature (1)..(270): Xaa is any amino acid
MVRIGTRIGDPISGHRANSVLQAVRVAVRWAVDNDEIPSDPFRKLGDVTEFLKEKGVLTLEERNNLINLPIDDYRSRLFMLLGCLCGMRRGEMRGLQWGDIEDNLIHIKHNYVDNEDVKNPKYNSVRKVPIPTAVQELLEIARENAFDISPSSFVLASPIRKDKPLNNNFFREGVKKELSALGISEAQQKERFITCHSLRHTFITLAQITGVPDVVISALAGHKSLKTTGKYSHIPQVIDFNDXRRKIDSSYLPXSIEQPGKPEKEAVNQ

SEQ ID NO: 20253 - DNA, 726 bp, Unknown
  Obtained from environmental sample
  misc_feature (1)..(726): n is a, c, g, or t
ttgccgcctgcttacgggctgattccccattcgttggaggggactctccttggcgcggtgacagttgacggcgacgatacaaggtcttcaagcgtcgcccggcttgcgaaaaaagtcggcatggtctttgaagatccgaccacgcagctttttacaactagcgtttacaacgaggccgcctttgcccttgaaaatttactgctcaagccggaggagatcgccgcgaaggtacaacaggcgctggaggcggccggcctttgggattacagggaatttcccgtgtccaatctttcaggcggacagaaacagcgcctgacaatcgcggccgcccttgccatggcgaacaggctccttgttctcgacgagcccgcttcccagcttgatcccctcggggcaatggaagttctttcgtttatccgcgatctccgccgacaaaaaggattgaccgtggtaatggcgacaggctcgggcgaggaagctgcggaattcgccgaaaaaatacttgtgttaaggaagggaagccttgccgcttttgggagtccgaaggaaatctttgccgacaaggaactcctggcctcatgtatgatagaccctccccaggtttcggaattcgccaaccgtatggaagaactcggaaacccgctgccgcgttttcccgtcaatcttgacgaagccctggagtcggtgcgtgatttgtttaaaggaatccatgaacaacggtactga

SEQ ID NO: 20254 - protein, 241 aa, Unknown
  Obtained from environmental sample
  DOMAIN (5)...(173): ABC transporter
  misc_feature (1)..(241): Xaa is any amino acid
MPPAYGLIPHSLEGTLLGAVTVDGDDTRSSSVARLAKKVGMVFEDPTTQLFTTSVYNEAAFALENLLLKPEEIAAKVQQALEAAGLWDYREFPVSNLSGGQKQRLTIAAALAMANRLLVLDEPASQLDPLGAMEVLSFIRDLRRQKGLTVVMATGSGEEAAEFAEKILVLRKGSLAAFGSPKEIFADKELLASCMIDPPQVSEFANRMEELGNPLPRFPVNLDEALESVRDLFKGIHEQRY

SEQ ID NO: 20255 - DNA, 597 bp, Unknown
  Obtained from environmental sample
  misc_feature (1)..(597): n is a, c, g, or t
gtggaatcggggggacctgagccgggcgtcgggtgcgcgggacggggcattattaccgccatcgggcttttggaacagcttggcgcttataccgatgatttggattttgtgttctacgacgttctcggcgacgttgtttgcggcggcttcgcgatgcccatccgcgagggcaaggcgaaagagatctacattgttgcaagcggcgagatgatggcgctttatgccgccaacaatatcgccaaaggcatcgcaaaattcgcgcagaagggcggagtgcggctcggcggactaatctgcaacagcagaaacgtggacagggagaacgaactgcttgaagcgttcgcgaaggaactcggcactcagcttgtttattttgttccgcgcaataacgtcgtccaaagagcggagatcaacaggaagaccgtgattcagtacgcgcccgaggatcatcaggcgcaggagtaccgcaatttggctaaggccatagagaccaatacgatgtttacgattccaaagcctatgacgcaggttcggcttgaagagatattgcttgaattcggattgatggacgcgataaaaaacgattatcgtatttaa

SEQ ID NO: 20256 - protein, 198 aa, Unknown
  Obtained from environmental sample
  DOMAIN (1)...(190): 4Fe-4S iron sulfur cluster binding proteins, NifH/frxC family
  misc_feature (1)..(198): Xaa is any amino acid
MESGGPEPGVGCAGRGIITAIGLLEQLGAYTDDLDFVFYDVLGDVVCGGFAMPIREGKAKEIYIVASGEMMALYAANNIAKGIAKFAQKGGVRLGGLICNSRNVDRENELLEAFAKELGTQLVYFVPRNNVVQRAEINRKTVIQYAPEDHQAQEYRNLAKAIETNTMFTIPKPMTQVRLEEILLEFGLMDAIKNDYRI

SEQ ID NO: 20257 - DNA, 735 bp, Unknown
  Obtained from environmental sample
  misc_feature (1)..(735): n is a, c, g, or t
gtgggagcgactatggatcacatggagcttgagcgggagcgcggtattacgatccaatccgccgcgacacaggttaactggaaagattataccattaacgttattgatacgccgggacacgttgactttaccattgaggttgagcgttccctgcgtgtgcttgacggggcgatcctcgttctctgctcggtgggcggggtgcagtcgcagtctattaccgtagacaggcagttaaaacgctaccatgtgccgcgcatcgcttttgtgaacaagtgcgaccgtaccggggcaaacccatttaaggtatgcctgcagctcagggaaaaactggggttgaacgcggtaatggtgcagattcccatcggacttgaagacaagctggagggaattgttgatttagtcaccatgaaggcggtgtactttgacggtgaccagggcgaaactatacgttatgcggatattccgtccaatttcaaggctgacgcggagaaataccgtgaggaaatgctggaagcgctttccatgttctgcgacgatctcgccggacagtatttggaaggcggagttgtcagcgaagacctgattcatcaggcgatccgtaagggcacattgtccgaacagcttgttccggtgatgctgggttcagcgtataagttcaaggggatacagcctctgctggacgcggtgaacctttacccttcccacccaaccgaggtaaaaaacccaggctcttga

SEQ ID NO: 20258 - protein, 244 aa, Unknown
  Obtained from environmental sample
  DOMAIN (1)...(237): Elongation factor Tu GTP binding domain
  misc_feature (1)..(244): Xaa is any amino acid
MGATMDHMELERERGITIQSAATQVNWKDYTINVIDTPGHVDFTIEVERSLRVLDGAILVLCSVGGVQSQSITVDRQLKRYHVPRIAFVNKCDRTGANPFKVCLQLREKLGLNAVMVQIPIGLEDKLEGIVDLVTMKAVYFDGDQGETIRYADIPSNFKADAEKYREEMLEALSMFCDDLAGQYLEGGVVSEDLIHQAIRKGTLSEQLVPVMLGSAYKFKGIQPLLDAVNLYPSHPTEVKNPGS

SEQ ID NO: 20259 - DNA, 672 bp, Unknown
  Obtained from environmental sample
  misc_feature (1)..(672): n is a, c, g, or t
ttggggctttctgaggttacgattcggggtgattttcgagtcctggaagaaaagggctggatcaaccgaaaatggggaggagccgctccggccctgcacagggatatcctggaaaggcagaaggtctgtcaggagcagaaaaactccatagccagagccgcggcggagctagtccgggacggggacgttatcatgatagaggcgggcacaacaacggcgttgattgcccgttacctctccgggaagcgggacattcatatcgttacaaactcaacccttgtgttctcttatgccaggatgtttcccaatttacagattaccatgacaggcggcgagttccgcagaagtaccgagtccatggtcggccccatagcgcttgagaccctcaaccgcctgaacgtgcggttggcctttgtggggacagacggctttacaatagaaaggggcatgactacccatctaatggaaggcgcggagattgtcaggatgatgaaagcccacgccgagattacggtacttaccgcggattcaggcaaattcggcagaataggcttttcttacgtgttgccgctttcggcaatggatttgatcttgaccgattgggagctaagcgacgtggcggaaactgaacttcgtgaagcgggaataaacattaaaaaggtgaaaaactaa

SEQ ID NO: 20260 - protein, 223 aa, Unknown
  Obtained from environmental sample
  DOMAIN (44)...(200): Bacterial regulatory proteins, deoR family
  misc_feature (1)..(223): Xaa is any amino acid
MGLSEVTIRGDFRVLEEKGWINRKWGGAAPALHRDILERQKVCQEQKNSIARAAAELVRDGDVIMIEAGTTTALIARYLSGKRDIHIVTNSTLVFSYARMFPNLQITMTGGEFRRSTESMVGPIALETLNRLNVRLAFVGTDGFTIERGMTTHLMEGAEIVRMMKAHAEITVLTADSGKFGRIGFSYVLPLSAMDLILTDWELSDVAETELREAGINIKKVKN

SEQ ID NO: 20261 - DNA, 774 bp, Unknown
  Obtained from environmental sample
  misc_feature (1)..(774): n is a, c, g, or t
gtggagcatgtcagtcatgtattctcccgtccgcgcaatgtgataatacccggtgtcctggtggacgcggtggtagtgtgtgaaacccccgtcgaaataggtgaatacaatcccgcgttatccggcgacattcatgttccggcgacgcacatggattattttgttaacaaaatctccaccacaaagaaaataactcacggcgatgatacagccgatattatcggggaacgtgctgcgcgtgaactgcgctccggtcaaatcgtgaatatcggtataggcattccggaaatggtgggcatttacgcgtccagactcggcatactgaaagagattgtcaacactgtggaggccggcggcgtgggcggacttcccgcgcccggcgtggcgtttggcgcgactataggcgcggatatgatctccgatatggcgactcagtttgatttttacgacggcggcggcctggacatctgttttctcggcggactggaagctgacgcgcagggcaatgtgaacgcccacaaactggaaggcagttacgccggaattggcggcttcgccaatatcacatactccaccaaaattattgttttctgcatgagtttcaataccaaagggcttatcaccgcanaagaaaacggtaaagtaataatcaaacatgaaggtgcggtgcctaaattcaaaaaacaaatttccgctatcagtttcgccgcaaaaaacgccctcaatcgcggtcagcgtgtactatacatcaccgaacgctgcgtattcgagtaa

SEQ ID NO: 20262 - protein, 257 aa, Unknown
  Obtained from environmental sample
  misc_feature (1)..(257): Xaa is any amino acid
MEHVSHVFSRPRNVIIPGVLVDAVVVCETPVEIGEYNPALSGDIHVPATHMDYFVNKISTTKKITHGDDTADIIGERAARELRSGQIVNIGIGIPEMVGIYASRLGILKEIVNTVEAGGVGGLPAPGVAFGATIGADMISDMATQFDFYDGGGLDICFLGGLEADAQGNVNAHKLEGSYAGIGGFANITYSTKIIVFCMSFNTKGLITAXENGKVIIKHEGAVPKFKKQISAISFAAKNALNRGQRVLYITERCVFE

SEQ ID NO: 20263 - DNA, 570 bp, Unknown
  Obtained from environmental sample
  misc_feature (1)..(570): n is a, c, g, or t
ttgatcgccgagaacatcattatggaacgttctttgagcaccgatgaccccgctctgggagaagatataagggccgagatactgagctcggtacagcccggctccggttatgagcctattacaaagggccgccgccgccttgccgaggaaatactcaatcgttcgcggcgcatggttcccgaatacggcatagaacttatcgacgtggtaacgcggcagatacgctactccgacgagcttaccccaagcgtctacgcccgcatgatacgggaacggaaccagatagcccaggcttaccgatccgccggcgaaggcagcaaggcggaatggctgggcaagatggacaatgaaaaacgctccattctttccgccgcatactctcaagctcaaacaattatgggaaacgctgacgcaagagccacaaggatttacgccgatgcgtacaaccaggacagggacttttttaatttctggcgcggcgtggaatcttaccggaacaccatgccgaagtttaacaaaacattgtcaacggatatggaatacttccgctatctgtataatccgcgataa

SEQ ID NO: 20264 - protein, 189 aa, Unknown
  Obtained from environmental sample
  misc_feature (1)..(189): Xaa is any amino acid
MIAENIIMERSLSTDDPALGEDIRAEILSSVQPGSGYEPITKGRRRLAEEILNRSRRMVPEYGIELIDVVTRQIRYSDELTPSVYARMIRERNQIAQAYRSAGEGSKAEWLGKMDNEKRSILSAAYSQAQTIMGNADARATRIYADAYNQDRDFFNFWRGVESYRNTMPKFNKTLSTDMEYFRYLYNPR

SEQ ID NO: 20265 - DNA, 966 bp, Unknown
  Obtained from environmental sample
  misc_feature (1)..(966): n is a, c, g, or t
atggccgagatacggctcgataaaaaactggaaaaaatgtataatatccatcctctgaccattgaagacgcccttgatgccaggcagcagccaaaagtcgaaacattccaaaattaccgttttatttccttaaaatcaataaggcatgaaaagaaaattcatttgataaaacaggatattaaaaaacgtttttccagaagaagtcgaaagaaattaatggaacaactggaagacatgaaggaatttattattgatcatatcagtataatcataatgaagaatgtgttaataaccattcaggaaatagccggagattcattcggggatataagaaaacggattttggaaaacatcgggcagattcgcagaatggggacggattatcttgcctattcattgattgatactgtggttgacgagtatttcattacactggcccatctggaagatgatattgaagatattgaagatcgcgccgtaaaaacagataatgacgcgttcatttccgaaatacaggaaacaaaaaaattccttttccatataaaacgggcgatgctgccgttgcgggagaatcttatgattatatcccgccaggatatgctgctgacaaacgaagaactaaaaccgttccttcaggacttgcgggaaaatttatctaacgcaatagaatccgtagaaacataccgtgaatggctgacaaacataatggatgtaaacctttcggttctgtcataccaattaaacaaagtgatgaanatactggctgttatatcggcaatatttatcccattaacttttattgcggggatatacggcatgaattttgaatttatgcccgaattggcgcagccctggggttaccctattgtgctgggattcatggggactgtcgcgctggcaatggtcgtattatttaaacacggaaatggttctaatccacggattttaatcgaggacatcgtttaa

SEQ ID NO: 20266 - protein, 321 aa, Unknown
  Obtained from environmental sample
  DOMAIN (3)...(305): CorA-like Mg2+ transporter protein
  misc_feature (1)..(321): Xaa is any amino acid
MAEIRLDKKLEKMYNIHPLTIEDALDARQQPKVETFQNYRFISLKSIRHEKKIHLIKQDIKKRFSRRSRKKLMEQLEDMKEFIIDHISIIIMKNVLITIQEIAGDSFGDIRKRILENIGQIRRMGTDYLAYSLIDTVVDEYFITLAHLEDDIEDIEDRAVKTDNDAFISEIQETKKFLFHIKRAMLPLRENLMIISRQDMLLTNEELKPFLQDLRENLSNAIESVETYREWLTNIMDVNLSVLSYQLNKVMXILAVISAIFIPLTFIAGIYGMNFEFMPELAQPWGYPIVLGFMGTVALAMVVLFKHGNGSNPRILIEDIV

SEQ ID NO: 20267 - DNA, 465 bp, Unknown
  Obtained from environmental sample
  misc_feature (1)..(465): n is a, c, g, or t
gtgattgtgtcttttatttgcggtttgtcgtttcaggagcagttaacagacttaaaacccgctttttattacgcaatccttatgtacattttatccgtatttacaaatttatatgataatttaaggcttattccctttaatgaattgttaaaagtgttaattccgcgccatgaatatttaagaattacactgcgtctggcgcttattatgcaaatttcggcattggtcttccgcacgacaagcgcgcttgaaataagagaagccgtaaggcttgaaataataaacgtatttttatgttttattcccgaaatttttaagatatggacttccgtcaatcttgcgtggaaagcgcgcggaggaaaagacggcatagcaaaaataaaaacagttatttttgttttaatttcgctttgttttgaaaaagcggcgttaaaagcaaaagcgttagaggcaaggagcgtataa

SEQ ID NO: 20268 - protein, 154 aa, Unknown
  Obtained from environmental sample
  misc_feature (1)..(154): Xaa is any amino acid
MIVSFICGLSFQEQLTDLKPAFYYAILMYILSVFTNLYDNLRLIPFNELLKVLIPRHEYLRITLRLALIMQISALVFRTTSALEIREAVRLEIINVFLCFIPEIFKIWTSVNLAWKARGGKDGIAKIKTVIFVLISLCFEKAALKAKALEARSV

SEQ ID NO: 20269 - DNA, 663 bp, Unknown
  Obtained from environmental sample
  misc_feature (1)..(663): n is a, c, g, or t
atgacagattggccgagggatcataaacgccgttttgagggggcgaagggaccgaataccggcggcatgggggcaatagccccggtccctgatttttcacaggaagcgcaggacgattttgtccaatctattttgaaaccgacgcttaacggtatcagggttgagcactttgactaccgtggatttatcttttttggattaatggtacaaaaaaaccggtgctacctgcttgaatacaatgtgcgtcttggcgacccggaaacccaggcggtattgccgcttatggatagtgatcttgtggatctttgcgaagccgtgattgagggcaatgaatttcacctaacatggaaacagggagctgtctgcgcccctgttgtcgtcgccgaaggctaccctggtccctaccgcaaaggcgacgctgtttccatagatgtaacagccctggaaaaaaccggggcgaaaatattcatcagcggcgctttccggggccttgccggcggcattgggtcgtccgctccatccctgcttacatccgggggcagagtactgaccgtttccgccttcgggcaaaatgccgacgaagcctacgcccgcgcctataaaggccttgaggcaatcaactttgaaggcatgggctttcgctgcgacataggcagggaataa

SEQ ID NO: 20270 - protein, 220 aa, Unknown
  Obtained from environmental sample
  DOMAIN (2)...(88): Phosphoribosylglycinamide synthetase, ATP-grasp (A) domain
  misc_feature (1)..(220): Xaa is any amino acid
MTDWPRDHKRRFEGAKGPNTGGMGAIAPVPDFSQEAQDDFVQSILKPTLNGIRVEHFDYRGFIFFGLMVQKNRCYLLEYNVRLGDPETQAVLPLMDSDLVDLCEAVIEGNEFHLTWKQGAVCAPVVVAEGYPGPYRKGDAVSIDVTALEKTGAKIFISGAFRGLAGGIGSSAPSLLTSGGRVLTVSAFGQNADEAYARAYKGLEAINFEGMGFRCDIGRE

SEQ ID NO: 20271 - DNA, 774 bp, Unknown
  Obtained from environmental sample
  misc_feature (1)..(774): n is a, c, g, or t
atgcaaagaatcggcgagctggccgcgttcgggacggcggttgcgtggacgataggagccctcttttttgaacagggagtaaaacgcattggcgtgctttccgttaattttttcaaagtggtatttgcttttgtgctattaacgataacggcggcttttttgcggggaatgcccctgccttttgacgcgcctcttagggccgtgatctttctgaccttgtccggaataatcgggtttgtcgttaccgatatgtttctttttacagcctacggcaccatcggcccaagaattaccatgctaataatggcgctttcccctcctgtaacagccggtatagcttacgtttttctggacgagaggcttggctcgatgggcgctcttggcatgagcctggtcataatcgggatttgcatgacagtattcggcaaacaaaacagcgtttccatttccaaaattgacaaggttgacatgcgcggatacatctttgcttttatcgcttccataggccaatcaattggaatggttttaacaaaagccggccttggcgattacgatccggtttcggggacgcagattcgcgaaatcgcggccatcgttggattcgcccttgtggcattggtttacgacaggggaaggggactaataaaagcggcgaaaaactttgcgggcttaaagtctaccgcggggggtgctgtttttggcccttttatcggcgtagcgctttcgctctttgccattcagcgtattagcgcgggcatgaagccctctccataa

SEQ ID NO: 20272 - protein, 257 aa, Unknown
  Obtained from environmental sample
  DOMAIN (14)...(141): Integral membrane protein DUF6
  misc_feature (1)..(257): Xaa is any amino acid
MQRIGELAAFGTAVAWTIGALFFEQGVKRIGVLSVNFFKVVFAFVLLTITAAFLRGMPLPFDAPLRAVIFLTLSGIIGFVVTDMFLFTAYGTIGPRITMLIMALSPPVTAGIAYVFLDERLGSMGALGMSLVIIGICMTVFGKQNSVSISKIDKVDMRGYIFAFIASIGQSIGMVLTKAGLGDYDPVSGTQIREIAAIVGFALVALVYDRGRGLIKAAKNFAGLKSTAGGAVFGPFIGVALSLFAIQRISAGMKPSP

SEQ ID NO: 20273 - DNA, 420 bp, Unknown
  Obtained from environmental sample
  misc_feature (1)..(420): n is a, c, g, or t
ttgggggaaaaggtctttgggaaaaaaaatgagattaccgcgctggaagcgattgtccatccgcagaccgaccgcatgatattggagtggattagttcgcaaaacggcagaacctgcgttattaacgcggcattgctgcatagatcggcggtttttaggcagcttggctgcatattattggttaccgccccgttccttgtcagaatgttacgggcaaaacgcagggacaggctctcctggacttcaattttcaggagattaacgagccagaagcgttttacccttcaatatttagccggaaatgccgatatttacatagtggaaaacccctggacaggagggtttttcccgggttccgccggttatgaaacaaaactggaacggcggatcaatgagttcctggcaggattggatttttaa

SEQ ID NO: 20274 - protein, 139 aa, Unknown
  Obtained from environmental sample
  misc_feature (1)..(139): Xaa is any amino acid
MGEKVFGKKNEITALEAIVHPQTDRMILEWISSQNGRTCVINAALLHRSAVFRQLGCILLVTAPFLVRMLRAKRRDRLSWTSIFRRLTSQKRFTLQYLAGNADIYIVENPWTGGFFPGSAGYETKLERRINEFLAGLDF

SEQ ID NO: 20275 - DNA, 336 bp, Unknown
  Obtained from environmental sample
  misc_feature (1)..(336): n is a, c, g, or t
gtgctttgccgcagcggcgcgggcacaatctgggaatgtaaatttttaaagaagccaatggtgcttattcccttccggggttcggcaacaaggggggatcaggtagagaacgcccgcctttttgaagatgcgggcgccgccgtccgctttattccgaattcagaagaaaacgtttctgcggaaaaactttctgaattaattgtatcccttgcgcaaaatccagataaactcaaatcaatggcggaggccaggattgacggcgggggatcagaaggcaacgcggctgaatttatcgcgagggaaattgctgaaaggataagggggaaagatggataa

SEQ ID NO: 20276 - protein, 111 aa, Unknown
  Obtained from environmental sample
  misc_feature (1)..(111): Xaa is any amino acid
MLCRSGAGTIWECKFLKKPMVLIPFRGSATRGDQVENARLFEDAGAAVRFIPNSEENVSAEKLSELIVSLAQNPDKLKSMAEARIDGGGSEGNAAEFIAREIAERIRGKDG

SEQ ID NO: 20277 - DNA, 540 bp, Unknown
  Obtained from environmental sample
  misc_feature (1)..(540): n is a, c, g, or t
atggataatattacggtgattgattatatttttattattctaatcttgttgatgattgttcacggcttttttaaagggtttattgaagagctcttttcctgggcagcaattattctggcaatatggacggcggtgcttttgaattccgccaccgcggcgtttatccgggaaaaggccatgcagaatgtgcgtgtagtgccggaaatccttggtttcgcggccgtttttattcttgtcatgatcgtaattaaatttttggagaagatcctgaaggatgttatagcgggagcaaatctgggaaacgttaataaatttcttggggcgcttttcggtctcatcgaaggttttgcttttgtaattcttatcatttttgttctttccgttcagccgcttttcaacgcttctaaaatattgggagaaagcatttttgcccagataatgcttcctttaataaggattccaatggatcgtgggcaggatgttgtcgaaaccgtccttngtattttgccgatcttttatcgggcaggtcgagcaggatag

SEQ ID NO: 20278 - protein, 179 aa, Unknown
  Obtained from environmental sample
  DOMAIN (6)...(160): Colicin V production protein
  misc_feature (1)..(179): Xaa is any amino acid
MDNITVIDYIFIILILLMIVHGFFKGFIEELFSWAAIILAIWTAVLLNSATAAFIREKAMQNVRVVPEILGFAAVFILVMIVIKFLEKILKDVIAGANLGNVNKFLGALFGLIEGFAFVILIIFVLSVQPLFNASKILGESIFAQIMLPLIRIPMDRGQDVVETVLXILPIFYRAGRAG

SEQ ID NO: 20279 - DNA, 870 bp, Unknown
  Obtained from environmental sample
  misc_feature (1)..(870): n is a, c, g, or t
atgcaaagacttgtagtagatgaagctaaaataaagaaagccatcctgtcagggctcccttttactgtaaccacttttaccatggcgcgtgaaatagaaatttatattgaagaagttataacctttttcctaaaatacgccggaaaagaaaatcttaaagattacgttgtttacagcgtcctggaacttgccgccaacgcgaaaaaagcaaataccaaacgggtatatttttctgaactcggtttggatatttccaaagattatgactacatgatagggatggaaaatttcaaagagaacgcgcttgccaatatctctcatttccttcaattgcagaaagaaaggggcctctatattaggctggcattgcagatgcgggatgacattattcagattgagattcgcaacaatgccgccgctgtccgcaccgaattgaaccgcatacgcgaccggctggcccgctcgcggcagtaccaaagccttgatgaagtgttttctcagatacttgatgattcagaaggcgcgggcctggggcttattatcctcgtgctgatgctgagaaagatgggccttaacgaagactgctttaatatatgcaacaatgaaaaagagactgttgcgcgcataaagatacctatggatcaggttaatgttgaaaatatttacgggctttcccaggcaatcgtcgataatatagattcccttccccagtttccggagaacatcaaggagatacagcggcttctcaatgattcggatgccgacataggtatcattgcgcggcaattggcaatagatcccgcgtttaccgcggatctgttcagaatagtcaactccgcgcagtacatgctatcaaacgactcgccataa

SEQ ID NO: 20280 - protein, 289 aa, Unknown
  Obtained from environmental sample
  misc_feature (1)..(289): Xaa is any amino acid
MQRLVVDEAKIKKAILSGLPFTVTTFTMAREIEIYIEEVITFFLKYAGKENLKDYVVYSVLELAANAKKANTKRVYFSELGLDISKDYDYMIGMENFKENALANISHFLQLQKERGLYIRLALQMRDDIIQIEIRNNAAAVRTELNRIRDRLARSRQYQSLDEVFSQILDDSEGAGLGLIILVLMLRKMGLNEDCFNICNNEKETVARIKIPMDQVNVENIYGLSQAIVDNIDSLPQFPENIKEIQRLLNDSDADIGIIARQLAIDPAFTADLFRIVNSAQYMLSNDSP

SEQ ID NO: 20281 - DNA, 609 bp, Unknown
  Obtained from environmental sample
  misc_feature (1)..(609): n is a, c, g, or t
atgtctaaatccggcgataattttattacggtcgataccctgaaagaacaaaaaatcgacccgttggcatatcgctatttttgttattcaagccattaccgcaaacaattgtcgttttctgtcgacaacgtttcggcggcgcatacgggacttaacaatttgagaaatatcgtgcaaaaaaatgcgggttttgacgatacgaaagcggagcaaaaagaaatcgaaaccgttttggaaagtttttacaaggcggttttggacgatatgaatatgcccgtcgcgctcgccgaaatttggggaatactaaaaaacggctcaatttgcggcgaagtaaaaaaagcggcgataaaaaaagcggacgaaattttggcgcttgatttattctgcgaaaaagcgtcgtcagaaaaaataatagacggcgtcaaattcgacggcttcgacgattttaacgacagcgaaatcaaagatatagccgatttgctcaataaacgaatcgaggcgaaaaaaaacagagattttaaaacggcggacgatataagaaattctattgccgccaaaggaattgaaattcttgacagtaaagacggcgttttgtgccgaanaaagtaa

SEQ ID NO: 20282 - protein, 202 aa, Unknown
  Obtained from environmental sample
  misc_feature (1)..(202): Xaa is any amino acid
MSKSGDNFITVDTLKEQKIDPLAYRYFCYSSHYRKQLSFSVDNVSAAHTGLNNLRNIVQKNAGFDDTKAEQKEIETVLESFYKAVLDDMNMPVALAEIWGILKNGSICGEVKKAAIKKADEILALDLFCEKASSEKIIDGVKFDGFDDFNDSEIKDIADLLNKRIEAKKNRDFKTADDIRNSIAAKGIEILDSKDGVLCRXK

SEQ ID NO: 20283 - DNA, 408 bp, Unknown
  Obtained from environmental sample
  misc_feature (1)..(408): n is a, c, g, or t
atgatcagatcggccgaggaattcttcgccaccccagtccccagtccccagaccctagtccccatctcatccgcgccgatgtcaacgttttccttgaacgcgccattgcggagggctgccgctgggactcgatcattcttgatccgccggnctttttccaactcaaaaatggcgcgcgccgatttcgacctgaagagggactatatgtcgctgttggcgaagtgccttaccctgctcgcgcccggcggcaagctctggttcagcgcaagcgccaagtctttcaaggcaaacgccgcggaactggaaacggcgcttgccgcaaaagccgcggacataacggacaaactcgtggatgaggactttagggggaaaaaggggccgaagacgtttaaaatatttttggattag

SEQ ID NO: 20284 - protein, 135 aa, Unknown
  Obtained from environmental sample
  misc_feature (1)..(135): Xaa is any amino acid
MIRSAEEFFATPVPSPQTLVPISSAPMSTFSLNAPLRRAAAGTRSFLIRRXFSNSKMARADFDLKRDYMSLLAKCLTLLAPGGKLWFSASAKSFKANAAELETALAAKAADITDKLVDEDFRGKKGPKTFKIFLD

SEQ ID NO: 20285 - DNA, 543 bp, Unknown
  Obtained from environmental sample
  misc_feature (1)..(543): n is a, c, g, or t
ttgcctancgatgaaaataaaattagagataaattgtttggtgatgattttttgagaaataatcaagtaagaaacgaattaaaaattacagattatttatttgaaccggaaacgcctgaaaaatctggaagagccgatattaaaatcatttccaggaaattaacttttattgatacaaaagcatatttcataattgaatgtaaaagattggatagtaaaaatacaagtggtatatcaggactaaatgcaaaatatattgaagaaggtattgcccggtttgcttctaaaaagtattctatgtacgattgcacagcggggatgataggttttgtagttgagaagatggatattcaacaaaatgtttcggctattaataaactgctaattgaacattttactcaaatttctacagaagaagtactgacatacaaaacaattgtatcagactttaattattcttattcatcaaaacatagtatagatggcattttaaaaattatttatcatttaatgtttgacttatcggataatattaccgtatga

SEQ ID NO: 20286 - protein, 180 aa, Unknown
  Obtained from environmental sample
  misc_feature (1)..(180): Xaa is any amino acid
MPXDENKIRDKLFGDDFLRNNQVRNELKITDYLFEPETPEKSGRADIKIISRKLTFIDTKAYFIIECKRLDSKNTSGISGLNAKYIEEGIARFASKKYSMYDCTAGMIGFVVEKMDIQQNVSAINKLLIEHFTQISTEEVLTYKTIVSDFNYSYSSKHSIDGILKIIYHLMFDLSDNITV

SEQ ID NO: 20287 - DNA, 639 bp, Unknown
  Obtained from environmental sample
  misc_feature (1)..(639): n is a, c, g, or t
gtggcaattcggggcgaccttgatgtaaacgaagttaaacttgccgctgttctaaaggcaagcgaagtgagccttgcccttgataccgatgttgtccgcttgaccgaagcgcctgtgggatttgcgggccctgtggggttgtcttcccttcctgtcataatcgatcacacagttacaggcatggaagacgccgttacaggcgcactggaaaaagactttcactatgaacacgccgcttacggacgcgattttgaagcgtggatgatcgaagatgttcgcacggtaaaagcgggagatcgctgccccctttgcggcggcgagctttatacaaaaatgggtaacgagcttgggcacatttttaaactcggctacaagtacactcgttcaatgaacgtaacatatcttgatgaaaacggtaaaactcaaatgcctgtgatgggctgttacggcatcggtgttgaccgcacgcttgcgtcggtaattgaagaacaccacgatgaagcaggcattatctggcccgcttccgtcgctccgtatcatgtaattataatcccgattaaatacaacaatgaagtaaaaacagccgccgacaaccttgcggcagaattaccaaagcgggtattgaagtttactggatga

SEQ ID NO: 20288 - protein, 212 aa, Unknown
  Obtained from environmental sample
  misc_feature (1)..(212): Xaa is any amino acid
MAIRGDLDVNEVKLAAVLKASEVSLALDTDVVRLTEAPVGFAGPVGLSSLPVIIDHTVTGMEDAVTGALEKDFHYEHAAYGRDFEAWMIEDVRTVKAGDRCPLCGGELYTKMGNELGHIFKLGYKYTRSMNVTYLDENGKTQMPVMGCYGIGVDRTLASVIEEHHDEAGIIWPASVAPYHVIIIPIKYNNEVKTAADNLAAELPKRVLKFTG

SEQ ID NO: 20289 - DNA, 561 bp, Unknown
  Obtained from environmental sample
  misc_feature (1)..(561): n is a, c, g, or t
gtgggggatgacgatcagtcgatttaccgtttccgcggcgctgaggtaaaaaatattcttgaatttccggaaaaattttccggcgccgacattatccgtctggaaagcaattaccgttccaccgcgccgattttgaaagccgcttcctctgttgtagatcacaacaagggccgtttggggaaaaccctccggtcagaacggggcgacggaaaactgccggtgcttgcctttctgccgaatcaggaagaagaagccaatttctgcgcgtcgcttatcgagaaatcggtagaaagcggaaacaagaaaacacaggcggcgcaatggtcggattgggcggtgctgtaccggactaacgcgcaatcgtatgattttgaaaaggaattcctgcaccgtcacattccctacaaggtagtcggctcgcttaaattttatgagcgcgaggagattaaagatgccctcgcccttctttctttcgtggtgaacccccgagacgaagtggcctttcggcggatggtgaacaacccgcccgtggcctgggcgcgggtacggtggatcgcctga

SEQ ID NO: 20290 - protein, 186 aa, Unknown
  Obtained from environmental sample
  misc_feature (1)..(186): Xaa is any amino acid
MGDDDQSIYRFRGAEVKNILEFPEKFSGADIIRLESNYRSTAPILKAASSVVDHNKGRLGKTLRSERGDGKLPVLAFLPNQEEEANFCASLIEKSVESGNKKTQAAQWSDWAVLYRTNAQSYDFEKEFLHRHIPYKVVGSLKFYEREEIKDALALLSFVVNPRDEVAFRRMVNNPPVAWARVRWIA

SEQ ID NO: 20291 - DNA, 888 bp, Unknown
  Obtained from environmental sample
  misc_feature (1)..(888): n is a, c, g, or t
ttggagatggaggacaggggcctgttttgggagatagagcaccagaaggtgctggagggtcttctggaggaagcctacctcgatcagcgcggagtcttcataagggaagggatgcggggcgaagtcaagctgcgcctgattcgacttgggcacccagtccaagacatggcgggcttcaagcctggcgacccgctggagatgaccaccaggaccaaactgctgggcagcggcgctgacttcgccctgcggagctaccagatggcggccgttgatgtcttccacgctggtggtgggcccgacgggggcgcgggtgtgctggtgctgccatgcggagccggcaagaccgtcatcggcataggctgcatggacaggctccagacgcacacacttgtgctgaccacaaacgtgaccgctgtgaagcagtggaagcaggagctactggacaagaccacgctggaggacggtcaggtagggctgtacacgggggacacaaaggaaataaggcccgtgaccatagccacctaccagatactgacgtaccgcaagtccaaggacgggccgtttgaacatttcaaactgttcgaagcagccaattggggtctggtcatctacgacgaagtccacatgctgcctgccccggtgttccgcgctgtggcggagttgcaggccaagcgccgcctgggtctcaccgccacgctggtgagggaggatggcaaagaagaggatgtgttcagcctgataggtcccaagcgcgttgacatcccatggaaagtacttgaaaaggacggctacattgcctccgcccactgcctggaaatccgcgtccccctgcccacggacgagcgcatggactatgccgtggcggacaacagagggcgttcaggatag

SEQ ID NO: 20292 - protein, 295 aa, Unknown
  Obtained from environmental sample
  DOMAIN (83)...(241): DEAD/DEAH box helicase
  misc_feature (1)..(295): Xaa is any amino acid
MEMEDRGLFWEIEHQKVLEGLLEEAYLDQRGVFIREGMRGEVKLRLIRLGHPVQDMAGFKPGDPLEMTTRTKLLGSGADFALRSYQMAAVDVFHAGGGPDGGAGVLVLPCGAGKTVIGIGCMDRLQTHTLVLTTNVTAVKQWKQELLDKTTLEDGQVGLYTGDTKEIRPVTIATYQILTYRKSKDGPFEHFKLFEAANWGLVIYDEVHMLPAPVFRAVAELQAKRRLGLTATLVREDGKEEDVFSLIGPKRVDIPWKVLEKDGYIASAHCLEIRVPLPTDERMDYAVADNRGRSG

SEQ ID NO: 20293 - DNA, 420 bp, Unknown
  Obtained from environmental sample
  misc_feature (1)..(420): n is a, c, g, or t
atgggtaaaaatatccccgcccatgtgggcattatcatggacggaaacggacgctgggcgaaaagccgtggtcttgtccgcacgcagggacaccttgaaggattaaagacggcaaaacgtatcgtaaaagccgctagcgatttaggaataaaatatctgactctttacgcgttttcgacggaaaactggaaacgcacatccgaagaagtcggctttataatgggacttataaaacagtatttgcgggtggagtttgatttcagtaaacaaaataaaatccgcgttcgtcacgccggggatttcgccggattgccgcctgacattcaaaaagagttatccgattccatgtctgacacggcaagttttgaaggaatgcaggttattctcgcgattaattacggcggcagggacgagatttaa

SEQ ID NO: 20294 - protein, 139 aa, Unknown
  Obtained from environmental sample
  DOMAIN (12)...(139): Putative undecaprenyl diphosphate synthase
  misc_feature (1)..(139): Xaa is any amino acid
MGKNIPAHVGIIMDGNGRWAKSRGLVRTQGHLEGLKTAKRIVKAASDLGIKYLTLYAFSTENWKRTSEEVGFIMGLIKQYLRVEFDFSKQNKIRVRHAGDFAGLPPDIQKELSDSMSDTASFEGMQVILAINYGGRDEI

SEQ ID NO: 20295 - DNA, 405 bp, Unknown
  Obtained from environmental sample
  misc_feature (1)..(405): n is a, c, g, or t
gtggcgaatatttcaattcccgaagcgcgccttgtcgttattcaaccttgggataaaaatcttattaccgagattgaaaaagcgattcgttcttcggaactgtcgttgaatccgtcaaatgacggcaaggtaatccgcgtttcaattcctccgcttaccgaggaaagacgcaaagaactagttaagctcgcgaaaaatcaagcggaacaatcaagagtcgcaatccgcaacatccgaagggacggcaatgaagaattaaagaaacttttaaaggataagaaggcaaagattacggaagacgacgagagcaagggagaggaagaactgcaaaaacttacagacaactacatagggcaggtaaataaaatccttgaagaaaaagaaaaagagataatggatgtataa

SEQ ID NO: 20296 - protein, 134 aa, Unknown
  Obtained from environmental sample
  DOMAIN (2)...(132): Ribosome recycling factor
  misc_feature (1)..(134): Xaa is any amino acid
MANISIPEARLVVIQPWDKNLITEIEKAIRSSELSLNPSNDGKVIRVSIPPLTEERRKELVKLAKNQAEQSRVAIRNIRRDGNEELKKLLKDKKAKITEDDESKGEEELQKLTDNYIGQVNKILEEKEKEIMDV

SEQ ID NO: 20297 - DNA, 447 bp, Unknown
  Obtained from environmental sample
  misc_feature (1)..(447): n is a, c, g, or t
atgaaagagcttccgggtatactttttatcatcgacacacgcaaggaagctatcgccgtagccgaggccaaaaggcagggcattccaataatagcggttgttgacacaaactgtaaccccgacggcatcgactaccccattcctggcaacgacgacgcaatcagggcgattaccctctttacgcaaattgtcgcaaacgccgttgtagaagcggataacgaggtagggcttaagatcattgaaaccctcggcgacgaagacgaggatatggaaagcctgatgaacgacgtatccagaaaagaagaagacagagaaatagtcgattatgaaaaatacacaacggaagaagcaatcagggacgcgaaagcggacgaagaagtccctgaagaagatgaagacgacacaaagataaaagttgacatcgataaagtctataaagacgaataa

SEQ ID NO: 20298 - protein, 148 aa, Unknown
  Obtained from environmental sample
  DOMAIN (1)...(72): Ribosomal protein S2
  misc_feature (1)..(148): Xaa is any amino acid
MKELPGILFIIDTRKEAIAVAEAKRQGIPIIAVVDTNCNPDGIDYPIPGNDDAIRAITLFTQIVANAVVEADNEVGLKIIETLGDEDEDMESLMNDVSRKEEDREIVDYEKYTTEEAIRDAKADEEVPEEDEDDTKIKVDIDKVYKDE

SEQ ID NO: 20299 - DNA, 759 bp, Unknown
  Obtained from environmental sample
  misc_feature (1)..(759): n is a, c, g, or t
ttggctgatttcgggacactgcggaaacgggaactcctggttatttacgcgggcaagggagaatcggaagccgatgaaagctgccgcaaggccgcggaactggccattgccctttttgagggccgcaaggtaaaaccgcctgctgaactccttaagggtaattttaccgcgaaaaaactcaagaaagcccaggccgatgaagaaccggttaaaaaagcgaaaggcaaagcgcccaaagccgaaaaaccaggtaaggcagccaaaccaggcaaagccgcaaaaccgggcaaaggggcgggacgcaaatccgcggcttccgagacgtatgaggccaatgccgttacaaaagccgaaccggaacagaaggaagtccgcgtagcgccgccggtggtaaccgcctcggctccagccgtctccaaaggcccgatgcggatgaccccgatgtattccgtgctggtatccaatgagttgttccataacggtaatgtggaggcctggaaacggataattgccagctataccgccaaatatccggatttgcaggtgtacatatactacgaaggtgagcgtattttagacataaactcacttttcaagtggggcaaagtcaaacatggaagctccatccagttcgccgtatccggcaatgacattaaggatgtggccaagctgcagcgttatctggttcagggcgcgagccaccagttcgaggctttcctgcacggaccggtaaacaatgttctaaagctgttcggttaa

SEQ ID NO: 20300 - protein, 252 aa, Unknown
  Obtained from environmental sample
  misc_feature (1)..(252): Xaa is any amino acid
MADFGTLRKRELLVIYAGKGESEADESCRKAAELAIALFEGRKVKPPAELLKGNFTAKKLKKAQADEEPVKKAKGKAPKAEKPGKAAKPGKAAKPGKGAGRKSAASETYEANAVTKAEPEQKEVRVAPPVVTASAPAVSKGPMRMTPMYSVLVSNELFHNGNVEAWKRIIASYTAKYPDLQVYIYYEGERILDINSLFKWGKVKHGSSIQFAVSGNDIKDVAKLQRYLVQGASHQFEAFLHGPVNNVLKLFG

SEQ ID NO: 20301 - DNA, 300 bp, Unknown
  Obtained from environmental sample
  misc_feature (1)..(300): n is a, c, g, or t
ttggaaacttatttgagcattgaggggctggccaagtatttgggcatagcggaaaagacagtcagaaaatgggttcttaaccatgccattccctaccacaagattatgaaaataatccgtttccgtgtttccgagattgagcaatggattgagaccaacggcaataacccccagggcaatgacggcgaagaacaggacggagatttgtttgcggaagatgaagccgggtatgggaatggcggggaagaggcaaaggcattgaggctgatgaagcccggggcgttgtatgagcgattttga

SEQ ID NO: 20302 - protein, 99 aa, Unknown
  Obtained from environmental sample
  misc_feature (1)..(99): Xaa is any amino acid
METYLSIEGLAKYLGIAEKTVRKWVLNHAIPYHKIMKIIRFRVSEIEQWIETNGNNPQGNDGEEQDGDLFAEDEAGYGNGGEEAKALRLMKPGALYERF

SEQ ID NO: 20303 - DNA, 465 bp, Unknown
  Obtained from environmental sample
  misc_feature (1)..(465): n is a, c, g, or t
gtgaaggaaaagttagcccggctcaatgctgtccgcaaactgataatgaaagaaaagataaagtcccaggacacccttttggaacttctacagaaggaagggtntgcggtaactcaggccacgctctcaagggatcttaaagagctcaaggtaagcagggtttccgacgctatggggtcttatttttacgctctgggagaggaacatcaggaggcggaaaatacctatgctcacgattttttacgaggctgtatttcaattgaatggtcaggcaatattgtgattgttaaaacccattcaggccattctgaccctgttgccgtagctctggacagttttgctttcaatgaaatactcggtactattgccggcaacgacaataccgtcgccgtgtttttaagggaaggatgcagcggcgaagattttatgaagcacattaaagaaacaataccggaatttgaatga

SEQ ID NO: 20304 - protein, 154 aa, Unknown
  Obtained from environmental sample
  DOMAIN (76)...(149): Arginine repressor, C-terminal domain
  misc_feature (1)..(154): Xaa is any amino acid
MKEKLARLNAVRKLIMKEKIKSQDTLLELLQKEGXAVTQATLSRDLKELKVSRVSDAMGSYFYALGEEHQEAENTYAHDFLRGCISIEWSGNIVIVKTHSGHSDPVAVALDSFAFNEILGTIAGNDNTVAVFLREGCSGEDFMKHIKETIPEFE

SEQ ID NO: 20305 - DNA, 417 bp, Unknown
  Obtained from environmental sample
  misc_feature (1)..(417): n is a, c, g, or t
atgcttgagtttggcaggagacgctatgggtctttttccatgcggataaaaaaaccgatagacattttcacccttgtgcggcattatgccgaccgcaaacaggagaggtttatcagtctttcactgaacggcgcccacgaagtgcttgcggtgcggattgttaccatcggacttgtaaacaaaacaatcgtccatccgcgtgaagtattcgccgacctgattcaggacagggcggcggccttttgcgttgcgcataaccacccatcgggacagcttgtaagttcccctgaagacgatgatataacggagcgtcttcaatccgcagcgcaaatactgggactccattttattgaccatattattttttcagagacctcatggtggagtttcagggagaacggaaaattaatggattga

SEQ ID NO: 20306 - protein, 138 aa, Unknown
  Obtained from environmental sample
  DOMAIN (13)...(136): RadC, DNA repair protein
  misc_feature (1)..(138): Xaa is any amino acid
MLEFGRRRYGSFSMRIKKPIDIFTLVRHYADRKQERFISLSLNGAHEVLAVRIVTIGLVNKTIVHPREVFADLIQDRAAAFCVAHNHPSGQLVSSPEDDDITERLQSAAQILGLHFIDHIIFSETSWWSFRENGKLMD

SEQ ID NO: 20307 - DNA, 735 bp, Unknown
  Obtained from environmental sample
  misc_feature (1)..(735): n is a, c, g, or t
atgttacaaaataccaacctatcttcggctttgtttacggatttttattcgcttaccatggcgcagggctactggaaaaagggaatgaaacaccgcgcggtttttgaaatgttttttcgaagcaaccctttttcaggcggcttttcagtttttgccggccttgaaaccctgctggaaaaaattcaagccttttctttttcccccgacgatatagcgtacctccgtaacctgggatcttttgacgaagcctttttggaatacctggcgggctttaggtttaccggcactatttgggcaatggacgaaggaacggttgtcttcccaaatgagccgctaatcagggtctgtggcggcctgattgaatgtcagctcatcgaggggatgcttcttaacaccgtcaattttcaaagccttatcgcgaccaagaccgccagagtcgtccttgcctcaggaaaggcctccgttgcagaattcgggctgcgccgcgcacaggggcctgacggtgctatgtcggcttccagagccgctttcataggcggagcttccagaacctcaaacgtccttgcgggaaaagagtacggtatccccgttttcggaactatggcccattcctgggttatggcctggcccacagaagtagaggctttccaggcctatgcggagatataccccgacaactccgtctttttaatcgacacctacgatacccttaaagcggagtcaagagcgcaatag

SEQ ID NO: 20308 - protein, 244 aa, Unknown
  Obtained from environmental sample
  SIGNAL (1)...(21)
  misc_feature (1)..(244): Xaa is any amino acid
MLQNTNLSSALFTDFYSLTMAQGYWKKGMKHRAVFEMFFRSNPFSGGFSVFAGLETLLEKIQAFSFSPDDIAYLRNLGSFDEAFLEYLAGFRFTGTIWAMDEGTVVFPNEPLIRVCGGLIECQLIEGMLLNTVNFQSLIATKTARVVLASGKASVAEFGLRRAQGPDGAMSASRAAFIGGASRTSNVLAGKEYGIPVFGTMAHSWVMAWPTEVEAFQAYAEIYPDNSVFLIDTYDTLKAESRAQ

SEQ ID NO: 20309 - DNA, 708 bp, Unknown
  Obtained from environmental sample
  misc_feature (1)..(708): n is a, c, g, or t
atgaaaggaaaagtaaaatacgagcttgcctggcaggagctggacagccttatccccccagaggtttttgaaaacgcaaaaaaaatcggcagaagtaaaccttggggaacagcccatgccctgctgtgcgccgcggataaaatcaactctccctntgcggtaatcaacgccgatgatttttacgggagggaagcctttgccgcgatgggcaaattcctggctgatagcggcgataaagaaggcgcgatagtgccatatttgctggagccaactttaagcaagacaggaacagtagccaggggggtctgcaaaatatcaaacggctacatcgtttctattgatgagctaacagcgattgaaaaaaaggaaggcgtgattttcaacacagggcccgacggcgcaagacaggtactctattctgacaccccggtctccatgaattttctggcttaccccgacagcatactcccaaggttcaggcagtactttgacgattttatcgctgcttcaggcggagaactgaaaagcgaatgttaccttcccaaagcgtcggactggtttatcaaaaacagctatctcaaaatgcgcgttctgaaggccgactcggaatggttcggcgttacttacaaagaggacaaagaaacggcaatcaagcgccttgaggagcttaccagagcgggggtttatcccgattccttgtggagctag

SEQ ID NO: 20310 - protein, 235 aa, Unknown
  Obtained from environmental sample
  misc_feature (1)..(235): Xaa is any amino acid
MKGKVKYELAWQELDSLIPPEVFENAKKIGRSKPWGTAHALLCAADKINSPXAVINADDFYGREAFAAMGKFLADSGDKEGAIVPYLLEPTLSKTGTVARGVCKISNGYIVSIDELTAIEKKEGVIFNTGPDGARQVLYSDTPVSMNFLAYPDSILPRFRQYFDDFIAASGGELKSECYLPKASDWFIKNSYLKMRVLKADSEWFGVTYKEDKETAIKRLEELTRAGVYPDSLWS

SEQ ID NO: 20311 - DNA, 366 bp, Unknown
  Obtained from environmental sample
  misc_feature (1)..(366): n is a, c, g, or t
ttgacaggggaagactggntaaatgagtccgcgcgtgaaatatggtgggcgcagctgccgcctcccagaggatcaagtcccgcaaaacgccgtcctgtgttaatcattcaaggtgacagttataatcgaagcacaataaacacggtaatctgcgctgtcatcacttcaaatacagagttggcttccctgccaggaaatttactgcttgaaaaatcaatttccggtttggaaaaaacatcgactgttaattttacgcaaatttattctctggacaaacctgatttaatagaacatgtgacgatgcttccaaagttcatgcttgataaagtggatagttgtcttaagatggtacttgaaataaagtaa

SEQ ID NO: 20312 - protein, 121 aa, Unknown
  Obtained from environmental sample
  DOMAIN (11)...(119): PemK-like protein
  misc_feature (1)..(121): Xaa is any amino acid
MTGEDWXNESAREIWWAQLPPPRGSSPAKRRPVLIIQGDSYNRSTINTVICAVITSNTELASLPGNLLLEKSISGLEKTSTVNFTQIYSLDKPDLIEHVTMLPKFMLDKVDSCLKMVLEIK

SEQ ID NO: 20313 - DNA, 795 bp, Unknown
  Obtained from environmental sample
  misc_feature (1)..(795): n is a, c, g, or t
gtgtttctacggaagagtgacgcccgaacttttacaaaagcgcttgataaatacggcgatgtacgttttgtggctgtcatgtcggtaaacaacgagaccggagccataaccgatattgcttctttaatggatgttatcaaaaaaagaaaggaatccgcaccaatacattttcactgcgatcttgtacaggcaattggtaaaataccgattgacatttcaaactgggaaattgattccgcttcaataagcgcccataaaatttcaggtccccgtgggattggacttttatatctgaaaaaacccttggaagtgttttactccggaggcggtcaggaaaaagggataaggggcggaaccgaaaacacgcagggtggtatagaactcgcgaattgccttacacggtacgcaaacgcggaaactgtgcagcttgagcatgcgcgggcaaaagcccgatgtaagaaactgatgtcttctctttccgcaatggaacgttgtactatcattccctcctgccgcacccctgaagacgacagattttctccctacattttacaagtcgcttttaaaaacattcccggcgaagttatggcacgcgctcttgacgatttaggtttcgcggtttccacgggatcggcttgttcttcctcatctcccgaacgccccgtcctagcggcaatgggtattgaagaaaatttaagaatcgaaggcatacgaatctctcaggggtattctactacggacgaagaaattgatctttttcttgaagcggtcgcggaggtgttaaaatttctgtaa

SEQ ID NO: 20314 - protein, 264 aa, Unknown
  Obtained from environmental sample
  DOMAIN (4)...(253): Aminotransferase class-V
  misc_feature (1)..(264): Xaa is any amino acid
MFLRKSDARTFTKALDKYGDVRFVAVMSVNNETGAITDIASLMDVIKKRKESAPIHFHCDLVQAIGKIPIDISNWEIDSASISAHKISGPRGIGLLYLKKPLEVFYSGGGQEKGIRGGTENTQGGIELANCLTRYANAETVQLEHARAKARCKKLMSSLSAMERCTIIPSCRTPEDDRFSPYILQVAFKNIPGEVMARALDDLGFAVSTGSACSSSSPERPVLAAMGIEENLRIEGIRISQGYSTTDEEIDLFLEAVAEVLKFL

SEQ ID NO: 20315 - DNA, 882 bp, Unknown
  Obtained from environmental sample
  misc_feature (1)..(882): n is a, c, g, or t
gtgcaggttgtaactggattcataggctcaacgatggacggatatacgaccactgtagggcgggacggttccgatttaagcgccgccgtttttgccgccgcccttggagtgaagaagcttgaaatatggaccgatgttgacggaatgctcacagccgatcccgagcaggttaagaacgcgttcctcatagatgaaatttcttataacgaagcgatagaaatttctcactttggtgcgagggtaattttcccgccgtcggtcaaaccggcgcttgaaaaaaacattcccatttttgtccgcaacacgtttaatccaaagggaagcggcacaaaaataaccgctaaagccgctcccggcaaatattcgattcgcgggataagctctataagtaaagtcgcactcgtaagaattcaaggtacgggcatggtcggcgtagccggtttttccgcccgcgttttcggcgctctggcaagaaagggaatcaacgttatgttaatttcgcagagttccagcgaatactcaatttgttttgcggttctgcctgaagatatacagaaggccgacgctgcgttaaaggaagagttcgcgaatgaaatccacggttgttctattgaaaatccgattatagaaaaagacctttcaataatcgccgttgtaggttcggcaatgaaaagcacttcggggatttcaggaaaatttttccacgcccttggcagaaatggcattaatatcgtggcaatcgcgcaaggatcatcagaaacaaatatttccgcggtcatatcctcggctgacgaatgtaaggcgcttaacgccattcacaatgctttctttttcgcccatcagcgttctgtcaatctgttcctgattggtacgggcctatag

SEQ ID NO: 20316 - protein, 293 aa, Unknown
  Obtained from environmental sample
  DOMAIN (217)...(284): ACT domain
  misc_feature (1)..(293): Xaa is any amino acid
MQVVTGFIGSTMDGYTTTVGRDGSDLSAAVFAAALGVKKLEIWTDVDGMLTADPEQVKNAFLIDEISYNEAIEISHFGARVIFPPSVKPALEKNIPIFVRNTFNPKGSGTKITAKAAPGKYSIRGISSISKVALVRIQGTGMVGVAGFSARVFGALARKGINVMLISQSSSEYSICFAVLPEDIQKADAALKEEFANEIHGCSIENPIIEKDLSIIAVVGSAMKSTSGISGKFFHALGRNGINIVAIAQGSSETNISAVISSADECKALNAIHNAFFFAHQRSVNLFLIGTGL

SEQ ID NO: 20317 - DNA, 774 bp, Unknown
  Obtained from environmental sample
  misc_feature (1)..(774): n is a, c, g, or t
gtggcggtcgccgggctaatccccaagaacgacatgcgccgattcgaggcctttctaagcgactacggtatacaggcgcttctctacgaggcccccggcgttacgcgcgtcaacgtcacgctgcacgacgcccaggcgcagtgcgtcacccacataaacagcgcgtcgccagtgctgcccgtcagtttgcaggaggatttcctgcgctttctggccggacacgcggaggccgacgtcgactggtgcttcagcggcagcctgcccagcggcttcgacgacgacgcctacgcccgcctgatacgcgacttcaaaaacatgggcgtcagctgcctcttggacacccgcggcatggcgctcaaaaccggcgcgagggccgccccgcagatcatcacgccgaacctgacggaactccaagagttcttccaagaggagatcaagggcgttcaccacatagctctatgcggcaagcgcttcatagacatggacgtagagtacgtcttcatcaccctgggccaagacggcgtgatcgcgatccatgaggagcagtgcctgctctgctccccgccggatataaaaacggtcgacacggtaggctgcggcgacgcattcgccgccggggtgctggtggcgcggaagcgcagcttcgccttcgccgagatgtgcaggatggcggtcgcgtgcgggtcgtcgaaaagtctgcacgaggggccgggggtcatcacgctggatgaggtttggcagttgatggagggtgttgagattacttgcatataa

SEQ ID NO: 20318 - protein, 257 aa, Unknown
  Obtained from environmental sample
  misc_feature (1)..(257): Xaa is any amino acid
MAVAGLIPKNDMRRFEAFLSDYGIQALLYEAPGVTRVNVTLHDAQAQCVTHINSASPVLPVSLQEDFLRFLAGHAEADVDWCFSGSLPSGFDDDAYARLIRDFKNMGVSCLLDTRGMALKTGARAAPQIITPNLTELQEFFQEEIKGVHHIALCGKRFIDMDVEYVFITLGQDGVIAIHEEQCLLCSPPDIKTVDTVGCGDAFAAGVLVARKRSFAFAEMCRMAVACGSSKSLHEGPGVITLDEVWQLMEGVEITCI

SEQ ID NO: 20319 - DNA, 906 bp, Unknown
  Obtained from environmental sample
  misc_feature (1)..(906): n is a, c, g, or t
atgcacagtatcggccgagtattacacgtttttgagtataccgtcggcctccggccgccgttgcgaagcgtaaaatttaactcaatgcaaaggagccgtatcacaatgatgtcgcaactgaaaaagacccgtatagtcgccaccctcggcccggcttccagatcgccggagaagattcgcgcgctccttcaggcgggcgtcaatgtattccgcttcaacttctcgcacagcgaccacgagaagcacaccgccaatctgaaaatggtgtacgaggtgtcgaaagagcttggcgtctatccggcgctgctggccgacttgcaggggccgaagatccgcaccggcaagaccgagggcgacgcgccggtcacgctccacagcggggcgaaggtcgtgcttaccgcggacgatgccgtctgtacggacagcgttatttcgattgaccaccacacgctggctcaagagattgatgttaagcaggagatcgccataaacgacgggctcataaggctagaggtcgagcaaatcgaccgggacaaaaaagagatccgctgtgtggtcacggacggcggagtttactcctccagaaaaggggtcaacctccccaacgtgcacctgagtataccgtccgtaacggacaaagacaaggaagacttggagtttattctggccaaccagtttcagttcatcgcgctgtcgtttgtgagaaccgctcaggatctgaaaaaactgaaggccattatgaacgggcggcgtccggatataaagctcatcgccaagattgaaaaaccggaggcggcgcacaatatcgaatccattcttcgggagtgcgancggcatatggtcgcccgcggagaccttggcgtcgagccccatactatctggtgccgatcatccagaaagagctga

SEQ ID NO: 20320 - protein, 301 aa, Unknown
  Obtained from environmental sample
  DOMAIN (40)...(299): Pyruvate kinase, barrel domain
  misc_feature (1)..(301): Xaa is any amino acid
MHSIGRVLHVFEYTVGLRPPLRSVKFNSMQRSRITMMSQLKKTRIVATLGPASRSPEKIRALLQAGVNVFRFNFSHSDHEKHTANLKMVYEVSKELGVYPALLADLQGPKIRTGKTEGDAPVTLHSGAKVVLTADDAVCTDSVISIDHHTLAQEIDVKQEIAINDGLIRLEVEQIDRDKKEIRCVVTDGGVYSSRKGVNLPNVHLSIPSVTDKDKEDLEFILANQFQFIALSFVRTAQDLKKLKAIMNGRRPDIKLIAKIEKPEAAHNIESILRECXRHMVARGDLGVEPHTIWCRSSRKS

SEQ ID NO: 20321 - DNA, 906 bp, Unknown
  Obtained from environmental sample
  misc_feature (1)..(906): n is a, c, g, or t
atgtttggtaatatctttaatccgtctgacgtatcttcgtcggcggtaattaatacggcgcttatccgccattataatgtgcttaccgcagaaaacaacatgaagccggatcagctttcaaccggaaaaggttcttacaattttatacctgcggatcgcatggtaaatgccgccatagcgtcgggctttaaagttgtaggacacactcttctctggcacagtcagattccgcgatggcagcagaatatcgactcaacaaccgcgctggaagacatgaaacaatatataactgatgtggtaagccattttaaaggaagaatctattcgtgggacgtgcttaatgaagcctttcccgacggcggttattccgcgaattggaaaacatccatgcggaccaacaatccctggtttaaatctatagggtctgattttgtatacgaagggttccttgccgcccgtcttgcggaccctaacgcgattttgtattacaacgacttcaataccgatcaggcagctaaagccttgatgatttatgatatggtaaaagaagtgaatgagcgttataaagcggcgtatcccggtgaaaaacggttactcatcgaaggcataggaatgcaggaacatcacaatacgaacgtttcggcaaacgcgataagaaacaccttgaacctttttaaacagttgggagtaagaatatctgtcagcgagcttgatgttctgatagtaccttatcagcagtttgcgccttttggccacggaaccaataaacagaattcctttacaggagatacaaagactaacggactaaaaaaacaggctgaattatacggccaattttttaaagtgtatctggaatttagcgacatcattgagcgcgtttcatttttgggcgtcactgatgattaa

SEQ ID NO: 20322 - protein, 301 aa, Unknown
  Obtained from environmental sample
  DOMAIN (1)...(301): Glycosyl hydrolase family 10
  misc_feature (1)..(301): Xaa is any amino acid
MFGNIFNPSDVSSSAVINTALIRHYNVLTAENNMKPDQLSTGKGSYNFIPADRMVNAAIASGFKVVGHTLLWHSQIPRWQQNIDSTTALEDMKQYITDVVSHFKGRIYSWDVLNEAFPDGGYSANWKTSMRTNNPWFKSIGSDFVYEGFLAARLADPNAILYYNDFNTDQAAKALMIYDMVKEVNERYKAAYPGEKRLLIEGIGMQEHHNTNVSANAIRNTLNLFKQLGVRISVSELDVLIVPYQQFAPFGHGTNKQNSFTGDTKTNGLKKQAELYGQFFKVYLEFSDIIERVSFLGVTDD

SEQ ID NO: 20323 - DNA, 831 bp, Unknown
  Obtained from environmental sample
  misc_feature (1)..(831): n is a, c, g, or t
ttgctgttaggcacttttgaatggtccctggactatttaatcaacaggatggatttgtcattgtttgaacaaaactaccataacgatgaaacgggggcagccgcctatccgccgaaggcattgttaaaaataatattttactgctattcaaagggaatattgtccagcagggcaatggaaaaagcggccaaaaacaatatagttgcgaaagcgctggcggaagacagcgagcccgatcacgctacaatagcggcatttgtttcgtcaaaccacggggcggtaaaaggtttgtttgcccaggtattaatgcaatgcgacaaattggaattaataactggagaaatgtttgcgatagacgggtgcaggctgccgtcaaacgcgtcaaaagaatggagcgggacgatagcgggccttacgaaaaagaaagagaggctggaaaagcatatatcgcggctgctggcgaggcatcaagatcttgacagaagcttggaagctaaaaagatacaggagccgtattcaaaaacgatgggcgacgacagggaacggaggggacgcggcatagagcggctggagaagaaactgaaaaagctggaggagtttctgaaggctgcggagccgaagaaggnggcgtcaggngcggaagtgcagacaaacataacggacaaagagagcgcgaaaataaaagggccgcatggctacatacagggatataatgggatagcgatagccgattcangcagccagataatagtttcggcggaagcgtcaggcacgtctgagagcgggaatttccctaanatgctgaaagccntgagaaacatgaagcgataa

SEQ ID NO: 20324 - protein, 276 aa, Unknown
  Obtained from environmental sample
  misc_feature (1)..(276): Xaa is any amino acid
MLLGTFEWSLDYLINRMDLSLFEQNYHNDETGAAAYPPKALLKIIFYCYSKGILSSRAMEKAAKNNIVAKALAEDSEPDHATIAAFVSSNHGAVKGLFAQVLMQCDKLELITGEMFAIDGCRLPSNASKEWSGTIAGLTKKKERLEKHISRLLARHQDLDRSLEAKKIQEPYSKTMGDDRERRGRGIERLEKKLKKLEEFLKAAEPKKXASGAEVQTNITDKESAKIKGPHGYIQGYNGIAIADSXSQIIVSAEASGTSESGNFPXMLKAXRNMKR

SEQ ID NO: 20325 - DNA, 888 bp, Unknown
  Obtained from environmental sample
  misc_feature (1)..(888): n is a, c, g, or t
atggactttgaagaccgcctgatgaacgccgaaaccgaccggcagatgcttgaagagcagcagttcaggcgcctgctggatgccgtggtggaggccaagggcaacctacaggccttggccgtagccatagcgaagctcgatgtgttgtgcgcgtttgccgaaagggctaggaactctggctggactaagccagaactgtcagacgagcgggtcttgatactggccgatgcgaggcacccgattctggaatcccgcatggggcgcgagtgcatacccaacgacctgacgttgtccccgcagtcgcccatggcggtggtcacggggccgaatatggggggcaaaagcacgttcctaaggatggcggccgtgctggtcgtgatggcgcaggtgggcagcttcgtgccggcctccctcatgcgcttcggcatcgttgacaagatttttacgcgcataggcgccagcgaccagttgtcaaagggacagagcaccttcatggtggagatgacagagacggccaggatactcaaccaggctacaccagcgagcatggtcatactggacgaaatcgggcgcgggacatccaccagggatggcctggcgctggccgaggccatagccctgcacttaaaggaaatgcaggggggcgcgccaaggacgctgttcgccacgcacttctttgaactgaccagattggcggatgacccaagggtcaccaacctgcacgtcgaggtccaggagtgggaggacagtctgcacttcctgcaccgcatcgcggaagggcccgcagaacgcagctatggcatacaggttgcgcggctggccggcctgccaaagagcgtcatcgccaaggcgcagcgcatcctagccgacacgcgggaagaccgctga

SEQ ID NO: 20326 - protein, 295 aa, Unknown
  Obtained from environmental sample
  DOMAIN (61)...(294): MutS domain V
  misc_feature (1)..(295): Xaa is any amino acid
MDFEDRLMNAETDRQMLEEQQFRRLLDAVVEAKGNLQALAVAIAKLDVLCAFAERARNSGWTKPELSDERVLILADARHPILESRMGRECIPNDLTLSPQSPMAVVTGPNMGGKSTFLRMAAVLVVMAQVGSFVPASLMRFGIVDKIFTRIGASDQLSKGQSTFMVEMTETARILNQATPASMVILDEIGRGTSTRDGLALAEAIALHLKEMQGGAPRTLFATHFFELTRLADDPRVTNLHVEVQEWEDSLHFLHRIAEGPAERSYGIQVARLAGLPKSVIAKAQRILADTREDR

SEQ ID NO: 20327 - DNA, 342 bp, Unknown
  Obtained from environmental sample
  misc_feature (1)..(342): n is a, c, g, or t
atggactattttttcatcggagaggcggagctggttacggctttccgttttgtaggcatcggcggaatctcagtgcaaaactcaggcgaagcccttgaagccttccgcagaattaccgaaagctatgacgaaacctcgggaaccttcctgccgggcatggagctttgccgcgtgcttataattacggaggaagtggctgactggcttgaggattgccttgtacagtggcagcttaaagatcgctaccctttgattgtggaaattccggggcttttgggaaggcatgagggcagaaaaaccctggttgaatccatcagggaagctatcggagtcagaatctga

SEQ ID NO: 20328 - protein, 113 aa, Unknown
  Obtained from environmental sample
  misc_feature (1)..(113): Xaa is any amino acid
MDYFFIGEAELVTAFRFVGIGGISVQNSGEALEAFRRITESYDETSGTFLPGMELCRVLIITEEVADWLEDCLVQWQLKDRYPLIVEIPGLLGRHEGRKTLVESIREAIGVRI

SEQ ID NO: 20329 - DNA, 441 bp, Unknown
  Obtained from environmental sample
  misc_feature (1)..(441): n is a, c, g, or t
atggaagagttaagaactaccgaggtgctgggcaatgaaattctggaagatgcccggagaaaagcccagaagattttaaagaccgccgatgacaccctttctgcgcaaaaccgcgactgggacaggaaaataaaacattcgacaacttccatccggaaaacctttgccgcacggacaaaaaaaaccatcgacgagattcaggcccgccttcccctggacaagcgccggcttcgatccagaaccaccgaaagctttctggttaaggcactggatgattttttgcggactctaagccgggaaaagcttctttctgtgttggagcgggaacttacggtgcgattaacggcctgcacggacgatcttattcatcaccgctcaatatccgttattcaggccttatccctgatgaagcccagacgattattgaaaaatgccttataa

SEQ ID NO: 20330 - protein, 146 aa, Unknown
  Obtained from environmental sample
  misc_feature (1)..(146): Xaa is any amino acid
MEELRTTEVLGNEILEDARRKAQKILKTADDTLSAQNRDWDRKIKHSTTSIRKTFAARTKKTIDEIQARLPLDKRRLRSRTTESFLVKALDDFLRTLSREKLLSVLERELTVRLTACTDDLIHHRSISVIQALSLMKPRRLLKNAL

SEQ ID NO: 20331 - DNA, 777 bp, Unknown
  Obtained from environmental sample
  misc_feature (1)..(777): n is a, c, g, or t
gtggaagacgggagccaatatttcggcccctttccgaatgtgcaggctctggatgaaacccttgcggtaatagaaaaattatttcccctgcgaaaatgcaaaaccctgaaaaagcgcgaaaacccctgcatgtactaccatataagccgctgtctcgcgccatgctgcggcagggtggaagaacaggcgtataaagcccaggttgaaagggtacgcaagcttcttgccggagaaacttccgccctgatgggggacttgagcgctcaaatgcaaactgcagcagcggctttgaaattcgaggaggccgcgaatttcagaaacgcaatccgggcgattgaaagcctgtcggagagcaactccgtagctgacatggacccggaaagccgggattacattgcctgggcggaagaggggatcttcaccaccttttctgttctttccatgcggggcggccgaatgacaggccgggagcttttcaattcccgttccgccgccaaagaagacgaatccctggttactttcctgaccgcttactattcccccgaccgccctcccccgccccggattttcctgaccggtttatccgtgcaagccgatgccctggacaggtatttcatggaacagttcggctacacgccaagcctggtctggcaggaggggcttgaaaaaaggcacatcgccgccctaagcatggcccggcaaaatgcccaggaagaacttaaaagacggctgnagaacgcggggcgggcctgcccggacgaactatcttggcgataa

SEQ ID NO: 20332 - protein, 258 aa, Unknown
  Obtained from environmental sample
  DOMAIN (80)...(115): UvrB/uvrC motif
  misc_feature (1)..(258): Xaa is any amino acid
MEDGSQYFGPFPNVQALDETLAVIEKLFPLRKCKTLKKRENPCMYYHISRCLAPCCGRVEEQAYKAQVERVRKLLAGETSALMGDLSAQMQTAAAALKFEEAANFRNAIRAIESLSESNSVADMDPESRDYIAWAEEGIFTTFSVLSMRGGRMTGRELFNSRSAAKEDESLVTFLTAYYSPDRPPPPRIFLTGLSVQADALDRYFMEQFGYTPSLVWQEGLEKRHIAALSMARQNAQEELKRRLXNAGRACPDELSWR

SEQ ID NO: 20333 - DNA, 840 bp, Unknown
  Obtained from environmental sample
  misc_feature (1)..(840): n is a, c, g, or t
ttgagcccgcttgtgttaaaccgcgcatggagccatcactttatccgctttgatgccgactttgggcttttggaatacnttgtggatggcaggcttgaagccctggattataccacttcctccggcagggaaggcggcaatgtttatacccccatcatcggtgaaaactgccatatggcgctgggcagccgcttctcgggcattatggatgaattccgcattcacgggaattaccttgaaaaggccgagacaacccgctattcaggcagcaacgggcgggtggaaacacgaacgctggatttgggctatgccgacagccaggttcttaaaatcgaggcctttggcggccgcacttccaattattccggaaaggtacgcaatgagtatgccggaaacagttctttaagtttttcagatcattcggagatgaaattttttatccgccttagcaatagtccatacaggtggaacgaagtcccctggattccgatcaatccagggacggaattgcaacaattccggggcaggtatgtccagcttgcggcggatttttacccgggcgctgacggggaaacttctccctacctgtcggagttaagggtgatttacaaggccgcggaaccccctccgcctcccgcttatgtagccgcagtggcaagggatggggcggtggaattgacctggagagccagcgcttcaagggatgttggcggttattatgtttactacggtaccgcaaagggggaatacctggaatcaaaatgccctattgacgccggtaacaggacttcgatcctggttgaaggcttaaaaaatgggacactctattatttgcaatag

SEQ ID NO: 20334 - protein, 279 aa, Unknown
  Obtained from environmental sample
  misc_feature (1)..(279): Xaa is any amino acid
MSPLVLNRAWSHHFIRFDADFGLLEYXVDGRLEALDYTTSSGREGGNVYTPIIGENCHMALGSRFSGIMDEFRIHGNYLEKAETTRYSGSNGRVETRTLDLGYADSQVLKIEAFGGRTSNYSGKVRNEYAGNSSLSFSDHSEMKFFIRLSNSPYRWNEVPWIPINPGTELQQFRGRYVQLAADFYPGADGETSPYLSELRVIYKAAEPPPPPAYVAAVARDGAVELTWRASASRDVGGYYVYYGTAKGEYLESKCPIDAGNRTSILVEGLKNGTLYYLQ

SEQ ID NO: 20335 - DNA, 732 bp, Unknown
  Obtained from environmental sample
  misc_feature (1)..(732): n is a, c, g, or t
atggaaatccctgttgtaggcaggatgccttacaagggttttttcaaaattgaggacgcgcgcaaggaacgggcaaaacttgagaaaaaggggctcgacgtctggatacggggagttgacgctttcagtacgctgggctggttcagggatccgctgtattcctatatgcgggactatcctcccaacaggctcgccgatctgctcatccatgaatcactccacgcgacggtgtatataaaggggcaggcgcagtttaacgaggaacttgccgaatttgtgggcagcgaaggcgcgaggttgtacacggagtcccgttatggcgtagattccgccgaatacagggcaatgcttgccgacgaggcggacaacaagcgttatgtgacattcatccagggattaataaaagaacttaatgaattgtatgaaagcgaaagaagcggcgaagaaaagttaagcgggaaagaaaaaattataagcgccgcgagagaacgctttaccgctgaatatgaaagccttttttcaggtgaaaactaccgcggcttttcggagctgcccgtaaacaacgcctaccttgaattgtaccgcctgtattacgccgaggacgcctatattgccggcctgttcgcgggatccggcaagacccttcccgaattcattgccgctgcnaaatccatttcaaagaaaaaaggaagctccggcagggaaatgctggcgcaagcattacaaagttaa

SEQ ID NO: 20336 - protein, 243 aa, Unknown
  Obtained from environmental sample
  misc_feature (1)..(243): Xaa is any amino acid
MEIPVVGRMPYKGFFKIEDARKERAKLEKKGLDVWIRGVDAFSTLGWFRDPLYSYMRDYPPNRLADLLIHESLHATVYIKGQAQFNEELAEFVGSEGARLYTESRYGVDSAEYRAMLADEADNKRYVTFIQGLIKELNELYESERSGEEKLSGKEKIISAARERFTAEYESLFSGENYRGFSELPVNNAYLELYRLYYAEDAYIAGLFAGSGKTLPEFIAAAKSISKKKGSSGREMLAQALQS

SEQ ID NO: 20337 - DNA, 480 bp, Unknown
  Obtained from environmental sample
  misc_feature (1)..(480): n is a, c, g, or t
ttgaggggaagagcggaagggtttgctcaatcgtgggttgggattatccaatggatatggcagagcgtataccggcctcaccatagacggaaaaactggtttgtctcggtaaaaccctatttcgcggcggaatgcggtaaagagttttctctttccgatgtgcgctttgaaacgacaaaagccggagggcctggcggccagcatgtcaacaaaaccgaaaccgctgtccgtgccgtccatattccaaccggaaaaagcgcggctgcccgaggggaacgttcccagcttatgaataaaaaacttgcccttgcccgccttgcgtcattgcttattgatgaaaaggaagccaaagaacggcaaaaccgttccgaattacgccgcacccattgggaacttgagcgtggaaaccccatccgtgtatacgacggcgggacattaaaactgattaaagggaaaaattatgacagaagcaacggttaa

SEQ ID NO: 20338 - protein, 159 aa, Unknown
  Obtained from environmental sample
  DOMAIN (40)...(153): Peptidyl-tRNA hydrolase domain
  misc_feature (1)..(159): Xaa is any amino acid
MRGRAEGFAQSWVGIIQWIWQSVYRPHHRRKNWFVSVKPYFAAECGKEFSLSDVRFETTKAGGPGGQHVNKTETAVRAVHIPTGKSAAARGERSQLMNKKLALARLASLLIDEKEAKERQNRSELRRTHWELERGNPIRVYDGGTLKLIKGKNYDRSNG

SEQ ID NO: 20339 - DNA, 372 bp, Unknown
  Obtained from environmental sample
  misc_feature (1)..(372): n is a, c, g, or t
atgacagaagcaacggttaaaccgattcctgtgaagggaaaacacaatgaagctctggtttacgccaaggcaatagaagcgtcgtgtgagaacaaaatacgccaataccttgaccatcccgcgtttgcgggtaccaaggtgaggataatgcccgatgttcacctgggtaaaagcactgtgataggatggacagcctcctatgattccatcgttataccttcggtaatcggtcttgatattggctgcggtgtatgcgcctgcaatcttgngaggggaaagctggctttcgataaactggataagtttattcggaaaaatatcccttcaggtcaggatgtgcgggattcgcttcatgaagattgggagatatga

SEQ ID NO: 20340 - protein, 123 aa, Unknown
  Obtained from environmental sample
  misc_feature (1)..(123): Xaa is any amino acid
MTEATVKPIPVKGKHNEALVYAKAIEASCENKIRQYLDHPAFAGTKVRIMPDVHLGKSTVIGWTASYDSIVIPSVIGLDIGCGVCACNLXRGKLAFDKLDKFIRKNIPSGQDVRDSLHEDWEI

SEQ ID NO: 20341 - DNA, 786 bp, Unknown
  Obtained from environmental sample
  misc_feature (1)..(786): n is a, c, g, or t
atgattttagaaccacagtgtttcatgcggattgcggaagataaagttaattggattgacagtctgttggacggcgttgatatttccccggatataatttccaattatcttttcaggtttcaatggaaacttgacgaccatttttgcatagtcacatttaccgcttccgccgacatgaagattcccattatatccattttggatattaaacagataaacgatatttttccagacgctcttatttccgtttacgatgaacatattgtcatgattatacgatgtgccgacaaactgcaacctcacggaaaaaagaaagagcggttggaacagttcctgaaaaaagacattatgcttcactgcggtgtcagcatggtttttaataattttatgcaattacgtttttattatacccagagcaaatttgccgcatcccaatttaaaccgtcgctaagtcctacaatctgtttatacgaagattgtcaagctaagcacgtgttacacgctttatcactcggagccgatttgcgttgtttctgccaccccggcattctttcactctgggaaagcggaaacgaatcccagcgggatttggtccactgcctgtatcactattttttaaacggcagaaacatcagcgcgacggctgacgcgatacacattcaccgcaatacccttatttaccgcttagacaaagcggaggaagttttaaatattgacataaagcaaactactcccaaacaggcatttttgtttattgtctcttgtttgattgttcangggctgtga

SEQ ID NO: 20342 - protein, 261 aa, Unknown
  Obtained from environmental sample
  misc_feature (1)..(261): Xaa is any amino acid
MILEPQCFMRIAEDKVNWIDSLLDGVDISPDIISNYLFRFQWKLDDHFCIVTFTASADMKIPIISILDIKQINDIFPDALISVYDEHIVMIIRCADKLQPHGKKKERLEQFLKKDIMLHCGVSMVFNNFMQLRFYYTQSKFAASQFKPSLSPTICLYEDCQAKHVLHALSLGADLRCFCHPGILSLWESGNESQRDLVHCLYHYFLNGRNISATADAIHIHRNTLIYRLDKAEEVLNIDIKQTTPKQAFLFIVSCLIVXGL

SEQ ID NO: 20343 - DNA, 882 bp, Unknown
  Obtained from environmental sample
  misc_feature (1)..(882): n is a, c, g, or t
gtgcggcctgaacaattactggcatggagagaaaatagagaggcgcagttgataagcctgtacagacttgacaggccgtttggcgagcgcatcatctttagaacaataaatatactgactttcaattttggaaaatccacgcacattaaatcggcaaaaggcgagcaggatgtgctgaccataattctggaagctctgcccaaaacaatgctgctgtttaccacagccactatttttgagcttgccataggaattacgctgggcctgttaaaagccagaaaacccggcgggaaactggatagatcgaccagctttataaccatggtagtatacggaatgccggcctggtggctgggcatgatgctcatacttttatttgtatacattttcaaactattcccgtcgggcggtgtcgtatcaacccctacgccgctgggctttgccgggcttcttgacaggatttggcacatggttctgcctgtaacaacgcttgtcattatctccttctggagcctgtcgttcattatacgcaacatcgtgcttggggtgctgcaggaagattacatcatgagcgcgagagcgcgcggcataggcgagaaatcaattctgttcgggcatacgcttcgcacatcagccccaccaatcgtaacaatgaccctgttgtcgcttttggcttcattttcaggggcgattattttcgagggcatattttcatggccgggtctcggcaacctgtactggattgccgttcagcagaacgacatccccgttttaatgggcgatcttgccatgtcaacggggctataccttgctgggcttatattccttgacttgatataccgcttccttgatccgcgcattaaagtcggaggcaaagcatga

SEQ ID NO: 20344 - protein, 293 aa, Unknown
  Obtained from environmental sample
  DOMAIN (66)...(289): Binding-protein-dependent transport system inner membrane component
  misc_feature (1)..(293): Xaa is any amino acid
MRPEQLLAWRENREAQLISLYRLDRPFGERIIFRTINILTFNFGKSTHIKSAKGEQDVLTIILEALPKTMLLFTTATIFELAIGITLGLLKARKPGGKLDRSTSFITMVVYGMPAWWLGMMLILLFVYIFKLFPSGGVVSTPTPLGFAGLLDRIWHMVLPVTTLVIISFWSLSFIIRNIVLGVLQEDYIMSARARGIGEKSILFGHTLRTSAPPIVTMTLLSLLASFSGAIIFEGIFSWPGLGNLYWIAVQQNDIPVLMGDLAMSTGLYLAGLIFLDLIYRFLDPRIKVGGKA

SEQ ID NO: 20345 - DNA, 666 bp, Unknown
  Obtained from environmental sample
  misc_feature (1)..(666): n is a, c, g, or t
ttggcacggatacctaaagcgggatatttttcaggcgttantgcggggttaagtgggcttgtttatcgggttttaacgagcgtgatgncggtnttcatcggggttatgtacggcattgtcagcgcatatttcgcgggctttaccgacacggtcatgtcgtttctttntgagctgtttgtgtccattccgattctccccatactgatagtcatgtcggcaatcttcaagccgaatatctggatcatcattgccacgttgatagttttttcctgggtagggcctgtaaaaaccgtgcgttccatggccatgcaaataaaagaagaaacctacattgaggcggcaaaggcccttggttccggcaaatggagggtcatcttcaaacacatggcccctcttttacttccgtattcgtttgccagcatggccttgagcgttccgggctttatcgtttttgaagcttccctttcgcttttggggctgggggatccgaccatagtatcatgggggcagatactgcacgacgcgcaatcctccggggctacacttaacgggctttggtggtggatagtcccccctggcctgttcattgccattatgggaatgacattcgcgtttttgggattcgcgatggacaagatccttcatcccaagctcaggacgaggtga

SEQ ID NO: 20346 - protein, 221 aa, Unknown
  Obtained from environmental sample
  DOMAIN (16)...(220): Binding-protein-dependent transport system inner membrane component
  misc_feature (1)..(221): Xaa is any amino acid
MARIPKAGYFSGVXAGLSGLVYRVLTSVMXVFIGVMYGIVSAYFAGFTDTVMSFLXELFVSIPILPILIVMSAIFKPNIWIIIATLIVFSWVGPVKTVRSMAMQIKEETYIEAAKALGSGKWRVIFKHMAPLLLPYSFASMALSVPGFIVFEASLSLLGLGDPTIVSWGQILHDAQSSGATLNGLWWWIVPPGLFIAIMGMTFAFLGFAMDKILHPKLRTR

SEQ ID NO: 20347 - DNA, 678 bp, Unknown
  Obtained from environmental sample
  misc_feature (1)..(678): n is a, c, g, or t
gtgcgccctggagataatcttccccatcataagattccgattattatcaacggcgcgctgctccacgatgtgggaatgttgaggctgccaaaggaagtcacagaaaagcggggagggctttccgattcggaacgccagcttatacgcagccacccggcgcttgcccacaagatagtggttaagagaatgcactttccggaggatgtaggcgttattgttttgcagcaccatgagcggtgggacggccagggctacccaaacaacatctcggaagattatattgatataggcgccaggatagtgtccattgccgacgcgtttgaagccatggtaagccccaagccgtaccgcaattcaattacaggcaatcaggcggtgaaaaacctcctttccgacaattcgcggcggtttgaccctacgattctgaaggcgtttgtccttattatggggatttatcccattggctccatagtccgtctgaacaacggcgcggttgcgcggatatcagaagttcgctccatcgcgccgttgcgccccaaagtccagataatagttgaccacgccaatcaaatataccgtaatgaagagggcggattcctcgatctactgacggaaacgagcctgtacattaccaaagcaatggacaagaaagagtttacggagcaatacgggcaataa

SEQ ID NO: 20348 - protein, 225 aa, Unknown
  Obtained from environmental sample
  DOMAIN (4)...(110): HD domain
  misc_feature (1)..(225): Xaa is any amino acid
MRPGDNLPHHKIPIIINGALLHDVGMLRLPKEVTEKRGGLSDSERQLIRSHPALAHKIVVKRMHFPEDVGVIVLQHHERWDGQGYPNNISEDYIDIGARIVSIADAFEAMVSPKPYRNSITGNQAVKNLLSDNSRRFDPTILKAFVLIMGIYPIGSIVRLNNGAVARISEVRSIAPLRPKVQIIVDHANQIYRNEEGGFLDLLTETSLYITKAMDKKEFTEQYGQ

SEQ ID NO: 20349 - DNA, 612 bp, Unknown
  Obtained from environmental sample
  misc_feature (1)..(612): n is a, c, g, or t
atgcaagatgtgtatgcccatgggcgcggtcagcgcgctgtgcgggataagggggtgcatgtccatactgcacgggtcgcaggggtgcgctacctacatccggcgtcacgcggcgacccactacaacgagccggtggacatcgcctcgtcgtcgctgacggaggaggggacggtcttcggcggcgaggagaacctgctcaaggggctgcggaacatgatcgacctctacgccccggaggtcatcggcgtttgcaccacgtgtctggcggagaccatcggcgaggacgtgggcgccatcgtgaggaagttctatgcgcagaatccggacgacgtgggcgtcaagataataaccgtcgcgtcgcccgggtacggcggcacgcagaacgaggggtggttcgccgcgatacgcgccgttctagagcagacaatgccgaacgacgagcccaacggcaggatcaacgtctttacgccaatgataagccccgccgacgtgcgctacctgaagaacaccctaaagagcttttttcccgggaaagggacggagtgcgtaatactgcccgacatctccgaaaatttggacggcgccaccgagaagcggtacaaccgccttaa

SEQ ID NO: 20350 - protein, 203 aa, Unknown
  Obtained from environmental sample
  misc_feature (1)..(203): Xaa is any amino acid
MQDVYAHGRGQRAVRDKGVHVHTARVAGVRYLHPASRGDPLQRAGGHRLVVADGGGDGLRRRGEPAQGAAEHDRPLRPGGHRRLHHVSGGDHRRGRGRHREEVLCAESGRRGRQDNNRRVARVRRHAERGVVRRDTRRSRADNAERRAQRQDQRLYANDKPRRRALPEEHPKELFSRERDGVRNTARHLRKFGRRHREAVQPP

SEQ ID NO: 20351 - DNA, 495 bp, Unknown
  Obtained from environmental sample
  misc_feature (1)..(495): n is a, c, g, or t
atgtattttcgttcaagacttattacatggtctcccacatactcagtaggactgaaagtaatagatgatcaacataaaaaactttttaatttgcttaatgaaatgtacaaccatattgccggtgatgaagagtcggaactggcttattctaaaaaaattattcagcaaacagtcgaacatataagggtaaattttgcaacggaagaaaaatttttgctggtaacaaaatttccggaatatgccgaacataaaagcgcccacgaatcctttatattaaccttaatcggtaatatgaaagagattgaaaacggaaaaaagttaaacattacagcttttacccatttcctaagagactgggttttgacccacatagctataatggacagacaacattttgactctttaagaaaaaacatcggcaatttcaacagaaaagacaatatgttaatagatgaccagcaaaatatttattcaaacgaatcggaaacggtttaa

SEQ ID NO: 20352 - protein, 164 aa, Unknown
  Obtained from environmental sample
  DOMAIN (17)...(75): Hemerythrin HHE cation binding domain
  misc_feature (1)..(164): Xaa is any amino acid
MYFRSRLITWSPTYSVGLKVIDDQHKKLFNLLNEMYNHIAGDEESELAYSKKIIQQTVEHIRVNFATEEKFLLVTKFPEYAEHKSAHESFILTLIGNMKEIENGKKLNITAFTHFLRDWVLTHIAIMDRQHFDSLRKNIGNFNRKDNMLIDDQQNIYSNESETV

SEQ ID NO: 20353 - DNA, 429 bp, Unknown
  Obtained from environmental sample
  misc_feature (1)..(429): n is a, c, g, or t
gtgctggggcagtgtttcgcaaaggctcttggtgaaaagaggggcataagacgcagcggagactgccttttccctatggacgagactcttgcccgcgccgctgttgatatgtcgggccgtccttttttattttttgacggacagcttcctgattctcacataatttcgataaacaaagacggaaaggaatataagtttcaaacaggtttaacggaagatttttggcagggttttacaaattcggccggctgtaatcttcaccttgaaatcttacgcggcagaagcgatcaccacaaaattgaagccatgttcaaagccgccgcccgcgccattcgcgccgcctgcgagacagacgaacgcgctaaagattctattccctcaaccaaaggtattcttcccggttttgacgcgccgagtgtgcttgcatga

SEQ ID NO: 20354 - protein, 142 aa, Unknown
  Obtained from environmental sample
  DOMAIN (2)...(112): Imidazoleglycerol-phosphate dehydratase
  misc_feature (1)..(142): Xaa is any amino acid
MLGQCFAKALGEKRGIRRSGDCLFPMDETLARAAVDMSGRPFLFFDGQLPDSHIISINKDGKEYKFQTGLTEDFWQGFTNSAGCNLHLEILRGRSDHHKIEAMFKAAARAIRAACETDERAKDSIPSTKGILPGFDAPSVLA

SEQ ID NO: 20355 - DNA, 660 bp, Unknown
  Obtained from environmental sample
  misc_feature (1)..(660): n is a, c, g, or t
ttgctgttgcttcttcttttgattgggataattattttcgtattaagaaggcttgataaatccccaaatcgtgttttagccaaagccgcggctcccggcccatcaacttccgcttcatcggcggtaaaagcgatgccgcttgccgcgagtcagaataaggttgccgcaagccctaaaaaaattgccgaaagccgcaaaccagatcaggctccagaatacccccagcctaagatgaagcccctccccaaagacaaggtctacgacgaaagcttatacggtaacggaggcccgcttctgcttaacctctttgtagaggatcagaatacagcgatagggaaaagaaacattcattcgctcaagcccggctattcctttaccataggcggaggtaaatctgatttccttatcttccttgttcccattcctccgcgtattgcggatgtcagttacgacggcaggaactgcgttttcataccacgaaaaccccagtacttccccgatataggttcccaaacaattccaaactgtatcggcaagactttacgggtaatttctgataaaaaatacgagcttcacatcaggcttgaaagatacgaagatccgttacaagccctgaataaattgcttcgttcaattaaagtgccagggccagtacagtag

SEQ ID NO: 20356 - protein, 219 aa, Unknown
  Obtained from environmental sample
  misc_feature (1)..(219): Xaa is any amino acid
MLLLLLLIGIIIFVLRRLDKSPNRVLAKAAAPGPSTSASSAVKAMPLAASQNKVAASPKKIAESRKPDQAPEYPQPKMKPLPKDKVYDESLYGNGGPLLLNLFVEDQNTAIGKRNIHSLKPGYSFTIGGGKSDFLIFLVPIPPRIADVSYDGRNCVFIPRKPQYFPDIGSQTIPNCIGKTLRVISDKKYELHIRLERYEDPLQALNKLLRSIKVPGPVQ

SEQ ID NO: 20357 - DNA, 651 bp, Unknown
  Obtained from environmental sample
  misc_feature (1)..(651): n is a, c, g, or t
atgttaaaccttacttccaattatatcgcgattaatggaatatctcaggttgttttaaaatccaaaaatgaggaagtccttaacgacgccagaaagtctctttacaaatcggttatttaccttgaggaagccgtaagcaattatattgacgttcctttttcagattatgaagaaaaattaaacctgcttgaaacctttgatgaaaaccagcgttataccttgataagaaagatggggcttgccatcgaccttttggagtatgcctatggggacaattcaaaatggagatggacatttgttgaaatggaagggcgttttgccacagtcgcaaaaaatatattggatcttcgccgcgttatagaatactcaaattttgaatctccgtattatgattctactgtttatcatcttaggctggttaaaaggctgttatcgcagtcggcggatcgttaccgcgaaaaatacgaactgagtaccgggcagatacccgattttaagacgggtatttcatatttgggcgctttaagaagactgcacattcttctcgcggaaagcgaagacgcggaaaacgtaaagaaaaaaatagcgatttggaaaacaaaattagaggcggatcacaaaaagcaggaagatgccaaaaaaagagcatga

SEQ ID NO: 20358 - protein, 216 aa, Unknown
  Obtained from environmental sample
  misc_feature (1)..(216): Xaa is any amino acid
MLNLTSNYIAINGISQVVLKSKNEEVLNDARKSLYKSVIYLEEAVSNYIDVPFSDYEEKLNLLETFDENQRYTLIRKMGLAIDLLEYAYGDNSKWRWTFVEMEGRFATVAKNILDLRRVIEYSNFESPYYDSTVYHLRLVKRLLSQSADRYREKYELSTGQIPDFKTGISYLGALRRLHILLAESEDAENVKKKIAIWKTKLEADHKKQEDAKKRA

SEQ ID NO: 20359 - DNA, 834 bp, Unknown
  Obtained from environmental sample
  misc_feature (1)..(834): n is a, c, g, or t
ttgaatcgacagcttcgtccaaccgccgaggaaacgggatacggcgaagttaacctgacggacggcggcggacagcggcaggttcctgaggtcagtgtcaacgcccggcatgcggatgaatacagagacggccctttagttgaccgggtcgaactttcttccgccgttaacgccgtgtcggcgaccttgtcggcgaccttgtcggcgacaaagtcggcgcctgttacgctgaagacccaggatacagcgataaccctcaatactgctccgaatgacgcagacgcttataataaaagcggcgacgagtacttttataaaagagactatgatcgggccattgaagaatatacaaaagcgatacaaattgatccgaacaatgcatacgcttacaataaccgcggcgtcgcctatcgcaataaaggtgataatgaccgggccatagccgattacacgcaggcgatacggattgattcgaattatgcagccgcttacaataaccggggttatgtgtacaacaagaatggagagtatgaccgggccatagccgattacacgcaggcgatatggattattccgaactatgccgtcgcttacaataaccgcggcggcgcgtactttgataaaaaagagtatgaccgggccattgaagattatacaaaagcgatacagattgatccgaactatgctgacgcttactataaccgcggcgccgcatacaacgataaaggctatttcaggcagacccgcgtcgatgttaacanagccttgcagattaatccggggtatcaaagcgcccaggaactatccgccgaacttaaacggctcggatattaa

SEQ ID NO: 20360 - protein, 277 aa, Unknown
  Obtained from environmental sample
  DOMAIN (161)...(194): Tetratricopeptide repeat
  misc_feature (1)..(277): Xaa is any amino acid
MNRQLRPTAEETGYGEVNLTDGGGQRQVPEVSVNARHADEYRDGPLVDRVELSSAVNAVSATLSATLSATKSAPVTLKTQDTAITLNTAPNDADAYNKSGDEYFYKRDYDRAIEEYTKAIQIDPNNAYAYNNRGVAYRNKGDNDRAIADYTQAIRIDSNYAAAYNNRGYVYNKNGEYDRAIADYTQAIWIIPNYAVAYNNRGGAYFDKKEYDRAIEDYTKAIQIDPNYADAYYNRGAAYNDKGYFRQTRVDVNXALQINPGYQSAQELSAELKRLGY

SEQ ID NO: 20361 - DNA, 876 bp, Unknown
  Obtained from environmental sample
  misc_feature (1)..(876): n is a, c, g, or t
ttgaggcggaactttgatcgaaattcattccaagcccgcgacgagattggcgcattaacctataatttaagaagaatgtgttcggctttaaatgttttcggcaggttttcaaataaggaaattgccgtaaaagcgataagcggcgaaataaaaccgggcggtttttcaaaacacggcactattttattttcagacattcgggattttacggcaaaatatgaaaattttatcagattttttggcgcggaagcttccgataaaattgttttatggctcaatgaatattttacgaaaatggttgactgcgttaaaaaatccaacggcactatggataaatttatcggaagcgcggtaatgtcccattggggcacggcttgttcggcaggcagtccgcgcaaggacgcttttaacagcataaaagcggctcttatgatgcgtaaggctatttattatatgaacagggaacacaaggcgggagatgcttccaatccgtcaatccgtatcgggtgcggaattaattcaggcgttgttacggcgggacagcttggcggcgatactaggatggattattcggttttaggcgatcccgtcaatctggcgttacgccttgaagcctttactaaaccgtttggcgcggatattcttatctccgaagaaacatggaaacttgtcggggataaatttatcacagaagaaatgccttccgtgtcggttaagggaaaaacgaaacctgtgcgggttttcgccgttgtcaattttaccggcggtataaaaggacctcagtcgcttgacgaagtgcgctttcttttgggaattgagcccgccggatctgataaagcgaacgttaacgctnttgaatcagttttaaatttttaa

SEQ ID NO: 20362 - protein, 291 aa, Unknown
  Obtained from environmental sample
  DOMAIN (50)...(252): Adenylate and Guanylate cyclase catalytic domain
  misc_feature (1)..(291): Xaa is any amino acid
MRRNFDRNSFQARDEIGALTYNLRRMCSALNVFGRFSNKEIAVKAISGEIKPGGFSKHGTILFSDIRDFTAKYENFIRFFGAEASDKIVLWLNEYFTKMVDCVKKSNGTMDKFIGSAVMSHWGTACSAGSPRKDAFNSIKAALMMRKAIYYMNREHKAGDASNPSIRIGCGINSGVVTAGQLGGDTRMDYSVLGDPVNLALRLEAFTKPFGADILISEETWKLVGDKFITEEMPSVSVKGKTKPVRVFAVVNFTGGIKGPQSLDEVRFLLGIEPAGSDKANVNAXESVLNF

SEQ ID NO: 20363 - DNA, 762 bp, Unknown
  Obtained from environmental sample
  misc_feature (1)..(762): n is a, c, g, or t
atgcagtccgccgaaaacaaaatccgaattaccagttcccgtcaaatanctgaaggtcaaactttaagaattttagtgcctgaaaccggcgtatataaatccgaagttgtaaaaaattcaggtaattatctttccatagcgcgtccgacgaatacaaaagtatcctctaccatgcaatggttggggctaaaaatatccgtttatttctggcgtgaagacgatgcgggatatgtctttgattcggaagtagttgatgaagttttttccaaagggatttccgcattaaaaatcgatcaaaatgattcgctttttagaacgcaaaaaagaaaatccatgcgcgttaaattccgtaatccggcgtttctgtatcttgttaacgatattgaaaatccgcacaaactggaaaaagctgcgggattaaaaataatgatggacgatatttccgatacaggatgcgcattcaaggtaatggggcaggtttctaccggaatgcgctttaagacgcaatttttacttaataagattcctgtttgcgtgcctggaacggtgcgttccgtagattatgatagggaaagtaatatttcaatcgtgcacatggaggcggatactcttccgattggaaccagaaattttattctatgcgaagtttttaatttgcttcccgaatatgatgaagatgaactaccgttccgcgtgctggaagaagaaacaggcgttgtctccaaacagccggatcagttcatggaggagaagaatgtttaa

SEQ ID NO: 20364 - protein, 253 aa, Unknown
  Obtained from environmental sample
  DOMAIN (107)...(218): PilZ domain
  misc_feature (1)..(253): Xaa is any amino acid
MQSAENKIRITSSRQIXEGQTLRILVPETGVYKSEVVKNSGNYLSIARPTNTKVSSTMQWLGLKISVYFWREDDAGYVFDSEVVDEVFSKGISALKIDQNDSLFRTQKRKSMRVKFRNPAFLYLVNDIENPHKLEKAAGLKIMMDDISDTGCAFKVMGQVSTGMRFKTQFLLNKIPVCVPGTVRSVDYDRESNISIVHMEADTLPIGTRNFILCEVFNLLPEYDEDELPFRVLEEETGVVSKQPDQFMEEKNV

SEQ ID NO: 20365 - DNA, 969 bp, Unknown
  Obtained from environmental sample
  misc_feature (1)..(969): n is a, c, g, or t
atgcacagcatcggccgagnttcattgatattatttatacttgaccgttgttacttttaccgcatgaactatttccaaaaatcagaacgtctatacgaccgcgccgtctcggacggcggcgcgggtatctccgagtccgatatgcgcgaggtcgccgagtggccgcttgatcaggcgatgctgctctttgccgccgccgatcaggccaggcgccgttttttcggcggcaatgtagacccgtgcacgcttatgagcgtcaagtcgggcgggtgcggcgaagactgcgccttctgctcgcaatccgcccgcaatcaggccgacgtagcggtacacggactctgccccacggaagaaatagtctcgcgatgcaaggaagcgtggtcaaagggtttgccgttttgcgttgtgtccagcggcaagcgtcttgacaaatcggaatttcaagcgttgtgcggggcgctttcggaatgcggcgacggcggggagaagcacgcgtcgctgggtatcctcggcgataatgatttcacggcgttgcgtaacgcgggcgtcgtctgctacaaccacaatttggagacgagccgcgattatttcggcaagatagtcaccacgcacggttatgacgatagggcggacaccgtccgcagggcgaaggcggcgggtctgcgggtgtgctgcgggggcattttcggcgttggggagagttgggaggataggatagcgctgtgtttggagttgcgtgggcttggggtagacaccgtgcccataaactttctgaacgcgatagagggcacgcgggttgagccgccccaaggaacgccgattgagtttttgaaaatcgtttcgctgtacagactggccatgccaaaatcgacgattaaagtttgcggggggcggggagagaacctgggggcgctgccaccgctgatttttctggcgggagcaaacggtatatcacgggcgggtatctga

SEQ ID NO: 20366 - protein, 322 aa, Unknown
  Obtained from environmental sample
  DOMAIN (254)...(322): Biotin and Thiamin Synthesis associated domain
  misc_feature (1)..(322): Xaa is any amino acid
MHSIGRXSLILFILDRCYFYRMNYFQKSERLYDRAVSDGGAGISESDMREVAEWPLDQAMLLFAAADQARRRFFGGNVDPCTLMSVKSGGCGEDCAFCSQSARNQADVAVHGLCPTEEIVSRCKEAWSKGLPFCVVSSGKRLDKSEFQALCGALSECGDGGEKHASLGILGDNDFTALRNAGVVCYNHNLETSRDYFGKIVTTHGYDDRADTVRRAKAAGLRVCCGGIFGVGESWEDRIALCLELRGLGVDTVPINFLNAIEGTRVEPPQGTPIEFLKIVSLYRLAMPKSTIKVCGGRGENLGALPPLIFLAGANGISRAGI

SEQ ID NO: 20367 - DNA, 783 bp, Unknown
  Obtained from environmental sample
  misc_feature (1)..(783): n is a, c, g, or t
atggcaagaccagaatcccgattacatggaagtgccttctgggttcagaaagccgttctaaaagacgcgggttatcccaaaatccagactgtggatcagtattttaccctgttagagaactatgccaggaaatatccgaccattaacggccagcctaccatcccctttgtaatccttaccgatgactggcgtgcgtttgagctgtggaacccgcctaacttcctcgccggttaccccaacgaaggcaatggcattgtagaccccgtaacccacaagtacacaaacttctttactatggacatttccaaacgctggttccagaaactgaacgaactggacaaaaggaacctgatcgacaggacgagctttaccgacaacttcgatcagtatggcgctaaaatcgccgcaggccgtgtattgggacagttcgctcagggctggcagttcatgtacgattttgacggggtaaacagaacccgtgggcaacccgaacgcatgatggttccccttgccattacatgggatacaaacaccaggccgcgctatcgcaatttgagtattgccaatatcggccgcggtatggcaatcagcaaaagcgccaaagaccctgtaagaattatgcgcttcctgaatgaatatattacggaagacatccagcgcaccatgctctggggtattgaaggtaaagattggcagtatggtcccaataaagtaccgtaccgcaccccggcgcanaggacaaactggcagaacccgacctaccaggaacagaacccgcgctag

SEQ ID NO: 20368 - protein, 260 aa, Unknown
  Obtained from environmental sample
  misc_feature (1)..(260): Xaa is any amino acid
MARPESRLHGSAFWVQKAVLKDAGYPKIQTVDQYFTLLENYARKYPTINGQPTIPFVILTDDWRAFELWNPPNFLAGYPNEGNGIVDPVTHKYTNFFTMDISKRWFQKLNELDKRNLIDRTSFTDNFDQYGAKIAAGRVLGQFAQGWQFMYDFDGVNRTRGQPERMMVPLAITWDTNTRPRYRNLSIANIGRGMAISKSAKDPVRIMRFLNEYITEDIQRTMLWGIEGKDWQYGPNKVPYRTPAXRTNWQNPTYQEQNPR

SEQ ID NO: 20369 - DNA, 480 bp, Unknown
  Obtained from environmental sample
  misc_feature (1)..(480): n is a, c, g, or t
ttgtggcatgggctttatcaaagagccgatactatggcttggagatccgaaatatttctggngaatagtcgggattacttatgtatgaaggaagtaggatggaatacaattatttatctcgcggcaattgccggcatcgatcctaatttatacgaggccgcggatattgacggctgtaacaggtaccaaaaaatgtggcgtattacccttccttctataaagccgaccataataattttgttaataatgagtatagggcacatacttgacgcgggttttgaattgcagtacttgctgcgaaacgggcttgttatggatgtatctgacacaattgacatatatgtgcttgttttcggccttcgctattccaattattctcttgcgacagccgccgggatgtttaaaaatttcgtaaatatttcacttatatttattgccaacgagatcgccagaagggcgggtgaggagcgcctgatatga

SEQ ID NO: 20370 - protein, 159 aa, Unknown
  Obtained from environmental sample
  misc_feature (1)..(159): Xaa is any amino acid
MWHGLYQRADTMAWRSEIFLXNSRDYLCMKEVGWNTIIYLAAIAGIDPNLYEAADIDGCNRYQKMWRITLPSIKPTIIILLIMSIGHILDAGFELQYLLRNGLVMDVSDTIDIYVLVFGLRYSNYSLATAAGMFKNFVNISLIFIANEIARRAGEERLI

SEQ ID NO: 20371 - DNA, 624 bp, Unknown
  Obtained from environmental sample
  misc_feature (1)..(624): n is a, c, g, or t
gtgtatcagatcggccgagaggataggtttcgggctgtcgttctgcccttcggcttttgccagttcttcaagcaaatccctgccgcggcgggtaagtttttcgggtatctgtacaataactttgatgtacatgtcgccgtatgttcctcccgacgggactcccgagccgcggatacggagcatttttccgctctgggtgccggcgggaacttttacctttatcgttttgccgtcaagcgatgttacgtgaatgtccgcgcccagagccgcctggcttacggagattgggacggcgcagtaaagatcgtgcccctgacgctcaaagtattcatggcgtttaactcttatgaacacgtacaagtcgccgggatgtcctccgttgggacccgcgtcgccctgccttggaattaccagccgtttgccgttatcggtgccggcgggaatggtaaccattatcttctgacgctttttctgtgttcccgacccgccgcattctttgcaaggcgtttctatgacgaaaccttcgccgtgacaggtatggcaggtttgggcaaccgagaaaaaaccgtgactttgacgtatctgcccggaaccgcggcaggtctggcaggttttcttgcctga

SEQ ID NO: 20372 - protein, 207 aa, Unknown
  Obtained from environmental sample
  misc_feature (1)..(207): Xaa is any amino acid
MYQIGREDRFRAVVLPFGFCQFFKQIPAAAGKFFGYLYNNFDVHVAVCSSRRDSRAADTEHFSALGAGGNFYLYRFAVKRCYVNVRAQSRLAYGDWDGAVKIVPLTLKVFMAFNSYEHVQVAGMSSVGTRVALPWNYQPFAVIGAGGNGNHYLLTLFLCSRPAAFFARRFYDETFAVTGMAGLGNREKTVTLTYLPGTAAGLAGFLA

SEQ ID NO: 20373 - DNA, 615 bp, Unknown
  Obtained from environmental sample
  misc_feature (1)..(615): n is a, c, g, or t
atgggacatgataaattgtttcagaaaaagaaaatcctgaaacgtctcgaaaaaacacgcaaacttcgcaggattttgattgtttgcgaaggtgaaaaaaccgaaccgaattattttaaaaaatttaaagctaatcctgaagtatttgatgatattgatatacaaggaaccggttacaatacaacatcgttaatagcagaagcaataagaataaaaaacgaggcaatccaaaataaagaaccatatatagaaacttggtgtgtctttgataaagatgatttcaccgttgaatcatttgataaagcgttaaaaatggctgagcaaaaccaaataaaatgcgcttattctattgaagcttttgaaatctggtatttgctacactataatttttatgacactgctttttcacgattacaatacaaggaaaaactttcagaattactgaaaaaaccgtatttgaaaaatgatccggaaatgtactttcttttatttaagaaacanagcatagcaatacaaaatgcanaaaaactttataaaaatcaacacttgctaccattaaaagatcaaaatcctattacaaccgtattccaactcgntgaaacgataacagagtaa

SEQ ID NO: 20374 - protein, 204 aa, Unknown
  Obtained from environmental sample
  misc_feature (1)..(204): Xaa is any amino acid
MGHDKLFQKKKILKRLEKTRKLRRILIVCEGEKTEPNYFKKFKANPEVFDDIDIQGTGYNTTSLIAEAIRIKNEAIQNKEPYIETWCVFDKDDFTVESFDKALKMAEQNQIKCAYSIEAFEIWYLLHYNFYDTAFSRLQYKEKLSELLKKPYLKNDPEMYFLLFKKXSIAIQNAXKLYKNQHLLPLKDQNPITTVFQLXETITE

SEQ ID NO: 20375 - DNA, 921 bp, Unknown
  Obtained from environmental sample
  misc_feature (1)..(921): n is a, c, g, or t
atgctgcaccggtgggacgtgaatgcgccgcaaaagctctttggcactttcttcgagatccttcatattctggcagggaatgaccacatgctccaatccccgcgccactgcggcgaggatcttttccttgatgccgcccacgggcagaatgcgcccgcgcagggtcacttctccggtcatgcacagcgtggaatccaccggcttgtcggtcagggcggaaatcagggcgacgaccatggtgacgcctgcggaaggcccgtccttgggagtagccccggaggggacgtgaatatgaatgtccgttttgtccgcaaagcccggcgccacgcccagttccccggcatgtgtccgcgcgtagctcagggccgccttggcgctttcctgcatcacgtcgccgagttggcccgtcatggtcagtctgcctttgcccttcatcgcgccggcctcgatatgcagcacctcgccgccaaagggcgtccaggcaagtcccagcgccagaccgggcttgaactccttttccttctccgcatccagaaagcgcggagcgccgagaaatttcggcgtctgcgccgctcccacgcgaaaggggccgtgctgcccttccgccttgcgccgggcgattttacggcacaaagaccccaactcgcgctccaggttacgcaagccggcttcgcgcgtatattcctgaataatccgctcgacagccttcacgtggatcgaaagttccttctcctgcaacccgttgtccttcagcattttcggcaaaagatgccgctgcgcgatgaccagcttttcctgcatggtgtatcccggcagggcgatgacctccatacggtcgcgcagggcggagggaatggtttccagatggttggccgtacagatgaacatcacctggacaaatcaaagggcacgttcaggtaa

SEQ ID NO: 20376 - protein, 306 aa, Unknown
  Obtained from environmental sample
  misc_feature (1)..(306): Xaa is any amino acid
MLHRWDVNAPQKLFGTFFEILHILAGNDHMLQSPRHCGEDLFLDAAHGQNAPAQGHFSGHAQRGIHRLVGQGGNQGDDHGDACGRPVLGSSPGGDVNMNVRFVRKARRHAQFPGMCPRVAQGRLGAFLHHVAELARHGQSAFALHRAGLDMQHLAAKGRPGKSQRQTGLELLFLLRIQKARSAEKFRRLRRSHAKGAVLPFRLAPGDFTAQRPQLALQVTQAGFARIFLNNPLDSLHVDRKFLLLQPVVLQHFRQKMPLRDDQLFLHGVSRQGDDLHTVAQGGGNGFQMVGRTDEHHLDKSKGTFR

SEQ ID NO: 20377 - DNA, 801 bp, Unknown
  Obtained from environmental sample
  misc_feature (1)..(801): n is a, c, g, or t
atgctcgccacgttgcgcgacgacgttgagtttgatatctcgttagatgttctcaaacgccgtgagtttgaccttccgcgctgtcgggagctgttaaacgaatttgagttcttctctatgttgcggaacccgctcttcggcgctagaaagaagttcgagccgcgtatacgtgcaatcaactcaatcgcccaattgcgcggtctagttgagacgataggcaagaaaggcgaggccgccatcgacgtggtgacgacgggaaaccatccaagagtcgcgcagcttaaaggaatcgtgcttgccgtcgactcctcggaggcgttttacgcgcggatcgacggcggcagcggcgcgaaacgcggtaatggcacagccgtcgccatgaacttgtttgacggcttaaacaggcaaggcgcggctgacgaaagcggctcggttgacgactgcgaatcgcttgacagaagcgaggcgttgaaaattctcgccggcgtgcttgagtcgccgcaaataggcaagatcgggcacgatctgaaacacctctccatggcgctcaggggcgaggggattactctgcgcggactcgccttcgacgcgatgctcgccgcatacgtgatagaccccggaaagcgccgctatgacctcgcggagcttgtaagcgagcatctgtgcgtagacataaaaaccgccggcgattggcgcgacggcgacgagttcgtcgaccctctcgccggccccgtgcccaccgccgaagcggcctgcgcctcgctgcttctacgggaaaaactactgcccatcatggaatga

SEQ ID NO: 20378 - protein, 266 aa, Unknown
  Obtained from environmental sample
  DOMAIN (56)...(266): 3'-5' exonuclease
  misc_feature (1)..(266): Xaa is any amino acid
MLATLRDDVEFDISLDVLKRREFDLPRCRELLNEFEFFSMLRNPLFGARKKFEPRIRAINSIAQLRGLVETIGKKGEAAIDVVTTGNHPRVAQLKGIVLAVDSSEAFYARIDGGSGAKRGNGTAVAMNLFDGLNRQGAADESGSVDDCESLDRSEALKILAGVLESPQIGKIGHDLKHLSMALRGEGITLRGLAFDAMLAAYVIDPGKRRYDLAELVSEHLCVDIKTAGDWRDGDEFVDPLAGPVPTAEAACASLLLREKLLPIME

SEQ ID NO: 20379 - DNA, 756 bp, Unknown
  Obtained from environmental sample
  misc_feature (1)..(756): n is a, c, g, or t
ttgtttatggaattctcacagcgggaagtcaggcgttcccacgggcctttttcgctggtatggatgcggcgcgccctgcggacatggctgcacgggggcaagccttgggacggccttttgttaacgccggcgctggaaacgcttaaacagcgccttgccgagaataaccgttactttgaatcgctgatacaaaaatatttgctggataacccccaccgtgcgctggtaatgctggaaccgcagaaagattttttgccccaacaggaggcgcggcttgccgaagaattggcaaagaccgaacagggtttaagcgatacggaaaaaaaacgcataacggaaaaatcggcggctcttgaaaaaattcaaagtgaaggcgacagtcccgaagcgcttgccactattccccatctctcccgcagcgacctttcgcccgaaccggaaatgattccccgtagccttgaagacttgcagggaattcccgcgttgtttcacgatttgtatacgaatggtattacctatatcgaccttgcctttcctttggacattttgccgccggaggattattcatggctgcctttttttgcccgtgcggcaatttccgtggggcttcccggcatggactacggcgaagtgtccagcctgctggcgcgtaccgtgggcggttttaacgccgtactgcacaccggttccgcggctcccgtggcagacagtccggtgatacaaactccccgtaggggagcccgcaggggcgtttaa

SEQ ID NO: 20380 - protein, 251 aa, Unknown
  Obtained from environmental sample
  DOMAIN (78)...(251): Peptidase M16C associated
  misc_feature (1)..(251): Xaa is any amino acid
MFMEFSQREVRRSHGPFSLVWMRRALRTWLHGGKPWDGLLLTPALETLKQRLAENNRYFESLIQKYLLDNPHRALVMLEPQKDFLPQQEARLAEELAKTEQGLSDTEKKRITEKSAALEKIQSEGDSPEALATIPHLSRSDLSPEPEMIPRSLEDLQGIPALFHDLYTNGITYIDLAFPLDILPPEDYSWLPFFARAAISVGLPGMDYGEVSSLLARTVGGFNAVLHTGSAAPVADSPVIQTPRRGARRGV

SEQ ID NO: 20381 - DNA, 447 bp, Unknown
  Obtained from environmental sample
  misc_feature (1)..(447): n is a, c, g, or t
atgaaaataattctacaggacacgatgacaaataacggcattaaagctaactatggcgacgaatccccaatcgccgcttttgcgactactcccggcaacagcgcgttgacattaatccgctgttcgggaaaaggttcaatagaatcggcggcatcagtttttgcggcggcaagaacaaaaagcgattcgcttcaaaaagattcatcgccgcttatgacggcgcagggaaacacggttattcacggctggattgtctcaaataaaaacgaaaaaatagacgacgtacttgtttccgttttccgttctccgaaaagctacacaggcgaggacagccttgacatttgctgtcacggcggcgcggcggcggggaagtctgtaatgacggcgttaaagacttccggctttcgtgatgcgtactccggcgaatttacattccgagctttttga

SEQ ID NO: 20382 - protein, 148 aa, Unknown
  Obtained from environmental sample
  misc_feature (1)..(148): Xaa is any amino acid
MKIILQDTMTNNGIKANYGDESPIAAFATTPGNSALTLIRCSGKGSIESAASVFAAARTKSDSLQKDSSPLMTAQGNTVIHGWIVSNKNEKIDDVLVSVFRSPKSYTGEDSLDICCHGGAAAGKSVMTALKTSGFRDAYSGEFTFRAF

SEQ ID NO: 20383 - DNA, 921 bp, Unknown
  Obtained from environmental sample
  misc_feature (1)..(921): n is a, c, g, or t
atggttgagtattacattatagagagctatggaacttacaaaccgacaggaacggcaaaaggctctgtcacaatagacggcggaacctatgagctttatgaaacaacaagaactaatcagccttcgattgaaggaacaaaaacatttaaacaatactggtctgtacgcacgtcaaaacgcacaagcggaacaatctccgtaacagagcattttaaagcgtgggaaaaacaagggatgactcttggtaagctttatgaagtagctcttacggctgaaggttatcagagcaacggaagcgctaagataacaagccatacccttacgattggcggaagcggttcaagttccgatagttcaaacagcggatcaggtaacggaggcggcagcggaaacggaagcagtacaactacaggcgctactaaaattgaagccgagaatatgaccaaaagcggaaaatataccggcaactgctcgtctcctttcaccggagttgtgttatacgcaaacgacgacaaagtttcatttagccagtcctttgcaaataacagccataattttaaacttcgcggcgcgtcgtcaaacagcaaagaagctcaggttgaattaagaatcggcgggacttcctacggaacattcaagttcagcggaacatcacctgcggaaaaaaccatcactgctgctcacaacaaaggcgggagcaccgcgacagttgagcttgtgtgtgttaatgataatgacacatgggacgtattaattgactggattgaaatcagcgcgagcggaaattcatccggttcaagcggaaacggctctggcagcggcaattcangcggctcaagcggtagttcatcangcggcggctatttcagcggttcggggtctttcagcgnaaccnagatagaagccgagagtatgacctag

SEQ ID NO: 20384 - protein, 306 aa, Unknown
  Obtained from environmental sample
  DOMAIN (143)...(259): Carbohydrate binding module (family 6)
  misc_feature (1)..(306): Xaa is any amino acid
MVEYYIIESYGTYKPTGTAKGSVTIDGGTYELYETTRTNQPSIEGTKTFKQYWSVRTSKRTSGTISVTEHFKAWEKQGMTLGKLYEVALTAEGYQSNGSAKITSHTLTIGGSGSSSDSSNSGSGNGGGSGNGSSTTTGATKIEAENMTKSGKYTGNCSSPFTGVVLYANDDKVSFSQSFANNSHNFKLRGASSNSKEAQVELRIGGTSYGTFKFSGTSPAEKTITAAHNKGGSTATVELVCVNDNDTWDVLIDWIEISASGNSSGSSGNGSGSGNSXGSSGSSSXGGYFSGSGSFSXTXIEAESMT

SEQ ID NO: 20385 - DNA, 876 bp, Unknown
  Obtained from environmental sample
  misc_feature (1)..(876): n is a, c, g, or t
atgctccaacgattactgggatgcacactctacgcaaatgttttggaaggcagcgcggcagatttcagcaaaagcagtttgaatacggaggttcactacgataagagatactctttgaacggctttgtgaaagccacaggttatttaaacgatgggacagtttggcgagattacgatattgaatttagccactcgcaaaaaataacaccagatggtagcaaagcgctgaatggtcagggttcctttgtttcgcggcaaaatttgcggcgggaaaacggcatagacgaaaaaaccattttaaaccagcaagcaaatgccgaaatgacctactatcagaaaatcggcgacaataaaaacatcaccataaaagaaaggcaggaatacaatttgcaaacagggcttattgtccggcaaaatcccgatattcagttcagggcttctggtcctttgtttgctccagatgtttctggagaaagcataaatcctccgttctgggaaaaaataaattattcttattctaaccgattcaataactatatggttagagcaccagatacaatatattacaatccgttagacactgcatctgaatattacacgttagacacaacggcttattatttgggtttttctgataatttttctttaaattacacgggaattctctttgatgttttaagcataactccgtcactgaatttttttgggaactggactgcaaatgaatatattttgccgcgtgattccatagacaaaagaggtcaccttgcttttgacccctcaaaagacgaatatggtcaatactatccgaaatacaatggttctgtgagaaccagcacaaaactctacggtatatggcttcccgaatggggctag

SEQ ID NO: 20386 - protein, 291 aa, Unknown
  Obtained from environmental sample
  misc_feature (1)..(291): Xaa is any amino acid
MLQRLLGCTLYANVLEGSAADFSKSSLNTEVHYDKRYSLNGFVKATGYLNDGTVWRDYDIEFSHSQKITPDGSKALNGQGSFVSRQNLRRENGIDEKTILNQQANAEMTYYQKIGDNKNITIKERQEYNLQTGLIVRQNPDIQFRASGPLFAPDVSGESINPPFWEKINYSYSNRFNNYMVRAPDTIYYNPLDTASEYYTLDTTAYYLGFSDNFSLNYTGILFDVLSITPSLNFFGNWTANEYILPRDSIDKRGHLAFDPSKDEYGQYYPKYNGSVRTSTKLYGIWLPEWG

SEQ ID NO: 20387 - DNA, 930 bp, Unknown
  Obtained from environmental sample
  misc_feature (1)..(930): n is a, c, g, or t
atgacgattctgcacggctctcagggctgcgccacctatatacgccgtcacatggcgacccactataacgagccgattgatattgcctcatcatcccttaccgaagaggggacggtcttcggcggcgagacaaatttgctgaaagggttaaaaaatttaatagacctgtacaacccgcaggtaatcggcgtctgtacgacgtgcctggctgagaccatcggggaggatgtgggcgctgttgtaaaaaagttttatgagcaaaatccccatacgagcgttgagataatcaacgtcgcctctcccggctacggcgggacacagaacgaaggttggttcgccgcgctcagggcggttgtcgggcagattgatcctgacaaaatcccaaacggcaaagtcaacattattacgccgcaaatcagtcccgccgatacccggtggctgaaaggcttttttacggagatgggcgttgattatattctcttgccggacatttccgataatctggacggtgtgacggaaaaaccctacaacaggttaaaaatgggcgggacgccgttgtctgatgccgcaaaaatggcgggtgcgcggttaacaattgaattttccgagtacacaaacgcggataattcccccgccgagtatttgcgtaaaacatataacgtgccgtttgtgaaactgcccctgcctgtcggtgtccgcgctgtggatatgcttatcaatacgctgaaaagttcaggcggcttcgttacccagaatattgtgaaggagcgcggacggtatctggacgccatggttgattccccacaaatatgcagcgaggcgcgggctgttgtattcggtgaacgggattttgtgancgcgatggcgcgtctgtgctgtggaaaacggattttaccggtggntgattgccaccgcctcggtttcggatag

SEQ ID NO: 20388 - protein, 309 aa, Unknown
  Obtained from environmental sample
  DOMAIN (1)...(306): Nitrogenase component 1 type Oxidoreductase
  misc_feature (1)..(309): Xaa is any amino acid
MTILHGSQGCATYIRRHMATHYNEPIDIASSSLTEEGTVFGGETNLLKGLKNLIDLYNPQVIGVCTTCLAETIGEDVGAVVKKFYEQNPHTSVEIINVASPGYGGTQNEGWFAALRAVVGQIDPDKIPNGKVNIITPQISPADTRWLKGFFTEMGVDYILLPDISDNLDGVTEKPYNRLKMGGTPLSDAAKMAGARLTIEFSEYTNADNSPAEYLRKTYNVPFVKLPLPVGVRAVDMLINTLKSSGGFVTQNIVKERGRYLDAMVDSPQICSEARAVVFGERDFVXAMARLCCGKRILPVXDCHRLGFG

SEQ ID NO: 20389 - DNA, 735 bp, Unknown
  Obtained from environmental sample
  misc_feature (1)..(735): n is a, c, g, or t
atgttaatacctaaagttgaacagcggataagacggtaccttaatttacttgagaaaaactcctaccgcaaaatcgccaatctggaatttgaaacgtatgaaaaggaaggcttccggttccgcgcggtctacaacgcgccgttaagcgacaaccccatttttctgagtgttacacctaacgaagattcccttgcctttatcgacggcaggcccgcgggcgcgtttaacatgtaccacaataaaatccgcattgacgccgacgggaaagaacataccctgcatgtcgaggcgtattctgagggctgtcttctggaacgccgcagggcgatacactcccttttttacgacatccgcgccctgtacgaaacggcgaaaatcgccgatcccaattcgctgcgtaaagcgcagataatgaaagggctgtccattgcgcttaacggaatcagcctgaacgcggacggggaagagcttgaaaaacaggccgtcgaggccgcgcaaacgcttgcgccgctgttggcgctgaaaaacggccccagcgcgccggcggttcatcttgtcggacgcgcccgcattgatcacgcgtcgaacattgccgaaaccggacgcaagacagcccgcacttttgccaacatgctccggttaatanaagaataccccgaatttatttttatccaaagccagccttgccagttggaaattgtcaaaaacgaatatcctgaaatttttgcgccgtga

SEQ ID NO: 20390 - protein, 244 aa, Unknown
  Obtained from environmental sample
  misc_feature (1)..(244): Xaa is any amino acid
MLIPKVEQRIRRYLNLLEKNSYRKIANLEFETYEKEGFRFRAVYNAPLSDNPIFLSVTPNEDSLAFIDGRPAGAFNMYHNKIRIDADGKEHTLHVEAYSEGCLLERRRAIHSLFYDIRALYETAKIADPNSLRKAQIMKGLSIALNGISLNADGEELEKQAVEAAQTLAPLLALKNGPSAPAVHLVGRARIDHASNIAETGRKTARTFANMLRLIXEYPEFIFIQSQPCQLEIVKNEYPEIFAP

SEQ ID NO: 20391 - DNA, 303 bp, Unknown
  Obtained from environmental sample
  misc_feature (1)..(303): n is a, c, g, or t
gtggcccggacagtccacatgggcgtagtggcggttcgaggtctcgtattccacgtggctcgccgctatggttatgccacgctccttctcctcgggcgccttgtctatcttgtcaaagggcacgtaatctccaccgccggccttggacagcaccagcgttatggccgccgtcagggtggtcttgccgtggtctatgtgcccgatggtacccacgttaacgtgcggcttggtccgatcaaacttcttcttgcccattttcgcctccctggcccggagggtcgccccccgggcccagttggatga

SEQ ID NO: 20392 - protein, 100 aa, Unknown
  Obtained from environmental sample
  misc_feature (1)..(100): Xaa is any amino acid
MARTVHMGVVAVRGLVFHVARRYGYATLLLLGRLVYLVKGHVISTAGLGQHQRYGRRQGGLAVVYVPDGTHVNVRLGPIKLLLAHFRLPGPEGRPPGPVG

SEQ ID NO: 20393 - DNA, 510 bp, Unknown
  Obtained from environmental sample
  misc_feature (1)..(510): n is a, c, g, or t
gtggtgggcggaaccgtgcccaaggaataccacgccgccgtgggcgagggcgccctggaggccgctgaaaaaggcgggatccgggcgggctacccggtgaccgacgtgaaggtcaccctcttcgacggctccttccacgaggtggattcctcggaaatggcctttcacatcgcgggttccctggctttcaaggaagggctgcgccaggcccgttccgtgctcctggagcccatcatggacctggaaaccgtgactccggaagagtttgtcggcgatgtcatgggtgatatcgccgcccgccggggccgggtcggcggcctggacgccaagagcggcttccaggtcatccgggccgatgtccccctggcctccatgttcggctatgccaccgaccttcggagccgcacccagggccgggccactttcaccatgcagttcggccgctaccagcccctgccggagagcgtggccgccgaggtggcgtccgcccgcgaagcgggccgcaaatga

SEQ ID NO: 20394 - protein, 169 aa, Unknown
  Obtained from environmental sample
  DOMAIN (2)...(71): Elongation factor G, domain IV
  misc_feature (1)..(169): Xaa is any amino acid
MVGGTVPKEYHAAVGEGALEAAEKGGIRAGYPVTDVKVTLFDGSFHEVDSSEMAFHIAGSLAFKEGLRQARSVLLEPIMDLETVTPEEFVGDVMGDIAARRGRVGGLDAKSGFQVIRADVPLASMFGYATDLRSRTQGRATFTMQFGRYQPLPESVAAEVASAREAGRK

SEQ ID NO: 20395 - DNA, 324 bp, Unknown
  Obtained from environmental sample
  misc_feature (1)..(324): n is a, c, g, or t
gtggccgggggtgtcgatgatgttgatgcggtgcttgcgccagaaacaggtggtggccgccgaagtgatggtgatgccgcgttcctgttcctgctccatccaatccatggtggcctggccgtcgtggacctcgcccatcttctgggagacgccggtataaaacagtatccgctccgaagtggtggtcttgccggcgtcgatatgggcgatgatgccgatattgcgcgtttgggttatggggaccgatggggccaaaagagtattcctaattcaatcgctcaatcaaagtccaagtccggtaaacttgatttccgaaaacgctga

SEQ ID NO: 20396 - protein, 107 aa, Unknown
  Obtained from environmental sample
  misc_feature (1)..(107): Xaa is any amino acid
MAGGVDDVDAVLAPETGGGRRSDGDAAFLFLLHPIHGGLAVVDLAHLLGDAGIKQYPLRSGGLAGVDMGDDADIARLGYGDRWGQKSIPNSIAQSKSKSGKLDFRKR

SEQ ID NO: 20397 - DNA, 945 bp, Unknown
  Obtained from environmental sample
  misc_feature (1)..(945): n is a, c, g, or t
gtgcatgcgcaggcggaaaccgtcaacctgtttttctgtagacgaaatagacgaacttccagcgatttccgcggcgatcccgctaccgccctcctgnaagtccttgatcctgaacaaaattcaacctttgtagaccattatctggaagttcaatacgatctttccaaagtaatgtttattaccacggcaaattccttacatacgattccgtatcccctgcttgaccgcatggatataatcgaagttcccggttacggggaaaatgaaaaacttacaatagcgaaacaattcctggttccgaaagaacttaaagagaacggcctttccaacgcgaaaataattttcagggacgacgccctaagaagcattatccgccattggacgatggaatcaggagtgcgtaaccttgaacgcgagacggcgcgctgcataaggcgcatcgcgagaggagccgtaaaaacggggtacggcaaggaaaaacctgtaacttcatttaaaaagataataacgccggcggtaatagaaaaactgctcggcaaaaaattatacaaacgcgatgttgttttcagcgaggcccgtataggcgtaacatacgggcttgcgtggacggaaacgggcggggcgattttacccgtcgagacaatacgttacaacggaaacggggagcttttaattacgggaaacctcggcgacgtaatgaaggagagcgcgcgcattgccctgtcttacctgcacagcacatgcgacaggtacaatttttccataaaagacttaagcaagtctaattatcacatccatgttccggagggcgctatcccgaaggacggtccttccgcgggcatcacccttgcttcgtcattgctgtccaccctctgtaaaattcccccgcgcccttgcgtcgccatgaccggagagcttaccctagcggaagggtctctcgaataa

SEQ ID NO: 20398 - protein, 314 aa, Unknown
  Obtained from environmental sample
  DOMAIN (168)...(311): Lon protease (S16) C-terminal proteolytic domain
  misc_feature (1)..(314): Xaa is any amino acid
MHAQAETVNLFFCRRNRRTSSDFRGDPATALLXVLDPEQNSTFVDHYLEVQYDLSKVMFITTANSLHTIPYPLLDRMDIIEVPGYGENEKLTIAKQFLVPKELKENGLSNAKIIFRDDALRSIIRHWTMESGVRNLERETARCIRRIARGAVKTGYGKEKPVTSFKKIITPAVIEKLLGKKLYKRDVVFSEARIGVTYGLAWTETGGAILPVETIRYNGNGELLITGNLGDVMKESARIALSYLHSTCDRYNFSIKDLSKSNYHIHVPEGAIPKDGPSAGITLASSLLSTLCKIPPRPCVAMTGELTLAEGSLE

SEQ ID NO: 20399 - DNA, 585 bp, Unknown
  Obtained from environmental sample
  misc_feature (1)..(585): n is a, c, g, or t
gtgccgcctcaaggcggaagaaagcaccccaatcaggaacttatacgtattgacaccaccaacatcctttttatatgcggcggcgcttttgttggattggaaaaattaatcgcccgccgcgtcgtaaaccagcccctggggttcggttccggcatgacaggttccgagaaaaacctgaaagaactgtacgactccattcaccccgacgatttaattcacttcggcatgattcccgaattcataggaaggcttcccattaccgtcggccttgaagaattaaagcgcgatgatcttaaacgcatcatcaccgagccgcgcaacgccatcgtaaggcagtatcaggcttctatggcttatgacaatgtaaaacttgaatttaccgagaaagcgattgactctatcgcggatttggcgattaagcaaaaaacaggggcgcgcgggcttcgcgccattgtggaaaaactgatgacggatatcatgtttgacattccctcgatgaagggcgataagcatgtaatagtaacccacgacactgtcgaaaagtcagagcctcctcaaataatttacctgcaaaagagcgcgtaa

SEQ ID NO: 20400 - protein, 194 aa, Unknown
  Obtained from environmental sample
  misc_feature (1)..(194): Xaa is any amino acid
MPPQGGRKHPNQELIRIDTTNILFICGGAFVGLEKLIARRVVNQPLGFGSGMTGSEKNLKELYDSIHPDDLIHFGMIPEFIGRLPITVGLEELKRDDLKRIITEPRNAIVRQYQASMAYDNVKLEFTEKAIDSIADLAIKQKTGARGLRAIVEKLMTDIMFDIPSMKGDKHVIVTHDTVEKSEPPQIIYLQKSA

SEQ ID NO: 20401 - DNA, 684 bp, Unknown
  Obtained from environmental sample
  misc_feature (1)..(684): n is a, c, g, or t
ttgaggagcattgcaagcgaagttcaaaaatattccgaaaaaggcgatatagttcatgttctcaaagaaggagaatccttaacgcaaatagccagatttgccattggcaaatacaattcgcttgttagcacagaggctatgatcaaagaatatttgcaagacaacgaattgtctttggatagcaaacttaaagcaggcgatactttgcgtttaaaactgccaaccttcaataatccacaccataaaacaatgcagggagcgtggaattttttcacaggtctattaaacgatagccttgcatacatcactgaactatataatccaactcaaaccgccacaatgagacggcacgatggaatagatgttgcagggcgcaagggaacgcgtattttggcaccctttagcggaaccgcttggacaatggaagatgagcgcggtggtttgatgattgcaatagcgagagaagacgatttgcttgtttttatgcactgcgaacagcggttttatctgaacggtcaatctgttatggaaggagaccctatagcttctgtgggtagctctgggcacacaaccggacctcacgtacacgtagccgctgggaaaatatcaaaaaacggagagcgaaatatcagcggattaagatataatgctttaaatccatttatatggttcaaggagatgtga

SEQ ID NO: 20402 - protein, 227 aa, Unknown
  Obtained from environmental sample
  DOMAIN (115)...(220): Peptidase family M23
  misc_feature (1)..(227): Xaa is any amino acid
MRSIASEVQKYSEKGDIVHVLKEGESLTQIARFAIGKYNSLVSTEAMIKEYLQDNELSLDSKLKAGDTLRLKLPTFNNPHHKTMQGAWNFFTGLLNDSLAYITELYNPTQTATMRRHDGIDVAGRKGTRILAPFSGTAWTMEDERGGLMIAIAREDDLLVFMHCEQRFYLNGQSVMEGDPIASVGSSGHTTGPHVHVAAGKISKNGERNISGLRYNALNPFIWFKEM

SEQ ID NO: 20403 - DNA, 312 bp, Unknown
  Obtained from environmental sample
  misc_feature (1)..(312): n is a, c, g, or t
atggcggtacgccagctcatggattttctggaatacggcggaatccgcaatgcggtgaattttccccgctgtaagttggatatgcgcgcgcccaaccgcctgctcgtggcaaaccgcaatattcccaacatggtcgggcagattaccacgatacttgccgcggcaaatatcaacatcaccgatttgattaaccatcaccgcgatgattttgcctataatatcattgatacggagcaggaaatcacggcatccgtgctggaacagcttaggggtatcaacggcataatccgcgttcgctcaattaagaagtag

SEQ ID NO: 20404 - protein, 103 aa, Unknown
  Obtained from environmental sample
  misc_feature (1)..(103): Xaa is any amino acid
MAVRQLMDFLEYGGIRNAVNFPRCKLDMRAPNRLLVANRNIPNMVGQITTILAAANINITDLINHHRDDFAYNIIDTEQEITASVLEQLRGINGIIRVRSIKK

SEQ ID NO: 20405 - DNA, 360 bp, Unknown
  Obtained from environmental sample
  misc_feature (1)..(360): n is a, c, g, or t
ttggggtatcactttagcgccgccgcgccgggtggttatataatccgtgacctcagtaccgataaaatactctcgcaagtggatattctgctggaaaatgacgactacattatagcggtggaagtaaaaataacagtgcgcccacaggatattgaacaccacatcaaacggctggaaatactgaaagaataccggagcaaacaccatgatacgcgcataatacggggagccatagcgggcgcaatattcggggaagaggaaaagaaggcggtcattgaggcgggattctatgcgctgatccaatccggcgacacgatgaagctggaaataccggaagactttgtgccaagagagttttaa

SEQ ID NO: 20406 - protein, 119 aa, Unknown
  Obtained from environmental sample
  misc_feature (1)..(119): Xaa is any amino acid
MGYHFSAAAPGGYIIRDLSTDKILSQVDILLENDDYIIAVEVKITVRPQDIEHHIKRLEILKEYRSKHHDTRIIRGAIAGAIFGEEEKKAVIEAGFYALIQSGDTMKLEIPEDFVPREF

SEQ ID NO: 20407 - DNA, 381 bp, Unknown
  Obtained from environmental sample
  misc_feature (1)..(381): n is a, c, g, or t
atgctgggacagtacggttttctcgcggaagttttttctatatttgcaaagtacagcatttcagtagatatggtcgcaacgagcgaagtatcggtctccctcacccttgatacttctcacgatttaaccgaagtaaaaaaagaactgaataaattcgccggtgtagacataaaaacaggaaaagcgattgtttctatcatcggaaatgttaagcgctcatcggaaattcttgcgagggcgtttaaaatctgtcagtttatcggcgttactgtgcaaatgatttcgcagggggcaagcaaggtaaacataagctttattgtgaatgataccgaagcggtagaaacggtaaaagcgcttcatctggatttttttgaatcctga

SEQ ID NO: 20408 - protein, 126 aa, Unknown
  Obtained from environmental sample
  misc_feature (1)..(126): Xaa is any amino acid
MLGQYGFLAEVFSIFAKYSISVDMVATSEVSVSLTLDTSHDLTEVKKELNKFAGVDIKTGKAIVSIIGNVKRSSEILARAFKICQFIGVTVQMISQGASKVNISFIVNDTEAVETVKALHLDFFES

SEQ ID NO: 20409 - DNA, 342 bp, Unknown
  Obtained from environmental sample
  misc_feature (1)..(342): n is a, c, g, or t
atgaaaatagcaattatcggttacggtaaaatgggaaaaatgctagaacagattgcctgcgcacaggggcataccataacggcaatagtagaccctgccgcagaggacgctgggaaacctataagcaaaagcattgccgaagccggtcttgattccgttgacgcagcgattgaattttcccagcctgtatccgctgtaccaaacattattgcgcttgctaaaaagaaaatcccaacagtaacgggaacaacaggctggcatgaacgcatggacgaagttgcaaaggaaatagaaaaatcaggcggctctcttctttggtcgtctaacttttcatcgaggtaa

SEQ ID NO: 20410 - protein, 113 aa, Unknown
  Obtained from environmental sample
  DOMAIN (1)...(110): Dihydrodipicolinate reductase, N-terminus
  misc_feature (1)..(113): Xaa is any amino acid
MKIAIIGYGKMGKMLEQIACAQGHTITAIVDPAAEDAGKPISKSIAEAGLDSVDAAIEFSQPVSAVPNIIALAKKKIPTVTGTTGWHERMDEVAKEIEKSGGSLLWSSNFSSR

SEQ ID NO: 20411 - DNA, 432 bp, Unknown
  Obtained from environmental sample
  misc_feature (1)..(432): n is a, c, g, or t
atgaatcaatgttcaaattgcggcgcggagctcaggcccgcggccaacttttgttcaagctgcggcgcggcccaggccggtgccgtgcaggccgagactttcgatccagccggagcgccgccggcgcataccgacgtcgtccgcccccgcgccgacagcgcggccctgccgcagaagattgagaaccacttcataaagtcgatcatcgcgacgatctgctgctgcgtaccgttcggcatagtcgggataatctacgccacgagggtggacgcgtttatgaggacgggcaaccgcgccgccgccgaggacgcgagcaggaaagcgagcctgtggagtaacttggccatcggcataggggtggtggtgaatgtgctggtaacgatgttaacggtggtttatcagctgaaatcgttgaatttgccggcgctgtaa

SEQ ID NO: 20412 - protein, 143 aa, Unknown
  Obtained from environmental sample
  misc_feature (1)..(143): Xaa is any amino acid
MNQCSNCGAELRPAANFCSSCGAAQAGAVQAETFDPAGAPPAHTDVVRPRADSAALPQKIENHFIKSIIATICCCVPFGIVGIIYATRVDAFMRTGNRAAAEDASRKASLWSNLAIGIGVVVNVLVTMLTVVYQLKSLNLPAL

SEQ ID NO: 20413 - DNA, 618 bp, Unknown
  Obtained from environmental sample
  misc_feature (1)..(618): n is a, c, g, or t
atgaatttctggaataacaaccatgggagcatcgtggagataaaaggcagctggtatgttttttaccacaggcacacaaacggaaaagagttcagccgtcaggcctgccttgagccggttaagatagaaaaagacggcgtaatacatcaggttgagataagctcctgcgggccaaacggaaaaccgcttgacggacgcggtgaatatcccgcctacatcgcatgcaatctgttttgtatggattttaagggattgtcagttgaacaatactggtcgcggcgcgatattctccttccctttattacgcaggacggaagggacggagatgaggaaaacggttttgttaccaatataaacgacaattacggtattggctttaaatattttgactgcaaggggattaaaaaaatcaaggtaaaaacgcgcggttactgccatggcgcccttcatgttaaaacaagatgggatggagaggctttagcgtgtatagaaattgattccagtaatatttgggcggaattttcttcagatataaaccttcctgacggaatacacgcgctttactttatttataagggtaccggacacgctactatagcttcctttactttggaataa

SEQ ID NO: 20414 - protein, 205 aa, Unknown
  Obtained from environmental sample
  misc_feature (1)..(205): Xaa is any amino acid
MNFWNNNHGSIVEIKGSWYVFYHRHTNGKEFSRQACLEPVKIEKDGVIHQVEISSCGPNGKPLDGRGEYPAYIACNLFCMDFKGLSVEQYWSRRDILLPFITQDGRDGDEENGFVTNINDNYGIGFKYFDCKGIKKIKVKTRGYCHGALHVKTRWDGEALACIEIDSSNIWAEFSSDINLPDGIHALYFIYKGTGHATIASFTLE

SEQ ID NO: 20415 - DNA, 486 bp, Unknown
  Obtained from environmental sample
  misc_feature (1)..(486): n is a, c, g, or t
atgggagtactcttaagccaaaaaatatcgatgtactatgaaaggttcaaagatattgatgtaacatttacaaaagatatgattcatgttactgggcttttaacgcaacaaatacatttaaaatgcggaaacgatttttggccctgcgtgatttatacagcctctttttccggcgcaaaagttgtcgccaatgtaaaaacaggccttctggcaaaactccagacgacaaataactttgtcagccttcgcctttgtttcaagcctgagggagaaaccaacactataacattttttgtcacagcccgcgtcatggcgagtgcgccctatggtaattcgcaggacgttaatatgttcacaatccagtttaccaacaggccgcctgatgagtttatcgaaattatagggcgcattctggacgctaatgtaaattccaaaaaacgtaaagaagaccgcatcccgttgactcctgaaatttacgcanactaa

SEQ ID NO: 20416 - protein, 161 aa, Unknown
  Obtained from environmental sample
  misc_feature (1)..(161): Xaa is any amino acid
MGVLLSQKISMYYERFKDIDVTFTKDMIHVTGLLTQQIHLKCGNDFWPCVIYTASFSGAKVVANVKTGLLAKLQTTNNFVSLRLCFKPEGETNTITFFVTARVMASAPYGNSQDVNMFTIQFTNRPPDEFIEIIGRILDANVNSKKRKEDRIPLTPEIYAX

SEQ ID NO: 20417 - DNA, 648 bp, Unknown
  Obtained from environmental sample
  misc_feature (1)..(648): n is a, c, g, or t
atggttctgcaaggcgaaagagaatttgcaagggataaccgtacattaggtcgctttgacctgacgggaattccggcaaaaccacgcggtatgccgcaaattgaagtttcttttgacatagatgcaaacggcattgtgcacgtgagcgcaaaagacaaggaaactggcaaagaacagagcattaaaattcaatcctcttccggcctaagcgaggatgagataaacaaaatggttaaggatgcagaagccaacgcagacaaagacagaaagtcccgcgaattggtggatgcaaaaaaccaagccgagcaagttgtctatcaggttgaaaaaaccttgaaagagaacgaaggaaaattgcctgccgatgtggtttcgcaagcgaacaccgcagttgcggatttaaaagctgccgcagaaaaagccacgagcaaagaggacattcaaagtgcgctggacaaagcccagagcatagttggtcaaattttgcaagcggctcagatggctggggcaactgctggcaaagctggcggcgagcatcaacacggcgataactgcgatggctcttgcggagacaactgcaaaagtgctggggacaaaaaagacggccccgtagatgcggattatgaagttgttgatgagaagaaatag

SEQ ID NO: 20418 - protein, 215 aa, Unknown
  Obtained from environmental sample
  DOMAIN (2)...(167): Hsp70 protein
  misc_feature (1)..(215): Xaa is any amino acid
MVLQGEREFARDNRTLGRFDLTGIPAKPRGMPQIEVSFDIDANGIVHVSAKDKETGKEQSIKIQSSSGLSEDEINKMVKDAEANADKDRKSRELVDAKNQAEQVVYQVEKTLKENEGKLPADVVSQANTAVADLKAAAEKATSKEDIQSALDKAQSIVGQILQAAQMAGATAGKAGGEHQHGDNCDGSCGDNCKSAGDKKDGPVDADYEVVDEKK

SEQ ID NO: 20419 - DNA, 465 bp, Unknown
  Obtained from environmental sample
  misc_feature (1)..(465): n is a, c, g, or t
atgcccaaagcggtcatattgcgctttcttcttttcatcggaaagcacatcgtaggcctcggcagcttctttgaatttattttccgcttccttatcgccagggtttttgtcgggatggtattttatagcgagctttttataagcccgctttatatcatctgcggaagcgtccttagaaactccgagaacttcatagtaatctttttttgccatttcctatttcttctcatcaacaacttcataatccgcatctacggggccgtcttttttgtccccagcacttttgcagttgtctccgcaagagccatcgcagttatcgccgtgttgatgctcgccgccagctttgccagcagttgccccagccatctgagccgcttgcaaaatttgaccaactatgctctgggctttgtccagcgcactttgaatgtcctctttgctcgtggctttttctgcggcagcttttaa

SEQ ID NO: 20420 - protein, 154 aa, Unknown
  Obtained from environmental sample
  misc_feature (1)..(154): Xaa is any amino acid
MPKAVILRFLLFIGKHIVGLGSFFEFIFRFLIARVFVGMVFYSELFISPLYIICGSVLRNSENFIVIFFCHFLFLLINNFIIRIYGAVFFVPSTFAVVSARAIAVIAVLMLAASFASSCPSHLSRLQNLTNYALGFVQRTLNVLFARGFFCGSF

SEQ ID NO: 20421 - DNA, 879 bp, Unknown
  Obtained from environmental sample
  misc_feature (1)..(879): n is a, c, g, or t
gtgatcccaactccagagcaaattttggccaaaccggaacagataaaagaaacgatgaatatcgcggcttttagaaaagtagccgcagatattttccaagagcttaaaaaagcagatccctctattttgcacatgacaagttcccgttccactggtaattattaccagcagcaatccattgattgcgccattgttgcagcattgctcgctaaacgctacaattttgacccagatgaaattgaagatatgattctagcggttctgcttatggacgtaggtttagcccttttgccagataatcttttaaatcccagcgcaaaactgtctttagaggacttggaacttaaaaaaaagcatcctgattatggttttgaaattttacgggcatgcaatgtttctctgatttgcgcaaatgttgcgttgcagcaccatgaacggcaagatggcggaggttatcctcgcaaacttacaggtagcaataaaccgcctatacgtacaacaggacctgctcctaaaggcaaaataaaccgatatgcggaaattgcttccgttgctttggattatgtttctcttatagccccgccgcctggcatagatgcgcaaacccctataaacagcataaaatttttagtgcggctttctggagcaaagctcaattcctctattgttgaaaccttgcttgcaatgattcctgtgtatagcgcaggcgaccgcataatggtcacttcagacccaagcggcgagttaaaaggctatgtgggcgtggtgctgcgttcaaattcaagggagcaaaacagacctgccatagctttatttancacggcgcaggcgaaaaatcccgctcatacagataaatttgtgggaagagaaagatcttga

SEQ ID NO: 20422 - protein, 292 aa, Unknown
  Obtained from environmental sample
  DOMAIN (55)...(192): HD domain
  misc_feature (1)..(292): Xaa is any amino acid
MIPTPEQILAKPEQIKETMNIAAFRKVAADIFQELKKADPSILHMTSSRSTGNYYQQQSIDCAIVAALLAKRYNFDPDEIEDMILAVLLMDVGLALLPDNLLNPSAKLSLEDLELKKKHPDYGFEILRACNVSLICANVALQHHERQDGGGYPRKLTGSNKPPIRTTGPAPKGKINRYAEIASVALDYVSLIAPPPGIDAQTPINSIKFLVRLSGAKLNSSIVETLLAMIPVYSAGDRIMVTSDPSGELKGYVGVVLRSNSREQNRPAIALFXTAQAKNPAHTDKFVGRERS

SEQ ID NO: 20423 - DNA, 603 bp, Unknown
  Obtained from environmental sample
  misc_feature (1)..(603): n is a, c, g, or t
ttgaaccgcgcggcccttatgtatctggtgggagtttttgccgtactcggtatgctcaaacgggaagcgctttcgctgttgtgtatagcctttctgattcagttggtcattacgcccaaagcggggatttccctgtcgttcatcctttcatacctggcccttgcggggattctgatcatcggtgaatcgcttaacagtattttcaaaggcaaaatgcctgccgcgctcctcttgtccctttccgcctcgctgggagctttcatcgccaccgccggagtaacggcctggtttttcggcatcctgcgtccggtgggcataatagcgagtctggtattgaccccgctgaccacggtctttatgattggttcgatgatatggctcgtcctcaatctggcgctgcccgcgctttcacctttgctgggttatccccttttactgctgtaccggcttatggacagaacggcttttttcgcggcgctgacacccggcatcaaagggcagccctggctgattatatcattgtcgctgttaagcatggcagtgatattctggtttgaataccgccgccgtttggcggcgaatcgcatggaacctttcgcctga

SEQ ID NO: 20424 - protein, 200 aa, Unknown
  Obtained from environmental sample
  DOMAIN (1)...(188): Competence protein
  misc_feature (1)..(200): Xaa is any amino acid
MNRAALMYLVGVFAVLGMLKREALSLLCIAFLIQLVITPKAGISLSFILSYLALAGILIIGESLNSIFKGKMPAALLLSLSASLGAFIATAGVTAWFFGILRPVGIIASLVLTPLTTVFMIGSMIWLVLNLALPALSPLLGYPLLLLYRLMDRTAFFAALTPGIKGQPWLIISLSLLSMAVIFWFEYRRRLAANRMEPFA

SEQ ID NO: 20425 - DNA, 525 bp, Unknown
  Obtained from environmental sample
  misc_feature (1)..(525): n is a, c, g, or t
ttgaatccgggaaagaaaataatatttgtatttttcatgatggcggtttctgtcttttatatcccggcgcagaccaatactaccgataattcatccaattcatcgggcgcgtttgatacaaccggttttccccaatgggtaaaagacctgcgccgctgggagatagtcgcttttggttcagtcccgtttaccatgctttttaccactgccggcatggacatgtaccggtggaacaacgccaacggcatggacatgagcgaagaaggaagacgctatgctccctggcccttaaaaagctccggcgctattcttatggatacccgtgaatttgagaatgttttaaaaattgccgcctgtatatccgtgggtgtcgcgtttaccgatctccttattgttaagataaagcggtacaaggcgcggaaaagggcggagtccctgccggccggcactaccattattaaccgtaaaccctggcctgaggaagcgccctcagaagacagtaataacacggaccaaaaaccctga

SEQ ID NO: 20426 - protein, 174 aa, Unknown
  Obtained from environmental sample
  SIGNAL (1)...(25)
  misc_feature (1)..(174): Xaa is any amino acid
MNPGKKIIFVFFMMAVSVFYIPAQTNTTDNSSNSSGAFDTTGFPQWVKDLRRWEIVAFGSVPFTMLFTTAGMDMYRWNNANGMDMSEEGRRYAPWPLKSSGAILMDTREFENVLKIAACISVGVAFTDLLIVKIKRYKARKRAESLPAGTTIINRKPWPEEAPSEDSNNTDQKP

SEQ ID NO: 20427 - DNA, 714 bp, Unknown
  Obtained from environmental sample
  misc_feature (1)..(714): n is a, c, g, or t
ttggagtacacccgtaaggagaaggggtactccgagcatacggtggaggcttaccgcagcgacatctcgcagttcgtggagttcctgctgcataaggggatagccttgaccgtctccgcggcgatggccaagcagccgctgcgcctcttcctgcacgatgtggggcgcagggggctcaaggcgcgttccgtggcccgcaaggtcgcctccatcaagtcgctgtgccgctactgcgtaaagataggcgccctcaccgtcaatccagccaaggcgctgtcaacacccaagttagacagcccactgccggtcttcctgacggccgcccaggccgagtcgctggaggaggcggcggccggcgacaacgcccgcaaccaagcgatcatcgagttcttctacggcagcgggatacgcctgtcggagctccacggcctgaccttcggaagcatcgacaggcggggcatgaccgtccgcgtaatgggcaagggccggaaagagcggatagtgcccgtcaccgcccaatccgtggacgcgctggacaagtacctgaagggccggcacggcgccccccgcgacccgatcttcgtaaacgcccaaggcgaacgcctgtccgcccgccaaatagagcgaatagtgagcgcctccctatcccaggtctcgcaacaaaaaaagaaagcccccacgtactgcgccactcctacgccacacacctactag

SEQ ID NO: 20428 - protein, 237 aa, Unknown
  Obtained from environmental sample
  DOMAIN (105)...(231): Phage integrase family
  misc_feature (1)..(237): Xaa is any amino acid
MEYTRKEKGYSEHTVEAYRSDISQFVEFLLHKGIALTVSAAMAKQPLRLFLHDVGRRGLKARSVARKVASIKSLCRYCVKIGALTVNPAKALSTPKLDSPLPVFLTAAQAESLEEAAAGDNARNQAIIEFFYGSGIRLSELHGLTFGSIDRRGMTVRVMGKGRKERIVPVTAQSVDALDKYLKGRHGAPRDPIFVNAQGERLSARQIERIVSASLSQVSQQKKKAPTYCATPTPHTY

SEQ ID NO: 20429 - DNA, 591 bp, Unknown
  Obtained from environmental sample
  misc_feature (1)..(591): n is a, c, g, or t
gtgccgctactgcgtaaagataggcgccctcaccgtcaatccagccaaggcgctgtcaacacccaagttagacagcccactgccggtcttcctgacggccgcccaggccgagtcgctggaggaggcggcggccggcgacaacgcccgcaaccaagcgatcatcgagttcttctacggcagcgggatacgcctgtcggagctccacggcctgaccttcggaagcatcgacaggcggggcatgaccgtccgcgtaatgggcaagggccggaaagagcggatagtgcccgtcaccgcccaatccgtggacgcgctggacaagtacctgaagggccggcacggcgccccccgcgacccgatcttcgtaaacgcccaaggcgaacgcctgtccgcccgccaaatagagcgaatagtgagcgcctccctatcccaggtctcgcaacaaaaaaagaaagcccccacgtactgcgccactcctacgccacacacctactagacgccggcgcggacataaaagcgttaaagaactattgggccacgcctccctatcacgacccaagtctatacacctatatcaaagggaacccctactaa

SEQ ID NO: 20430 - protein, 196 aa, Unknown
  Obtained from environmental sample
  misc_feature (1)..(196): Xaa is any amino acid
MPLLRKDRRPHRQSSQGAVNTQVRQPTAGLPDGRPGRVAGGGGGRRQRPQPSDHRVLLRQRDTPVGAPRPDLRKHRQAGHDRPRNGQGPERADSARHRPIRGRAGQVPEGPARRPPRPDLRKRPRRTPVRPPNRANSERLPIPGLATKKESPHVLRHSYATHLLDAGADIKALKNYWATPPYHDPSLYTYIKGNPY

SEQ ID NO: 20431 - DNA, 975 bp, Unknown
  Obtained from environmental sample
  misc_feature (1)..(975): n is a, c, g, or t
ttgtnnnnnnnggttatggcgagtaacttgccaacgctttaccttgaagcgggattcttcgcccgttacggacgttttgtaaacgccgtaaatgacatttcgttttacattgataaaaatgaatcttacggtcttgtcggtgaatccggctgtggaaagacaactacggcgcgaatgttggtgcggatgtacgaagccgattcaggggagattctccactacgaaggagacgacccaacagcgatagccgatttaaaaaaagagagtttaaggcaataccgcgagaaggtacgctatgtttttcaggacccagcaagatcgcttaacccgcgaatgagcgtctatgaagttttagtctcaggttgccgcaaaccgttaaaaaagcgcggggtcagcgagaaggaactccgcgaaaaagccgccgccattttggaagaggttggtcttcagactgccgaccttgaaaaacgcccttcggagttttcgggcggccaacgccagagaatttccatcgcccgcgcgcttttaatggagcctgaagttttaatctgcgacgaagtggtctccgcccttgacgtgtcaattcaagggcagattctcaacttgttactcgacatcagaaaaaagagaaatatgtcctttttattcatagcccacgatttaaaagtggcgtgttacttctgcgaccgcatcggcgtaatgtacaaaggcgaattaatggaagaagcccccgcagagaacctgtatcgggaagctcttaacccatacacaaagcttttattctcctcccgcgccggcactcccgtcacctcacaggcggaggacgcanacaaatccgctccctcccatcctttcgcaatcacgggcgcgtcctgtcctttcngccccagatgcccacaggcaagcgagaaatgtttcccgcgaacaccccgagttgacgctagtgggcgcaggacactctatccgntgttttaa

SEQ ID NO: 20432 - protein, 324 aa, Unknown
  Obtained from environmental sample
  DOMAIN (240)...(305): Oligopeptide/dipeptide transporter, C-terminal region
  misc_feature (1)..(324): Xaa is any amino acid
MXXXVMASNLPTLYLEAGFFARYGRFVNAVNDISFYIDKNESYGLVGESGCGKTTTARMLVRMYEADSGEILHYEGDDPTAIADLKKESLRQYREKVRYVFQDPARSLNPRMSVYEVLVSGCRKPLKKRGVSEKELREKAAAILEEVGLQTADLEKRPSEFSGGQRQRISIARALLMEPEVLICDEVVSALDVSIQGQILNLLLDIRKKRNMSFLFIAHDLKVACYFCDRIGVMYKGELMEEAPAENLYREALNPYTKLLFSSRAGTPVTSQAEDAXKSAPSHPFAITGASCPFXPRCPQASEKCFPRTPRVDASGRRTLYPXF

SEQ ID NO: 20433 - DNA, 660 bp, Unknown
  Obtained from environmental sample
  misc_feature (1)..(660): n is a, c, g, or t
gtggttccgcttatccccctttctgaaatttttatggacgacccggtaaggatgatccgcgccgtaaaatacgcggctttgacgggtttttccctgccgatgaatttaaaattaaaaattaaaaagcagtccaaattactcgcttccgtttcgccgtcccgtctgacagaagaaatttttaaaataatccattctaacaaggcggctttaattgttgacatgcttgataaaatagggttgtactcctaccttcagccggaagcggttaaacttatgcgaaagaacaaagattacagggagcgttatttaaagaccctttccgccctgaacgggaaagaaaactaccggggttacattttaggatcgcttttttacgattaccttgaaagcatcggcgaatggaaacccggagtaattgaaaactacagggagatttttcaaatagcccgctcttttgtcctgccgatgaatcctccgcgttatgaaatggaacacgccctgcgaagcttcctttccgcacgaggcataacaataaaaaggatatacccccacgaaaggcccaaaccgcccgcagaaggagaatccgcgccgtccccgtcaaaaaaacgccgcagaagacgcaagcccaaactaaaacccaatcctgatgctactcagtaa

SEQ ID NO: 20434 - protein, 219 aa, Unknown
  Obtained from environmental sample
  DOMAIN (1)...(94): Poly A polymerase family
  misc_feature (1)..(219): Xaa is any amino acid
MVPLIPLSEIFMDDPVRMIRAVKYAALTGFSLPMNLKLKIKKQSKLLASVSPSRLTEEIFKIIHSNKAALIVDMLDKIGLYSYLQPEAVKLMRKNKDYRERYLKTLSALNGKENYRGYILGSLFYDYLESIGEWKPGVIENYREIFQIARSFVLPMNPPRYEMEHALRSFLSARGITIKRIYPHERPKPPAEGESAPSPSKKRRRRRKPKLKPNPDATQ

SEQ ID NO: 20435 - DNA, 312 bp, Unknown
  Obtained from environmental sample
  misc_feature (1)..(312): n is a, c, g, or t
ttgtatttaggccgtacttatgaacacactatgacaaaaaattatgtcccaatgcttgaaggacgctcatcggtcggacgattagggatttatatacatataaccgcagggtttggagatgtcggttttagtggttattggacattggaaatactatgcatacaaccagtcaaaatatacccaatggtagaaatatgtcaaatttattatcatacaatttctgataattttacaacttataaaagcgggaaataccaaaataatgacggaatacagccaagtctgttttacaaagattttgagaagaaataa

SEQ ID NO: 20436 - protein, 103 aa, Unknown
  Obtained from environmental sample
  misc_feature (1)..(103): Xaa is any amino acid
MYLGRTYEHTMTKNYVPMLEGRSSVGRLGIYIHITAGFGDVGFSGYWTLEILCIQPVKIYPMVEICQIYYHTISDNFTTYKSGKYQNNDGIQPSLFYKDFEKK

SEQ ID NO: 20437 - DNA, 780 bp, Unknown
  Obtained from environmental sample
  misc_feature (1)..(780): n is a, c, g, or t
gtggacgcaggtcatctttctgaaaaacccggcagggccttcgcccgctttgacgactatgtcggcaaatccaatgtgttcagccgcgaagacgccggcacgcccggctgcgccttgagccgatgtctggaaagcggcaaaacggcgagcgcggaaacgcgcatccgtgtgaaagacaaggttctggatgtcggctattcaaacatgcccttgctggatagttcaggaaagatgatcgccgtgctgatgctttttgttgatatgaccgaggtgaaaaacacccaacggcttattgtcgatgtggcgagccacgccgtggatatctcccatcggctggccgttgcgtccgacgagctttccacgcaagtgagccagatgagcgcgggggcggagcggcaacggcagcaggcggcttcaacctctacggctatggaggagatggacggctccgttgcggaagtggcgcgcagcgcgggtgatgccggcgagcaggcgcggctgtcgcatgaaaaggcgtccgacggcgagggagtggtgagaaaggtcatcactgccatcaacgaggtcaaccgggttacccaggaactgcaaaagaacatgtattcgctggggcgacaggctgaatccatcggcggtgtgatgaacgtcatttccgacattgcggatcagacaaacctgctggcgctgaacgcggccattgaggcggcccgggccggcgaggccggacgcggttttgccgtggtggcggacgaagtgcgcaagctggcggataaaccatga

SEQ ID NO: 20438 - protein, 259 aa, Unknown
  Obtained from environmental sample
  DOMAIN (117)...(258): Methyl-accepting chemotaxis protein (MCP) signaling domain
  misc_feature (1)..(259): Xaa is any amino acid
MDAGHLSEKPGRAFARFDDYVGKSNVFSREDAGTPGCALSRCLESGKTASAETRIRVKDKVLDVGYSNMPLLDSSGKMIAVLMLFVDMTEVKNTQRLIVDVASHAVDISHRLAVASDELSTQVSQMSAGAERQRQQAASTSTAMEEMDGSVAEVARSAGDAGEQARLSHEKASDGEGVVRKVITAINEVNRVTQELQKNMYSLGRQAESIGGVMNVISDIADQTNLLALNAAIEAARAGEAGRGFAVVADEVRKLADKP

SEQ ID NO: 20439 - DNA, 894 bp, Unknown
  Obtained from environmental sample
  misc_feature (1)..(894): n is a, c, g, or t
atgtctggtataacccacacggggaaggcggtaatatcgggaaggatctccggcgcggtaatcccagagagcgtggaactgacgattgggggcaggaaacttgcggacgcccctgtgaacaaatacggagtattccgatatgaattatcggataactacgtgcacgagggggagggcgtgggtgtctccgcggccttccagacgctttccggcgagtgggtaacatcacacgagaatttgctgagggtcgtccgtttcgggccggttttggagataaccagccacaaggacggggacgttataaccgaccgaccctggctggaggggcacgcgtacatgttccggccccccgacgagcctgtgaccaggcgggagaaggccttgtaccaggtggccggtgtggagataagccttgacaacggcaaaactttcctgcccgcgaccggcgccggcgactggaagttccggcttgagacaagccagcttgcggagggcatactgccgattatagtgaaggcggatttcaacaacggggagttcgccgttaggcgcatattgctgatagtcgacccgaaaaacccattggttaacgtcataggccctgatgagaactcggggcacaggacaacgttgaaggttttcgggtcgacctttgacgactatgacatggacagcgtggaagtgagcctgcgtcccggggacaagctgggttacacgatgccgagcttcatccaaggtctgtatttggactacagcgtattcgggagcatgatcttctgcgccggccttgggctcacgttttttgacgancatgtgaaggtgcaggcgaacgtgtcgcaggcgccgtcgggccngtattcgggctgggccttttggccggaagcttcctgctaa

SEQ ID NO: 20440 - protein, 297 aa, Unknown
  Obtained from environmental sample
  misc_feature (1)..(297): Xaa is any amino acid
MSGITHTGKAVISGRISGAVIPESVELTIGGRKLADAPVNKYGVFRYELSDNYVHEGEGVGVSAAFQTLSGEWVTSHENLLRVVRFGPVLEITSHKDGDVITDRPWLEGHAYMFRPPDEPVTRREKALYQVAGVEISLDNGKTFLPATGAGDWKFRLETSQLAEGILPIIVKADFNNGEFAVRRILLIVDPKNPLVNVIGPDENSGHRTTLKVFGSTFDDYDMDSVEVSLRPGDKLGYTMPSFIQGLYLDYSVFGSMIFCAGLGLTFFDXHVKVQANVSQAPSGXYSGWAFWPEASC

SEQ ID NO: 20441 - DNA, 900 bp, Unknown
  Obtained from environmental sample
  misc_feature (1)..(900): n is a, c, g, or t
atgttctttgaagatgtggttcttttggacgttactccgctttcccttggcatagaaaccttgggcggagttatgaccaaactgatagaccgcaacaccacaatcccaattcgtaaaagccaagtgttcagcacagcagacgataaccaaagcgcggttacaatacacgttttgcaaggagagagagaattcgcaagggataaccgcacacttggtcgctttgatttaaccggaattccgccaaagccacgcgggttgccgcaaattgaggtttcttttgatatcgatgcaaacggcattgtacacgttagcgcaaaagataaggaaacaggaaaggaacagagcattaaaattcagagttcttcgggacttagcgaagatgagataaacaaaatggttaaagatgccgaagccaatgcggagaatgatagaaaatcccgcgagttggtggatgcaaaaaaccaggctgagcaagttgtttatcaggttgaaaaaactctgaaagaaaacgatggcaaattgccggcagatgcagtttctcaagcaaacgccgctgttgcagatttaaaatccgttgccgaaaaagctacgagtaaagaggaaattcaaagcgcaatggataaagctcagggcgttttgagccaaattttgcaagccgctcaaatgggtggagcccctgatggtcagcaccagcacggagagaactgcgaaggttcttgcggagacgactgcaaaaacaaaagcgaaaaaggcaaagaaggcccggtagatgcagattttgaggttgttaacgaanagaaaataaatatatggcanagcgagactactacgaaagtctgggcgtttccaaagacgcttccgcagacgatattaagcgggcgtataanaagctcgctataa

SEQ ID NO: 20442 - protein, 299 aa, Unknown
  Obtained from environmental sample
  DOMAIN (2)...(222): Hsp70 protein
  misc_feature (1)..(299): Xaa is any amino acid
MFFEDVVLLDVTPLSLGIETLGGVMTKLIDRNTTIPIRKSQVFSTADDNQSAVTIHVLQGEREFARDNRTLGRFDLTGIPPKPRGLPQIEVSFDIDANGIVHVSAKDKETGKEQSIKIQSSSGLSEDEINKMVKDAEANAENDRKSRELVDAKNQAEQVVYQVEKTLKENDGKLPADAVSQANAAVADLKSVAEKATSKEEIQSAMDKAQGVLSQILQAAQMGGAPDGQHQHGENCEGSCGDDCKNKSEKGKEGPVDADFEVVNEXKINIWXSETTTKVWAFPKTLPQTILSGRIXSSL

SEQ ID NO: 20443 - DNA, 318 bp, Unknown
  Obtained from environmental sample
  misc_feature (1)..(318): n is a, c, g, or t
ttgagaaactgcatctgccggcaatttgccatcgttttctttcagagttttttcaacctgataaacaacttgctcagcctggttttttgcatccaccaactcgcgggattttctatcattctccgcattggcttcggcatctttaaccattttgtttatctcatcttcgctaagtcccgaagaactctgaattttaatgctctgttcctttcctgtttccttatcttttgcgctaacgtgtacaatgccgtttgcatcgatatcaaaagaaacctcaatttgcggcaacccgcgtggctttggcggaattccggttaa

SEQ ID NO: 20444 - protein, 105 aa, Unknown
  Obtained from environmental sample
  misc_feature (1)..(105): Xaa is any amino acid
MRNCICRQFAIVFFQSFFNLINNLLSLVFCIHQLAGFSIILRIGFGIFNHFVYLIFAKSRRTLNFNALFLSCFLIFCANVYNAVCIDIKRNLNLRQPAWLWRNSG

SEQ ID NO: 20445 - DNA, 609 bp, Unknown
  Obtained from environmental sample
  misc_feature (1)..(609): n is a, c, g, or t
atggcaaatgctctcactcatggaatgggagtattgtttggcgttgcaagcattccggtgctttctgctataggggcaaaaactggcaatatatctggagttgtgggggcaaccatttatgctttctgttttattatgctattcacattcagcacaatttaccacagcattcaaaatgcagaagcaaaaaaaatactccgcacctttgaccacgtttcaatatattttttaatagccggtacctatacaccatttttgctcatctatatgctggattcttttggcataacattgctctccatacaatggtcgcttgtgctcctcggaattcttttcaagattttttttacggggcgttttaagttcgcaagcaccttagtctatgtggctatgggttggcttttgcttgtgggtggcaacagattttttgtggtgctgccaacacctgtgctggttatggttatgattggcggtgggctttacacacttggttctgttttttatttgaacaaaaaaatttaccatcaccacgctatatggcatttgtttgttttgagtgcggctatttgccattatgtagcggtgttgcttgcggttatattaaaatga

SEQ ID NO: 20446 - protein, 202 aa, Unknown
  Obtained from environmental sample
  SIGNAL (1)...(22)
  DOMAIN (1)...(192): Haemolysin-III related
  misc_feature (1)..(202): Xaa is any amino acid
MANALTHGMGVLFGVASIPVLSAIGAKTGNISGVVGATIYAFCFIMLFTFSTIYHSIQNAEAKKILRTFDHVSIYFLIAGTYTPFLLIYMLDSFGITLLSIQWSLVLLGILFKIFFTGRFKFASTLVYVAMGWLLLVGGNRFFVVLPTPVLVMVMIGGGLYTLGSVFYLNKKIYHHHAIWHLFVLSAAICHYVAVLLAVILK

SEQ ID NO: 20447 - DNA, 729 bp, Unknown
  Obtained from environmental sample
  misc_feature (1)..(729): n is a, c, g, or t
ttgcccggaaaacgggggaaccgaacaacacagggagcagggagaaaggaagacgagggaaaagcgaaggaagagggaacagggagcagggagcagggaacaacagagggaaaaaaaccgcagactgaaaaaccggcggaacagacaaccgcaaagcctcaaactcagccgaagaaaaaatcgcaagacgaaaaaccggcaacgtctgtttctaaacctcaaaaccagacgccggagaaaaaaccgcagaccgaaaaaccggcagcctctgcccaaccttccacaacgcctgtccagccttcttctcctcagcctgtcaaacccgctgaaacgcgtaacagaagcatctatcttatacaggaaacgaacatatcgccggtaaaagtgaacaggagtcttaaagtttctgacacgccactgaaggacagtatcaacgcgctgcttgccggaccaaccgctgatgaaataaggcgcggcatggtaagccttgtgccggaaggctcaaggctcttatcagtgaaaattgaaggaaatacagccgtccttgattttaatcaggagttcaggtacaacacccggggcagtgaaggctgcgccgcccagataaagcaaattgtctggacagccacggagttttccaatgtcaaggacgtgcaatttcttattgagggaaaaaaggtagattttctcagcgaaggcgtgacgattcacagccctatcggcagataa

SEQ ID NO: 20448 - protein, 242 aa, Unknown
  Obtained from environmental sample
  misc_feature (1)..(242): Xaa is any amino acid
MPGKRGNRTTQGAGRKEDEGKAKEEGTGSREQGTTEGKKPQTEKPAEQTTAKPQTQPKKKSQDEKPATSVSKPQNQTPEKKPQTEKPAASAQPSTTPVQPSSPQPVKPAETRNRSIYLIQETNISPVKVNRSLKVSDTPLKDSINALLAGPTADEIRRGMVSLVPEGSRLLSVKIEGNTAVLDFNQEFRYNTRGSEGCAAQIKQIVWTATEFSNVKDVQFLIEGKKVDFLSEGVTIHSPIGR

SEQ ID NO: 20449 - DNA, 840 bp, Unknown
  Obtained from environmental sample
  misc_feature (1)..(840): n is a, c, g, or t
ttgggaattgggaaacaagaagaaacatttccctgggaaggaatgcttccctcggttcttcagcagaacattgccgaatttggcgtcattgaaatggaaggagaaggcagaccggtttctgatatgattaattccatttgggaagctcccgagccaattaccctggtggtccgttgtgtgtttgacgatccctggctggcggcggagtatgtcctttgtaaggagcgcataaaggcggtggtggaaggcagccgtattattgcccggattataagggctgtcaggataatttacgcggtctcttaccgggaaaaggagctgggggaacagtttattgttgaagccgggaactggaatcccccctcaattcatgtttccgtgggctcaaagtatccccaaagaaatcaacgagaattgttatttgcccttcagaattacggaagaaaagaagggatagagctggggtcaattatgattctggggcccgtcaccttagcggcggtctttgacgcggtgaggctgaaaaaacccgcaatggatcggtatatcgcggtagggggttccgcagtcagaaatccccagattatgaaagtccgaatcggtacccgagttggcgaaatctttgcccaatgtggaggatttactaaaaatcccaaacgtattgccacgggtagtcccctattaggccgagccattatggatcttgatgaaccaatcacaaagaccagctatggcctctttgcgtgttccgatgggcccaaagtaggaatggctcccagaggaatctgtattacctgcggagaatgcagggatgtgtgtcctattgggcttgatccctga

SEQ ID NO: 20450 - protein, 279 aa, Unknown
  Obtained from environmental sample
  DOMAIN (33)...(226): Respiratory-chain NADH dehydrogenase 51 Kd subunit
  misc_feature (1)..(279): Xaa is any amino acid
MGIGKQEETFPWEGMLPSVLQQNIAEFGVIEMEGEGRPVSDMINSIWEAPEPITLVVRCVFDDPWLAAEYVLCKERIKAVVEGSRIIARIIRAVRIIYAVSYREKELGEQFIVEAGNWNPPSIHVSVGSKYPQRNQRELLFALQNYGRKEGIELGSIMILGPVTLAAVFDAVRLKKPAMDRYIAVGGSAVRNPQIMKVRIGTRVGEIFAQCGGFTKNPKRIATGSPLLGRAIMDLDEPITKTSYGLFACSDGPKVGMAPRGICITCGECRDVCPIGLDP

SEQ ID NO: 20451 - DNA, 708 bp, Unknown
  Obtained from environmental sample
  misc_feature (1)..(708): n is a, c, g, or t
atgaaaaaattcttaatcacaatatttgttaccgtattttcaattatttcggtcaaatgcgcgccttcccaggatgtattaacggttagaataatagcattcgacgatgcggctacattcagcgatgaggtacttaatgttctattaatcaattataaagattatttagcagataataaaattgatattgatataattaaaatagattggatgtatattgagggacctcttgccgattccatggatgatgagggatatcttaccgatcccatggacgatatattccgccaaaattttgatttaattattgtcatggactatgtagtttacgaaaaaataaaagaatgggcgctaaaataccccgaacaggactttttggtcttggccggtaatgccgacatcaacttgccgaacgtaatggaaattgaatttgccgtacatgaaggctcatatctggttggcgcggcagcggctctcaaggcggtagaaagtaacaatgaaacatacaaatttggatttatgagcagttttaataattatgtaaccggtccgtataaagccggctttgttcaggntgtactttcagtattgcctcanagcgtatttgtcgaatattatctttacgaatgggagacccgaacatcatttacgtcagcgcgggaaagtttgatctggatgtgttcgcgatctattgtcctgacgcggtga

SEQ ID NO: 20452 - protein, 235 aa, Unknown
  Obtained from environmental sample
  SIGNAL (1)...(19)
  misc_feature (1)..(235): Xaa is any amino acid
MKKFLITIFVTVFSIISVKCAPSQDVLTVRIIAFDDAATFSDEVLNVLLINYKDYLADNKIDIDIIKIDWMYIEGPLADSMDDEGYLTDPMDDIFRQNFDLIIVMDYVVYEKIKEWALKYPEQDFLVLAGNADINLPNVMEIEFAVHEGSYLVGAAAALKAVESNNETYKFGFMSSFNNYVTGPYKAGFVQXVLSVLPXSVFVEYYLYEWETRTSFTSARESLIWMCSRSIVLTR

SEQ ID NO: 20453 - DNA, 807 bp, Unknown
  Obtained from environmental sample
  misc_feature (1)..(807): n is a, c, g, or t
ttgtcagggctggtggaaactgttacntgcggcgcgccgcttgctataatatcncgcaacaaagacgcncgctctgctgattaccgagaattgcgggatattccgcgtccgtcccacgcagattttgccgcgcacataaagtacggcggatttcaggacgtggcgggtggtggacatttttccggcagactgaccgcgccgttgtgcgccgccggcgggatatgtttacaaatattgcgcggcctgggaatccgcattggcgcgcatatattgcggatcggcagcgcagaggacgattcttttgaccctgtgggtgtgtcaagcgcggacttcgaagcaatcctaaaaaaccctctgcccgtactgaatcgtgaagcgggcgaatccatgaaaaagcaaattctggaagcgcgggaaaagggtgactcggttggaggcattgtagaggctgcggcaatcggcctgcctgttgggttaggcgacccgatattcgagggtattgagaaccgaatcgccgggattgtcttcggcataccgggcgttaaaggcattgaattcggaagcggattcgctattgctggacgcaggggatcggaaaacaatgacagcttctacatggacggggaaaaagtaaaaacgcgcacaaacaactcgggcggaatattgggcgggataacaaacggcatgcccgtcctcttccgcgcggcgttcaagcccacgccgtccatcggcatggaacaggacagcgtcagcctgtcacaggcgaaaaacgccgtttgcagggaagggccgacagatccctgctag

SEQ ID NO: 20454 - protein, 268 aa, Unknown
  Obtained from environmental sample
  DOMAIN (1)...(268): Chorismate synthase
  misc_feature (1)..(268): Xaa is any amino acid
MSGLVETVTCGAPLAIISRNKDARSADYRELRDIPRPSHADFAAHIKYGGFQDVAGGGHFSGRLTAPLCAAGGICLQILRGLGIRIGAHILRIGSAEDDSFDPVGVSSADFEAILKNPLPVLNREAGESMKKQILEAREKGDSVGGIVEAAAIGLPVGLGDPIFEGIENRIAGIVFGIPGVKGIEFGSGFAIAGRRGSENNDSFYMDGEKVKTRTNNSGGILGGITNGMPVLFRAAFKPTPSIGMEQDSVSLSQAKNAVCREGPTDPC

SEQ ID NO: 20455 - DNA, 618 bp, Unknown
  Obtained from environmental sample
  misc_feature (1)..(618): n is a, c, g, or t
ttgtatgacaagaaagatttataccagaaggagaggatatctattcccaagccagtatttatagtgctgtacaacggcgaggaggatatagcggattttgaagagtaccttttatcggatttatacaaggagttcgacatatcgaaagacccgttatttttggaattaaaagtgcaggtgcgcaacataaacaaaggtcacagcgtagatatagtggatcacagtcctttgctccgcgattacgtggcctttgtagaggaggtgcgggaaatcaacagggaggagggtatgacaccggagaaggcgatggagagggcgatagacagctgtattaaaaaagggatattaatcgatttcctaaatcatcataaacaggagattatgaaaatgcttgtaacagaatgggattacgacttagaaaaggaagtcttaagagaagaagcccatgagaaaggccggggggaaggccgggaggaagaacggcgtaaaaacattcgggatttgtaccggataggtgtcggtattgagaccattgttaaagcctttgacctctcggagcgggaagtcaaaaagattttggggctgcaagcaggaggttatgaaaatgctcgtaactga

SEQ ID NO: 20456 - protein, 205 aa, Unknown
  Obtained from environmental sample
  misc_feature (1)..(205): Xaa is any amino acid
MYDKKDLYQKERISIPKPVFIVLYNGEEDIADFEEYLLSDLYKEFDISKDPLFLELKVQVRNINKGHSVDIVDHSPLLRDYVAFVEEVREINREEGMTPEKAMERAIDSCIKKGILIDFLNHHKQEIMKMLVTEWDYDLEKEVLREEAHEKGRGEGREEERRKNIRDLYRIGVGIETIVKAFDLSEREVKKILGLQAGGYENARN

SEQ ID NO: 20457 - DNA, 387 bp, Unknown
  Obtained from environmental sample
  misc_feature (1)..(387): n is a, c, g, or t
gtgctcgcgggtctggggcataaccgagtccggggcggaaacgaccagcaccgcgccgtccatctgcgccgcgccggtgatcatgtttttgatgtagtcggcgtggcccggacagtcgatgtgggcatagtgcctcttgttggactggtattcaaggtgtctggtattgatggtgataccgcgggctttctcttccggcgcgttatcaatttgatcataagtcataaccttgtcgccgaattttttggcgcagtacattgtgatagccgcggaaagcgtggttttaccatggtcgacgtggccgatggttccgacattcatgtggattttattccgggtaaatttgtcttttgccattttgtgtcctccttaatactagacacataa

SEQ ID NO: 20458 - protein, 128 aa, Unknown
  Obtained from environmental sample
  misc_feature (1)..(128): Xaa is any amino acid
MLAGLGHNRVRGGNDQHRAVHLRRAGDHVFDVVGVARTVDVGIVPLVGLVFKVSGIDGDTAGFLFRRVINLIISHNLVAEFFGAVHCDSRGKRGFTMVDVADGSDIHVDFIPGKFVFCHFVSSLILDT

SEQ ID NO: 20459 - DNA, 621 bp, Unknown
  Obtained from environmental sample
  misc_feature (1)..(621): n is a, c, g, or t
atgttagggctatnggccaggaaattgggaatgactcaggtcttcgacggagaaggcaacatgtttccggtaacggtaatgagtgttgagccgaacgttgtcattgccaaaaagacagaagagaaagaccattacaatgccgtggtagtcggcgtgggcgacaagaagaaaagccgggtcacaaaaccatatgccggccagtttcccgaaagcatcgctcccaaaaaacgccttcaggaactgcgggactttgaaaaggatcccgctgtgggcgacaccttgggagttgaaacgctggaaggggtgcgctatgtcgacgtatccggcgtttccaaaggcaaaggctttcagggcgttgttaagcgatatggttttggcggcgggcggaaaacccacggctcgaaattccatcgcgagcccggttcgacaggccagagcacttacccgcacaggaccttcaagaacacgaagctccccggacggatgggccgcgagaaggtgacggtcctcagcctgagggtagagaaactggatgccgagaaacagcttattctggtccgcggatcggttcccgggaacaatggcggccttgtgctcgtgcgcgcggcggtgaaaaggtaa

SEQ ID NO: 20460 - protein, 206 aa, Unknown
  Obtained from environmental sample
  DOMAIN (8)...(201): Ribosomal protein L3
  misc_feature (1)..(206): Xaa is any amino acid
MLGLXARKLGMTQVFDGEGNMFPVTVMSVEPNVVIAKKTEEKDHYNAVVVGVGDKKKSRVTKPYAGQFPESIAPKKRLQELRDFEKDPAVGDTLGVETLEGVRYVDVSGVSKGKGFQGVVKRYGFGGGRKTHGSKFHREPGSTGQSTYPHRTFKNTKLPGRMGREKVTVLSLRVEKLDAEKQLILVRGSVPGNNGGLVLVRAAVKR

SEQ ID NO: 20461 - DNA, 681 bp, Unknown
  Obtained from environmental sample
  misc_feature (1)..(681): n is a, c, g, or t
gtgcgcgagcgcacccaggaactctcgctggtcaaggaagtcaccattgaggccctggcgaatctggccgaatggcgcgaccctgaaaccggatcgcacatcaagcgcacccagaactatgtccgcgctctggcccatgctntgcggaaaaatccggcgtacgcggatcagtttgacgacgccgcgattgagctgttttaccaatccgctcccctgcacgatgtgggcaaggtgggcattccggactcgattctgctcaagcccgataccctgacctatgacgagttcgagatcatgaaaacccacaccacgcgcgggcgcgacgccttggacatggccgagcgcaagctcggcggcaactcctttctgcatctggcccgggaaatagcttacggccaccacgaacactgggacggcaacggctatccccagggtctgaagggcacacaaacgcccttgcccgcgcgcctcatggccgtagccgatgtgtacgacgctttgaccagcaagcgggtgtacaaacccgccctgccccatgaaaaagccctgaacatcattgtgcaaggccggggcacccattttgatccggacattgttgacgccttgatctcggctcaggaggagttccgggagattggccagcgcttcagggaaagcgacgtgagcaaacgcgcggtctga

SEQ ID NO: 20462 - protein, 226 aa, Unknown
  Obtained from environmental sample
  DOMAIN (30)...(167): HD domain
  misc_feature (1)..(226): Xaa is any amino acid
MRERTQELSLVKEVTIEALANLAEWRDPETGSHIKRTQNYVRALAHAXRKNPAYADQFDDAAIELFYQSAPLHDVGKVGIPDSILLKPDTLTYDEFEIMKTHTTRGRDALDMAERKLGGNSFLHLAREIAYGHHEHWDGNGYPQGLKGTQTPLPARLMAVADVYDALTSKRVYKPALPHEKALNIIVQGRGTHFDPDIVDALISAQEEFREIGQRFRESDVSKRAV

SEQ ID NO: 20463 - DNA, 555 bp, Unknown
  Obtained from environmental sample
  misc_feature (1)..(555): n is a, c, g, or t
gtggccgcgcttgaggtcaacatttcctgccccaatgttcaggaaggcggcgcgcttttcggccaggacccagtccaggccgccgccgtcaccagcgccgtgcgcgcccgggccggagatttgcccgtactggtcaagctttcgcccaatgtcacggacatcgccctcatcgcccgcgccgtggaagacgccggcgcccatgccgtgtgctgcatcaatacgcttcaaggcatggccgttgatctcgccacacgcaagccgcgcctgtccaccgtaatcggcggcctgtccgggccggccatcaagcccgtggccctgcgctgcgtctggcaggtcagccgggcggtcaaaatcccggtcatcggcatcggcggcatcgtgaacgccgaggatgccctggaattcatcctggcgggcgcccatgccgtgcagatcggcagcgccagcttcatgcgtcccgacgccgcctttgcctgcgcggctgatctgcccgttgcctgcgcccgttacggcattacaagccttgacgcctggcggggttccttggcatactga

SEQ ID NO: 20464 - protein, 184 aa, Unknown
  Obtained from environmental sample
  DOMAIN (1)...(167): Dihydroorotate dehydrogenase
  misc_feature (1)..(184): Xaa is any amino acid
MAALEVNISCPNVQEGGALFGQDPVQAAAVTSAVRARAGDLPVLVKLSPNVTDIALIARAVEDAGAHAVCCINTLQGMAVDLATRKPRLSTVIGGLSGPAIKPVALRCVWQVSRAVKIPVIGIGGIVNAEDALEFILAGAHAVQIGSASFMRPDAAFACAADLPVACARYGITSLDAWRGSLAY

SEQ ID NO: 20465 - DNA, 855 bp, Unknown
  Obtained from environmental sample
  misc_feature (1)..(855): n is a, c, g, or t
ttggcggagacggttccttatgtggacgccgacagcggggaaattgttatttcatattcgcgggaactctttgacagttcggaaaaatctctcggagtgctggctatcgacgtgttgttaaatcagataggtgaatatgtggaaactatacgcctttcggaaacgggttacggaatattgctgaaccagaattttgagataatagcctatcccgacgacgagctcaagggtaaacggctggattcaatcaacggcgattacgcgaagattcatgaaaaactcgcgagcggcaagcctgtagtatccctcagcgtgattgattccgaaaatattaaacacatagcgtttttcaaacggattcccaacggatggtatataggttccatgactccgtacaatgttttttacagggatacatatataatggcccttattctggcgctggtaggtttcgcgctgatgtttgtgctttcccttcttgttttgcgccagcaccgacgcatagaaaattacaccgacgctgtcatggaattaaacgaggcaagcaggcgttttgtgcccactcaattcgttaaaataataggcgttgaaaacatcaccagcctgaagctgggggattccgtccagaatgtcataaccgtaatgttttttgacatacgttttttttccgttcattcccagatgatgtccacaaacgagacttttgattttgtaaacaaagtattcgggcttgccggggcaattatccggaaacacaacggttttgttgataaatatatgggcgacgccgcgatggttctctttgagcgatcagcaaacgcggtgagggcgggcataaaattttacgtacggtaa

SEQ ID NO: 20466 - protein, 284 aa, Unknown
  Obtained from environmental sample
  DOMAIN (4)...(83): Cache domain
  misc_feature (1)..(284): Xaa is any amino acid
MAETVPYVDADSGEIVISYSRELFDSSEKSLGVLAIDVLLNQIGEYVETIRLSETGYGILLNQNFEIIAYPDDELKGKRLDSINGDYAKIHEKLASGKPVVSLSVIDSENIKHIAFFKRIPNGWYIGSMTPYNVFYRDTYIMALILALVGFALMFVLSLLVLRQHRRIENYTDAVMELNEASRRFVPTQFVKIIGVENITSLKLGDSVQNVITVMFFDIRFFSVHSQMMSTNETFDFVNKVFGLAGAIIRKHNGFVDKYMGDAAMVLFERSANAVRAGIKFYVR

SEQ ID NO: 20467 - DNA, 804 bp, Unknown
  Obtained from environmental sample
  misc_feature (1)..(804): n is a, c, g, or t
atggtgtttgtcaccgccggcatgggcggcggcaccggcaccggagccgccccggtaatcgccaagatcgccagcgatcacgggtcgctgactgtcggcgtggttacaaagccctttgagtttgagggcgaggcgaaaatgcagaaagccgaagaggggatcaaaaaactgcgagagtttgttgacacccttataataattcccaacgagaatctttttaagctggttgacagtaaaacgtcctcgcttcacgcgtataagctggcggacgatgtgcttcgtcaggcggtgcaggctataaccgatctgattaccaagacaggtttaataaatattgatttcgctgacgttcagacgactatgaaagggcagggggacgcccacatgggaatagggattggcaggggggacaaccgcgccaaagccgccgccgacgacgccattgacaacccccttctggaagacaccggcatcgagggcgcgacacggctcctggtcaatatctccggccccgaggatgtctctatgctggaggttaaggatatcatgatgactatcagggcaaaggcggtccccaatgttgaaataattttcggccagttggttgatcccgaactgggggatgatatcaaggtaaccgtcatagccaccggcttcaatgccaaagccgtgtcatcggcaaagagctccgacccggtcaggaaagcggaaaccgcgccgggcgatgtccttagccttgaacatttcaacagaatacggcagggttcaaaatcccccagtatgatcattatgtcggatatgtaa

SEQ ID NO: 20468 - protein, 267 aa, Unknown
  Obtained from environmental sample
  SIGNAL (1)...(21)
  DOMAIN (1)...(108): Tubulin/FtsZ family, GTPase domain
  misc_feature (1)..(267): Xaa is any amino acid
MVFVTAGMGGGTGTGAAPVIAKIASDHGSLTVGVVTKPFEFEGEAKMQKAEEGIKKLREFVDTLIIIPNENLFKLVDSKTSSLHAYKLADDVLRQAVQAITDLITKTGLINIDFADVQTTMKGQGDAHMGIGIGRGDNRAKAAADDAIDNPLLEDTGIEGATRLLVNISGPEDVSMLEVKDIMMTIRAKAVPNVEIIFGQLVDPELGDDIKVTVIATGFNAKAVSSAKSSDPVRKAETAPGDVLSLEHFNRIRQGSKSPSMIIMSDM

SEQ ID NO: 20469 - DNA, 822 bp, Unknown
  Obtained from environmental sample
  misc_feature (1)..(822): n is a, c, g, or t
atgaccctggcctgcgaagcgcttggggggggagacgcggccctgccccttgccccgttagttgaattttgccacaacgccagccttatccatgatgatatagaagacaactccaacgagcgccggggcaagccctcggtgcatttgctccacggcgttgacgtggcgatcaacgcgggcagttttctttacttcctcccgcttgcctgcatagattcatggtcacaggccgcgcattacggcagagatgcctactcattgtgggcggcctatctgcgcaagctccatttggggcaggcgatcgacattcactggcaccgcaatttcgatatagtcccctctgttgatgaataccttgccatgtgcgccctgaaaaccggatgcctcgcgcgctttgccgtggagttgggagctttggctgcaagaaccacaggccgtgacacgggtaaggcagggaccatgggagaggcggcgcctctgggagaggcggcggaaaaactcggcattggcttccagatacttgacgacgtgaaaaacctgaccacgggcatacccggcaaacagcggggcgatgatattgttgaaggaaaaaagagcctgcctgtacttttgtttttgagccggtatcctgaaaagaaggggatggtctgccgttgttttatggttgcaggatcggacggagcgggcgcgccggaaacggaagagttaatacaggcgcttgcggcttgcggcgttattaaagaagccggggaacagggcaaggcgcttatcgccggagcgcggacggtttttgagaaaacagcgcgcttcttgccggcctga

SEQ ID NO: 20470 - protein, 273 aa, Unknown
  Obtained from environmental sample
  DOMAIN (1)...(247): Polyprenyl synthetase
  misc_feature (1)..(273): Xaa is any amino acid
MTLACEALGGGDAALPLAPLVEFCHNASLIHDDIEDNSNERRGKPSVHLLHGVDVAINAGSFLYFLPLACIDSWSQAAHYGRDAYSLWAAYLRKLHLGQAIDIHWHRNFDIVPSVDEYLAMCALKTGCLARFAVELGALAARTTGRDTGKAGTMGEAAPLGEAAEKLGIGFQILDDVKNLTTGIPGKQRGDDIVEGKKSLPVLLFLSRYPEKKGMVCRCFMVAGSDGAGAPETEELIQALAACGVIKEAGEQGKALIAGARTVFEKTARFLPA

SEQ ID NO: 20471 - DNA, 660 bp, Unknown
  Obtained from environmental sample
  misc_feature (1)..(660): n is a, c, g, or t
ttggaaacagctgaaattttagtaaaatctggacttaatccctgtgtattaaatttagcaagccgtcaaaatccgggcggtggggtgattaacggcgcgggagcgcaggaagaaaatatattcagacgatctaacttgtttttgtcgttatatcaatttgctccttacgcaagtgaatatggaataaaaaaacatgaaaaaagttatccgcttgatagaaataccggcggcatatactctgcggatattacggtatttcgcggttcagaaaaaaacggatattgtttattgagaaaaccttatactgtttcatttgtcagtgttccggcaataaaagcgcctgaattaatagaacggaatggaaatctttatatagcagataatctcgtggaacctacaaaagaaaaaatacggacaatattcagaattgcgggtaaatataaacatgattgtctggtattaggcgcatttggatgcggagcatttgcaaatccgccgaatcacatggcgcaattattcaaagaagtttttcttgaaaaagaatttatcaatagatttaaatttgttgttttctcaatatttgaagatcataatagtaataggcggcataatccaaatggtaatgttttaccgtttttggaagtattcaataagttttaa

SEQ ID NO: 20472 - protein, 219 aa, Unknown
  Obtained from environmental sample
  misc_feature (1)..(219): Xaa is any amino acid
METAEILVKSGLNPCVLNLASRQNPGGGVINGAGAQEENIFRRSNLFLSLYQFAPYASEYGIKKHEKSYPLDRNTGGIYSADITVFRGSEKNGYCLLRKPYTVSFVSVPAIKAPELIERNGNLYIADNLVEPTKEKIRTIFRIAGKYKHDCLVLGAFGCGAFANPPNHMAQLFKEVFLEKEFINRFKFVVFSIFEDHNSNRRHNPNGNVLPFLEVFNKF

SEQ ID NO: 20473 - DNA, 363 bp, Unknown
  Obtained from environmental sample
  misc_feature (1)..(363): n is a, c, g, or t
atggagcaaaaagcctttgaaatggcggggaaaaattactccgttccggggcaaagggcagaggattttttggcaaaaaaaggcggggttttatgggatttaatgccagagaacataagcaaaaatttagaggctgctctttatgaatttgagaaaaaaatgccaggttttataaaaaacggtttgttgctcgcaccggaaaccaggacttcttcaccgcttagaattgttcgcaaagagagtggtgaatctgtgtctgttgctggcatttatcctgttggcgaaggggcaggttactcgggtggaattttgacgagtgcggcagatggggtgagacttgcattttctatgttatggcaatga

SEQ ID NO: 20474 - protein, 120 aa, Unknown
  Obtained from environmental sample
  misc_feature (1)..(120): Xaa is any amino acid
MEQKAFEMAGKNYSVPGQRAEDFLAKKGGVLWDLMPENISKNLEAALYEFEKKMPGFIKNGLLLAPETRTSSPLRIVRKESGESVSVAGIYPVGEGAGYSGGILTSAADGVRLAFSMLWQ

SEQ ID NO: 20475 - DNA, 843 bp, Unknown
  Obtained from environmental sample
  misc_feature (1)..(843): n is a, c, g, or t
atggatatttcccttttggcttcttttagcaagggaaatgaacacaaaaacataagcgaaatgctagagcttgcaaatgggggtgcttatggttttggagatggtggcattcccgttggcaacctgcgttttttgagaatggtttttgaatatgggggggcaacaggaaaaaccttttatatgcaccctttggaacctgatttgtgcaacactggttttgtgaacgaagggctttattcagatatgctaggttttaagggaattcccgaacaggcagaaacagttgtggtttacagaatgctggaattttccagatggtttaaagtacctgtgcattttagagaaatttcttgtgaaaaaagtttggagctaattgaaatatcaagaaatagaaaatccaatgtaagctgcgatgttgggatttatcatcttttatttgatgattccagtttagtggaactttcttctgaatatagtttttcttctccgctgagaacccaaaaggacaaagaagccttgtggaaagggcttttagacggcaatgtgcaacatataagctgcaaccatttccctgtgcgtaagcaagacaagcaaacaaattttgaagatgcaatccctggtgctgtttctttggaaattgccctttccgctctgtggcatatcacggcagaaaaaactggagggcatcctgaacgtttgttggattggctgagtgctggtgttttggagcagggcaagccagcgaatttaattctctttaatcccgatttggaatgggaagtaagtgaaaatacatttgcaggcccagtgtgcaattctcctctttttggggcaacgttgtag

SEQ ID NO: 20476 - protein, 280 aa, Unknown
  Obtained from environmental sample
  misc_feature (1)..(280): Xaa is any amino acid
MDISLLASFSKGNEHKNISEMLELANGGAYGFGDGGIPVGNLRFLRMVFEYGGATGKTFYMHPLEPDLCNTGFVNEGLYSDMLGFKGIPEQAETVVVYRMLEFSRWFKVPVHFREISCEKSLELIEISRNRKSNVSCDVGIYHLLFDDSSLVELSSEYSFSSPLRTQKDKEALWKGLLDGNVQHISCNHFPVRKQDKQTNFEDAIPGAVSLEIALSALWHITAEKTGGHPERLLDWLSAGVLEQGKPANLILFNPDLEWEVSENTFAGPVCNSPLFGATL

SEQ ID NO: 20477 - DNA, 855 bp, Unknown
  Obtained from environmental sample
  misc_feature (1)..(855): n is a, c, g, or t
atgaaaaagaaaggcggcgtgcttattaccgtccggaagaacgacaaggcggaaattatccgcgtggcgaaaaaaatggtacaggcgggattttccctgtacgcgacgcggggcaccgcccgttttcttgcggaaaggggcttcgatgtccaatccgtggaaaaaatccgggattgcgctgacaataacgcggcgacgcttcttgaaagcggcaagatcagttacatcatctccacgtcaaagaaaggcagggatcccgcccttgacgatgtgaagattcgcagaaaagcctgctctcttggcgttccctgccttacctcggtcgatacggctaacgcgctggcggacggtttgctttcaggctacagcgaaaccaataccgaattaatcgacattaataaccttaggactgaccgcacaaggcttgctttcacaaagatgcagagctgcggcaatgattatatttacttcaactgctttgacacggaaatcgattcgcccgaatcgctgtccgtgtttttgtccgacaggcataccggcgttggcggcgacggcgttgtgctgatactgcgatccgccattgccgatgcgagaatgcggatgttcaacctcgatggcagcgaaggcagcatgagcgggaacgccatccgctgtgtggcaaaatatctctatgacaacggtattgtcaaaaagcgcgatatgcggatcgagaccaaaagcggggtgaagaacctctatctatccacgcggaacggggtggtatcatccgtcaaggttgatatgggtatcgccaaactgcgccccgaancaatccctgtgaatctggggggagaaagcgtgatcgggcaaaagtga

SEQ ID NO: 20478 - protein, 284 aa, Unknown
  Obtained from environmental sample
  DOMAIN (18)...(106): MGS-like domain
  misc_feature (1)..(284): Xaa is any amino acid
MKKKGGVLITVRKNDKAEIIRVAKKMVQAGFSLYATRGTARFLAERGFDVQSVEKIRDCADNNAATLLESGKISYIISTSKKGRDPALDDVKIRRKACSLGVPCLTSVDTANALADGLLSGYSETNTELIDINNLRTDRTRLAFTKMQSCGNDYIYFNCFDTEIDSPESLSVFLSDRHTGVGGDGVVLILRSAIADARMRMFNLDGSEGSMSGNAIRCVAKYLYDNGIVKKRDMRIETKSGVKNLYLSTRNGVVSSVKVDMGIAKLRPEXIPVNLGGESVIGQK

SEQ ID NO: 20479 - DNA, 429 bp, Unknown
  Obtained from environmental sample
  misc_feature (1)..(429): n is a, c, g, or t
gtgttcgacgagctcggcgactgggcaatgtgccagggtccgtcttcctatcgttggggcggcacatgggttggcgcatacaaaggaacaaagaatgtcgcgacagctaaagaatttatccgctacgtagccacagacgacggcttcctcgaagcatgggcgaaagagaccggcgacgttgtaagcaacctcaatgttatcaacaaaattaaagatacctataccgagccttatctcggcggacagaaccactatgcggaatttgccgaaatggcgaaaaacgttaacggcagacttcttcagggaagcgacgaagccattgaagctatgtttgatgaagcggtatcagctttcgtaaacggcgaaaaatccaaagctcaggctcttgcggatttcagaaaacaagctgaatctcagttcatcagataa

SEQ ID NO: 20480 - protein, 142 aa, Unknown
  Obtained from environmental sample
  misc_feature (1)..(142): Xaa is any amino acid
MFDELGDWAMCQGPSSYRWGGTWVGAYKGTKNVATAKEFIRYVATDDGFLEAWAKETGDVVSNLNVINKIKDTYTEPYLGGQNHYAEFAEMAKNVNGRLLQGSDEAIEAMFDEAVSAFVNGEKSKAQALADFRKQAESQFIR

SEQ ID NO: 20481 - DNA, 420 bp, Unknown
  Obtained from environmental sample
  misc_feature (1)..(420): n is a, c, g, or t
atgtcagaagatattattggtcaggaaacagaaacacagcctggcgaagaaagagaaaaagatttacaaaataatatatctcttaataataaaaaattaaaacaacatagaaaatcaatcggtcatgaagcgatgacaaatcgctggggttatttttttgtcgcgcctttcatagttgtattctgcgtatttaacctgtggcctactttatacactttcatccttagttttaccaatctggaaggtttacggacagattttaaatttaacggtcttgtaaattatataaaattggttaaagaccagtatttctggggcgctatgggaaatacctttattatctggacttttaactttatcccgcagttaggccttgccctgatactttccatctggncttcagacatccggcttaactga

SEQ ID NO: 20482 - protein, 139 aa, Unknown
  Obtained from environmental sample
  misc_feature (1)..(139): Xaa is any amino acid
MSEDIIGQETETQPGEEREKDLQNNISLNNKKLKQHRKSIGHEAMTNRWGYFFVAPFIVVFCVFNLWPTLYTFILSFTNLEGLRTDFKFNGLVNYIKLVKDQYFWGAMGNTFIIWTFNFIPQLGLALILSIWXSDIRLN

SEQ ID NO: 20483 - DNA, 363 bp, Unknown
  Obtained from environmental sample
  misc_feature (1)..(363): n is a, c, g, or t
atgtttcttcgttctttatccgtacctgtaaacacaataaacggggtaggctcttccgcggcgcaaaaacttgcgcggcttggaatacgcgccgccgcggatcttcttcttcactatccgcgcgactgggaagatcgctcgaacattgtgccgttaaaagcgtatagaaacggcaaagtgtgtaccgtcgttaccgtttttgcgcgggaatggattggctacggcagaatgagaacgccgaaaatttatatagaagacgaaaacactcaggcggcgcttgtatgttttaaccgtccgtggttagacaaacagcttgttacagggcaaaaatatatggtttccggccgattctactataaatag

SEQ ID NO: 20484 - protein, 120 aa, Unknown
  Obtained from environmental sample
  misc_feature (1)..(120): Xaa is any amino acid
MFLRSLSVPVNTINGVGSSAAQKLARLGIRAAADLLLHYPRDWEDRSNIVPLKAYRNGKVCTVVTVFAREWIGYGRMRTPKIYIEDENTQAALVCFNRPWLDKQLVTGQKYMVSGRFYYK

SEQ ID NO: 20485 - DNA, 585 bp, Unknown
  Obtained from environmental sample
  misc_feature (1)..(585): n is a, c, g, or t
atgcgtttatttttggatttgggctgcaataaccggtattatttcataattattttgtacgaaataattttatcatgntttggaancatgtcgggcggaaaanctgttcaaattataaataaaattacagatccgtatctgactgggtggagacaaaaattaaatttaagcataggcgcttttgatttttcggtaataccggcagtgntatttctttcctttactcaaaatttatttcattctctttcaaatgcggaaaggataactatcggctttattcttgcgcaaataatattggcaatatggaatattttttcttttattataggattttttattatcgtaattatcatacgccttataggatattttattaactgcaatatatacagccctttctggagagttattgattctatcacacagccggttttatacagaatgaacagaatatttttcggcaagaaaataggaagttatttaacagggataattttatctttattgcttttaattataactcttgtcggcggaaggcttattgtatttttgctttccggtcttctttataaactgcctatataa

SEQ ID NO: 20486 - protein, 194 aa, Unknown
  Obtained from environmental sample
  misc_feature (1)..(194): Xaa is any amino acid
MRLFLDLGCNNRYYFIIILYEIILSXFGXMSGGKXVQIINKITDPYLTGWRQKLNLSIGAFDFSVIPAVXFLSFTQNLFHSLSNAERITIGFILAQIILAIWNIFSFIIGFFIIVIIIRLIGYFINCNIYSPFWRVIDSITQPVLYRMNRIFFGKKIGSYLTGIILSLLLLIITLVGGRLIVFLLSGLLYKLPI

SEQ ID NO: 20487 - DNA, 396 bp, Unknown
  Obtained from environmental sample
  misc_feature (1)..(396): n is a, c, g, or t
atggaagaaatattgaaatttttacaggatgcccgcacgttttttctcgccactgtcgagaaggatcaacctcgggtgcggcctatgggctttgtcatgatttacgagggaaagctcagtttttctacgaacaataaaaaagacatgtataaacaaatcaaagccaacccaaagattgagatttgcgccagcacccctgatggaaaatggctcagggtatgcggcaatgcggccttcaatcccaacagagccgcgaaagaaaaggcattggaaattatgccggctctgaaaaaaatgtactcccctgacgacggcatttttgagattttccattttgaaaatgcccttgcggttttcagcgatatgcagggcgggaagaaagaagtaaagatataa

SEQ ID NO: 20488 - protein, 131 aa, Unknown
  Obtained from environmental sample
  DOMAIN (1)...(84): Pyridoxamine 5'-phosphate oxidase
  misc_feature (1)..(131): Xaa is any amino acid
MEEILKFLQDARTFFLATVEKDQPRVRPMGFVMIYEGKLSFSTNNKKDMYKQIKANPKIEICASTPDGKWLRVCGNAAFNPNRAAKEKALEIMPALKKMYSPDDGIFEIFHFENALAVFSDMQGGKKEVKI

SEQ ID NO: 20489 - DNA, 879 bp, Unknown
  Obtained from environmental sample
  misc_feature (1)..(879): n is a, c, g, or t
atgccgacccactataacgaaccgatggatatcgcctcatcatccctaccgagggaaggaacgtattcgggcggcgaggcaaatttgctgaaagggctgaaaaatttaataagcctgtacacccgcagggtaatcggcatttgtacgacctgccttgccgaaaccatcggagaggataccggcgctatcgcgaaaagattttatgagcaaaatcccgatacggatgttgagataatcaacgtcgcctctcctggctacggcgggacgcaaaacgaaggatggttcgccgcgcttagggcgcttgtcgaacaggttaaaccggacacccaccccaacggcaaggtcaacgtcatcacgccgcagatcagccccgccgatacacggtggctgaaaactattttaacggaaatgggtattgattatatcctcttgcccgacatttccgataatttggacggcgtaacggaaaacccctacaacaggttaaaaatgggcggaacgccgctgaccggcatagcgaagatggcgggtgcgcggttgacaatagaattttccgagtacacgaactcggataattccccctcggagtatttgcaaaaagaatacggagtgccgtttgtaaaactgcccctgcctgtcggcgtccgcggtatggatatgtttattaaaacgctggaagactcaggcggaattgtaactaaagattttaacagggagcgcgggcggtatttggacgccatggtcgattcccacaaatactgctcgcaggcgcgtgcggttgtattcggcgagccggattttgtaacggcggtagtacgtctgtgctgtgaaaactggaattttaccggtggtaattgccactgcctctgtttcggataa

SEQ ID NO: 20490 - protein, 292 aa, Unknown
  Obtained from environmental sample
  DOMAIN (2)...(289): Nitrogenase component 1 type Oxidoreductase
  misc_feature (1)..(292): Xaa is any amino acid
MPTHYNEPMDIASSSLPREGTYSGGEANLLKGLKNLISLYTRRVIGICTTCLAETIGEDTGAIAKRFYEQNPDTDVEIINVASPGYGGTQNEGWFAALRALVEQVKPDTHPNGKVNVITPQISPADTRWLKTILTEMGIDYILLPDISDNLDGVTENPYNRLKMGGTPLTGIAKMAGARLTIEFSEYTNSDNSPSEYLQKEYGVPFVKLPLPVGVRGMDMFIKTLEDSGGIVTKDFNRERGRYLDAMVDSHKYCSQARAVVFGEPDFVTAVVRLCCENWNFTGGNCHCLCFG

SEQ ID NO: 20491 - DNA, 570 bp, Unknown
  Obtained from environmental sample
  misc_feature (1)..(570): n is a, c, g, or t
atgatgatgatgagtgacggcgctctttccaaggctgaaatagacgcgctgctttcaggagtggattcgtcaccggccgcgggcggcagcgccacggcaacggtggcgcctccaagcggcggcgacagcatttcaccggagcaaaagaaagccctggaaacatttttggcttctactacggatgcgcagtcttccaacctttcgatgttgaccgggacgcaaatccatgtgaaggggccgcagataacaatcaacgggcgcgacctctttcttgggcagcttcccgagaaagtagttgtaataaagtcggattttagttcaggctttcccggcgaacatatgttcattttacccgaggatggggcgaaggcaatcgccagcctgataaacaaagaagataatatccagcttgatgagatgtcattatcggtattgtgcgaagctgtttcccagttggttgggcatcagataacagcgcttgccggtaaaacaggcaataaatccattgcgaatgttccgccggaggcgaccaatgtgccaaaagcggtgtcgcctgctcggccgatctga

SEQ ID NO: 20492 - protein, 189 aa, Unknown
  Obtained from environmental sample
  misc_feature (1)..(189): Xaa is any amino acid
MMMMSDGALSKAEIDALLSGVDSSPAAGGSATATVAPPSGGDSISPEQKKALETFLASTTDAQSSNLSMLTGTQIHVKGPQITINGRDLFLGQLPEKVVVIKSDFSSGFPGEHMFILPEDGAKAIASLINKEDNIQLDEMSLSVLCEAVSQLVGHQITALAGKTGNKSIANVPPEATNVPKAVSPARPI

SEQ ID NO: 20493 - DNA, 330 bp, Unknown
  Obtained from environmental sample
  misc_feature (1)..(330): n is a, c, g, or t
ttggtattcgtcggtacggcgcaacgccacttccgaaaacctcactgtattaaggaaaagctggcgactgtcgatgttaatgtagtagcggaaattgggaagatcgatattcccgtaagggacgttctttccctgcaggcaggagacgttatccgcttgtacaatacccgtgtggaagaaccgtatttcctgaatattggcaataaaccaaagttcctgtgccgtcccgggttaatagggagaaaactggcggtacaaattacaaagaagattgccgagcttgaagaaaacgacttcgaagagctggtaagcgatggggaggttatgtaa

SEQ ID NO: 20494 - protein, 109 aa, Unknown
  Obtained from environmental sample
  DOMAIN (17)...(94): Surface presentation of antigens (SPOA) protein
  misc_feature (1)..(109): Xaa is any amino acid
MVFVGTAQRHFRKPHCIKEKLATVDVNVVAEIGKIDIPVRDVLSLQAGDVIRLYNTRVEEPYFLNIGNKPKFLCRPGLIGRKLAVQITKKIAELEENDFEELVSDGEVM

SEQ ID NO: 20495 - DNA, 555 bp, Unknown
  Obtained from environmental sample
  misc_feature (1)..(555): n is a, c, g, or t
gtggtagtgatgattgaagagccggtagtcgaaccgctaaccagggaagacctggacttttgggcggatgagggcaagacgggccttgtgcttcacgagtgggggaacgatcataatcttggggcaattgccagggctgcggcttttttcgatgtgcatttcatcgtgctgaacgagaacgacgaggaagcgcggctgactaccagcgcctatcgtgtcgcggaaggcggcatggaacatgtcaccgtgcgaaaaataaacaacacagccggatttttaaaagacgcggcaaaaaaaattcttgtcatcggaaccgacatccgcgcgcggcggcgcattggcgatctttccggcattgcgaaagactgggccgagcggatcggagtgaaacgccccggagtcgcgctggcgcttgggaacgaggaaaatggccttccgcaaagtataaaagacaactgctcctgcctgcttcgcattccggggacgggtaatatcgaaagccttaatatcgctcaggccgcggctctttttctgagagagatttacgatctctaa

SEQ ID NO: 20496 - protein, 184 aa, Unknown
  Obtained from environmental sample
  DOMAIN (26)...(179): SpoU rRNA Methylase family
  misc_feature (1)..(184): Xaa is any amino acid
MVVMIEEPVVEPLTREDLDFWADEGKTGLVLHEWGNDHNLGAIARAAAFFDVHFIVLNENDEEARLTTSAYRVAEGGMEHVTVRKINNTAGFLKDAAKKILVIGTDIRARRRIGDLSGIAKDWAERIGVKRPGVALALGNEENGLPQSIKDNCSCLLRIPGTGNIESLNIAQAAALFLREIYDL

SEQ ID NO: 20497 - DNA, 456 bp, Unknown
  Obtained from environmental sample
  misc_feature (1)..(456): n is a, c, g, or t
ttgtttgaaaataaaaacccggaagaggtttttgataaaattctggaaaacctggacaagtggtgctggaatcatacgtttaacgctattgaaaaacaatccaatacagaccttaaaatattatacgaaggcggcgattcgtttgtcagccttatgaggaaaaaagaaggcgcggtttttgaatactggttaggaatatttatgccgcaggggactgatgttccggcgggatatgagaagatagatttccctaaatcaaaattgggaatatgcagtgtttacggaaaaaggaactcattaattcattatgacgctgattgcaggaaaaaattggcggaaaactgtattgaatgtcaagaaaatgaggaatggttttttcaacgttttaactggcgggggttctttgaggaagataaatacggtaaaaggttattggaatattgttattttttataa

SEQ ID NO: 20498 - protein, 151 aa, Unknown
  Obtained from environmental sample
  misc_feature (1)..(151): Xaa is any amino acid
MFENKNPEEVFDKILENLDKWCWNHTFNAIEKQSNTDLKILYEGGDSFVSLMRKKEGAVFEYWLGIFMPQGTDVPAGYEKIDFPKSKLGICSVYGKRNSLIHYDADCRKKLAENCIECQENEEWFFQRFNWRGFFEEDKYGKRLLEYCYFL

SEQ ID NO: 20499 - DNA, 381 bp, Unknown
  Obtained from environmental sample
  misc_feature (1)..(381): n is a, c, g, or t
atggaagatttaaaatttagggatgccttagaaacggatttagaaaaaattgttgaaatatacaattcgacaattccttcaagaatggttaccgctgatacagaaccagtttcggtgaatagcaaaaaaaaatggtttgacgagcataattcattaaaaagaccgctttgggttgttgaaaataaatctaatgaaataatcggctgggttagttttcagtcattttatggaagacccgcctataatgctacggtagaaataagtatttatttggcggcggaacaaagaggcagaggattaggaaaacaaattctccattattgtattgacaatgccccaaatttcggattaaaactttgctcggatttattttgcacataa

SEQ ID NO: 20500 - protein, 126 aa, Unknown
  Obtained from environmental sample
  misc_feature (1)..(126): Xaa is any amino acid
MEDLKFRDALETDLEKIVEIYNSTIPSRMVTADTEPVSVNSKKKWFDEHNSLKRPLWVVENKSNEIIGWVSFQSFYGRPAYNATVEISIYLAAEQRGRGLGKQILHYCIDNAPNFGLKLCSDLFCT

SEQ ID NO: 20501 - DNA, 744 bp, Unknown
  Obtained from environmental sample
  misc_feature (1)..(744): n is a, c, g, or t
atgaacacagatcaggtaaaacaaaaacttttacggattgaggacgccccgctagaattttcccttattttctcgggaaaaaaaagcagcaaggtaaacggcctgtacaagcctgacagccgcgagatcgtcatccataaccgcaattttgatcaggacgcggcgggggaaaacctgctgctgtacacggcgatccacgaatacgcccaccatctccatgcctgctctcagggcggcaaactatcgccgcgtgcgcacacgtcggaattttgggcgatttttcacgcgcttctggaaaaagccgaatcaaaaaaaatctaccgcgatgtcttcgccgacgccccggaacttacagcgcttaccgaaaccatacggaaaaaatacctccaggaaaacggcagcctggtcaaggagatgggtaaacatctgttgaaagcgcatgagctttgcaccgcgataggggtgcgttttgaggactatgttgaccgtgtgctgagaataccccgtaccgccgctaacatggcgattaaaatgtttaattacgatttaaacccgcagacaggcgccgacaacatgcgcttcctcgccggtatacgcgatgccggagagcgaaaagccgccgaaaccgccctgctcaaaaataaaagccccgatacggtaaaaacggcgattcgccaaaaaactaaaaatgaagaccctgtgcaaatgctggaacgggagaagaaccgcctgaacgcacaatag

SEQ ID NO: 20502 - protein, 247 aa, Unknown
  Obtained from environmental sample
  misc_feature (1)..(247): Xaa is any amino acid
MNTDQVKQKLLRIEDAPLEFSLIFSGKKSSKVNGLYKPDSREIVIHNRNFDQDAAGENLLLYTAIHEYAHHLHACSQGGKLSPRAHTSEFWAIFHALLEKAESKKIYRDVFADAPELTALTETIRKKYLQENGSLVKEMGKHLLKAHELCTAIGVRFEDYVDRVLRIPRTAANMAIKMFNYDLNPQTGADNMRFLAGIRDAGERKAAETALLKNKSPDTVKTAIRQKTKNEDPVQMLEREKNRLNAQ

SEQ ID NO: 20503 - DNA, 867 bp, Unknown
  Obtained from environmental sample
  misc_feature (1)..(867): n is a, c, g, or t
atgattaattccgaccacggcgatgaaatgatacaccaatctatcgttgagggcgctatggcgcaaagaaacaggccgaaagacgagggcggttccatgctttctacagttaacaacgctcttgccgtgtttgccgatcagaaaatcgcgcgtaatacttggaactccgaattttatattgatgaatttcaagaaactaaaagacctatttctctttaccttacgattcaatacgacagtgttcaacgtatcgcgcctttgatccgaatgtttgttattcttttttcccgtaaatttacaggcggagaaacggacgcaaataacagaaaatttgaaattcctctcttatttattcttgacgaatttgacaagctcggccgcatggatgaactggaaatgaacatgggtattcacaacggcttcggcattcattacttcttaatattccagtcattaaaccagcttatcaaaatttatactaaagaccattcttttttagctcatgcgcgtaacacaattatttacgctccgggtacaggggaaacggattccgccgaacttgtttcaaaaatatgcggaaaagaatctatcagccgtaccaatatttcctactccggagggaaagcgcaagtcggttattccaataaaaatatttcctcgcaggatcaagaacgcaaccttatcaacgccgatgaagttatgaaactccctctcgaccagcttattcttttatgccagggcttgccgccatatataggcaaaaaaaatgtttattataaagaccctgtttttaaacctcgaagtgaatttcccccggccctttacacgcgcgaagaagctttgaaagccgcacagtccacaatttaa

SEQ ID NO: 20504 - protein, 288 aa, Unknown
  Obtained from environmental sample
  DOMAIN (1)...(278): TraG/TraD family
  misc_feature (1)..(288): Xaa is any amino acid
MINSDHGDEMIHQSIVEGAMAQRNRPKDEGGSMLSTVNNALAVFADQKIARNTWNSEFYIDEFQETKRPISLYLTIQYDSVQRIAPLIRMFVILFSRKFTGGETDANNRKFEIPLLFILDEFDKLGRMDELEMNMGIHNGFGIHYFLIFQSLNQLIKIYTKDHSFLAHARNTIIYAPGTGETDSAELVSKICGKESISRTNISYSGGKAQVGYSNKNISSQDQERNLINADEVMKLPLDQLILLCQGLPPYIGKKNVYYKDPVFKPRSEFPPALYTREEALKAAQSTI

SEQ ID NO: 20505 - DNA, 804 bp, Unknown
  Obtained from environmental sample
  misc_feature (1)..(804): n is a, c, g, or t
atgatagacgaccttatagaggcaggtgtgcacggctttgtgccagttggaacaacggggcaaagcgcaactcttagtaccaagcaacatttggattttataaaatttgtgctggattatgtggatggcaaggtacctataatagctggagctggctccaatagcacaagggaatcggttgagatgataaaagacattcaaaaaatcaaagaagttcctatgctctgcgtaacaggctactacaacaaccctccgcaagagggaatttacgcccatttcaaggctttgagcagcgaaacaggcgcaaaaatcattctctacaacgtgcccgggcgcactgcaaattacatacatccaagcaccattataaaactagccgaagacaaaaacataataggcttaaagcaagccgttgaatttagaattggcgaaaaatatcacgaagacacaaaaagcatagcagaacacaccaaaaacctagacttcgccctaatttccggcgaagacggtgcattcatagatatgcttgaactaggtggcgtaggattgataagttcaactgcaaacatacccgaagcctcaaaaattttcgttgagctttancaactctttcacaaaaaagaattcgaaaaatgcgacaaacttcaagacgatgccagagactacgtagaagccgtattcagccgcaaaaaccccatcccccctaggaaacttcttcaacagccccctcttgctcccattagtgagcgtccaagccaccgaaagaggagacgaagccgatgccccgcatacataaactcctaa

SEQ ID NO: 20506 - protein, 267 aa, Unknown
  Obtained from environmental sample
  DOMAIN (1)...(263): Dihydrodipicolinate synthetase family
  misc_feature (1)..(267): Xaa is any amino acid
MIDDLIEAGVHGFVPVGTTGQSATLSTKQHLDFIKFVLDYVDGKVPIIAGAGSNSTRESVEMIKDIQKIKEVPMLCVTGYYNNPPQEGIYAHFKALSSETGAKIILYNVPGRTANYIHPSTIIKLAEDKNIIGLKQAVEFRIGEKYHEDTKSIAEHTKNLDFALISGEDGAFIDMLELGGVGLISSTANIPEASKIFVELXQLFHKKEFEKCDKLQDDARDYVEAVFSRKNPIPPRKLLQQPPLAPISERPSHRKRRRSRCPAYINS

SEQ ID NO: 20507 - DNA, 447 bp, Unknown
  Obtained from environmental sample
  misc_feature (1)..(447): n is a, c, g, or t
ttggcttatcgacaccgggaaggtcgccgattgcgtagcaagctgtatttcgcacttgtccgcaagtttggcggcgactatgttttttgcgacataacgcgcggcatatgcggcggagcgatcaacctttgtcggatccttgccggaaaacgcgcctccgccgtgccgtcccataccgccgtaagtgtctacgatgatcttgcgtccggtgagtcccgtgtcgccgaacggaccgcctacaacgaaacggcctgtcgggttaatgtagtaattggtttttttatcaagcattcccgtcggttcaagcaccggcataataattttttcaattacggtagtttcaatttctttataagaaacttcaggagcatgttgatgagaaattacaacagaatctatgcggatgggtttatttccttcatattcaattgttacctgactttttga

SEQ ID NO: 20508 - protein, 148 aa, Unknown
  Obtained from environmental sample
  misc_feature (1)..(148): Xaa is any amino acid
MAYRHREGRRLRSKLYFALVRKFGGDYVFCDITRGICGGAINLCRILAGKRASAVPSHTAVSVYDDLASGESRVAERTAYNETACRVNVVIGFFIKHSRRFKHRHNNFFNYGSFNFFIRNFRSMLMRNYNRIYADGFISFIFNCYLTF

SEQ ID NO: 20509 - DNA, 675 bp, Unknown
  Obtained from environmental sample
  misc_feature (1)..(675): n is a, c, g, or t
atgcaaaaaccagcaaccagtaaaaggctgcttggagtagtagttccggttggagcgcttagaagcaagaatgggatgggagtgggagaatttcttgatcttgcgggttttgccgttctctgtaaaaaaatgaggctgggacttattcaaattctgcctgttaatgacacaggttttgaaagctccccgtattcaagtttgaccgcgtttgggctccaccctttatatcttaggatcgaagaaatagaagaatttaacgtagcggataaatcaataaaaaaacggatcaaggatgcaaaagaaaaattcgacaagaacgcgcgttttttacattatgatgttctaaaagaaaaacttgatatatgccgggaaatttatgaattagcaaaagaacaaattgccgcaagcgcgtccggcggaagactttcagaatggattaagcaaaattcgtggattaagcaatactctgtatacaggagattaaaagagacctacggcggaaaatcctggaaggaatggcctgagtatcatattgttacagcggcagaaattgaaactttgtggaatgataataaattacgtgaagaacaccttttctgggtttggctgcaggaagcactggatacgcaattttccaaagcagcaaaagcagtcgccgatgcgggcattgtttaa

SEQ ID NO: 20510 - protein, 224 aa, Unknown
  Obtained from environmental sample
  misc_feature (1)..(224): Xaa is any amino acid
MQKPATSKRLLGVVVPVGALRSKNGMGVGEFLDLAGFAVLCKKMRLGLIQILPVNDTGFESSPYSSLTAFGLHPLYLRIEEIEEFNVADKSIKKRIKDAKEKFDKNARFLHYDVLKEKLDICREIYELAKEQIAASASGGRLSEWIKQNSWIKQYSVYRRLKETYGGKSWKEWPEYHIVTAAEIETLWNDNKLREEHLFWVWLQEALDTQFSKAAKAVADAGIV

SEQ ID NO: 20511 - DNA, 807 bp, Unknown
  Obtained from environmental sample
  misc_feature (1)..(807): n is a, c, g, or t
gtgagcttccccgggggattgccaggcctcaaccaaaagatacacatcattctgcntgagccgccgtataatttgttcaagtttatcgccggtatggagtggcttccggcatacagaaaaatctatggcatatttcccatgatcctgggcagtatcctggtctgctctggagcgcttcttataggggtgccgatagctctgctctgcgcgctctttatggcggagtttcttccgccgaaattcgcgaatgtttttcggagcggcgtagagcttttggcgggcataccgtcggtggtctacggatttttcggccttatggtgatagtgccgctggtcaagcagactttcaaaacgccgtcgggaaacagcctgctttccgctgtgattgtccttgcgatgatgatcctgccgacgattataaccgtggccgaaaaatgcctgcaggcggttccgctttccaggcgcgaggcgtccctggcgttaggcgcaagcaagatgcagaccgccttgcatgtggttctgccgcacgctaagtccggcgtactggccgggatcatcctcggcttttcccgcgccgtgggcgagacaatggcggttatacttgtcgcgggaaactcggtacagctaatcagaagcccgctggaaggggtaaggactttaaccgcgaccatcgccctggagatgggttacgccgaaggcagacactcgcacatgctttttgcaattggcatagtcctgcttgtaatgatccttcttcttaacggccttatccttataatacgccgccggggagagatagacgcatga

SEQ ID NO: 20512 - protein, 268 aa, Unknown
  Obtained from environmental sample
  DOMAIN (48)...(266): Binding-protein-dependent transport system inner membrane component
  misc_feature (1)..(268): Xaa is any amino acid
MSFPGGLPGLNQKIHIILXEPPYNLFKFIAGMEWLPAYRKIYGIFPMILGSILVCSGALLIGVPIALLCALFMAEFLPPKFANVFRSGVELLAGIPSVVYGFFGLMVIVPLVKQTFKTPSGNSLLSAVIVLAMMILPTIITVAEKCLQAVPLSRREASLALGASKMQTALHVVLPHAKSGVLAGIILGFSRAVGETMAVILVAGNSVQLIRSPLEGVRTLTATIALEMGYAEGRHSHMLFAIGIVLLVMILLLNGLILIIRRRGEIDA

SEQ ID NO: 20513 - DNA, 495 bp, Unknown
  Obtained from environmental sample
  misc_feature (1)..(495): n is a, c, g, or t
atgcaaattcttgtagacgcggattcatgcccacgcccggcaagggaaatgattttgcgtttttcatccaggctgggtattaaaagcgtctttgcggctaaccgtcctattcccggacttatggagtctgacaaaggcaaaaagcggacggcgcctgaaaccgtgtttttcgaactatgtccttccggcgaaggggaagcggacaggcgcattttggcgctggccaaaagcggagaccttgttattacaagggatctgcctctggctgaacagcttgtagacgccggaataaccgtactggacgacaggggcagggcttttacaaaggaaaatatccgggaacatcgttcaataagagactttaccgtcggtctcgcaaataacggccttgaatttgacagaataccttcttacggtaaaaaagaactgtcttcgcttgccaacagcctggatcgggaactgtccagattaaatagaaccgccgtcgggatataa

SEQ ID NO: 20514 - protein, 164 aa, Unknown
  Obtained from environmental sample
  DOMAIN (1)...(156): Uncharacterized BCR, YaiI/YqxD family COG1671
  misc_feature (1)..(164): Xaa is any amino acid
MQILVDADSCPRPAREMILRFSSRLGIKSVFAANRPIPGLMESDKGKKRTAPETVFFELCPSGEGEADRRILALAKSGDLVITRDLPLAEQLVDAGITVLDDRGRAFTKENIREHRSIRDFTVGLANNGLEFDRIPSYGKKELSSLANSLDRELSRLNRTAVGI

SEQ ID NO: 20515 - DNA, 405 bp, Unknown
  Obtained from environmental sample
  misc_feature (1)..(405): n is a, c, g, or t
atggtaagcctggaacaggtcaagctgctggaatcgaaggttacaaacgtaattgaacatgtaaaaaaagtaaccaccgataattccagactaagggaaaagctggattcatatcaaaaacggattgaagagcttgaagttctggtacatcagttcaaggaaaatcagggccagattgaggatggaattctttcagccctggacaggcttaatcagtttgaggacgcattagaaagcaagctttctgctgaaagcaagccgcctgtcgaaagcaaaccgcctgtcgaaagcaagccggttattaaaagcgggccatcgatggaaacaaaagccatgccgcctgaaaaaaccacagatgaggaacagacctcagacacagccgatggagagcttgatattttttaa

SEQ ID NO: 20516 - protein, 134 aa, Unknown
  Obtained from environmental sample
  misc_feature (1)..(134): Xaa is any amino acid
MVSLEQVKLLESKVTNVIEHVKKVTTDNSRLREKLDSYQKRIEELEVLVHQFKENQGQIEDGILSALDRLNQFEDALESKLSAESKPPVESKPPVESKPVIKSGPSMETKAMPPEKTTDEEQTSDTADGELDIF

SEQ ID NO: 20517 - DNA, 411 bp, Unknown
  Obtained from environmental sample
  misc_feature (1)..(411): n is a, c, g, or t
atggcaaagagcgatcttcttatagatattttagggacaaaattcacaatctccgccgaagaaacggcggagtatcttaataagctcctggacaagtatcggcggacaattgaaaacgtacagaggacaacaggtcttaaagatcctcttaaaaccgccgtcctcacgggctttttgctttgcgatgatcttgagaaggccggaagcgcctcagaagcggtaaaaaaagaagaacagagggaggcggagcggcttacccagggcatgatctcaaagcttaacgaaataattccggaagcctcggaaggagatacttattcgcggacgccagcccgggagcccgttggcgtcgaagagaaaccangcgatttttcctcggtgatagccgcgaatcctccgtttataaactaa

SEQ ID NO: 20518 - protein, 136 aa, Unknown
  Obtained from environmental sample
  misc_feature (1)..(136): Xaa is any amino acid
MAKSDLLIDILGTKFTISAEETAEYLNKLLDKYRRTIENVQRTTGLKDPLKTAVLTGFLLCDDLEKAGSASEAVKKEEQREAERLTQGMISKLNEIIPEASEGDTYSRTPAREPVGVEEKPXDFSSVIAANPPFIN

SEQ ID NO: 20519 - DNA, 882 bp, Unknown
  Obtained from environmental sample
  misc_feature (1)..(882): n is a, c, g, or t
ttgagccttgaacgggcttttaagattgttactgaaaatgacggcagggtaatagtcattatgggaaaaccccatctaccttttgttattactgcctgttccaaattaagccttgctgaaagaaaacgtctcatattgattcctgaacctgaagcaaaaaacacagcgcccgcgatagcttgtgccattaaatacgccgggataaccggcgggtggaaccgcacaatggtagtgcttaccagcgatcacattataaaaccgcttgacgcttttttaaaagatataaatatagccgcgcagtatgcagaacaaaataaacttgttatatatggtatttctccgacaggaccggaaacaggattcggttatattgaaacagtagataaactttccgataatgtttacgccgttacagcatttcatgaaaagcccaatcttgaaacggcggaacgattttttgcttccaggaattatttctggaattcgggaatgtttacatttcgctgtggatttttgttgaatgaataccaccgtctttcatcaagtgtaatcagcccctttgaaaatcttaagccacccaataaaaagtcatatactgagataaatggcttttgtgtgctggatgcatgggaaggattaagcaatgcatacaatcaggctaaatgtatttcttttgattatgctatcgccgaaaaatgtactaaaactgtaatgctacgcgcatcttttgactggattgatataggcagttgggatgactatgtccgtcttatttccatcaattctactcctgatagctatactggcaaaaatgtatttaccacagagacaagcgggtgttttgtcgattcagacattcccgtcgccctagcccggagttga

SEQ ID NO: 20520 - protein, 293 aa, Unknown
  Obtained from environmental sample
  DOMAIN (1)...(264): Nucleotidyl transferase
  misc_feature (1)..(293): Xaa is any amino acid
MSLERAFKIVTENDGRVIVIMGKPHLPFVITACSKLSLAERKRLILIPEPEAKNTAPAIACAIKYAGITGGWNRTMVVLTSDHIIKPLDAFLKDINIAAQYAEQNKLVIYGISPTGPETGFGYIETVDKLSDNVYAVTAFHEKPNLETAERFFASRNYFWNSGMFTFRCGFLLNEYHRLSSSVISPFENLKPPNKKSYTEINGFCVLDAWEGLSNAYNQAKCISFDYAIAEKCTKTVMLRASFDWIDIGSWDDYVRLISINSTPDSYTGKNVFTTETSGCFVDSDIPVALARS

SEQ ID NO: 20521 - DNA, 801 bp, Unknown
  Obtained from environmental sample
  misc_feature (1)..(801): n is a, c, g, or t
atggaaaacgacggttcttcataccttttttcagggtctgtaatttacagaagcgatcaggatgtaactatccttaaaaaagccacaatctcaagcggagaaagcgaaaatgaattttggtctattaaagcgtcaaaactctggcttctgcccggttcggatttcgccatttttaacgccgtattaaaagtcggggaaattcccgttttatatataccgttcttttattttccgggagatgaaatgatttttcatcctgttataggataccgctcaagggaaggcggctttgttcagacgacaacatatcttataggtcagccgaaggcaaacgcttccgaaagctcgttaagcaaaatcatcggtaattcagataacaatgaaaaagaaattcaaggattgtttcttcgcaatacaagcagaccgataaaagacgctgattcagtaagtcttaaagccatatttgattattatgtaaaccttggaacatatacggcgcttgatcttaccactccaaaaaaaggaatttttaatcagcttgatttatctttaggattaggttttacaagaacagtttcagatgcagacgggttctttactcctttttggccgaattatgacggtacttatgaaagaaacgaatccaatttattttcaaaaaacgttcctttccgctacaaaatgaattttaaaagcggtatcagcatgaaatacggctctctttcatggaatatcccgtattattccgatccttatgtggaaagggatttttccaaccgcgcggaaagcatggatggatga

SEQ ID NO: 20522 - protein, 266 aa, Unknown
  Obtained from environmental sample
  misc_feature (1)..(266): Xaa is any amino acid
MENDGSSYLFSGSVIYRSDQDVTILKKATISSGESENEFWSIKASKLWLLPGSDFAIFNAVLKVGEIPVLYIPFFYFPGDEMIFHPVIGYRSREGGFVQTTTYLIGQPKANASESSLSKIIGNSDNNEKEIQGLFLRNTSRPIKDADSVSLKAIFDYYVNLGTYTALDLTTPKKGIFNQLDLSLGLGFTRTVSDADGFFTPFWPNYDGTYERNESNLFSKNVPFRYKMNFKSGISMKYGSLSWNIPYYSDPYVERDFSNRAESMDG

SEQ ID NO: 20523 - DNA, 705 bp, Unknown
  Obtained from environmental sample
  misc_feature (1)..(705): n is a, c, g, or t
ttggaggaagccgtcgttgctgcgccgacggcncaatattctcaggcgaggagatctgctttgaaaacaaaggaacctgatctctcggttaccgttgccggggtcaaatttcgaaacccggttatcgccgcctccggaacatttggctatggccgggaatacgaaggccttttggacattgtgggccttggcggtatctgcacaaaaggccttacaataaatcccaggccgggaaatcagggagtgcgaatctacgagactccttccggaatgatgaactccatcggccttgaaaaccccggcatccccgcttttatcgagaccgaactgccatgcttaaagaaactcggcccggcaataatcgctaacctgtcaggctctaccgtttctgaatatgtccagggtgcgcgcgttcttggcaattcagacgtggacatgattgaaataaacatctcctgtcccaacgttaaatccggtgggatgacctttggccttgaacctgaaaccgcagcttctttgacaaggcaggtgcgcaaggccgcttcaaaaaaaccgctaatggtaaaactttcgccaaatgccccggatattgcggcggtggcccaggcctgcgtaaaggccggggtggacgccatttctttggtaaataccttcaaggccatggccattgacatcaacgcaagaaagccagtcttgaaaatataa

SEQ ID NO: 20524 - protein, 234 aa, Unknown
  Obtained from environmental sample
  DOMAIN (27)...(233): Dihydroorotate dehydrogenase
  misc_feature (1)..(234): Xaa is any amino acid
MEEAVVAAPTAQYSQARRSALKTKEPDLSVTVAGVKFRNPVIAASGTFGYGREYEGLLDIVGLGGICTKGLTINPRPGNQGVRIYETPSGMMNSIGLENPGIPAFIETELPCLKKLGPAIIANLSGSTVSEYVQGARVLGNSDVDMIEINISCPNVKSGGMTFGLEPETAASLTRQVRKAASKKPLMVKLSPNAPDIAAVAQACVKAGVDAISLVNTFKAMAIDINARKPVLKI

SEQ ID NO: 20525 - DNA, 924 bp, Unknown
  Obtained from environmental sample
  misc_feature (1)..(924): n is a, c, g, or t
gtgcgtatatttgatgataataattcccctctggcagttttgagcatgaatgtgccgatagatagtatttctgagtatgttattgaaacacgccttgcggaaggcggctacggccttttgcttagcgaagatctggaagtcattgcccacccttatgaagaaggaataggcataaatctgcgcaactggaacagcggtcttacagaatttgccgatgaattggaggagaaaaaaaaggacgtttcagaacacaggtttataaattacagaggcgatgactccatagtatcattccgccttctggaaaatggctggtatgtgggaattgtaacgcccatagacaaatattatcaaaccacaagaaccatggcgctgttcctaaccgtactgggcgctatattggcaatgggtcttattgcagtattactggttttattcaggcaggtgaacaaagagaacgaaaaatcccaggctatggcccattggtacaggtctattcttaacgcgataccgctgcccatatccgttaccgacacagacgcaagatggacatttattaacacgacagttgaaaaatatttgggaataacgctcgaagacgccataggcaagccgtgcagcaattggagagccgacatctgcaataccgaaaattgcggcattgcctgcgtgaaaaagggcctgaacaaaacttatttttccgacacggattcatcgttccagatcgatgtcgcgacgttgagggacctaagcggtgaaacaatgggatatattgaggtggtacaggatgttaccgacctgaagctgatggcaaaaaaacaggcggacgcggaagctgcaagccacattttggaaaatatcctcaacggccttgacgcgcagatttatgtcagcgttccacataccggtgaacttctcttttaa

SEQ ID NO: 20526 - protein, 307 aa, Unknown
  Obtained from environmental sample
  DOMAIN (167)...(269): PAS fold
  misc_feature (1)..(307): Xaa is any amino acid
MRIFDDNNSPLAVLSMNVPIDSISEYVIETRLAEGGYGLLLSEDLEVIAHPYEEGIGINLRNWNSGLTEFADELEEKKKDVSEHRFINYRGDDSIVSFRLLENGWYVGIVTPIDKYYQTTRTMALFLTVLGAILAMGLIAVLLVLFRQVNKENEKSQAMAHWYRSILNAIPLPISVTDTDARWTFINTTVEKYLGITLEDAIGKPCSNWRADICNTENCGIACVKKGLNKTYFSDTDSSFQIDVATLRDLSGETMGYIEVVQDVTDLKLMAKKQADAEAASHILENILNGLDAQIYVSVPHTGELLF

SEQ ID NO: 20527 - DNA, 474 bp, Unknown
  Obtained from environmental sample
  misc_feature (1)..(474): n is a, c, g, or t
atggaaaaacacataaagactgtttttgaacatttcggcggcaagattgattcatgggatgtgtgcaatgaggtagttgatcaaaatgatattaccaatggaggagcgcgaaaagattccaagtacacagagataatggaagccgcgggattatcgggaataaaccgctatgaatatgtattaaaagcttttcaatgggcgcggaaatacgcggatgaaaacggcggggagaatgttaaactttttttaacggactttggaatagaaagaagatttccgggtcaggacaaaagtaaaattgacatgtttgaggaattagttgattatttaatagaaaatgaggcgccttttgacggcataggttttcagggacatttcaggctttatgatcacccggtagaacaaatcagcgatggaatagacagattcgcgaaacaaaaaaagacggaccaaaattattattcaatttggtga

SEQ ID NO: 20528 - protein, 157 aa, Unknown
  Obtained from environmental sample
  misc_feature (1)..(157): Xaa is any amino acid
MEKHIKTVFEHFGGKIDSWDVCNEVVDQNDITNGGARKDSKYTEIMEAAGLSGINRYEYVLKAFQWARKYADENGGENVKLFLTDFGIERRFPGQDKSKIDMFEELVDYLIENEAPFDGIGFQGHFRLYDHPVEQISDGIDRFAKQKKTDQNYYSIW

SEQ ID NO: 20529 - DNA, 681 bp, Unknown
  Obtained from environmental sample
  misc_feature (1)..(681): n is a, c, g, or t
atgtttacgtccgctggaccggaaatcgccgtggcgacgacaaaagcgtttcccgctcagctgtttttgttatatgttttggcgatatggttcgcggttaagctgggaaaattatctaaggaagaagaacaaaaattaatggcggagattaacgctctgcctgaaaaaacagagcaaatacttaagcagatcgattcaattcaaatgtacgcttctacggctgttgtttacaaaagcattttctttatcggaagaaatattgattacgcgatctcgcttgaaggctctcttaaacttaaagaaatttcatatattcactcggaagcgtacgcaggcggcgaattaaagcacggcactatttcgctcatagaagaggatacgctggtcgtcgcgctttcaaactgcggctcgctctatggaaaaattatgagcaatgtggaacaagtcataagccgcggcgcaaaggtgctgcttatcggcagttgtccggctgataatttaaaggcggacaaaaactttgaggataaactctttactatcgatcttcccaaatgttccgatttattctccccttccctatcggttattgttttacaactttttgcgtattatgtcgcggcgaacaaagggcttgatattgataagccgcgtaaccttgcgaaaagcgtcactgttgaataa

SEQ ID NO: 20530 - protein, 226 aa, Unknown
  Obtained from environmental sample
  DOMAIN (71)...(212): SIS domain
  misc_feature (1)..(226): Xaa is any amino acid
MFTSAGPEIAVATTKAFPAQLFLLYVLAIWFAVKLGKLSKEEEQKLMAEINALPEKTEQILKQIDSIQMYASTAVVYKSIFFIGRNIDYAISLEGSLKLKEISYIHSEAYAGGELKHGTISLIEEDTLVVALSNCGSLYGKIMSNVEQVISRGAKVLLIGSCPADNLKADKNFEDKLFTIDLPKCSDLFSPSLSVIVLQLFAYYVAANKGLDIDKPRNLAKSVTVE

SEQ ID NO: 20531 - DNA, 852 bp, Unknown
  Obtained from environmental sample
  misc_feature (1)..(852): n is a, c, g, or t
atgatgattacttctctggctattcctaactgggaagtacacttagcgtcttcttcaaggtttgtagacgctttagcgcttagcttcacaaaagaagcaaagtcaaaagagtacaacactgtgttgggcgttaggattcgtttccccatagagccgtataactcatgggcgaagattactcctccgtttgatattcctgcctacgaattatcagatgtcggcgaggacggtaaaattaccgctaaaagtcaagaagaaggctttaccaacactaagagccgctttgaagctcaggaagaaggcaagccggcttacggcgttattaagaacgtcggtgttatcagagaaataaaagtaaaagtgtacggtcttaacttcccccacggtctttcaacctgtattgttgacagcatgggagttgaaaagaccatgttcatgggttatatgcagtttgacggctggggagatcttatttggagaaacccggcttatatgcaggaagtaagaaaccgcgatctcaggattgttcctttgtatccgtttaatacacccttcatcaaattcgccggattccttatccagcgcgatgccgctaaagaaggcggagattttgttacatactttaaagacgtaaccattatctacgacttagcggttcttgacgccgataaagacatcaacgacgaagctatttggaacatcattcaaacccgcgaagaaaaacgcaaagcgtttgaaatggaacgctttggacaacagcaggttcttcgttatatcgaaatgcagaaacaagctactgaacttcccgttcatgatccgaaacgtgaagaagcagcggctcagaaccaatag

SEQ ID NO: 20532 - protein, 283 aa, Unknown
  Obtained from environmental sample
  DOMAIN (1)...(224): Flagellar filament outer layer protein FlaA
  misc_feature (1)..(283): Xaa is any amino acid
MMITSLAIPNWEVHLASSSRFVDALALSFTKEAKSKEYNTVLGVRIRFPIEPYNSWAKITPPFDIPAYELSDVGEDGKITAKSQEEGFTNTKSRFEAQEEGKPAYGVIKNVGVIREIKVKVYGLNFPHGLSTCIVDSMGVEKTMFMGYMQFDGWGDLIWRNPAYMQEVRNRDLRIVPLYPFNTPFIKFAGFLIQRDAAKEGGDFVTYFKDVTIIYDLAVLDADKDINDEAIWNIIQTREEKRKAFEMERFGQQQVLRYIEMQKQATELPVHDPKREEAAAQNQ

SEQ ID NO: 20533 - DNA, 582 bp, Unknown
  Obtained from environmental sample
  misc_feature (1)..(582): n is a, c, g, or t
atggcacatacaccaggacaaagaatttctgaattacgcagtacttattccatcagcagggagacgctggcggaacggagcggcatctcggaagtgatgatcgctaaaatcgaagaagaagggcatattcccgaccttgcgccgctgattaagatttcgcgggcgttgggggtcaggcttggcacactgcttgacgatcacgagcagcttgggccggttattacccgcgcgggcgaagaggccgcctcggagcgcttcaagaccgggcttccggctgacgccggcgtaaaaaccgagcacaaggggcttagtttcaaggcgctggccgcggacaaaaacggacgccacatggagcccttcatcgttgacattgagcccaacgccgtgcaggaaaaatccgcgcacgaaggcgaggaatttatccacgttctcacgggaaaccttaaactggaatacggcacaaccgcagaaacgctcaaagccggggattcggtatattacgattctatcgtgccccacagggtaatctccgccgattcaaatccggtaaagatactggcagttatttacactccagtatag

SEQ ID NO: 20534 - protein, 193 aa, Unknown
  Obtained from environmental sample
  DOMAIN (9)...(63): Helix-turn-helix
  misc_feature (1)..(193): Xaa is any amino acid
MAHTPGQRISELRSTYSISRETLAERSGISEVMIAKIEEEGHIPDLAPLIKISRALGVRLGTLLDDHEQLGPVITRAGEEAASERFKTGLPADAGVKTEHKGLSFKALAADKNGRHMEPFIVDIEPNAVQEKSAHEGEEFIHVLTGNLKLEYGTTAETLKAGDSVYYDSIVPHRVISADSNPVKILAVIYTPV

SEQ ID NO: 20535 - DNA, 819 bp, Unknown
  Obtained from environmental sample
  misc_feature (1)..(819): n is a, c, g, or t
atggcaacgctcgcgctgaagtaccgtccccgaatcctctccgacctcgtcggtcaggaggcgagtgtgaaggcactccacaacgcgctgactagggccaaggcggcgggcggggcaatccaccaccaggcattcttgttcgcaggcgtaaggggcacgggcaagaccagcacggcgcgcgtcatggccagatcgctgaactgcgcggaggggcccacgcccacgccctgcggggtctgcggtccctgcctggcgtccgagcagccagaccgcaacatggacatagtcgagattgacgcggcaagccgcgccagcgtcgaggatgccagagccttgcgggagcaagtccacacgcggccggccttctgccgctaccgtgtctatatcattgatgaagttcacatgctctcccgccaggcattcgatgcgctgctgaagatattggaggagccgccgtcccatgctgtgtttgtactggccactacggagttacaggacgtgccggacaccataaagagccgggtgcagatttatccattcaggctgattcccgtcggtctgatcgaagagagactgcggcttgtgtgcgattcggagggcgtgccgcacgagccaggtagcctgcgcctggtggccgaggcgggtcaggggtcaatgcgcgacgcgcttaccaccttggaccgcgtcatctccgctggggacggccaagtgttagaggagctggtcagggagcagttgggcatagtcccctccgtaagggtcaagggcgtgctggagtccctgctggcgggcgacgcaactcggccgattctgacctag

SEQ ID NO: 20536 - protein, 272 aa, Unknown
  Obtained from environmental sample
  DOMAIN (44)...(235): ATPase family associated with various cellular activities (AAA)
  misc_feature (1)..(272): Xaa is any amino acid
MATLALKYRPRILSDLVGQEASVKALHNALTRAKAAGGAIHHQAFLFAGVRGTGKTSTARVMARSLNCAEGPTPTPCGVCGPCLASEQPDRNMDIVEIDAASRASVEDARALREQVHTRPAFCRYRVYIIDEVHMLSRQAFDALLKILEEPPSHAVFVLATTELQDVPDTIKSRVQIYPFRLIPVGLIEERLRLVCDSEGVPHEPGSLRLVAEAGQGSMRDALTTLDRVISAGDGQVLEELVREQLGIVPSVRVKGVLESLLAGDATRPILT

SEQ ID NO: 20537 - DNA, 486 bp, Unknown
  Obtained from environmental sample
  misc_feature (1)..(486): n is a, c, g, or t
atgggacggcggctcctccaatatcttcagcagcgcatcgaatgcctggcgggagagcatgtgaacttcatcaatgatatagacacggtagcggcagaaggccggccgcgtgtggacttgctcccgcaaggctctggcatcctcgacgctggcgcggcttgccgcgtcaatctcgactatgtccatgttgcggtctggctgctcggacgccaggcagggaccgcagaccccgcagggcgtgggcgtgggcccctccgcgcagttcagcgatctggccatgacgcgcgccgtgctggtcttgcccgtgccccttacgcctgcgaacaagaatgcctggtggtggattgccccgcccgccgccttggccctagtcagcgcgttgtggagtgccttcacactcgcctcctgaccgacgaggtcggagaggattcggggacggtacttcagcgcgagcgttgccatgaccttgtgtattgtcccatatag

SEQ ID NO: 20538 - protein, 161 aa, Unknown
  Obtained from environmental sample
  misc_feature (1)..(161): Xaa is any amino acid
MGRRLLQYLQQRIECLAGEHVNFINDIDTVAAEGRPRVDLLPQGSGILDAGAACRVNLDYVHVAVWLLGRQAGTADPAGRGRGPLRAVQRSGHDARRAGLARAPYACEQECLVVDCPARRLGPSQRVVECLHTRLLTDEVGEDSGTVLQRERCHDLVYCPI

SEQ ID NO: 20539 - DNA, 462 bp, Unknown
  Obtained from environmental sample
  misc_feature (1)..(462): n is a, c, g, or t
ttgcacgtagaaaaagagggggaacgtcttattaattcgatgaaagcgcaagttgatgaaattacacaaaatgttgctaaaatggcggctaacacagaaaataaaaaaactgtttattttgaaatttccgccgctccggatatgatgacttttggaaggggcagttatattaacgatatgatttccataataggggctaaaaatatttttgatgacgagaattggcttgtgatgccggatgcggagtcggttatcagccgcaaccccgacgtgattcttacaaatgtaaattacattgacgatccaatcgcagaaataaaaagtcgtcccggttataaccacatcaacgccgttattaataaccgcatttatcaaattgataccgattcatctgcgcgcccttcaagccgtataattttggctttgcggcaaatgtcgcaagccgcctaccctgaccactaa

SEQ ID NO: 20540 - protein, 153 aa, Unknown
  Obtained from environmental sample
  misc_feature (1)..(153): Xaa is any amino acid
MHVEKEGERLINSMKAQVDEITQNVAKMAANTENKKTVYFEISAAPDMMTFGRGSYINDMISIIGAKNIFDDENWLVMPDAESVISRNPDVILTNVNYIDDPIAEIKSRPGYNHINAVINNRIYQIDTDSSARPSSRIILALRQMSQAAYPDH

SEQ ID NO: 20541 - DNA, 861 bp, Unknown
  Obtained from environmental sample
  misc_feature (1)..(861): n is a, c, g, or t
atgcttaataccgcggtcgccagcggcgagcgcctcccatttctcgtaacatccaacattgactgggacaggactctggctgatgaaaaacgcgcgtccaaagccgccgatcttcaaaaagctttaaaactntacggcgcggcggaatataccgttatagaaaaaggcggcgtaaaggcggcatttttcggtattttaggcaaacaggcagacagttacgcgccattaagcggattgtattttaaggatcaaattgagacttccaaaaatatcgtcgcgaaaataaaagccgaaacttccgcggacataataatctgcctgtcgcacagcggaaccgatgacaatccccaaaaatcggaagacgaacttttggcggctgccgtaccggaaattgacgttataatcagcggacatacgcactcaacgcttgataaacctattattatcggcaaaacaattattgtctcctgcggtgaatacactcacaatatgggttggcttgtgcttttccgtaacggaaaccgttatttgccgctggattacaaattactgcatatagtcgacattcagccgaaagacccggagattgaggccgctatacaaaaattcaaatctttggtagataaaaattacttctcccgtttcggttacagttacgatcaaataatttcatatacggattttgattttattccggtagaaaatttcggcaaagaacagggcgaggatactctgggtaatttgatttccgactcgtatatagcggcaattaaaaaagccgaaggagacaattaccgcaagattgacgtcgccgtagtccccagcggcgtgtcagaggctcgttctcaaaaggtccgataa

SEQ ID NO: 20542 - protein, 286 aa, Unknown
  Obtained from environmental sample
  misc_feature (1)..(286): Xaa is any amino acid
MLNTAVASGERLPFLVTSNIDWDRTLADEKRASKAADLQKALKLYGAAEYTVIEKGGVKAAFFGILGKQADSYAPLSGLYFKDQIETSKNIVAKIKAETSADIIICLSHSGTDDNPQKSEDELLAAAVPEIDVIISGHTHSTLDKPIIIGKTIIVSCGEYTHNMGWLVLFRNGNRYLPLDYKLLHIVDIQPKDPEIEAAIQKFKSLVDKNYFSRFGYSYDQIISYTDFDFIPVENFGKEQGEDTLGNLISDSYIAAIKKAEGDNYRKIDVAVVPSGVSEARSQKVR

SEQ ID NO: 20543 - DNA, 510 bp, Unknown
  Obtained from environmental sample
  misc_feature (1)..(510): n is a, c, g, or t
atgagaggtaaatatattcgcattatgttgttctgctgttcagctatgctttgtttaacatcaactgtttacgcacaagaaaaaaagggcaaggcaggggatgtccccccagcaaaggcgaaggaatatccctcagactacgcacaagaaaaaaaaggcaaggcaagggaatataattcagatgttggttttaagggacctagccaaccaataggttctattctcgtaactaaaactggacaaatacaagcgactccagccgcttctgcgaaaagccttgcctacgatactcctgttatgctagtcgggaacattacgcaatctattggaggagatctttatactttcaaagatacatcaggagaaattactgtgagaattacgcatggcgattggaaaggtttgtcaattgaagcatctgatggcgttgtaattgctggctatgtaaaatctagaagcgatgggcaaattgagattgatgttaaaatgatatcaaaaacaaaaatgtga

SEQ ID NO: 20544 - protein, 169 aa, Unknown
  Obtained from environmental sample
  SIGNAL (1)...(25)
  DOMAIN (72)...(166): Domain unknown function (DUF388)
  misc_feature (1)..(169): Xaa is any amino acid
MRGKYIRIMLFCCSAMLCLTSTVYAQEKKGKAGDVPPAKAKEYPSDYAQEKKGKAREYNSDVGFKGPSQPIGSILVTKTGQIQATPAASAKSLAYDTPVMLVGNITQSIGGDLYTFKDTSGEITVRITHGDWKGLSIEASDGVVIAGYVKSRSDGQIEIDVKMISKTKM

SEQ ID NO: 20545 - DNA, 780 bp, Unknown
  Obtained from environmental sample
  misc_feature (1)..(780): n is a, c, g, or t
ttgcggagagggaattctttcaaggagtgtgggcctaaaacggccgatgcagactattacataaaaggtctcaaaaccaacgacgaccctccgatagacaaagcaagcgtacaaaaaatgatatcgtattacaatgcgatcaactcttcaaacgatcagaattatgagcaaaatctctctccgtatatggatttcgactatnttctgcgctaccttgttgtggacgtagccattaaaaattgggatggcctgaggtcgtggtacattgatcatctcggtccgggacctattaaccacaactatttcatttacgaagaagaaacacctgatgggaaaatctggcttgttccatgggatatggatcaagcattggtggaaagagatacctattttgatgctggtggaggtatgggtggattcccgccggggggtggatttccaggatttggagaaccggtgccgcagtggaacgtgcctacgacagactgtggagatcgacaggttggagagtaccgtttcaggccgccaaattgtgacaaacttactaaacttatggcaaaccggtggactcgttacgtgcaactaggcgatttatttttaaaagacctgtttgtaagtcagcgattgaatgacaaaataaccaaacattcaaatttgattaataacgctgtgcaacaagatcctaatatccagcagggaacatggacaaatggtgtcaatagccttaagaattatttgccaaataatatttcttcgtttagaagctatttacatccgtag

SEQ ID NO: 20546 - protein, 259 aa, Unknown
  Obtained from environmental sample
  misc_feature (1)..(259): Xaa is any amino acid
MRRGNSFKECGPKTADADYYIKGLKTNDDPPIDKASVQKMISYYNAINSSNDQNYEQNLSPYMDFDYXLRYLVVDVAIKNWDGLRSWYIDHLGPGPINHNYFIYEEETPDGKIWLVPWDMDQALVERDTYFDAGGGMGGFPPGGGFPGFGEPVPQWNVPTTDCGDRQVGEYRFRPPNCDKLTKLMANRWTRYVQLGDLFLKDLFVSQRLNDKITKHSNLINNAVQQDPNIQQGTWTNGVNSLKNYLPNNISSFRSYLHP

SEQ ID NO: 20547 - DNA, 585 bp, Unknown
  Obtained from environmental sample
  misc_feature (1)..(585): n is a, c, g, or t
atgatggtttctctcggcactccgatgatcctcggcggcgatgaattcgggcgcactcaaaacggcaacaacaacgcttattgccaggataatgaaatttcatggtatgactggtctttacttgaagaaaacaaaaacttttaccgttttgcaaaagagatgatcgccttccgtctccgccatccctgttttatgcgtcccgaattttataccggagctaacggaagctacagcgctattcctgatataagctggttcgatgacaaaggagattcaccggattgggataagatcggttattatctggctttgcggatagacggcagcagagctgatcttcctgctgatcgtgatgacagttttttctatatcatgtttaacgccggacaggaaattcaaccctttatactggcggaaattccgtcaaaaaaagaatggtttcgtgttgctgacaccggactgctgcctcccaacgatatttttttaccgggaaatgaaaaaaaacttccttctcagcattcatatcccgtaaaagcccgcagcatggttattttgatttcaaaggatgcttcttccaatggataa

SEQ ID NO: 20548 - protein, 194 aa, Unknown
  Obtained from environmental sample
  misc_feature (1)..(194): Xaa is any amino acid
MMVSLGTPMILGGDEFGRTQNGNNNAYCQDNEISWYDWSLLEENKNFYRFAKEMIAFRLRHPCFMRPEFYTGANGSYSAIPDISWFDDKGDSPDWDKIGYYLALRIDGSRADLPADRDDSFFYIMFNAGQEIQPFILAEIPSKKEWFRVADTGLLPPNDIFLPGNEKKLPSQHSYPVKARSMVILISKDASSNG

SEQ ID NO: 20549 - DNA, 639 bp, Unknown
  Obtained from environmental sample
  misc_feature (1)..(639): n is a, c, g, or t
atggaatataaacctatggcattattatttcaaatcgggtggtgcattgccatcgttatacttgtaatgacagtaattgcctttatcatccaattgctccctcagaagaaacaatctgtggtgtccaaagaaaaagacaggctcatactgcatgatttagacgctgaaacagctctgaatttattcaaggatcccaataaggcccaattcttttgcgccaataaaaaaatggcgtcatgtcatggctggtatagctgctggcttcagactcccggcctttgcataatgcatgacggcactgaatctctgggaaaacaaattgcgttttgcggcgaatttatcattataagtaaaaacttatacggcggattcagcgcggaaataaaaaacgcgttggacagatcaatttcttctgcattgccttttttttgtgttcgcaacgacgaactgcaccatcagcctagatacccaaatagcggaaagatgacgacgtacatctataacgcaaatgaaatatctgatactgataaagaatcattaatggaaataacaagagcaaacggtataaatttaaataaaagtgattgtgaaacaatttttgtgaatgacgtgaatgagctgagagaggtattgatatga

SEQ ID NO: 20550 - protein, 212 aa, Unknown
  Obtained from environmental sample
  misc_feature (1)..(212): Xaa is any amino acid
MEYKPMALLFQIGWCIAIVILVMTVIAFIIQLLPQKKQSVVSKEKDRLILHDLDAETALNLFKDPNKAQFFCANKKMASCHGWYSCWLQTPGLCIMHDGTESLGKQIAFCGEFIIISKNLYGGFSAEIKNALDRSISSALPFFCVRNDELHHQPRYPNSGKMTTYIYNANEISDTDKESLMEITRANGINLNKSDCETIFVNDVNELREVLI

SEQ ID NO: 20551 - DNA, 768 bp, Unknown
  Obtained from environmental sample
  misc_feature (1)..(768): n is a, c, g, or t
atgcgccaaactattccagagcttaaagaaacactggatcgcctttacccggaagtcaacaagccggactttataacttttgatccggttcaatttccgcgcaggtatcaaagcgtgggcgacaaggaagtcgccgccttcctctccgcgacaattgcctggggccgcagggacatgatcctgaaatccgcagaaaagatgttctcgcttttggggccaagcccatacgaattcgttatggaagggaagtgcaaaaaattcgcggagaactcacgcggcgcaagcattcaccgtactttttttgaaagcgatttgcggtacttctgcaaaggccttaaagcctgttacgcgaaattcggtagcctggaaaagctttttgcctccgcttccgatgtttgggaaggcatatacctattccgggaaacgatggcaggcggaaacaaagccctttattccaagcacatatccaaccccgctgccggttccgcctgcaagcgcttgcacctggcccttcgctggctcgtgcggcgcgaaggcccagtggacatgggcctttggaaaagcatctccccttcttctctttttattcccctggacttgcacgtgggccgtaccgcccgccacctcggccttttacagcgcaaggcaaacgataagaaagcggttatctcccttacggaaaggcttcgcgctttttgtccggaagacccggtgaagtatgactttgcgttattcgggtactcaataaaccataatctatctttttga

SEQ ID NO: 20552 - protein, 255 aa, Unknown
  Obtained from environmental sample
  misc_feature (1)..(255): Xaa is any amino acid
MRQTIPELKETLDRLYPEVNKPDFITFDPVQFPRRYQSVGDKEVAAFLSATIAWGRRDMILKSAEKMFSLLGPSPYEFVMEGKCKKFAENSRGASIHRTFFESDLRYFCKGLKACYAKFGSLEKLFASASDVWEGIYLFRETMAGGNKALYSKHISNPAAGSACKRLHLALRWLVRREGPVDMGLWKSISPSSLFIPLDLHVGRTARHLGLLQRKANDKKAVISLTERLRAFCPEDPVKYDFALFGYSINHNLSF

SEQ ID NO: 20553 - DNA, 585 bp, Unknown
  Obtained from environmental sample
  misc_feature (1)..(585): n is a, c, g, or t
gtgggttcttcgaccatgccgcaaaaaaggaatccctggaattcagagcatgtcaaaagtttatggaaagctttcatgccccgcgctcttactttcttcatggatcagatcagcgagcatcagcgggatctttccaattcggcaagccagaggttcatttccgattatgttgcgggttttgttctggcagtcggcaggatggcacaggttatcgaaggccttcaagttgaccgcgaacggctaaatgcaaacctaaaggccgcgggcagcgccttgcttgcagagccggcgtatattcttctggccgaaagcggcgttaccgacgcccacgaggtgatacggaaaattacactggccgcagaaaaagaaaacttgagcttcgcccaggcgcttgagcgggaaaaagaaaccctgtccgcaatcgccgccaagatggctgagcttggattaataaaaacaaacagaaccgattctgttaccgctgcggctcttgcctggtttgagaatccggagcattaccggggtcttgcggaaaaaaaagcccgcagtattgcggctaaatacagggaggaaattaatgtttga

SEQ ID NO: 20554 - protein, 194 aa, Unknown
  Obtained from environmental sample
  DOMAIN (38)...(142): Adenylosuccinate lyase C-terminal
  misc_feature (1)..(194): Xaa is any amino acid
MGSSTMPQKRNPWNSEHVKSLWKAFMPRALTFFMDQISEHQRDLSNSASQRFISDYVAGFVLAVGRMAQVIEGLQVDRERLNANLKAAGSALLAEPAYILLAESGVTDAHEVIRKITLAAEKENLSFAQALEREKETLSAIAAKMAELGLIKTNRTDSVTAAALAWFENPEHYRGLAEKKARSIAAKYREEINV

SEQ ID NO: 20555 - DNA, 393 bp, Unknown
  Obtained from environmental sample
  misc_feature (1)..(393): n is a, c, g, or t
ttgcctggtttgagaatccggagcattaccggggtcttgcggaaaaaaaagcccgcagtattgcggctaaatacagggaggaaattaatgtttgaagtcagcctgtcttatgacgatgttcttcttttgccggggtactctgaggtacttccaaaggattgtgatatcagaaccagactctgcgatgatgtgcatttacacataccgattatttcagcggctatggatacggtaaccgaggaaaaacttgccattgcccttgcactcgaaggcggcgcgngtgtaatccaccgaaacctggacccggaagagcaggcaaggcaggctggaaacgttaagcgctatctgaactggattattgagaatcccgtttgcgtaaggaaaatgatctga

SEQ ID NO: 20556 - protein, 130 aa, Unknown
  Obtained from environmental sample
  DOMAIN (33)...(130): IMP dehydrogenase / GMP reductase domain
  misc_feature (1)..(130): Xaa is any amino acid
MPGLRIRSITGVLRKKKPAVLRLNTGRKLMFEVSLSYDDVLLLPGYSEVLPKDCDIRTRLCDDVHLHIPIISAAMDTVTEEKLAIALALEGGAXVIHRNLDPEEQARQAGNVKRYLNWIIENPVCVRKMI

SEQ ID NO: 20557 - DNA, 594 bp, Unknown
  Obtained from environmental sample
  misc_feature (1)..(594): n is a, c, g, or t
atgggattgagcatacagccaaaggcgtcgcagacgggttttgaagcatgggggtttgtacagccttacgcggacagcccgattaacagtgaaaatgtaggcgaacatgtatatatccagattattaatcaggcgaaaaagtatgtttatataaatacgccatatttaattgtagacgataacctcctttccgctcttacgctggcggcaaaaagcggcgttgacgtgcgcatcattacgcctcaccgttgggataaatggattgttgaaataacgtcccgttcatattacagaaggctgatacaggcaggtataaaagtctacgaatactcatccgggtttaaccacggaaagacatttgtttccgatgataaaatagcgacggtaggaactaccaatcttgatttccgcagcctttaccttcattttgagtgcggcgtgttaatctactcaagccaaacaatagccgcaattaaggaggattttatttctacattacctgtctgtcaggaaatgaccctgaaagattgcgcgagaaacgctatccaacgcgttactcaggatgtactgcgcgtcttcgcgccgttaatgtaa

SEQ ID NO: 20558 - protein, 197 aa, Unknown
  Obtained from environmental sample
  DOMAIN (111)...(138): Phospholipase D Active site motif
  misc_feature (1)..(197): Xaa is any amino acid
MGLSIQPKASQTGFEAWGFVQPYADSPINSENVGEHVYIQIINQAKKYVYINTPYLIVDDNLLSALTLAAKSGVDVRIITPHRWDKWIVEITSRSYYRRLIQAGIKVYEYSSGFNHGKTFVSDDKIATVGTTNLDFRSLYLHFECGVLIYSSQTIAAIKEDFISTLPVCQEMTLKDCARNAIQRVTQDVLRVFAPLM

SEQ ID NO: 20559 - DNA, 888 bp, Unknown
  Obtained from environmental sample
  misc_feature (1)..(888): n is a, c, g, or t
atggcgacaggagggtcggtagttgcaagccagtatatcggacgcaaggacggaaaaaacgcatgttgttcggcaaggcagcttgtttacataagccttttaatatccctaatcatgatgatcctgacaatggttttttgccgtcaggtattaaagctggtttacggaaatattgcggatgatgttatgcgttccgcgcaggtttattttttgataacagccctttcatatccttttctggctttatatacatccgcgtcttccctgttcagaagcatgggcaattccaaagtcagcatgaataccgccgttcttgtaaacataataaatatcgggggaaacgccctgtttatttacggcatggggcttggtgtcgcgggagcggcgctttcaacattaatcgggcgcatgatcgcggcggctgtactgacctatttattgatgcaggactggcttaacattattaatctgaaaggaataacaaagatcaaattagaacctgatatgataaagcgtatttttaatatcggcattcctagcggtcttgaaacttccatgtttcaaataggaaaaatcttaataacaaggatattcacatcattcggaaccgccgccattgcagctaacgctgtgggagctacaattaattccattgcgttcatgcccggcagcggtttcggcatggggcttatgataatcgcaggacaatgtataggcgcgggcgattatgaaggagtaagacagcagacaaaaaaaatactaaagctgtcttatatgacatattttttcattaacatacatatcctgattttcatgaatcaaattatcggattatttaatctttcggcggaagcgcaccaaatctcggccaatctgatacttggntaa

SEQ ID NO: 20560 - protein, 295 aa, Unknown
  Obtained from environmental sample
  DOMAIN (1)...(116): MatE
  misc_feature (1)..(295): Xaa is any amino acid
MATGGSVVASQYIGRKDGKNACCSARQLVYISLLISLIMMILTMVFCRQVLKLVYGNIADDVMRSAQVYFLITALSYPFLALYTSASSLFRSMGNSKVSMNTAVLVNIINIGGNALFIYGMGLGVAGAALSTLIGRMIAAAVLTYLLMQDWLNIINLKGITKIKLEPDMIKRIFNIGIPSGLETSMFQIGKILITRIFTSFGTAAIAANAVGATINSIAFMPGSGFGMGLMIIAGQCIGAGDYEGVRQQTKKILKLSYMTYFFINIHILIFMNQIIGLFNLSAEAHQISANLILG

SEQ ID NO: 20561 - DNA, 702 bp, Unknown
  Obtained from environmental sample
  misc_feature (1)..(702): n is a, c, g, or t
atggcaactacaataacaaccaacccggcaaataaagcgtctatagctaacgagtggtggactaacccagatggctctgccataaccccgccattcgttgcgggccgaacataccgcaagaacatcgaagtccagaactccgacccattatacaaaataaccagcgcaaccgccaaaacaatgaacggctctgatcctgatgaagcggtgttagagaacggagtgtggaggttgagcaaggacatggtggcagaaaacaaccgccagttcaccgacccgcgagatggaaaaacttacaggactgttgttatgcccgatggcaaaacttggatggcggaaaatctcaattggactggggctggcgtttattacggaagcgtagcaacgccaggcaatgcggagccattcccaaaagctggacgtctatatacacacgctcaggcattgacggcagcccccccgggttggcatttgccaagcgatgaggaatgggaagcaatgattaaagcaatagacatttatggggccgccgcgataaagctaagagcaacaagcgtctggagctctgttggtacatctactaccggcacagacgattacggattttccgctctgccgggtggccgccgcgctgccaacgtgtttgatgccccttacacctcagcttacttctggagttctacatcgagagaatccttataa

SEQ ID NO: 20562 - protein, 233 aa, Unknown
  Obtained from environmental sample
  misc_feature (1)..(233): Xaa is any amino acid
MATTITTNPANKASIANEWWTNPDGSAITPPFVAGRTYRKNIEVQNSDPLYKITSATAKTMNGSDPDEAVLENGVWRLSKDMVAENNRQFTDPRDGKTYRTVVMPDGKTWMAENLNWTGAGVYYGSVATPGNAEPFPKAGRLYTHAQALTAAPPGWHLPSDEEWEAMIKAIDIYGAAAIKLRATSVWSSVGTSTTGTDDYGFSALPGGRRAANVFDAPYTSAYFWSSTSRESL

SEQ ID NO: 20563 - DNA, 576 bp, Unknown
  Obtained from environmental sample
  misc_feature (1)..(576): n is a, c, g, or t
atgcaaaacaatcaacggttacgatatggtaacgtatcaggcgtgccatcagtacaatcaaataatggggagagaaatttcccagcagcttttatcgcgggttataaatatagtgggagcaagttcatggaacaagattcgaacagatcaatgaaagaggcggcgggtaaggccgcggtagacgctcttgtaaaaagcgggatgaaactgggtcttggcacgggttctaccgccattcacgcggttcgcagagttggcgaacttttagctaacggaacgttacgggacataagcgcctttgccaccagtttccagacggaaattgagtgtgaaaaacttgggatacccttttactcattgaattcgaaggaacttgcgagcgggcttgatcttaccatagacggagccgatgaggttgatcctcaaaaccgcgtgattaaaggcgggggaggggcgatgttgatcgaaaaattagccgcgtattcctccgcgttattcgccgttattgtggacgagtcaaaaatcgtacaaagcatagggacggtttttcccgttcctgtgctcggccgaatctga

SEQ ID NO: 20564 - protein, 191 aa, Unknown
  Obtained from environmental sample
  DOMAIN (97)...(191): Ribose 5-phosphate isomerase A (phosphoriboisomerase A)
  misc_feature (1)..(191): Xaa is any amino acid
MQNNQRLRYGNVSGVPSVQSNNGERNFPAAFIAGYKYSGSKFMEQDSNRSMKEAAGKAAVDALVKSGMKLGLGTGSTAIHAVRRVGELLANGTLRDISAFATSFQTEIECEKLGIPFYSLNSKELASGLDLTIDGADEVDPQNRVIKGGGGAMLIEKLAAYSSALFAVIVDESKIVQSIGTVFPVPVLGRI

SEQ ID NO: 20565 - DNA, 591 bp, Unknown
  Obtained from environmental sample
  misc_feature (1)..(591): n is a, c, g, or t
atgttcgttcccgccgacggctgttttggggataatacggactgcacaagtttttcagcgtcaattcgggttcttcttggcaaaaacatcttaaatggaaaaaagtttaccatcattggagcgggcggggtcgcgcgcgcggttgccgcggaagtttttcgtttgggaggcaaagccctaattttgaaccgtaccattcacaaagccaaagatctcgcgtcacagtacgattttcgctggggaggactggacgaacacggaattgaattagtgtataaatattcggatattatcattcaggcaacaacggttggaatgacaggatatgatgtttccgatcctttggaactctacagttttaccgggaaagaaattgtgatggatttggtatattttccggcgcagactccgtttttaacgcgagccgcggcagccggatgcaaaacaatcaacggttacgatatggtaacgtatcaggcgtgccatcagtacaatcaaataatggggagagaaatttcccagcagcttttatcgcgggttataaatatagtgggagcaagttcatggaacaagattcgaacagatcaatga

SEQ ID NO: 20566 - protein, 196 aa, Unknown
  Obtained from environmental sample
  DOMAIN (22)...(139): Shikimate / quinate 5-dehydrogenase
  misc_feature (1)..(196): Xaa is any amino acid
MFVPADGCFGDNTDCTSFSASIRVLLGKNILNGKKFTIIGAGGVARAVAAEVFRLGGKALILNRTIHKAKDLASQYDFRWGGLDEHGIELVYKYSDIIIQATTVGMTGYDVSDPLELYSFTGKEIVMDLVYFPAQTPFLTRAAAAGCKTINGYDMVTYQACHQYNQIMGREISQQLLSRVINIVGASSWNKIRTDQ

SEQ ID NO: 20567 - DNA, 774 bp, Unknown
  Obtained from environmental sample
  misc_feature (1)..(774): n is a, c, g, or t
gtgctggaagcggaaagagaattttttgtctccgaacctgtaagtatcggatcgaagctcggaggttcccctccggtaccggaaatattattcgagggttcaggacttctgatcctaaacaagcctgccggcatttccgttcatggcagaggaagcctggattccatagttcaatcctaccttgcccagaaattgcccccttccctttcgttcaagccaggccccttgcacaggctggacaagccaagctcaggcgtccttgctttttccgcaagccttgagggggcaaggcttttcagcggtatgatgcgcgggggaatgatcaaaaaggagtacctggccattttggaaggaaggatagaaaaagcggaatcctggggggatgagctttttcgtgataaaatgaataaaaagacctttacagaaaaccagattgaaaacaatcatgaacagctaaaagggaaatacgctgtaaccggtataaatccattaataacaaataaggcttgttcgcttgttcttttcaggatagaaacaggaagaacccaccagataagagcccaggcggcaagccgggggcatccgcttttgggagacataaaatacggggcaagccatttaagcgggggatttctgcttcacgcgtggcgcttgtatttgccaccccccttcactgccatgattgaagcccccctgcctgagaattttataactacaatcaaaaaactttttggtacgaatagccagcgcatactctcaaatttctaccactaa

SEQ ID NO: 20568 - protein, 257 aa, Unknown
  Obtained from environmental sample
  DOMAIN (35)...(191): RNA pseudouridylate synthase
  misc_feature (1)..(257): Xaa is any amino acid
MLEAEREFFVSEPVSIGSKLGGSPPVPEILFEGSGLLILNKPAGISVHGRGSLDSIVQSYLAQKLPPSLSFKPGPLHRLDKPSSGVLAFSASLEGARLFSGMMRGGMIKKEYLAILEGRIEKAESWGDELFRDKMNKKTFTENQIENNHEQLKGKYAVTGINPLITNKACSLVLFRIETGRTHQIRAQAASRGHPLLGDIKYGASHLSGGFLLHAWRLYLPPPFTAMIEAPLPENFITTIKKLFGTNSQRILSNFYH

SEQ ID NO: 20569 - DNA, 948 bp, Unknown
  Obtained from environmental sample
  misc_feature (1)..(948): n is a, c, g, or t
gtggagtttcttggggagccgatgaagctccgcgttgggccggggcttctaggccgcatcttcaacggcctcggggaggctgtcgacggctacggggacattttttcctcaacctgcctggacgtgaacgggctgcctatcaatccctacgcccgcacttacccgcgggattttatccagaccggcatatccgccatcgacggcatgaacacccttataaggggccagaaacttcccatcttttcaggcaacggccttccgcataaccggcttgccgcccagatcgtgcgccaggcgaagatcctgcatggttccggtgaaaccggagaagcggaacaatttgtgatcatcttctgcgccatgggggtcaagtacgatgtagcccgcttctttttggatgactttgagcgctcaggcgttttagccaacgtcgtggtctttctttcgctggcggacgcgcccacccttgagcgccttgtcgccccgcgctgcgcccttacagccgccgaatacctggcttacgaaaaaaacatgcacgtccttgtggtgatgaccgacatgaccaactactgcgaagccttgagggaggtttcttccatcaggggggaagttcccagccgcaaaggctatccgggctacctttactcggatctggcttcgctttacgaaagagcgggaaagattaacggctcaggcggatcgattacccagataccgatccttaccatgcccaacgacgacattagccatcccattcctgacctttcaggctatattaccgaagggcagatcgtcctggacagggagctgttccagcggggagtgtatcctcctgtcgccgggcttcccagcctttcccggctgatgaaggacggcatagggccgggcatgaccagggaggatcacaaagacgtttccagccagctctttgccgcctattcccagtaa

SEQ ID NO: 20570 - protein, 315 aa, Unknown
  Obtained from environmental sample
  DOMAIN (61)...(286): ATP synthase alpha/beta family, nucleotide-binding domain
  misc_feature (1)..(315): Xaa is any amino acid
MEFLGEPMKLRVGPGLLGRIFNGLGEAVDGYGDIFSSTCLDVNGLPINPYARTYPRDFIQTGISAIDGMNTLIRGQKLPIFSGNGLPHNRLAAQIVRQAKILHGSGETGEAEQFVIIFCAMGVKYDVARFFLDDFERSGVLANVVVFLSLADAPTLERLVAPRCALTAAEYLAYEKNMHVLVVMTDMTNYCEALREVSSIRGEVPSRKGYPGYLYSDLASLYERAGKINGSGGSITQIPILTMPNDDISHPIPDLSGYITEGQIVLDRELFQRGVYPPVAGLPSLSRLMKDGIGPGMTREDHKDVSSQLFAAYSQ

SEQ ID NO: 20571 - DNA, 306 bp, Unknown
  Obtained from environmental sample
  misc_feature (1)..(306): n is a, c, g, or t
gtgggcgcgtccgccagcgaaagaaagaccacgacgttggctaaaacgcctgagcgctcaaagtcatccaaaaagaagcgggctacatcgtacttgacccccatggcgcagaagatgatcacaaattgttccgcttctccggtttcaccggaaccatgcaggatcttcgcctggcgcacgatctgggcggcaagccggttatgcggaaggccgttgcctgaaaagatgggaagtttctggccccttataagggtgttcatgccgtcgatggcggatatgccggtctggataaaatcccgcgggtaa

SEQ ID NO: 20572 - protein, 101 aa, Unknown
  Obtained from environmental sample
  misc_feature (1)..(101): Xaa is any amino acid
MGASASERKTTTLAKTPERSKSSKKKRATSYLTPMAQKMITNCSASPVSPEPCRIFAWRTIWAASRLCGRPLPEKMGSFWPLIRVFMPSMADMPVWIKSRG

SEQ ID NO: 20573 - DNA, 480 bp, Unknown
  Obtained from environmental sample
  misc_feature (1)..(480): n is a, c, g, or t
gtggacgttaatccggtttgccgccggatacaccacgaaggagtaaaaatggcaaagaaaaaaattacggcttatgttaagctgcaatgcccggctggaaaggcaacgcccgcgccgcccgtaggccccgcgttgggaccgcatggggtcagcgctccgcagtttgtccagcagtttaacgacaaaacaaagggtatggaaccgggactcatcatccccgttatcatcacggtttatgcggataaatcatttacttttatcctcaaaactccgcctgcttcggtattgattaaaaaagcaatcggacttgaaaagggatcaaaagaatcccacaagattaaggtcggcaaaatctccagaaagcagcttgaagaaatcggcaagaccaagatggctgacttgtcagctaatgatcttgacgcggcggtaaagattattgccgggaccgcgcggtctatgggtgttgaggtggaaaaatga

SEQ ID NO: 20574 - protein, 159 aa, Unknown
  Obtained from environmental sample
  DOMAIN (25)...(84): Ribosomal protein L11, N-terminal domain
  misc_feature (1)..(159): Xaa is any amino acid
MDVNPVCRRIHHEGVKMAKKKITAYVKLQCPAGKATPAPPVGPALGPHGVSAPQFVQQFNDKTKGMEPGLIIPVIITVYADKSFTFILKTPPASVLIKKAIGLEKGSKESHKIKVGKISRKQLEEIGKTKMADLSANDLDAAVKIIAGTARSMGVEVEK

SEQ ID NO: 20575 - DNA, 384 bp, Unknown
  Obtained from environmental sample
  misc_feature (1)..(384): n is a, c, g, or t
atgaagcacggaaaaaaatacaaagaaagcgccaaaaaatataacccggccaacacttatgagcttacagaagcgttaaaacttgtcaaatcaatggcttacgcgaagtttgacgagactgtggatctgtccgtaaaactcaatcttaaaaagagccagaccgtgcgtgatacggtggttcttccccaccagttcagaggcgagaaaaaagtgcttgttttctgcaagcccgaaaaagaaaaagaagcccaggaagcgggagcgacgtttataggcgctgatgatttaattcaaaaggtaaaggaaggttggactgactttgacgtagcggtcgcgactcccgatatgatgaaagatgtcggcaagctcggtatggttttttag

SEQ ID NO: 20576 - protein, 127 aa, Unknown
  Obtained from environmental sample
  DOMAIN (14)...(126): Ribosomal protein L1p/L10e family
  misc_feature (1)..(127): Xaa is any amino acid
MKHGKKYKESAKKYNPANTYELTEALKLVKSMAYAKFDETVDLSVKLNLKKSQTVRDTVVLPHQFRGEKKVLVFCKPEKEKEAQEAGATFIGADDLIQKVKEGWTDFDVAVATPDMMKDVGKLGMVF

SEQ ID NO: 20577 - DNA, 513 bp, Unknown
  Obtained from environmental sample
  misc_feature (1)..(513): n is a, c, g, or t
atgactatggcaagcaagatcgtcgttatgaaggacggaagggtgcagcagattggcacgcccctctatctgtacaacaatccgaacaacaaattcgtagccggattcatcggctccccgccgatgaacttccttaccgtaagggtctcggaagaaggcagttcaatcgtgctggatgagggatcgttcaaggttaaggcggacgcgtctcacgccgcccacctgaaaaaatatgcggggaaagaaatcttcttcggcattcgccccgaggatatgaactacgtagaatccggcgcggacaacagctttgccacaaaaataaccgtggttgagccgctgggcgcggatatacacctctggcttaccaccgggacacaacccctggttgcgcgcaccgagcctcaccatgtgttcaaggtcggcgaaactgccaggttcattcccaagatggataaagcccgctattttgacaaggaaacagagcttgccatcctgccaggacccccaaaataa

SEQ ID NO: 20578 - protein, 170 aa, Unknown
  Obtained from environmental sample
  DOMAIN (85)...(156): TOBE domain
  misc_feature (1)..(170): Xaa is any amino acid
MTMASKIVVMKDGRVQQIGTPLYLYNNPNNKFVAGFIGSPPMNFLTVRVSEEGSSIVLDEGSFKVKADASHAAHLKKYAGKEIFFGIRPEDMNYVESGADNSFATKITVVEPLGADIHLWLTTGTQPLVARTEPHHVFKVGETARFIPKMDKARYFDKETELAILPGPPK

SEQ ID NO: 20579 - DNA, 738 bp, Unknown
  Obtained from environmental sample
  misc_feature (1)..(738): n is a, c, g, or t
atgagctaccacggaggggtcataggcggtgttttatcgatccttatttattcatggaaaaagaaatttgattgccgggagatcggggatatgtacgcggcgagtattcccctgggatataccttcggaagaatcgggaattttataaacggcgaactctttggccgtattacaaccgggccgctgggaatggttttccctaacggaggtatctacccatcggatagatattactcagccatcatgagtgaagcggaacgtatgggcctgggttttgttcccggcgcggtctttaatcctccccggcatccttcccagctttacgaggctctttttgaagggattgtcctttgggccattatctggttctggcggaaccggaaaccttttaagggcttcctcatcaccctttacctctcaggttatggtcttatccgttttatcctggaatatttccgggagcctgacgcggacttgggttaccggattcaattggtacaaaacaatttgccccctgcgttggctcatcctctgctttctttttccacaggccagattctctcctttggaatgattctcctggggctcgtctgggcggtgatcgcgctgcgtatgcctgacagggaacctgtgcgggtttattcctccgacaatgacaataagccgaaacccaaaaaccccggtgaaaaagcaacggaacgtaaccgccggcggaaattgcgcggaaaactcaagtag

SEQ ID NO: 20580 - protein, 245 aa, Unknown
  Obtained from environmental sample
  DOMAIN (1)...(205): Prolipoprotein diacylglyceryl transferase
  misc_feature (1)..(245): Xaa is any amino acid
MSYHGGVIGGVLSILIYSWKKKFDCREIGDMYAASIPLGYTFGRIGNFINGELFGRITTGPLGMVFPNGGIYPSDRYYSAIMSEAERMGLGFVPGAVFNPPRHPSQLYEALFEGIVLWAIIWFWRNRKPFKGFLITLYLSGYGLIRFILEYFREPDADLGYRIQLVQNNLPPALAHPLLSFSTGQILSFGMILLGLVWAVIALRMPDREPVRVYSSDNDNKPKPKNPGEKATERNRRRKLRGKLK

SEQ ID NO: 20581 - DNA, 879 bp, Unknown
  Obtained from environmental sample
  misc_feature (1)..(879): n is a, c, g, or t
atggaataccaccgcgaatggtacgccaaagcaaacccggcaacgcaaaagaaatacaaggacgatttttttaccaacgcggaaaacgaaattcagttaacgcttaagaagaaaacggaaattcttaaaaacaatatnttcggtgtagacatagatcgagaagcgactgaagtcgccattatgagcctgtacctaaaaatccttgacgaaggctacgacaagggtcaagcagagttatttatgcggggtcatatactgccggatatgacggggaatgttaagtgcgggaattcgctcatcgaccggaaacagctttttgactatgactttttcggcgaccctgatataaacccttttgactggcaggaattcaacgccgaaggttttgacgttatcatcggcaatccgccgtacatacggattcaggaaatgcaggaatgggcgcctaaaacggtcaaactgtaccgggaactctacaaggcaagttcggcgaaaaactatgatatatatgtcatattcattgaaaaagccctttcccttttgtctcccgccggttttataggaatgattttaccgaataaatttatgcagcaggaatacggcgagatgattcgttcccaaatttccacggacagcaatctctacaaactggttaattttaaggattttcaggttttcaagggggccacgacctatacctgccttttgtttttgtcaaaagaaaagaacagcgtttttgattatgccgaatgtcataatgctgacatagacacaacgtttagcaaaattgattccgggcgaatttccgccgttccgtgggttttgcataacaaggatgatctcgcgttcttcgatgcgctcaggtttacccaaagttag

SEQ ID NO: 20582 - protein, 292 aa, Unknown
  Obtained from environmental sample
  misc_feature (1)..(292): Xaa is any amino acid
MEYHREWYAKANPATQKKYKDDFFTNAENEIQLTLKKKTEILKNNXFGVDIDREATEVAIMSLYLKILDEGYDKGQAELFMRGHILPDMTGNVKCGNSLIDRKQLFDYDFFGDPDINPFDWQEFNAEGFDVIIGNPPYIRIQEMQEWAPKTVKLYRELYKASSAKNYDIYVIFIEKALSLLSPAGFIGMILPNKFMQQEYGEMIRSQISTDSNLYKLVNFKDFQVFKGATTYTCLLFLSKEKNSVFDYAECHNADIDTTFSKIDSGRISAVPWVLHNKDDLAFFDALRFTQS

SEQ ID NO: 20583 - DNA, 318 bp, Unknown
  Obtained from environmental sample
  misc_feature (1)..(318): n is a, c, g, or t
atggaatcgagcatttttaacagcggaaaaatggactttgtggccggaggcagcgtaagagacgacatacgcgctgaacgccaggaccagcagagtaacgccagcgccgcgacaagggcggcattgcgaaacgaaacgggcgcggactatatgcttactggaactgtaaggtctatcgttgacagagaaagcaacagaactgtcagaacatactttgttactgccgaactgaccgatattgagacaaatatgcgtatgtggataggacagaacaacgacattaaaaaaattgttacacagccgagaaacagattatag

SEQ ID NO: 20584 - protein, 105 aa, Unknown
  Obtained from environmental sample
  misc_feature (1)..(105): Xaa is any amino acid
MESSIFNSGKMDFVAGGSVRDDIRAERQDQQSNASAATRAALRNETGADYMLTGTVRSIVDRESNRTVRTYFVTAELTDIETNMRMWIGQNNDIKKIVTQPRNRL

SEQ ID NO: 20585 - DNA, 783 bp, Unknown
  Obtained from environmental sample
  misc_feature (1)..(783): n is a, c, g, or t
atgaacggcggaaccattacaggaaataaaacccttgcaaccgtagccggcactatcttaagaggcggagggctaaatgtaaggaatgataaaaaaactgccactgtcaaattaaacggcggttctatcatagagaatgaaggtcccactgctgacgtttggctccacaacggcggctttacactttcgggaaatatgacaattggcgagttgacaatagctcttgccttaaacggttcaatctattccacattatgtgtcataaaaattgctgataactggactggaagtgtcagtagattgaacatgaggggtgtcggcaatgttttagcggatattcccgaacaatggtcaaatataaagataattgaaggcgctgacggttactctcttaaaaccactgatttggcaaaattcaataacgcgtatttttacacggcagcaggcgcttcaaaccaacccatcgccgacacgcacaaaatagaaaattccggcgagaacattggtaaactgataagaacagctttctcctccgctcctgtacttactcttacacccggcgacgcaaaacttacctacacatggacagcctccgcccctgttgcggacagctacgacgtttattggaaagcgagaagcggtttgagcgcaactgaagtaaaaaccggcacgaagattaccggagccaccaccggcggcgtaataagcggattaaccaacggcacggcgtacagcgttattgttgtgccgaataaagcggacttactcagcattgattcatag

SEQ ID NO: 20586 - protein, 260 aa, Unknown
  Obtained from environmental sample
  misc_feature (1)..(260): Xaa is any amino acid
MNGGTITGNKTLATVAGTILRGGGLNVRNDKKTATVKLNGGSIIENEGPTADVWLHNGGFTLSGNMTIGELTIALALNGSIYSTLCVIKIADNWTGSVSRLNMRGVGNVLADIPEQWSNIKIIEGADGYSLKTTDLAKFNNAYFYTAAGASNQPIADTHKIENSGENIGKLIRTAFSSAPVLTLTPGDAKLTYTWTASAPVADSYDVYWKARSGLSATEVKTGTKITGATTGGVISGLTNGTAYSVIVVPNKADLLSIDS

SEQ ID NO: 20587 - DNA, 918 bp, Unknown
  Obtained from environmental sample
  misc_feature (1)..(918): n is a, c, g, or t
ttgtcgaatcaagttccncacggcctttcgccccgcaccaaccggctgggggatgttgaatttgacgcggcagtgttgaccaatgtaacccatgaacatctggaattccacggctcatgggaacagtaccgcgatgataaggccaatttattccgcgccctggataaaggctacgcgaaaacaggcattgagggcgtagaaaagattccccagccgtttggtgtcatcaatgccgatgacaacagcgcgtcttattttgccggtgtgaccagacagaaaacattgagtttcagcgtcaacggaaatgacgcggatttaacggtaagggcaacagaaagcggcgcctgcgataactggtattatgttcacatcagcgctgaaaataccgctattgatatacgcgaccggctacccggcgcgtttaacgcggggaatgtgctggcggcgctgctgacagtgtccggcctgaccggcgttccggcgcggaaaattgcctcgctctgcccccggctgctacctgtgcgggggcgcatgaccgccattaacaaaggccagccttttgaagtactggtggactatgcccataccccttcgtcgtttcaggcggtttttccgccactgcggaaacggcttgatctttcgggcggcaggattatcagcctctttggttccgccggcgagcgggacacccaaaaacgcgctgagcagggaaagattgccgccgcgtattcggactgtatcgtgctaaccgacgaagaccctcggggcgaaattcccatggacatacttgatgaaattgcccgtggggtatatgctgaaaaaccaggctttatcaaacaaaatgaaatcttttttttatacccgaccgtcctgccgccattcacaaagccctgtcccttgccccttcaggtgatatag

SEQ ID NO: 20588 - protein, 305 aa, Unknown
  Obtained from environmental sample
  DOMAIN (7)...(153): Mur ligase middle domain
  misc_feature (1)..(305): Xaa is any amino acid
MSNQVPHGLSPRTNRLGDVEFDAAVLTNVTHEHLEFHGSWEQYRDDKANLFRALDKGYAKTGIEGVEKIPQPFGVINADDNSASYFAGVTRQKTLSFSVNGNDADLTVRATESGACDNWYYVHISAENTAIDIRDRLPGAFNAGNVLAALLTVSGLTGVPARKIASLCPRLLPVRGRMTAINKGQPFEVLVDYAHTPSSFQAVFPPLRKRLDLSGGRIISLFGSAGERDTQKRAEQGKIAAAYSDCIVLTDEDPRGEIPMDILDEIARGVYAEKPGFIKQNEIFFLYPTVLPPFTKPCPLPLQVI

SEQ ID NO: 20589 - DNA, 669 bp, Unknown
  Obtained from environmental sample
  misc_feature (1)..(669): n is a, c, g, or t
atggcgagtcttccagccggacacatgagcgttgagaggcgcaacttgttaaaagcgcttaacgcggagcttgtgcttactcccggcaaggacggcatgaagggcgcaatcagaaaagccgaggagctttcgctcttttttgaaaaatcttttatccctcagcagtttaacaatccagctaacgcccgcgttcaccgcgaaaccaccgccgttgaaatctggaacgatcttgacggagagcttgacgtatttgtggcgggcgtcggaacaggcggcactatcacaggcgtcggcgaagttttaaaagaaaaaaatcccaagataaaaattgtagccgtggaaccctttgactctcccgtactttcgggcggcgttccgggaccgcacaagattcaaggcatcggcgcgggattcattccgaatgtactgaacacaaaagtaatagatgaagtatttaaagtaagaacggaacaagcctttgaaaccgcgcaggacttggcgcggacagaagggcttttagtcggcatatcttcggcggcggcggctttcgcggcggcggagattgcgaaacgttcggaatacaaaggcaagaccgttgtggctctgctgcccgacacgggagaaagatacctttccaccccgttgtttgacagaccgcaagcaatataa

SEQ ID NO: 20590 - protein, 222 aa, Unknown
  Obtained from environmental sample
  DOMAIN (1)...(206): Pyridoxal-phosphate dependent enzyme
  misc_feature (1)..(222): Xaa is any amino acid
MASLPAGHMSVERRNLLKALNAELVLTPGKDGMKGAIRKAEELSLFFEKSFIPQQFNNPANARVHRETTAVEIWNDLDGELDVFVAGVGTGGTITGVGEVLKEKNPKIKIVAVEPFDSPVLSGGVPGPHKIQGIGAGFIPNVLNTKVIDEVFKVRTEQAFETAQDLARTEGLLVGISSAAAAFAAAEIAKRSEYKGKTVVALLPDTGERYLSTPLFDRPQAI

SEQ ID NO: 20591 - DNA, 759 bp, Unknown
  Obtained from environmental sample
  misc_feature (1)..(759): n is a, c, g, or t
ttggccgaggtattcagacccttgcattttataggatatggaattagcgcaactcattacaattctctaaaccctcaaaaattgagcgagatgctgcaaaaatacaatggcgaagtttattatgtgaaaggcttggattgctgggacagccaaacctaccataaaaaagccgttgaacaccgtatagccacagtgtgcgaccgctttgagcaaatttttccaatggaaccggttttcaatacggtgataacaaataattatcgcttggttatagcaaagctaaaggaaaatggcacaggttcccagctatttgccccgcaagaggcaaatattgaattgccagaaaatgcagagtggcttggagcacccacagaatatcgtcaggagtggggttctttgcaaattgacaaatctgttacaggcaaacctttaaccgttgccaaaaaacgttataaaaacggaatgggcacacacgcaagcggattcctccgctgggaactaaatggcgaatacgaaagattaacagctattttaggtttagacgaagatgaattttgcagtaatggagttcaaataaaaattttaggaaatgggaatttgcttgcagacacaggaaaattagggcaaggacaggaatatcctctggacatttccttaaaaggaattaatcaactgacttttgaaacagatgcgcttggcgatattggctgcgatcacgtggacatagtagctgcgatactattcaaacctatcccctga

SEQ ID NO: 20592 - protein, 252 aa, Unknown
  Obtained from environmental sample
  DOMAIN (113)...(249): NPCBM domain
  misc_feature (1)..(252): Xaa is any amino acid
MAEVFRPLHFIGYGISATHYNSLNPQKLSEMLQKYNGEVYYVKGLDCWDSQTYHKKAVEHRIATVCDRFEQIFPMEPVFNTVITNNYRLVIAKLKENGTGSQLFAPQEANIELPENAEWLGAPTEYRQEWGSLQIDKSVTGKPLTVAKKRYKNGMGTHASGFLRWELNGEYERLTAILGLDEDEFCSNGVQIKILGNGNLLADTGKLGQGQEYPLDISLKGINQLTFETDALGDIGCDHVDIVAAILFKPIP

SEQ ID NO: 20593 - DNA, 828 bp, Unknown
  Obtained from environmental sample
  misc_feature (1)..(828): n is a, c, g, or t
ttgtcgctgcttaattaccgccgttcttacgatattgcgctgtacgtgtaccttattatcctgatccccctgttgtacacctgtgtttttggccgggtggttcacggtacccgctggctgagactcggcatgtttggcattcaggcgtcggaattcgcgaaaatttccaccattatttttctggcccgttatctgacagacacacggctcagcgggaatccttttggccgttttttagcggcctgttttatcgtgcttgttcccatgggaatcgtgcttattcagccggacctgggcacctcgctggtatttattccgattctgctctccatgacttttgtcgccggtatatcaacgcgtaatatattttttttaattttctgtattctgcttaccagccttttaacggttcttccgttctggcaaacctatattctgcggaaatccctgcccgccattgtgatgctgaccaatccccgccttatcattataactatccttgccctaggtcttatcatgggcattgccctgtttggttatctgaaatacaagaagcggtatttttactggctgttttattttgtcgcgattattgttttgtcgctgggcgcttcttatgcggcgcgcaaagtgttaaaaaattatcagatcatgcggctgattgtgtttcttgaccccaatgtagacccgcggggcgcgggctggaacattatccagtccgttaccgccatcggggccggcggctttaccggccagggatttttacagggaacccaaaatcattaccgttttctccccgaacagagcacccactttattttttcataa

SEQ ID NO: 20594 - protein, 275 aa, Unknown
  Obtained from environmental sample
  DOMAIN (1)...(226): Cell cycle protein
  misc_feature (1)..(275): Xaa is any amino acid
MSLLNYRRSYDIALYVYLIILIPLLYTCVFGRVVHGTRWLRLGMFGIQASEFAKISTIIFLARYLTDTRLSGNPFGRFLAACFIVLVPMGIVLIQPDLGTSLVFIPILLSMTFVAGISTRNIFFLIFCILLTSLLTVLPFWQTYILRKSLPAIVMLTNPRLIIITILALGLIMGIALFGYLKYKKRYFYWLFYFVAIIVLSLGASYAARKVLKNYQIMRLIVFLDPNVDPRGAGWNIIQSVTAIGAGGFTGQGFLQGTQNHYRFLPEQSTHFIFS

SEQ ID NO: 20595 - DNA, 657 bp, Unknown
  Obtained from environmental sample
  misc_feature (1)..(657): n is a, c, g, or t
atggttgataagcataccttaggcgtaacaaatataaccaagcgttttggaaaaaaagaagtggttcgcggggtaaattttacaatggtcaacggcgaggtcgcgggccttttggggccgaacggcgcggggaagacgacgattttttacatgattgtcggtttttaccggccaagcggcgggtttgtccacatggatgatatagacatcaccgccaagcccatgtaccgcagggcgcggcagggcatcgcgtacctgccgcaggaggcctccattttccgcaagctgacggtggaaaagaacatctgggccatacttgaaagccgccgggacattgataaagaagccaaaaaacagcggcttgaagccctgttggaagaattcgggatagccaggatacggaagcagtttggctataccctttccggcggcgagaggcggcgtacggaaattgcccgcgctctggcgacagagcccaaattcctcctgctggacgagccttttgccggcatagaccccattgcggtttacgagatcaaacagattatccgccgccttgccgaanaaggcataggcatccttatcaccgaccataatgtccgcgacaccctggaaataccacggaggcgtttattatcgccgagggttcgattgtag

SEQ ID NO: 20596 - protein, 218 aa, Unknown
  Obtained from environmental sample
  DOMAIN (32)...(215): ABC transporter
  misc_feature (1)..(218): Xaa is any amino acid
MVDKHTLGVTNITKRFGKKEVVRGVNFTMVNGEVAGLLGPNGAGKTTIFYMIVGFYRPSGGFVHMDDIDITAKPMYRRARQGIAYLPQEASIFRKLTVEKNIWAILESRRDIDKEAKKQRLEALLEEFGIARIRKQFGYTLSGGERRRTEIARALATEPKFLLLDEPFAGIDPIAVYEIKQIIRRLAEXGIGILITDHNVRDTLEIPRRRLLSPRVRL

SEQ ID NO: 20597 - DNA, 516 bp, Unknown
  Obtained from environmental sample
  misc_feature (1)..(516): n is a, c, g, or t
atgtacgcgtttaaggcaatgaccgcggtgcggggagacatagtattgggcggacagcattacagcctggatcccgggcgctgttccgggttttttagcgattcgaaaggttatttcccgtaccatttgaagggagtgtattgcggcagcatgggttttgacgcggagggcaggcgtttcgggtttcatcttgccgaaaaccaggcgaaagaaatcagaaaaaacaacgagaacgccctgtggctaaacgggcgcttaacgcctttgccccccgtgcgaatcaccatgtcaaacgaaccgcagtcggaatgggtcatccaggatgtggacggcatggtagacctcgtatttacgccaaaaataattaacaagtttggggttaacttcctggtgtcaaacggcgaattctttgctcctatggggcaatataacggtatgctgctcagcgccaaaggagagcagatacagatgcggaaccagtggggtattggcgagaaactctatttgagggtgtga

SEQ ID NO: 20598 - protein, 171 aa, Unknown
  Obtained from environmental sample
  misc_feature (1)..(171): Xaa is any amino acid
MYAFKAMTAVRGDIVLGGQHYSLDPGRCSGFFSDSKGYFPYHLKGVYCGSMGFDAEGRRFGFHLAENQAKEIRKNNENALWLNGRLTPLPPVRITMSNEPQSEWVIQDVDGMVDLVFTPKIINKFGVNFLVSNGEFFAPMGQYNGMLLSAKGEQIQMRNQWGIGEKLYLRV

SEQ ID NO: 20599 - DNA, 786 bp, Unknown
  Obtained from environmental sample
  misc_feature (1)..(786): n is a, c, g, or t
atgccgggcggctcaatgaacgtctctaccgccgtcacggtcataaacaccatagtagccgacgccatgaagactatctgcgatcggataaaaaaagaactcaacaaaggcaagggcgacaaacacgccgccgccgcgatcggtgagagcgaggcgaaagataccgacggaagcggagagagcggcggcggtcaacacggaaacatcggcaatcaaaccgccgccgccgtgatgaacgtcctctccgccataatcaaagagtcaaagcctgtcctatttgacggcgacaacaactcaatcgagtgggcgaaagaggcgcaggcacgcggcctgcaaaacatcgtgtccacaccggaagccctaaaagcgttcatcgaccccaaaacagtagaactattcgaacgccacaaggtattttcggagaccgaactcaaaacgatgtacaacacccagctcggccaatacgagaaatcactcgacatagagatcaaaactctgatagatatagtcaatacccaagtgctgccggccgcctacaactaccaagcggatatcgcgagcggcttagaggtgcttagggtgcttgccgacgacatgaccatcgagatgaccgacggcgcgttggaagaccgcaaggagatgtttgaaaaactcaccgcggaaatttactatgtccgtaagaatatgaaagaactgtcggtaagggtagataagtcgtacatggtggcggctgcggagagggccgcgtacctattcaaggagatcaatccgcagatggacacataa

SEQ ID NO: 20600 - protein, 261 aa, Unknown
  Obtained from environmental sample
  misc_feature (1)..(261): Xaa is any amino acid
MPGGSMNVSTAVTVINTIVADAMKTICDRIKKELNKGKGDKHAAAAIGESEAKDTDGSGESGGGQHGNIGNQTAAAVMNVLSAIIKESKPVLFDGDNNSIEWAKEAQARGLQNIVSTPEALKAFIDPKTVELFERHKVFSETELKTMYNTQLGQYEKSLDIEIKTLIDIVNTQVLPAAYNYQADIASGLEVLRVLADDMTIEMTDGALEDRKEMFEKLTAEIYYVRKNMKELSVRVDKSYMVAAAERAAYLFKEINPQMDT

SEQ ID NO: 20601 - DNA, 945 bp, Unknown
  Obtained from environmental sample
  misc_feature (1)..(945): n is a, c, g, or t
gtggttgttatcgtggacgagtacgataagccgtttctcgacttctacgntaagccgtctctggcgcaggagatgcgcgaaattatgcgggattattacatcacactcaaggccaacgagcggtacatgaaatacctgtttatgaccggaatctcaaagttcgccaaaatgggcgtcttctccacactgaacaatctaaccgacatctcgctcaagaaagaattcggcgcgttattcggatataccgaagaagagttggttgagaatttcggcgagcatcttgaggccggagcgaagaaattaggttgtactgccgatgaattagttgagaagatgaggcggtactacaacggtttttgcttcgatggggtacaaaaagtgtacaatccgttctccgcgcttaattttttgacggacttcgagtttgcgaattactggatggagagcgcaagccctaagataatcgccgactacatgaaagaccgaaacctgacggttgagcagtttgtcggaatgcaggtatcaaagaattttgtgagggccccgggcgagatggagaccgcgccgccggagggctttctgtatcaatccggttacctaacgcttcgggaaggggtctccgacgatttttcgctggactatccgaatattgaggtgcttgaatccatgtcgcagttggtaacgaagaacatcatccaaaacggcggcgactactttgttgactttcgtaccccaattttggatgcggtaagggacgataacgccgacctttttatcgaaacgataaaccgcctcttggcgagcgtaccatacgacgactatgccaaggcggcgcagtcgtcgataagacggtcaggcatacccgccggagagtggctataccgctcgaccatccttgccttcctgcgaggttgcggggtactggtcactcgtgccgaattctga

SEQ ID NO: 20602 - protein, 314 aa, Unknown
  Obtained from environmental sample
  DOMAIN (1)...(314): Protein of unknown function (DUF1703)
  misc_feature (1)..(314): Xaa is any amino acid
MVVIVDEYDKPFLDFYXKPSLAQEMREIMRDYYITLKANERYMKYLFMTGISKFAKMGVFSTLNNLTDISLKKEFGALFGYTEEELVENFGEHLEAGAKKLGCTADELVEKMRRYYNGFCFDGVQKVYNPFSALNFLTDFEFANYWMESASPKIIADYMKDRNLTVEQFVGMQVSKNFVRAPGEMETAPPEGFLYQSGYLTLREGVSDDFSLDYPNIEVLESMSQLVTKNIIQNGGDYFVDFRTPILDAVRDDNADLFIETINRLLASVPYDDYAKAAQSSIRRSGIPAGEWLYRSTILAFLRGCGVLVTRAEF

SEQ ID NO: 20603 - DNA, 819 bp, Unknown
  Obtained from environmental sample
  misc_feature (1)..(819): n is a, c, g, or t
ttgatcgcgagacaccgtattgccgaggcgggcgaggatatgaaaaagctgaaatacagactgtccatacatgagggggccggcgcggtcaaacttgccaaggaaacgcgagaggagattgataggcttcaagataaaatcgacaaatacgaggcgaagataagcgctaacagggataagcgttatcagatgttgtcgcaggaatacgccaagccggagaagccggatcatcacctcacattcgaacaacagttggaattaaagaaggccggaaggggggctggcaggggtagcggcgacagggcagctattgaagcagacagggcggcggaaagatatacacagcgtctgataaaaagagaggccgacatgaagaaaggcgttgttgatgcggagaagtatgtcaaggaatgcgaagctaaaaaggaaaaactgtccgcagatcagaaagcgctggacgccttattgaaaggcgggaagaagttcgcaaagaaagaacttgaagagaaggcgcggctagaagaggagattgctaaaacgagaaaagaacttggcggcaacgccgacgaagtagtctcccgtgcaataaatatgcgaaagcaggcaaaagctaggctgtcagccgtatgggacgaggcggaagcggccacatccaaactctcaaacatagagctagagacttgggtagacaacaataaggatagatgggataaaagcaggtcgcaccttgccacggcaaggatcatcccgccgcgcggcggcgcctccacgccgtcgcaaagcgcgatcccagcaacgacaagaaaaggtgcattctaa

SEQ ID NO: 20604 - protein, 272 aa, Unknown
  Obtained from environmental sample
  misc_feature (1)..(272): Xaa is any amino acid
MIARHRIAEAGEDMKKLKYRLSIHEGAGAVKLAKETREEIDRLQDKIDKYEAKISANRDKRYQMLSQEYAKPEKPDHHLTFEQQLELKKAGRGAGRGSGDRAAIEADRAAERYTQRLIKREADMKKGVVDAEKYVKECEAKKEKLSADQKALDALLKGGKKFAKKELEEKARLEEEIAKTRKELGGNADEVVSRAINMRKQAKARLSAVWDEAEAATSKLSNIELETWVDNNKDRWDKSRSHLATARIIPPRGGASTPSQSAIPATTRKGAF

SEQ ID NO: 20605 - DNA, 750 bp, Unknown
  Obtained from environmental sample
  misc_feature (1)..(750): n is a, c, g, or t
atgtatacttttccatacagcaacatatattttctagaattcattgttactatgcgatataattacatatacgatatgatagaatacgtcgtccctatgaatattgatgatagggcattggcaaaagcggcgcgggtactggaaagcggcgggctagtcgccttacccaccgatacaagctggagcataacctgttccctgaaatcccccggtggcattaaaaagctgaaaaaactgtccggagagagggacgaacggcattttaccctgctttgctcgggaatttcgcagtttggggagttatgcagcctggacaacagccgtttccgcctgataaaccgcctttctcccgggccttatgtgtttatattaaaaacgcttccgggtaccgaaaaagccctggacatacgccggaaggaagtcggcgtcagaatccccgatcattccataccccttgcccttattgacacgcttcagcagcccctttactcaataacagccaaaaagagcatgcaggaagaggttgaatttgaagataatgactccgatgatcatganaccgagcttccacccattcccgaagacaacctttttgaangcggctgggagctggacggaatcgacggccttgacctgattttagaccgcngcgaagagcgtgaacgtattttttccaccattcttgatttatccggcgatgatgtcatattgctaagaacaggcgcggcgcatggccattttaagatttag

SEQ ID NO: 20606 - protein, 249 aa, Unknown
  Obtained from environmental sample
  DOMAIN (44)...(241): yrdC domain
  misc_feature (1)..(249): Xaa is any amino acid
MYTFPYSNIYFLEFIVTMRYNYIYDMIEYVVPMNIDDRALAKAARVLESGGLVALPTDTSWSITCSLKSPGGIKKLKKLSGERDERHFTLLCSGISQFGELCSLDNSRFRLINRLSPGPYVFILKTLPGTEKALDIRRKEVGVRIPDHSIPLALIDTLQQPLYSITAKKSMQEEVEFEDNDSDDHXTELPPIPEDNLFEXGWELDGIDGLDLILDRXEERERIFSTILDLSGDDVILLRTGAAHGHFKI

SEQ ID NO: 20607 - DNA, 675 bp, Unknown
  Obtained from environmental sample
  misc_feature (1)..(675): n is a, c, g, or t
atgctgaaagtacagaccgagaaaaaaaacgcggaagtccttcttgccgtactggataaaataagcccgatgcttgaagacggcaagccgatacgtttagccaatctaaacgatgacgaaaaagccgcgatctatgacagtcactttattaccgccaaaccccagctttatgtgtgtaatgttgatgaagaaggaatccgctctattgccgctggcggcgaggggaacgcccatgtgcaggcggtgaaaaaacgcgctgaggcggaaggctccacggcaatctgcatctgcggcaagttcgaggcggagctttctgatataactaatatagaagaaaagatcgccttccttgaagagcttggccttaaagagccggggctttcctcccttatccgttcggcgtatcaactgcttaacctgcgaacttttttcacggctggcgaagacgagtgccgtgcgtggacaattcacaaaggcgatacggctccaaaagccgcgagcgttattcacacagattttgaaaaaggttttataaaagcggaagtgtatacctgcgatgacatttttacttacggaacagaagctaaaataaaagaagccggaaaataccgtgttgaaggcagggattatgtcgtgcaggacggcgatgtgatgtattttaggtttaatgtgtga

SEQ ID NO: 20608 - protein, 224 aa, Unknown
  Obtained from environmental sample
  DOMAIN (140)...(223): Protein of unknown function (DUF933)
  misc_feature (1)..(224): Xaa is any amino acid
MLKVQTEKKNAEVLLAVLDKISPMLEDGKPIRLANLNDDEKAAIYDSHFITAKPQLYVCNVDEEGIRSIAAGGEGNAHVQAVKKRAEAEGSTAICICGKFEAELSDITNIEEKIAFLEELGLKEPGLSSLIRSAYQLLNLRTFFTAGEDECRAWTIHKGDTAPKAASVIHTDFEKGFIKAEVYTCDDIFTYGTEAKIKEAGKYRVEGRDYVVQDGDVMYFRFNV

SEQ ID NO: 20609 - DNA, 504 bp, Unknown
  Obtained from environmental sample
  misc_feature (1)..(504): n is a, c, g, or t
gtgggtactacccggcgcaggggcagaaggcgtaaaagtatcagcatggaaccgcgcgcccttaccgagtggcttaaaaagcaggaacgtgcgcctgtagcctttgttttcggcaacgagcgcaccggtcttgaggaagacgagcttaatttctgcaatgtcgcatcacacgtccctgtttccgattccttcccctcgctcaacctttcccacgccgtgcaaatatacgcctacgagctttttctcgcctttggtcaaatcgaggaaaaccccgttaaaggggaatgggtcccgctggaatatccggcggttatgcagcttaccgaaagcataaccagtacccttgccgaacttggtttttacaaacgacccggtcgcgaggaacagacccgtttcttgcgggatttaatctgtcgcgccggtttgacggaaagggaaggccgctacctcaaagacatcttttccaaagcagcaagacttgggataattaggaatgaggagtga

SEQ ID NO: 20610 - protein, 167 aa, Unknown
  Obtained from environmental sample
  misc_feature (1)..(167): Xaa is any amino acid
MGTTRRRGRRRKSISMEPRALTEWLKKQERAPVAFVFGNERTGLEEDELNFCNVASHVPVSDSFPSLNLSHAVQIYAYELFLAFGQIEENPVKGEWVPLEYPAVMQLTESITSTLAELGFYKRPGREEQTRFLRDLICRAGLTEREGRYLKDIFSKAARLGIIRNEE

SEQ ID NO: 20611 - DNA, 714 bp, Unknown
  Obtained from environmental sample
  misc_feature (1)..(714): n is a, c, g, or t
atggcgatagtggacgctgacgtgcagatgaacgcgcccaagggactgacaagcgcaagcggcatagacgctgtaacccacgcgctggaagcntacgcctcggttatggcgaccgattacaccgacggtcttgcgatacaggcgctcaaggtgattttcgaatggctgcccgtcgcgtacaacgaaggcgcggcgaatcctgtcgcgcgagagaagatggcgaacgccgcaacgattgcgggcatggctttcgccaacgcgttcctcggcgtgtgccactcaatggcgcacaaactcggcgcgttccaccacctgccccacggcgttgccaacgcgttgatgatcagcgaagtgcttcgttacaactcctgcgaagttccgccgaagatggggacattccctcaatatgatcatcccaaaacattatcccggtacgctcaaatcgctgatgcgctttctctcggcggcaagaccgacgaggataaacttgaaaatctcatattggccgtggaaaagctgaaagagcagatagggattaagaagacaatcaaggattacggcattgatgaaaaagattttcttgcccgccttgacgatatgagcgaacaggcatttgacgatcaatgcacaggcgcgaatcccaggtatccattaatcgaggaaatcaaaaagatgtacctcaatgttttctacggaaagaaggagaaggtgtaa

SEQ ID NO: 20612 - protein, 237 aa, Unknown
  Obtained from environmental sample
  DOMAIN (1)...(222): Iron-containing alcohol dehydrogenase
  misc_feature (1)..(237): Xaa is any amino acid
MAIVDADVQMNAPKGLTSASGIDAVTHALEAYASVMATDYTDGLAIQALKVIFEWLPVAYNEGAANPVAREKMANAATIAGMAFANAFLGVCHSMAHKLGAFHHLPHGVANALMISEVLRYNSCEVPPKMGTFPQYDHPKTLSRYAQIADALSLGGKTDEDKLENLILAVEKLKEQIGIKKTIKDYGIDEKDFLARLDDMSEQAFDDQCTGANPRYPLIEEIKKMYLNVFYGKKEKV

SEQ ID NO: 20613 - DNA, 771 bp, Unknown
  Obtained from environmental sample
  misc_feature (1)..(771): n is a, c, g, or t
atggcagtagccgaaaccggcatgggcgtagtcgaggacaaagtcattaaaaaccactacgcctcggagtacatctacaacgcttataaagacgaaaaaacctgcggcataatcgaggaagaccccgtgtccggcattacccggatagccgaacctatcggcctcgtggcggcagtcattcctaccactaaccctacctctacggcgattttcaaggcgctcatttgccttaaaacccgcaacggcatcatcatctcgccgcacccccgcgccaaagcgtgcacctgcgccgccgccaaaatcgtgctggacgccgcagtcgccgcgggcgcgcccgagggaatcatcggctggatagacgagcccagccttgaaatgaccaatatggtgatgaaagaagcggacaccatccttgctacaggcggacccggcatggtcaagtccgcttattcttcaggaaagcccgccatcggcgtggggtcgggcaatgtgccggccatcattgatgacagcgcggatatactccttgccgtcaactcgattatccattcaaaaacatttgacaacggcatgatatgcgcgtccgagcaatcggttatcgccctgcaaagcgtttatgatcaggtaaaagccgaattcaaacgccggggctgttacttccttacgcctgaagaaacccaaaaagtaagggaaacaatcattgtcaacggatcgttgaacgcgaaaatcgtaggacagaaggcggcgaaaatcgcggagcttgcggcgtga

SEQ ID NO: 20614 - protein, 256 aa, Unknown
  Obtained from environmental sample
  misc_feature (1)..(256): Xaa is any amino acid
MAVAETGMGVVEDKVIKNHYASEYIYNAYKDEKTCGIIEEDPVSGITRIAEPIGLVAAVIPTTNPTSTAIFKALICLKTRNGIIISPHPRAKACTCAAAKIVLDAAVAAGAPEGIIGWIDEPSLEMTNMVMKEADTILATGGPGMVKSAYSSGKPAIGVGSGNVPAIIDDSADILLAVNSIIHSKTFDNGMICASEQSVIALQSVYDQVKAEFKRRGCYFLTPEETQKVRETIIVNGSLNAKIVGQKAAKIAELAA

SEQ ID NO: 20615 - DNA, 327 bp, Unknown
  Obtained from environmental sample
  misc_feature (1)..(327): n is a, c, g, or t
atgccgtatacccttaaccgcaacagtttccgcgagatccaaacggcccgtgtatacgcgggtatcagattaggaaccgccgccactacgtctctcggcatgggagaggcggaaatgacggaactcggcgaattaatagcgaaggttataaaggggacaacgcaggcgcaggatgccaaagacccgtccaaaaaaagcatggcaaaatacgctgtgaatgaagctgtaaagagcgaagttcacgctagggtaaaatcgttactggaaaaattccctgtgtatcctcagcttaatcttgaactgttaaagaaatatttcgttcagtaa

SEQ ID NO: 20616 - protein, 108 aa, Unknown
  Obtained from environmental sample
  misc_feature (1)..(108): Xaa is any amino acid
MPYTLNRNSFREIQTARVYAGIRLGTAATTSLGMGEAEMTELGELIAKVIKGTTQAQDAKDPSKKSMAKYAVNEAVKSEVHARVKSLLEKFPVYPQLNLELLKKYFVQ

SEQ ID NO: 20617 - DNA, 636 bp, Unknown
  Obtained from environmental sample
  misc_feature (1)..(636): n is a, c, g, or t
ttgctttcaattctggcaaacgaaaaaaaaattcacaccgaaagggtcggtactatagaccttgaccacttggctcctcttcacaggggcatagcccttgcagtagacgaaggcggatttagcgctgaaacttcccttgatgaattccttgaaagccttgcgaataacgataaaaaaagcgacgctcttgtcataatattggacgagataaccgatccgcacaattacggcgcaatactgcgttcctgcgatcaattcggcgtagacctggtgttaagccgacacaggcgaattgcaaaacacgcagaaacagtgtctaaaacttcagcgggggcttccgcctgggttccgcaggcggaaaccgccaatctgccccgtgcggtagaagaactgaaaaaagccggcttttggatttacggagccgacatggaaggcgaatgtctctacagccgggatcttcggggcaaaactgccattattctgggtggtgaaggaaccggcctttcacggcttttgagggaaagctgcgatgccatgatcgctatcccttccctgggccgcattgattccctgaatgtatcggtagccgcaggagtattattttacgaagtgatgcgccaaagaaaaaaagaataa

SEQ ID NO: 20618 - protein, 211 aa, Unknown
  Obtained from environmental sample
  DOMAIN (62)...(202): SpoU rRNA Methylase family
  misc_feature (1)..(211): Xaa is any amino acid
MLSILANEKKIHTERVGTIDLDHLAPLHRGIALAVDEGGFSAETSLDEFLESLANNDKKSDALVIILDEITDPHNYGAILRSCDQFGVDLVLSRHRRIAKHAETVSKTSAGASAWVPQAETANLPRAVEELKKAGFWIYGADMEGECLYSRDLRGKTAIILGGEGTGLSRLLRESCDAMIAIPSLGRIDSLNVSVAAGVLFYEVMRQRKKE

SEQ ID NO: 20619 - DNA, 774 bp, Unknown
  Obtained from environmental sample
  misc_feature (1)..(774): n is a, c, g, or t
atgggctatattggttccgcgccggattatcatatcaatgaaaaatatctggagcgtgtcgccgaagttgcgcagatggcccataatgccggcctcaaggcgatcatcaacctgcaccatgacggttcaacagaaggcggcggtaaggacaatggctggctttcgattaacaaagcccgcgccagtacagaaggctataacgaagtaacttttaaatttgtgcgggtgtggaaacaaatagcgacatatttcaaaaattacggcgactggctgatttttgaatcaatgaacgagattcatgacggcaactggggctggggtagcgccagcgcacagagcgcgcagtacgacattgtgaatgactggaaccggttttttacggaagttgtacggggaaccggcgccaataacgaggttcgttatgtgattttgcccggttactgtactgtgccccaacatacgcttgccagttatttttggctgccgccggacagcgcctccaaccggcagattgtaacttttcactattacgatccttatgaattcggaatagccggaacgcgctgggaatggggttcggactcggataaaaacaaggtcagcgcggattttgccccctttaagtcaaagtatatcgacaaccatattccggtgatcatcggcgaatgcggcgcggtgcgccagtcttcggacaaggcgcggcaaaacaggcttgcttatctttcatgggtgttcggcaaggccaaagaaaacggtctggttcccatttattga

SEQ ID NO: 20620 - protein, 257 aa, Unknown
  Obtained from environmental sample
  DOMAIN (2)...(253): Cellulase (glycosyl hydrolase family 5)
  misc_feature (1)..(257): Xaa is any amino acid
MGYIGSAPDYHINEKYLERVAEVAQMAHNAGLKAIINLHHDGSTEGGGKDNGWLSINKARASTEGYNEVTFKFVRVWKQIATYFKNYGDWLIFESMNEIHDGNWGWGSASAQSAQYDIVNDWNRFFTEVVRGTGANNEVRYVILPGYCTVPQHTLASYFWLPPDSASNRQIVTFHYYDPYEFGIAGTRWEWGSDSDKNKVSADFAPFKSKYIDNHIPVIIGECGAVRQSSDKARQNRLAYLSWVFGKAKENGLVPIY

SEQ ID NO: 20621 - DNA, 693 bp, Unknown
  Obtained from environmental sample
  misc_feature (1)..(693): n is a, c, g, or t
gtgccaatccggacgctctgcntgaaagcccctgttcccgctgaaaagtaccggcagtacgcgacgacgatgnatacgggcatgtatcgcaatacggtttccggttttttgttcaagatacagggtgaacacgccctgtaccgttccgatccgtcgttatacgccatttatgaccgttcttccggcgcgacggaaccgcccagcgtggcaaaaatcaaactcaacatgatcggcgggcagagctggcgtgttgccggacagtggattgaatgggatttctttgtgcctgaaagcggcatgtaccggtttaccgtcaagggccgtcagaattacaaccgcggttttgtatcaaaccgtatggtgatgatagacgggcaggtaccctgcatggaacttgccgccgtgccgtttacctacagcaataaatggaagctggcgacatttcgcgacgatcagggagatatgttgtttcccctggagcagggtcggcacactttccggatgcaggcggctatgggcggcatgggcgaaatgctcagcgtcatggaagaaagcatattccgcctgaacggaatttaccgcaagatactggtattaaccggcacggaaccggatatttaccgcgattaccgcgttgatgtggtataccccgaaattatcacggcaatggcgcggaaagcaaaatccttataa

SEQ ID NO: 20622 - protein, 230 aa, Unknown
  Obtained from environmental sample
  misc_feature (1)..(230): Xaa is any amino acid
MPIRTLCXKAPVPAEKYRQYATTMXTGMYRNTVSGFLFKIQGEHALYRSDPSLYAIYDRSSGATEPPSVAKIKLNMIGGQSWRVAGQWIEWDFFVPESGMYRFTVKGRQNYNRGFVSNRMVMIDGQVPCMELAAVPFTYSNKWKLATFRDDQGDMLFPLEQGRHTFRMQAAMGGMGEMLSVMEESIFRLNGIYRKILVLTGTEPDIYRDYRVDVVYPEIITAMARKAKSL

SEQ ID NO: 20623 - DNA, 507 bp, Unknown
  Obtained from environmental sample
  misc_feature (1)..(507): n is a, c, g, or t
ttggatttatcattccccaacattgaaatgaaatacatctacaaaaccaaaatacaagaatggttcaaaaaacgaatagccggaaagaatcttgacgcgctccaaagcgccgttctgaacggggatgccgaaacgttccaaagcgagttatcggcgattctttcggagagcataagttacatggataacgccgaaagcctctaccacggagttatgatcggagtgtttgcgcggttgaacggttacagacttaagtccaaccgagagaacggtgacgggcgcagcgatttggtcttatacaacgcgaacgaaaacggcggcaaagccgtcatttttgagtttaagttggcgcctaacgccaaaacgctcgcaaaagcgtgcgaagacgccctgaaacagatagaagacaagaactacgccgcctattgggacgaagaaggctataaaaacattgtcaaatacggcataggcttctacaagaaaaggtgcgaggtacggaaagggtga

SEQ ID NO: 20624 - protein, 168 aa, Unknown
  Obtained from environmental sample
  misc_feature (1)..(168): Xaa is any amino acid
MDLSFPNIEMKYIYKTKIQEWFKKRIAGKNLDALQSAVLNGDAETFQSELSAILSESISYMDNAESLYHGVMIGVFARLNGYRLKSNRENGDGRSDLVLYNANENGGKAVIFEFKLAPNAKTLAKACEDALKQIEDKNYAAYWDEEGYKNIVKYGIGFYKKRCEVRKG

SEQ ID NO: 20625 - DNA, 876 bp, Unknown
  Obtained from environmental sample
  misc_feature (1)..(876): n is a, c, g, or t
ttgttcgctgccatggcgggatatgtatccaatgacggaaaaggcgcggtcggacaaaatgataccgcgccctccggacgttttgtgccggtaagagaccgcaaaaacggcgctttgtcgcttagtccaaatctttccgatggcgcagtttattcggatgaattgattaattacctgattgccaaactgggaaattcgcgtaacggtggtatacgcggttattcgctggataacgagcctgccctgtggccaagtacacatccgcgcatccatccgggaaagaccactgttgcggaaatactggaaaaatcaatttctctttcttctgttgtcaaagaatttgatccaaccgccgaggtattcggcccggcattatacggcgtcggagcttacgcaaactttcagagcgctccggactggtataaatactctattgaatataagtggtttgtggatgcctacctggaaggaatgcgcaaggcaagcgatgaaaaaggccgccggcttcttgatgcgcttgatgtgcattactatacggaagcgcgttcgccgcttaatcaccgggttagcgaggatcgcgacactaacgaagaatgtatctatacacgctttcagtctacgcgctcgttatgggacaaaacctatattgaaaaaagctgggttgcatattcgctcggcaggtttttgcccattttgcccgtacttaacgaatctattgagcagtattatcctggtactaaactgtcaatcagcgagtataacttcggcggagaaaatcatgtttccggcggtattgcacaagcagatgctttgggtattttcgccgctcaaggcgtttattatgcggcgctctggccgatgtctgataaactttga

SEQ ID NO: 20626 - protein, 291 aa, Unknown
  Obtained from environmental sample
  misc_feature (1)..(291): Xaa is any amino acid
MFAAMAGYVSNDGKGAVGQNDTAPSGRFVPVRDRKNGALSLSPNLSDGAVYSDELINYLIAKLGNSRNGGIRGYSLDNEPALWPSTHPRIHPGKTTVAEILEKSISLSSVVKEFDPTAEVFGPALYGVGAYANFQSAPDWYKYSIEYKWFVDAYLEGMRKASDEKGRRLLDALDVHYYTEARSPLNHRVSEDRDTNEECIYTRFQSTRSLWDKTYIEKSWVAYSLGRFLPILPVLNESIEQYYPGTKLSISEYNFGGENHVSGGIAQADALGIFAAQGVYYAALWPMSDKL

SEQ ID NO: 20627 - DNA, 474 bp, Unknown
  Obtained from environmental sample
  misc_feature (1)..(474): n is a, c, g, or t
atgatgcactcttacgcagataacctatccaccgactatccgggcacttccgttcacgcaggtctgcttatggctataggcgcctctgtaagcgctccgggaatcggaaccgccctggcatacgccttgaacggtaaattccctgtagccaaatcgtggtgcgctacggtacttttgccctatgtaatggaaaagctggtcgcttcaaggccggaaaaaatggcgagagccgtatcccttatgggagaagcgattgaaagcgtctcaacctcagaagcggccaatatggctgtagatatgatacgcagccacatgggccagctaaaggtgcctgccaggctaaaagattttaacctgtcccttgaccgtctggttccggcggcggaagcggccagggacatggaatttgtcgcctcatctccctggactgtaacatcggaagacgcttacgatttattaaaacaggctttttaa

SEQ ID NO: 20628 - protein, 157 aa, Unknown
  Obtained from environmental sample
  misc_feature (1)..(157): Xaa is any amino acid
MMHSYADNLSTDYPGTSVHAGLLMAIGASVSAPGIGTALAYALNGKFPVAKSWCATVLLPYVMEKLVASRPEKMARAVSLMGEAIESVSTSEAANMAVDMIRSHMGQLKVPARLKDFNLSLDRLVPAAEAARDMEFVASSPWTVTSEDAYDLLKQAF

SEQ ID NO: 20629 - DNA, 423 bp, Unknown
  Obtained from environmental sample
  misc_feature (1)..(423): n is a, c, g, or t
atgatcttctctcgtaaaaagatgagcgaggcgctcaacgagttcagccaaaacgtcaaaccgatttcactttaccgcgatgcgtggaatcgcctaaaaaagaataaaatggccatgataggaatggtcgtggtcttgatatattttcttatctccctgttggcaccgattttgcctttttacaattatgcggaacaggaaatgaagcatatttatatgcagccttcttttaaaccctcaggcgaagtcatggttagtacgcgagaggcttacttttcgaagctcatggccagggaagggcgtagcgaatacacagccgtagaaaaggaagagctcgacaacttgcgcagtgaagctgaaaccaatcctatacataagaaggtctacattttcggtacggatgtcctgggccgggatctttaa

SEQ ID NO: 20630 - protein, 140 aa, Unknown
  Obtained from environmental sample
  misc_feature (1)..(140): Xaa is any amino acid
MIFSRKKMSEALNEFSQNVKPISLYRDAWNRLKKNKMAMIGMVVVLIYFLISLLAPILPFYNYAEQEMKHIYMQPSFKPSGEVMVSTREAYFSKLMAREGRSEYTAVEKEELDNLRSEAETNPIHKKVYIFGTDVLGRDL

SEQ ID NO: 20631 - DNA, 405 bp, Unknown
  Obtained from environmental sample
  misc_feature (1)..(405): n is a, c, g, or t
atgatccttccggtaataacccttgccttgaaccaatttgcgcggatagcgcgtgttatgcgggcgagcatgatagaaaccctcagatccgattatgttagaacggcgcgcgccaagggcctttccatgcctaccattattggaagacatgtgcttaaaggagcttcccttccggtcgtaagccttttaggcccggcacttgcggagattgtcgtgggcgctgtcgctaccgaaaggatcttcgccgtacccggcatgggcaggcagataatgaacgcgtcaacaaaccgcgattataccctgctcatgggaactattgttacttatgcgattgttcttatcgtgatgaattttatcgttgatatagcatacgggttcctcgatccccggattacatacaaataa

SEQ ID NO: 20632 - protein, 134 aa, Unknown
  Obtained from environmental sample
  DOMAIN (1)...(133): Binding-protein-dependent transport system inner membrane component
  misc_feature (1)..(134): Xaa is any amino acid
MILPVITLALNQFARIARVMRASMIETLRSDYVRTARAKGLSMPTIIGRHVLKGASLPVVSLLGPALAEIVVGAVATERIFAVPGMGRQIMNASTNRDYTLLMGTIVTYAIVLIVMNFIVDIAYGFLDPRITYK

SEQ ID NO: 20633 - DNA, 918 bp, Unknown
  Obtained from environmental sample
  misc_feature (1)..(918): n is a, c, g, or t
ttgatcgcgagactctttccgaatcgggggccggggcgggggcaaatgccggggcaaatgcccttgaagttatatgggaaaggggacagcgattctacatggaacaggctgggcaaatacccggcgggaaaaaatacgattctctgtgcgcgggatgtgatgagtactatacctacaacttttaaccataacttcccctcatatactgttgtcggaggcagggaaagatataattcaacagggctttccgttgtgttgctgaacaggggcggacgctatgcccgacgcagtttgttccatgactttgagaaaacaggctttgacagtgttgtttcagtggagccggagcctgtccattacgatcttgatgaactttccgcccgctttccgtttgtccgattcgtagtaccgcattcatggatcagccttggagaacagatcaatctggcggtatctgaacttacttccccgctttttttcgtcctctggaatgatcttagaatgattgccgggggcacagcccacaggatggcggaaaggctgacccgtcccgttgaaagcaacggtaatggaaaaggaaaaagtcaattcatgcggctctgtacggtccccgtgattcagaattcacgccatgatacgattcctactgtaatagctccggtaatacgccaaaagaaaatacaaacccgctttctcaatccctcaagcgagggcctcccaagcctgtacccgtttgacggcgtaggtatttacgacagggatcgttttatacagttggggggctttgacggtactttaaaaaacagtttttggcagcttatggattttgggttccgtgcgtacctctggggagaggaaatatcccttagtcaggcactcaagttttcttatgaggctgaaattcctgccgggggataa

SEQ ID NO: 20634 - protein, 305 aa, Unknown
  Obtained from environmental sample
  misc_feature (1)..(305): Xaa is any amino acid
MIARLFPNRGPGRGQMPGQMPLKLYGKGDSDSTWNRLGKYPAGKNTILCARDVMSTIPTTFNHNFPSYTVVGGRERYNSTGLSVVLLNRGGRYARRSLFHDFEKTGFDSVVSVEPEPVHYDLDELSARFPFVRFVVPHSWISLGEQINLAVSELTSPLFFVLWNDLRMIAGGTAHRMAERLTRPVESNGNGKGKSQFMRLCTVPVIQNSRHDTIPTVIAPVIRQKKIQTRFLNPSSEGLPSLYPFDGVGIYDRDRFIQLGGFDGTLKNSFWQLMDFGFRAYLWGEEISLSQALKFSYEAEIPAGG

SEQ ID NO: 20635 - DNA, 825 bp, Unknown
  Obtained from environmental sample
  misc_feature (1)..(825): n is a, c, g, or t
atgactccggcttatcgcccgcggcgttccaacgacctcgccgtgcaggattccggctcccctatccttatantagtggcttccgtcgacgttcaggcggatcggctttacgtcgacgtgaaaggttacagtataggcggcgtgacgtggactttagaattttntgatataccagggaacaccgccgattttaacggagtatgggacaagctggatcaaattataagcgataagcggtatataggaacggacggcaaggtttaccggatacaaataaccatgatcgactccgggcataataccgagtatgtttacgaatatgtcaaacggcactcaggcggcgtttttgcctgcaaaggaaaagattatttaattaatggggaaacctatcaatttttttctccgtctgctcaagaaaaaatcgggtttagaaacgcgctccatataagcaccggaaaattaaaagataaaatcagcaacgcaatgacctcatccttttgggtaacagggcagccacaaccgtattggtatccgaactttcgggaggattgccgcgacgattatttcaaacaatttgagtccgaaagccgggaagagaagcgcgacgctattacaaaacagttccgcggatatatttggaagcaaaaattcgggcaggataatcatgcactggactgttatgtatataatctagcggcgctggagcttgccgccgaatactggtgcaaggaacacctcggcttgcctgcgctggactggatcgccttttgggagcttgccaaacaaggggaattctaccaggagccgggcagcagaaccgcttaa

SEQ ID NO: 20636 - protein, 274 aa, Unknown
  Obtained from environmental sample
  misc_feature (1)..(274): Xaa is any amino acid
MTPAYRPRRSNDLAVQDSGSPILIXVASVDVQADRLYVDVKGYSIGGVTWTLEFXDIPGNTADFNGVWDKLDQIISDKRYIGTDGKVYRIQITMIDSGHNTEYVYEYVKRHSGGVFACKGKDYLINGETYQFFSPSAQEKIGFRNALHISTGKLKDKISNAMTSSFWVTGQPQPYWYPNFREDCRDDYFKQFESESREEKRDAITKQFRGYIWKQKFGQDNHALDCYVYNLAALELAAEYWCKEHLGLPALDWIAFWELAKQGEFYQEPGSRTA

SEQ ID NO: 20637 - DNA, 456 bp, Unknown
  Obtained from environmental sample
  misc_feature (1)..(456): n is a, c, g, or t
ttgggcagcgcgggcggcatacttttcatggacgattacggccaccacccgacggcaataaagacaactctcgacggcctaagagctttttaccacaccaggcggcttgtggttagtttcatgtcccatacctatacaaggactgccgcgctgttagatgaatttgccgcctcccttgccgaagccgacatactgttccttcataagatttacgcgtccgcgcgcgagcgttttgacggacatatcaacggcaagtccattatggaaaaaatcgaaagcctccctgccaggaaagccgaagtgtattacattgatgagccgatggacgcgtttgagcgggtaaaaaacattcttaaacccggcgatctttttcttaccctgggcgcgggcagcaactggcctcttggggtaaagctctttgagtattttaatggaaccgggggggtatccaaatga

SEQ ID NO: 20638 - protein, 151 aa, Unknown
  Obtained from environmental sample
  DOMAIN (2)...(82): Mur ligase family, glutamate ligase domain
  misc_feature (1)..(151): Xaa is any amino acid
MGSAGGILFMDDYGHHPTAIKTTLDGLRAFYHTRRLVVSFMSHTYTRTAALLDEFAASLAEADILFLHKIYASARERFDGHINGKSIMEKIESLPARKAEVYYIDEPMDAFERVKNILKPGDLFLTLGAGSNWPLGVKLFEYFNGTGGVSK

SEQ ID NO: 20639 - DNA, 477 bp, Unknown
  Obtained from environmental sample
  misc_feature (1)..(477): n is a, c, g, or t
atggcgagcacgatttttgttgattacccctatgcggcttccagtggtaatgcggcaatgaacgctcttgttattccaaaagacagtgcgtcaaaaaaaattattgtgtctttccattcatactcgccgtataattttgctttgaataaaaatggaactgacgattgggatgagtccaaaacatctgacaaaacggatattacaaattcaatggacgcgtttaaaacaaagtttgtaaataatggcattcctgtgataatcggtgaattcggcgcaatgcataaaaataatactgccaaaagagcggcatgggcaaaattttttgtaaaagaagcaaaggaaagaggtattccgtgtttctggtgggataacaacgcttttacaggtgacggtgaattattcggattattgaaaagaagcgacaattcattcccgtttcaggaaatagttagtgcgatgatggatggcataaaataa

SEQ ID NO: 20640 - protein, 158 aa, Unknown
  Obtained from environmental sample
  misc_feature (1)..(158): Xaa is any amino acid
MASTIFVDYPYAASSGNAAMNALVIPKDSASKKIIVSFHSYSPYNFALNKNGTDDWDESKTSDKTDITNSMDAFKTKFVNNGIPVIIGEFGAMHKNNTAKRAAWAKFFVKEAKERGIPCFWWDNNAFTGDGELFGLLKRSDNSFPFQEIVSAMMDGIK

SEQ ID NO: 20641 - DNA, 426 bp, Unknown
  Obtained from environmental sample
  misc_feature (1)..(426): n is a, c, g, or t
ttgcgaagcgcaagcgacagatacaattttacagataangacatctcgaaatcggattttcatatccatgtccctgaaggagcaatccctaaagacgggccttctgccggtgttacccttgcgtcttctcttctttccaccttgtgtaaagtccctccctgccccgctattgccatgacaggggaacttacgcttacagggcgtgttcttccgattggcggattgaaagaaaaacttcttgccgcaatcaggaacgggatggaaaaaacgcttttgccgaaagataacgagcctgactggcatgaacttgacaaagacattagagattcaatcaatatagaatttgttgagacagccgatgatgtgtttaagattttattttcagaaagcatattgaaaaaagcggcagtaacgcaaaataaataa

SEQ ID NO: 20642 - protein, 141 aa, Unknown
  Obtained from environmental sample
  DOMAIN (1)...(129): Lon protease (S16) C-terminal proteolytic domain
  misc_feature (1)..(141): Xaa is any amino acid
MRSASDRYNFTDXDISKSDFHIHVPEGAIPKDGPSAGVTLASSLLSTLCKVPPCPAIAMTGELTLTGRVLPIGGLKEKLLAAIRNGMEKTLLPKDNEPDWHELDKDIRDSINIEFVETADDVFKILFSESILKKAAVTQNK

SEQ ID NO: 20643 - DNA, 333 bp, Unknown
  Obtained from environmental sample
  misc_feature (1)..(333): n is a, c, g, or t
atgctttctgaaaataaaatcttaaacacatcatcggctgtctcaacaaattctatattgattgaatctctaatgtctttgtcaagttcatgccagtcaggctcgttatctttcggcaaaagcgttttttccatcccgttcctgattgcggcaagaagtttttctttcaatccgccaatcggaagaacacgccctgtaagcgtaagttcccctgtcatggcaatagcggggcagggagggactttacacaaggtggaaagaagagaagacgcaagggtaacaccggcagaaggcccgtctttagggattgctccttcagggacatggatatga

SEQ ID NO: 20644 - protein, 110 aa, Unknown
  Obtained from environmental sample
  misc_feature (1)..(110): Xaa is any amino acid
MLSENKILNTSSAVSTNSILIESLMSLSSSCQSGSLSFGKSVFSIPFLIAARSFSFNPPIGRTRPVSVSSPVMAIAGQGGTLHKVERREDARVTPAEGPSLGIAPSGTWI

SEQ ID NO: 20645 - DNA, 372 bp, Unknown
  Obtained from environmental sample
  misc_feature (1)..(372): n is a, c, g, or t
atgggtatacaagaatcggcggagatgtatctggaaacaattcatgtcctaagcctcaaggggaaccctgtccgatctattgatattgttaatgaacttgaatattccaagccgagtgtaagcgttgccatgaaaaacctcaaaaccaaagggtacatcgttatggataccgaaggccatataacgctgaccgctaaggggcttaaaatagcggaaacgatgtatgaacggcatgttgcgatttcagaatggctgatgtttctgggcgttgataaaaaaacggcgatacacgacgcctgcaagatggaacacgccatgagcgaaaaaagttttatggcgataaacaagcatataaaagagggcaagaaataa

SEQ ID NO: 20646 - protein, 123 aa, Unknown
  Obtained from environmental sample
  DOMAIN (2)...(62): Iron dependent repressor, N-terminal DNA binding domain
  misc_feature (1)..(123): Xaa is any amino acid
MGIQESAEMYLETIHVLSLKGNPVRSIDIVNELEYSKPSVSVAMKNLKTKGYIVMDTEGHITLTAKGLKIAETMYERHVAISEWLMFLGVDKKTAIHDACKMEHAMSEKSFMAINKHIKEGKK

SEQ ID NO: 20647 - DNA, 687 bp, Unknown
  Obtained from environmental sample
  misc_feature (1)..(687): n is a, c, g, or t
gtgtacatgacaagcgatagtccgctggggccgtatacattgcggaaaatgatactgccaatccccggcgaaatgttcaaaagcaagggcggaaacaaccatcacgcgatatttgaattcaggggaaagtattacatagtgtatcacacacggttgctggaaatggcaatgggcgtgcccgaaacccttccgagggaagggtatcgaagcacccacattgacgaagtaaacgtactgctggacggaaccattgaagaaatcaaaggcagcagaaaaggagcgtcgcagtccggcaggtttaacccgtttgaattgaccagcgcggcgaccataggcaaccaggcgggaataagcaccacagaagtccccggagaacaacggatgaaggtaacggacattgaatcaggcgactggattgctctgtacggcgtggacttcggcgatgcaggcgccaccggcggggcgcaaaagtttaactgtcgcgtaacgccgcctaaaagcggcaagagcgtaatccagatcaagctggacggcttgggcggcaaacccatcggctatgtcaatgtcgaacacgggaaatctgaaataacggtaaatctgtcagaaaccgttaccggcgtgcatgatctggtttttgttttctacggccagggctatgattttgagcagtggcaatttatacaatag

SEQ ID NO: 20648 - protein, 228 aa, Unknown
  Obtained from environmental sample
  DOMAIN (107)...(228): Carbohydrate binding module (family 6)
  misc_feature (1)..(228): Xaa is any amino acid
MYMTSDSPLGPYTLRKMILPIPGEMFKSKGGNNHHAIFEFRGKYYIVYHTRLLEMAMGVPETLPREGYRSTHIDEVNVLLDGTIEEIKGSRKGASQSGRFNPFELTSAATIGNQAGISTTEVPGEQRMKVTDIESGDWIALYGVDFGDAGATGGAQKFNCRVTPPKSGKSVIQIKLDGLGGKPIGYVNVEHGKSEITVNLSETVTGVHDLVFVFYGQGYDFEQWQFIQ

SEQ ID NO: 20649 - DNA, 576 bp, Unknown
  Obtained from environmental sample
  misc_feature (1)..(576): n is a, c, g, or t
gtgcgagcataccgggcatttttggggggcggtctcgctgtcgtggatgtggccgcaattccggcagacccacactttcttctctttcttggcgaagacggaactctcttccacgtttttgagcagtttcaggtagcgttcctcgtgttctttctctattttagcgaccgattcgaagaggaaggcgatgttgtcgaagccttcgccgcgcgcctcttcggccatacgcttgtacatggcggtccactcctcgtgttccccgcccgcggcggccttcaggttctccgccgtggggcggatatcgccgccggagagcagtttgaaccagattttggcgtgctccttctcattgtcggcggtttcttggaaaatggcggcgatctgctcgaagccctctttcttcgcctttccggcgaagtaggtgtacttgttgcgcgcttggctctctccggcaaacgcctcctgcaggttcttttctgtcttggtacccttcagttcggccatacagccctccttttttatggtttattgtttattgctcaacggcaggcggtttttatactacaactaagttaa

SEQ ID NO: 20650 - protein, 191 aa, Unknown
  Obtained from environmental sample
  SIGNAL (1)...(18)
  misc_feature (1)..(191): Xaa is any amino acid
MRAYRAFLGGGLAVVDVAAIPADPHFLLFLGEDGTLFHVFEQFQVAFLVFFLYFSDRFEEEGDVVEAFAARLFGHTLVHGGPLLVFPARGGLQVLRRGADIAAGEQFEPDFGVLLLIVGGFLENGGDLLEALFLRLSGEVGVLVARLALSGKRLLQVLFCLGTLQFGHTALLFYGLLFIAQRQAVFILQLS

SEQ ID NO: 20651 - DNA, 543 bp, Unknown
  Obtained from environmental sample
  misc_feature (1)..(543): n is a, c, g, or t
atggccgaactgaagggtaccaagacagaaaagaacctgcaggaggcgtttgccggagagagccaagcgcgcaacaagtacacctacttcgccggaaaggcgaagaaagagggcttcgagcagatcgccgccattttccaagaaaccgccgacaatgagaaggagcacgccaaaatctggttcaaactgctctccggcggcgatatccgccccacggcggagaacctgaaggccgccgcgggcggggaacacgaggagtggaccgccatgtacaagcgtatggccgaagaggcgcgcggcgaaggcttcgacaacatcgccttcctcttcgaatcggtcgctaaaatagagaaagaacacgaggaacgctacctgaaactgctcaaaaacgtggaagagagttccgtcttcgccaagaaagagaagaaagtgtgggtctgccggaattgcggccacatccacgacagcgagaccgccccccaaaaatgcccggtatgctcgcaccctcagtcgtacttcgagatcaagtcggtcaactactga

SEQ ID NO: 20652 - protein, 180 aa, Unknown
  Obtained from environmental sample
  DOMAIN (142)...(173): Rubredoxin
  misc_feature (1)..(180): Xaa is any amino acid
MAELKGTKTEKNLQEAFAGESQARNKYTYFAGKAKKEGFEQIAAIFQETADNEKEHAKIWFKLLSGGDIRPTAENLKAAAGGEHEEWTAMYKRMAEEARGEGFDNIAFLFESVAKIEKEHEERYLKLLKNVEESSVFAKKEKKVWVCRNCGHIHDSETAPQKCPVCSHPQSYFEIKSVNY

SEQ ID NO: 20653 - DNA, 582 bp, Unknown
  Obtained from environmental sample
  misc_feature (1)..(582): n is a, c, g, or t
ttgatggccgagcatgagctgctggaactgattgcctcaggcaatgtggcctatgagctcgcgaggccgctttcgctttattcgttctggttcagccgtattctcgctttcaggattgcccgtacaacgctccgctgctttcccattttcattgtcgcgtttttactgccaggttcatggggcttccatcttccccaaagctttcaggctttcgccctgttcgttccctccatcatctttgctgcctttcttgctaccgccctttccatggtcacctgcctggttacttttgtttcgcttaatccgaacggggcaaggctctttgtgggtgtggtcggggaattccttatgggcgctgtaatccccattccttttatgccgcctcttttgcagcggataacggcccttctgcccttccgttacactgcggatttcccttttcgcgtttactccgggcacatcgccgggactgaggctctgttcggtttggctgcgcagctcttctggcttgtggctctgattggccttgggctttggggtttcagggcagcgcttaagcgtcttgtgatacaggggggctga

SEQ ID NO: 20654 - protein, 193 aa, Unknown
  Obtained from environmental sample
  misc_feature (1)..(193): Xaa is any amino acid
MMAEHELLELIASGNVAYELARPLSLYSFWFSRILAFRIARTTLRCFPIFIVAFLLPGSWGFHLPQSFQAFALFVPSIIFAAFLATALSMVTCLVTFVSLNPNGARLFVGVVGEFLMGAVIPIPFMPPLLQRITALLPFRYTADFPFRVYSGHIAGTEALFGLAAQLFWLVALIGLGLWGFRAALKRLVIQGG

SEQ ID NO: 20655 - DNA, 363 bp, Unknown
  Obtained from environmental sample
  misc_feature (1)..(363): n is a, c, g, or t
atgaagcggattaaccttatctatttcagatatttatctatgagccttaagacagtactcgaataccggctttctgcctggcttgtaaccacggctcagagtctttccatgctctctgtcttcatcggccttgaccttatgttcctccgtttcgggagccttgcaggctggagtttcgcggagtctgccctctgtttcggtgtaacttacacggccatctctctttcggaatgtatcgcccgcggttttgattcattttcgcggatggtcattctgggcgaatttgaccgggtactgctgcggccccggagtaccatcattcaggtgcttggcagcaaaaccgatattaccccgattgaataa

SEQ ID NO: 20656 - protein, 120 aa, Unknown
  Obtained from environmental sample
  misc_feature (1)..(120): Xaa is any amino acid
MKRINLIYFRYLSMSLKTVLEYRLSAWLVTTAQSLSMLSVFIGLDLMFLRFGSLAGWSFAESALCFGVTYTAISLSECIARGFDSFSRMVILGEFDRVLLRPRSTIIQVLGSKTDITPIE

SEQ ID NO: 20657 - DNA, 330 bp, Unknown
  Obtained from environmental sample
  misc_feature (1)..(330): n is a, c, g, or t
ttgatcgcggaacttgacgttctttataacagtgaaatcggcaggacggaaaaattaatggaaaaagcgcggataattgattccgcgaaagagcggtttaacgcggagtatgacagccgtttttccggcgagaattacaggggttttgcggaattaccggtaaataacgcatatcttgaactatacaggctataccacacagaagacaatttttatgaggaactgtatgaccgttcaggacgaaaccttcccgcctttatttccgccgcaaaaaaaataacaaaaaaagacgacccccgccggcagcttgaaaacgctctttttcagtga

SEQ ID NO: 20658 - protein, 109 aa, Unknown
  Obtained from environmental sample
  misc_feature (1)..(109): Xaa is any amino acid
MIAELDVLYNSEIGRTEKLMEKARIIDSAKERFNAEYDSRFSGENYRGFAELPVNNAYLELYRLYHTEDNFYEELYDRSGRNLPAFISAAKKITKKDDPRRQLENALFQ

SEQ ID NO: 20659 - DNA, 417 bp, Unknown
  Obtained from environmental sample
  misc_feature (1)..(417): n is a, c, g, or t
atgaccgacacaaaaggcatggggataatgaactacgtatttttggagtacgccccatacgccggcgacatccgcacgagggcgaacggcgtgctgatagccaaagagccgtgcacgtcggtggcctacgcgctgttcaatttgcaggatcgcggaaagatgttcgtcggccccggcgttaagatatacagggggatgatagtcggcgagcactgccggtcaaacgatttggttgtcaaccccggcaaagagaaaaagctgtcgaacatgagggcggcgggttcggacgaaaacgtgatccttacgccgccggtagacatgagcttggaagattgcattgcctatatcaatgaagacgaattggtagaagtcacgccgcagtctataagattgcggaagagggacaataagtattaa

SEQ ID NO: 20660 - protein, 138 aa, Unknown
  Obtained from environmental sample
  misc_feature (1)..(138): Xaa is any amino acid
MTDTKGMGIMNYVFLEYAPYAGDIRTRANGVLIAKEPCTSVAYALFNLQDRGKMFVGPGVKIYRGMIVGEHCRSNDLVVNPGKEKKLSNMRAAGSDENVILTPPVDMSLEDCIAYINEDELVEVTPQSIRLRKRDNKY

SEQ ID NO: 20661 - DNA, 351 bp, Unknown
  Obtained from environmental sample
  misc_feature (1)..(351): n is a, c, g, or t
atgaccgtcaaatgccaaaagtgcaacgcccactgttgccgccacatcgccatcggcgtggacgctcctgatgacaaggagagttacgacaacatacgctggtacctgctgcacaaaaatgtctgggtattcatcgaccacgaagaccagtggctcatagagttcagaactccgtgccgcctgatcaggagcgactacaagtgcggcgactaccaaaaccgcccgctggtatgcaagaactatcccgaagaggacgaattgtgcgagggcgagacgaacgaacccgcgtacaaagaactgttcaaaaacgtcaaggacttcgagaggtatatgaagaagcggagcaagtag

SEQ ID NO: 20662 - protein, 116 aa, Unknown
  Obtained from environmental sample
  misc_feature (1)..(116): Xaa is any amino acid
MTVKCQKCNAHCCRHIAIGVDAPDDKESYDNIRWYLLHKNVWVFIDHEDQWLIEFRTPCRLIRSDYKCGDYQNRPLVCKNYPEEDELCEGETNEPAYKELFKNVKDFERYMKKRSK

SEQ ID NO: 20663 - DNA, 894 bp, Unknown
  Obtained from environmental sample
  misc_feature (1)..(894): n is a, c, g, or t
gtgaattattttgacaccgcttaccgctatcatgctggcgagtcggaaacctttgttggcgaggtcttagagcaatatccaagggactcattttatcttgccacgaaaatgccaggccacatgatggagtataaagacggtgtgtacaaattcaccgggcttcttgccaacagggaacctcgttctcctcaggaagtttttgaggaacagcttgaaagatgccgtgttgattattttgatttctaccttttgcataacgtatgtgaaacagcctgggatttctacaccagcgaggaaatcggcgtggttgattatttacttaaacaaaaacaagcggggcgtatccgtcatcttggcttgtcctcccacggcagtgccgatacgattgacaagttcttgtccaggtataattgctttgagtttattcaaattcaaattaattatctggattggactctacaaaacgcaggcaaaaaatatgaggttattacaaaacacggcctgccggttattacgatggagtcatgccgtggagggcggctcgtttcccttagccctgaggcaaatgccctgctaaaaactgcgcggccaaacgattctattgtttcctgggcgtttcgctttctgcaatcccttccaaatgtttcggttatcttaagcggcatgactactcttgagcagttaaaagaaaacattgagttgttctccaaagaagatccgacaacagatcaggaaagagagttgatccagcaggctgtcaggacgatggcagatatggttccgtgtaccgcctgcacttattgtatcgaagcctgtccgcaggaattggacatacccaagcttatttcggcgagcaatgaaatgcgttttccgccgcgtctcggccgaatctga

SEQ ID NO: 20664 - protein, 297 aa, Unknown
  Obtained from environmental sample
  DOMAIN (1)...(254): Aldo/keto reductase family
  misc_feature (1)..(297): Xaa is any amino acid
MNYFDTAYRYHAGESETFVGEVLEQYPRDSFYLATKMPGHMMEYKDGVYKFTGLLANREPRSPQEVFEEQLERCRVDYFDFYLLHNVCETAWDFYTSEEIGVVDYLLKQKQAGRIRHLGLSSHGSADTIDKFLSRYNCFEFIQIQINYLDWTLQNAGKKYEVITKHGLPVITMESCRGGRLVSLSPEANALLKTARPNDSIVSWAFRFLQSLPNVSVILSGMTTLEQLKENIELFSKEDPTTDQERELIQQAVRTMADMVPCTACTYCIEACPQELDIPKLISASNEMRFPPRLGRI

SEQ ID NO: 20665 - DNA, 981 bp, Unknown
  Obtained from environmental sample
  misc_feature (1)..(981): n is a, c, g, or t
atggccgagtacccgtccaccgcgataaaccagaacgttacatgggcaagtagcgatacctctgcagcccctgtatcagaaggcggcttggttattgccgttgccactggaaaggcgactatcactgtaaagactcaggatggcggtaaaacggcaagctgtacagtgaccgtcgatcctgttcctgtaagtagcgtttccttaaaatcatctaccagccttatcgtgggcggtacggaaaccttatacgcgcaaatagatccgcctgacgcggcaaaccagaacattacatgggacagcaataatacaggtgtggctacggtctctgtaaacggcacagttaccgctgtttcagccggaaccgcaactatcacagttatgactgcggacggaaacaaaaccgccgcctgtaacgtgaacgtcgttaccagcgccgttgcggtaaacggtgtttccctgaccaaatcatccaccagccttaatgtgggcagcagtgaaagtctttctgctacaataaatccatccaccgcgacaaaccagaatgttacatggacaagcagcaacgcctctgtagccacggtatcagcgggcggcatggttaccgccgttgccatcgggacggcaacggtcaccgttaagacccaggatggcgataaaacggcaagctgtacggtgaccgtcgatcctgttcctgtaagcggcgtatccctaaaatcaactaccagccttatcgtaggcggcacggaaacccttgtagcaactataacgccgcccgacgcggcaaacaagaacgttacatgggcaagcagtaatgcctctacagccacggtatcggcaggcggcctgattaccgccgttgccgccgggaacgcaactgtcaccgttacaactgctgacggtaacaggacagccagttgcaacgttaccgtttcagcttcaagccccgcaatcccaaccttttacactatttgccgcctttga

SEQ ID NO: 20666 - protein, 326 aa, Unknown
  Obtained from environmental sample
  DOMAIN (62)...(139): Bacterial Ig-like domain (group 2)
  misc_feature (1)..(326): Xaa is any amino acid
MAEYPSTAINQNVTWASSDTSAAPVSEGGLVIAVATGKATITVKTQDGGKTASCTVTVDPVPVSSVSLKSSTSLIVGGTETLYAQIDPPDAANQNITWDSNNTGVATVSVNGTVTAVSAGTATITVMTADGNKTAACNVNVVTSAVAVNGVSLTKSSTSLNVGSSESLSATINPSTATNQNVTWTSSNASVATVSAGGMVTAVAIGTATVTVKTQDGDKTASCTVTVDPVPVSGVSLKSTTSLIVGGTETLVATITPPDAANKNVTWASSNASTATVSAGGLITAVAAGNATVTVTTADGNRTASCNVTVSASSPAIPTFYTICRL

SEQ ID NO: 20667 - DNA, 786 bp, Unknown
  Obtained from environmental sample
  misc_feature (1)..(786): n is a, c, g, or t
ttgcaactggctgtcctgttaccgtcagcagttgtaacggtgacagttgcgttcccggcggcaacggcggtaatcaggccgcctgccgataccgtggctgtagaggcattactgcttgcccatgtaacgttcttgtttgccgcgtcgggcggcgttatagttgctacaagggtttccgtgccgcctacgataaggctggtagttgattttagggatacgccgcttacaggaacaggatcgacggtcaccgtacagcttgccgttttatcgccatcctgggtcttaacggtgaccgttgccgtcccgatggcaacggcggtaaccatgccgcccgctgataccgtggctacagaggcgttgctgcttgtccatgtaacattctggtttgtcgcggtggatggatttattgtagcagaaagactttcactgctgcccacattaaggctggtggatgatttggtcagggaaacaccgtttaccgcaacggcgctggtaacgacgttcacgttacaggcggcggttttgtttccgtccgcagtcataactgtgatagttgcggttccggctgaaacagcggtaactgtgccgtttacagagaccgtagccacacctgtattattgctgtcccatgtaatgttctggtttgccgcgtcaggcggatctatttgcgcgtataaggtttccgtaccgcccacgataaggctggtagatgattttaaggaaacgctacttacaggaacaggatcgacggtcactgtacagcttgccgttttaccgccatcctga

SEQ ID NO: 20668 - protein, 261 aa, Unknown
  Obtained from environmental sample
  SIGNAL (1)...(22)
  misc_feature (1)..(261): Xaa is any amino acid
MQLAVLLPSAVVTVTVAFPAATAVIRPPADTVAVEALLLAHVTFLFAASGGVIVATRVSVPPTIRLVVDFRDTPLTGTGSTVTVQLAVLSPSWVLTVTVAVPMATAVTMPPADTVATEALLLVHVTFWFVAVDGFIVAERLSLLPTLRLVDDLVRETPFTATALVTTFTLQAAVLFPSAVITVIVAVPAETAVTVPFTETVATPVLLLSHVMFWFAASGGSICAYKVSVPPTIRLVDDFKETLLTGTGSTVTVQLAVLPPS

SEQ ID NO: 20669 - DNA, 846 bp, Unknown
  Obtained from environmental sample
  misc_feature (1)..(846): n is a, c, g, or t
atgagcaagcacatgacggaaaccggcgcaagaaccgagggctatgccgcacctgaggcgtattccggcgttattggaaaagagtatgattactattcattgggcattacactttgggttctacttaccggtatggagccttttgtcgatgaaaaaggccaggccttgtactcaggtcagataacgctggacactattcatggtaaaaccattgaaaaactgctctcccgttccccagggattaatccttccatgcagacgctcataaagggcttattaacattacgccacgacaaacgctggaaaaacgatgaagtaacgcgccaccttgccggcgagaaagtcgatttgttcactgaagtacgaaatttaccgttagttgaaatcggtagcgatagttgctcgtcatttcaggaaatcgcccgcgcaattatcaatcatcccgaagaaggtaaaaagtttgtcttcgaaaagctggtgaagtatctttacaaaatacaggaacagaagcttgcggaaaaattggatgatatgattgacagttacagcgccgggaacagggaagacgaaggcgctgtttttatagcctatagcctatgccctaatatggcttttaaactggaacacggcctttcaatcagtaatctggaggagatgttcgcggttttggatacggaccctgacgctattcttccttttctcagggacgaaaaaaaaggtttttacgcctatcttgaagtttccggacttggcgagcacggaaagagagtaaaagaaatcgtggatgccaccgccggggatataagggcggtgtcgcggattattgcgcgtttcangacaacgtga

SEQ ID NO: 20670 - protein, 281 aa, Unknown
  Obtained from environmental sample
  misc_feature (1)..(281): Xaa is any amino acid
MSKHMTETGARTEGYAAPEAYSGVIGKEYDYYSLGITLWVLLTGMEPFVDEKGQALYSGQITLDTIHGKTIEKLLSRSPGINPSMQTLIKGLLTLRHDKRWKNDEVTRHLAGEKVDLFTEVRNLPLVEIGSDSCSSFQEIARAIINHPEEGKKFVFEKLVKYLYKIQEQKLAEKLDDMIDSYSAGNREDEGAVFIAYSLCPNMAFKLEHGLSISNLEEMFAVLDTDPDAILPFLRDEKKGFYAYLEVSGLGEHGKRVKEIVDATAGDIRAVSRIIARFXTT

SEQ ID NO: 20671 - DNA, 777 bp, Unknown
  Obtained from environmental sample
  misc_feature (1)..(777): n is a, c, g, or t
atgggatcgggtatcgttgtttcttactttgatctggccctgagccttaaagaaaagaacaactttaccgacatgaacaggcttattgacgccttttggaaaaagtatgaagaagaaagaaactataaagcggaacgggaaattctgcttcttatcgacaaggaagagatggatggtttgcggaattcttttgatttttatatgaatcaaataggcattacatatattagagaaaaatcttacagggaagcgctgcctaattttaaaaaagcattggagattaatccctcaggccttggttcaaacggtcaatcgtacaattttaattatggtcacgcgctttattccatgggaggccaggaaaacgcgaataaagctataggatacctggacagggcgataagtataacgcctgataaaccagagtccttgattttgaaaggcgtttgtttacatgatctgaataaatatcaggaagccattgcctgcctgggcatggcattgaaatacaaaacattaactaatgctgataaaaaatctgtttatatggcaatgaccaactgttacaacgcgttgggcatgaaggacaatgcagacagggctaacgcggaagcggagcgtttggcgaaacttcccggcgcgtcggaaaccgcgagaccgacaggcacggcggctcggtcggcagcggcgccggcggtaaaattctgcggggattgcggtgcgaagctggaaccgggcgaaaaattctgcggatcatgcggggcgaaagttgagtaa

SEQ ID NO: 20672 - protein, 258 aa, Unknown
  Obtained from environmental sample
  misc_feature (1)..(258): Xaa is any amino acid
MGSGIVVSYFDLALSLKEKNNFTDMNRLIDAFWKKYEEERNYKAEREILLLIDKEEMDGLRNSFDFYMNQIGITYIREKSYREALPNFKKALEINPSGLGSNGQSYNFNYGHALYSMGGQENANKAIGYLDRAISITPDKPESLILKGVCLHDLNKYQEAIACLGMALKYKTLTNADKKSVYMAMTNCYNALGMKDNADRANAEAERLAKLPGASETARPTGTAARSAAAPAVKFCGDCGAKLEPGEKFCGSCGAKVE

SEQ ID NO: 20673 - DNA, 498 bp, Unknown
  Obtained from environmental sample
  misc_feature (1)..(498): n is a, c, g, or t
gtggtgcgggtggcggtcttcgccaagggcgaaaaggccaaggaggcccaggaggccggggccgacgtctggggcgcggaagatttggtggaaaaagtgcagggcggttttctggagttcgacaaggccgtggccaccccggacttgatgggcctggtgggccgcctgggcaaggtgctggggccccggggcctgatgcccaacgccaagctgggcacggtgacttttgaagtggcctcggccgtgcgcgaactcaaggccggcaagatagacttccgggtggagaagagcggcatagtccacgcccccttgggtaaggtctccttcgggccggaaaaactcctcgggaacatgtccgcctttttcgacgtcatccagcgccttaagccgaccaccagcaagggcgtctatatcaagtccatctgcctgtcctcgaccatggggcccggggtcaggattgacccgctcttggtcaaggaacttaaagacctggcttga

SEQ ID NO: 20674 - protein, 165 aa, Unknown
  Obtained from environmental sample
  DOMAIN (1)...(150): Ribosomal protein L1p/L10e family
  misc_feature (1)..(165): Xaa is any amino acid
MVRVAVFAKGEKAKEAQEAGADVWGAEDLVEKVQGGFLEFDKAVATPDLMGLVGRLGKVLGPRGLMPNAKLGTVTFEVASAVRELKAGKIDFRVEKSGIVHAPLGKVSFGPEKLLGNMSAFFDVIQRLKPTTSKGVYIKSICLSSTMGPGVRIDPLLVKELKDLA

SEQ ID NO: 20675 - DNA, 918 bp, Unknown
  Obtained from environmental sample
  misc_feature (1)..(918): n is a, c, g, or t
atggccgagtcgatagagcctgttaccgacaattaccgcacgtattatgaaatctttgtcggcgctttttcggacacgaataaagacggcattggggatctcaatggcgtaatcaagcgtatggactaccttaacgacggcaagccgaattccggcaagagtcttggcgtggaaggaatttggcttatgcccgtaatgccgtcgccgagctaccacaaatacgacgtaagcgattattacgccatcgatccccaatacgggacaatggcggattttgacaaccttgttgccgaatgtaacaaacgcggcgtcaagctgatcatcgaccttgttctcaaccatacatcagaccggcatccctggtttataaaagcgaagcaggccataaaagaaggaaacctggatgaccgttacgcgaaatactacgccaaagaaactgaggaaattcccggaaagacctggtataaatttgaaaaaacgccagacggaacccaatactactatgaaggaaatttctccaacgttatgcccgagcttgatatggacaatcctgatgtgctacgggagattgtggacattgtcaaattctggcttgacaagggtgtgggcggctttaggctggatgccgtcaagtatatttattacggagaggatcaccggaatattcaatttttgaaattgttcaccgacgaatgtaagaaaataaaggaagatgtgtacatcgtagccgaaaactggtcgggtgttgcttccatacaaaactactatgaagcggtaaattgttttgatttcggaatggccagcacgtcgggtgatatttatttcacggcgcagggaattgaaagcgtatatgaatacacagaccgtttggcttcataccaaaggcaggttttggggcagaacaacaagcgattctga

SEQ ID NO: 20676 - protein, 305 aa, Unknown
  Obtained from environmental sample
  DOMAIN (17)...(304): Alpha amylase, catalytic domain
  misc_feature (1)..(305): Xaa is any amino acid
MAESIEPVTDNYRTYYEIFVGAFSDTNKDGIGDLNGVIKRMDYLNDGKPNSGKSLGVEGIWLMPVMPSPSYHKYDVSDYYAIDPQYGTMADFDNLVAECNKRGVKLIIDLVLNHTSDRHPWFIKAKQAIKEGNLDDRYAKYYAKETEEIPGKTWYKFEKTPDGTQYYYEGNFSNVMPELDMDNPDVLREIVDIVKFWLDKGVGGFRLDAVKYIYYGEDHRNIQFLKLFTDECKKIKEDVYIVAENWSGVASIQNYYEAVNCFDFGMASTSGDIYFTAQGIESVYEYTDRLASYQRQVLGQNNKRF

SEQ ID NO: 20677 - DNA, 387 bp, Unknown
  Obtained from environmental sample
  misc_feature (1)..(387): n is a, c, g, or t
atgacggcgtctacaggttcgcctgaattttcatcattttccgttttgtgcgcgtcagcctacactgtaaaaccattaatggttatccgcccttcgtcgttttttcctcagcccaatgtggacagcatgggagttcttcttgaaaaaaaatcttcgggtactcagattcctgatgtttttttccggcttgtccgcgccctgttttcgtcaaggcggaaaaccataaaaaacaatctgacagtttttctttcttcaatcttcggggatttggatgtatgcccgtccctattaagtgagaacggacttacaggcaatgaacgggcggaaaaccttgattttgaaagttttctatcacttgccaaatccattgagaatatgcgaaaataa

SEQ ID NO: 20678 - protein, 128 aa, Unknown
  Obtained from environmental sample
  misc_feature (1)..(128): Xaa is any amino acid
MTASTGSPEFSSFSVLCASAYTVKPLMVIRPSSFFPQPNVDSMGVLLEKKSSGTQIPDVFFRLVRALFSSRRKTIKNNLTVFLSSIFGDLDVCPSLLSENGLTGNERAENLDFESFLSLAKSIENMRK

SEQ ID NO: 20679 - DNA, 483 bp, Unknown
  Obtained from environmental sample
  misc_feature (1)..(483): n is a, c, g, or t
atgtcaatcgccggaaacattgcagaaatagaggaaagaattcaaaaagcctgtgtttcagccggaagaaaacgaaatgaaattaccttgatgggcgtttcaaagtttgtatcgcttggcatgatagaagaagcgcggcgcgcgggtattttctgttttggtgaaagcagggtgaaagaagggactacaaaatttgaaccgctgaagggcaacgctcctgaagttaaacttcacttgataggttccctccagcgtaacaaggccaaaaatgccgttcttttttttgactgcatccagtcggtagacagggaacagattatcgctgagctttttaagtttgcaggacagagggaaaagccgctggaaattctgtttgagcttcacacaggcgaagagacaaagagagggtttgcggattttgacgatcttttcagggncgctgaaatggtattgaacgcggaacttaaaacttcgcgggcttag

SEQ ID NO: 20680 - protein, 160 aa, Unknown
  Obtained from environmental sample
  misc_feature (1)..(160): Xaa is any amino acid
MSIAGNIAEIEERIQKACVSAGRKRNEITLMGVSKFVSLGMIEEARRAGIFCFGESRVKEGTTKFEPLKGNAPEVKLHLIGSLQRNKAKNAVLFFDCIQSVDREQIIAELFKFAGQREKPLEILFELHTGEETKRGFADFDDLFRXAEMVLNAELKTSRA

SEQ ID NO: 20681 - DNA, 690 bp, Unknown
  Obtained from environmental sample
  misc_feature (1)..(690): n is a, c, g, or t
ttgaaagaaatacccgtcttatacgaagatctctgctgcatggtttttaataagcccgcaggactccccgtgcagggcggtgaagggatcaagtcttcactggattccatcctatctgaaaaaattaagcccagaccgcttttggttcatcggcttgacagggacacctcaggcgtaattcttgtcgcaaagaccaaggaagctgccagggatttttccgccctgtttgcgaattcgggaacaataacaaagctttacctggggatttgctccggcatcgttgaaccggctgaggggacaataaagctctcccttgatgtgcgcggaaaggggcggggtagaattaaaaaagaatcggagactaattataagcttctttcgagcggggacataggggtcggttcatttagctttttagaactgaagcttggtaccgggcgtatgcaccagatcaggcgacacctcgcccttatcggccatccgcttttgggagacgacaagtacggagattttacgcttaacaagaaattgaaaacccgattgggactaaaaggtctgtgcctgcacgcctcgcgccttgttatccctcccttgcagggcctgctacccgacggccttgatgttacagctcaactacccgaaacattttcccgctttcttgagctgctaaaacctttaaacaagaattaa

SEQ ID NO: 20682 - protein, 229 aa, Unknown
  Obtained from environmental sample
  DOMAIN (12)...(157): RNA pseudouridylate synthase
  misc_feature (1)..(229): Xaa is any amino acid
MKEIPVLYEDLCCMVFNKPAGLPVQGGEGIKSSLDSILSEKIKPRPLLVHRLDRDTSGVILVAKTKEAARDFSALFANSGTITKLYLGICSGIVEPAEGTIKLSLDVRGKGRGRIKKESETNYKLLSSGDIGVGSFSFLELKLGTGRMHQIRRHLALIGHPLLGDDKYGDFTLNKKLKTRLGLKGLCLHASRLVIPPLQGLLPDGLDVTAQLPETFSRFLELLKPLNKN

SEQ ID NO: 20683 - DNA, 324 bp, Unknown
  Obtained from environmental sample
  misc_feature (1)..(324): n is a, c, g, or t
gtgttctacaactacctgctgaaatgctttgtcgttattgatttgaagacgcagaagctgacgcatcaggacgtggggcagatggacatgtacgtacggatgttcgatgacctgaagaggggcatggacgacaaccccaccataggcatcatcctgtgcgccgacaaggacgagacgatagtgaagtactccgtgctttcggacggtcgccagctgtacgcatcgaaatacaggctggtgcttccgactgaggaggaactgactgcggaactggagcggaacatacgcaatctgcgcgagttgcgaggcggcggcgatgggtga

SEQ ID NO: 20684 - protein, 107 aa, Unknown
  Obtained from environmental sample
  DOMAIN (1)...(94): Protein of unknown function (DUF1016)
  misc_feature (1)..(107): Xaa is any amino acid
MFYNYLLKCFVVIDLKTQKLTHQDVGQMDMYVRMFDDLKRGMDDNPTIGIILCADKDETIVKYSVLSDGRQLYASKYRLVLPTEEELTAELERNIRNLRELRGGGDG

SEQ ID NO: 20685 - DNA, 828 bp, Unknown
  Obtained from environmental sample
  misc_feature (1)..(828): n is a, c, g, or t
gtgatgaacagtgcgacgacggcgcaggagatagccctgcaggttctgggtctgaggccgggggacgaggttgtcaccacgcccatgacatgggccagcacactgaacaccatagtgcttcagggaggggtgcccgtgctggttgacatcgagcgcgggacgctgaacattgacccgacaaaaatcgaggccgcgataacgccaaggactgtcggcataatacccatccacctgaccggcctgcctgccccgatggacgccatctgggaaatagccgaaaggcacggcctctgggtggtggaggatgccgcgcaggcaatgggggcgcactacaaggggacaaagataggcgcgaacccaaggtcagccatgagcgtctatagcttccaccccaacaagaacatgaccacgggcgagggcggctgcattgcgctccacaatgagggacacgtggcccgcatcaagcgcctcaggttccacggcatcgagaaggacgcatggcggcggtttgcgaaggacggcacgccccacacggagattgtggagcctggccgcaaagccaacttcatggacatccaggccgccattggcctgcaccaggtcaagaagctggacgccttcaaccaaaggcgcgaagtcctgttcaggcggtacctggatggcctaaagggcattgacggtctcctgctgccgtgngagggcgacctgacgcaccggcactgcttccatctgtttgtgctgagggtacagccggaaatagtgggcagggaccgcgacgcctttgtgcaggcgctgaaggaagagaacatccggcgccgcatccactaa

SEQ ID NO: 20686 - protein, 275 aa, Unknown
  Obtained from environmental sample
  DOMAIN (1)...(275): DegT/DnrJ/EryC1/StrS aminotransferase family
  misc_feature (1)..(275): Xaa is any amino acid
MMNSATTAQEIALQVLGLRPGDEVVTTPMTWASTLNTIVLQGGVPVLVDIERGTLNIDPTKIEAAITPRTVGIIPIHLTGLPAPMDAIWEIAERHGLWVVEDAAQAMGAHYKGTKIGANPRSAMSVYSFHPNKNMTTGEGGCIALHNEGHVARIKRLRFHGIEKDAWRRFAKDGTPHTEIVEPGRKANFMDIQAAIGLHQVKKLDAFNQRREVLFRRYLDGLKGIDGLLLPXEGDLTHRHCFHLFVLRVQPEIVGRDRDAFVQALKEENIRRRIH

SEQ ID NO: 20687 - DNA, 654 bp, Unknown
  Obtained from environmental sample
  misc_feature (1)..(654): n is a, c, g, or t
atgctggttctgcacgcggaacacggcggcggcaataattcgacctttactatgcacgtcgtttcttcgtcgggttcggatacttattctacggtggcggcggctatgggctcgctcaaggggccgcgtcacggcggcgcgaatataaaggtagtcgagatgttcgaggacataaagaagaacgtcggcaagcgcaccgacgccaacgtccgcgactatatggcaaagctgttggacaagaaagcgttcgacaaggcggggcttatctacggaatggggcacgccgtttattcgctttcagacccgcgcgcgctcattctcaaaaaatacgtcagggaattgtcggaggctaagggcttgcatgaggaatacagcctttacgagcaggtggagcgtatcgcgccggaggtcataggcgacaaaagaaaaatctataagggcgtggcggcgaacgtagacttttattcgggatttataaattcgactctgggaataccgaaagagctttttacgccgatatttgcgatagcgcgtatagtcgggtggtcggcgcacagaatagaggagctgtctaataacggcaagattataaggccgaattataagtgtatcagcgagtataagaagtacgtccccataaaaaatagaaagtaa

SEQ ID NO: 20688 - protein, 217 aa, Unknown
  Obtained from environmental sample
  DOMAIN (1)...(199): Citrate synthase
  misc_feature (1)..(217): Xaa is any amino acid
MLVLHAEHGGGNNSTFTMHVVSSSGSDTYSTVAAAMGSLKGPRHGGANIKVVEMFEDIKKNVGKRTDANVRDYMAKLLDKKAFDKAGLIYGMGHAVYSLSDPRALILKKYVRELSEAKGLHEEYSLYEQVERIAPEVIGDKRKIYKGVAANVDFYSGFINSTLGIPKELFTPIFAIARIVGWSAHRIEELSNNGKIIRPNYKCISEYKKYVPIKNRK

SEQ ID NO: 20689 - DNA, 567 bp, Unknown
  Obtained from environmental sample
  misc_feature (1)..(567): n is a, c, g, or t
ttggaaggattatataatatgaccgagaagaccgcccatattcctgaacgtataaaggaattaagggagattctagaagtcagcgcaatggatttggcgaaagacacgggtattccttttgatacttacagtaaatatgaaagcggcgaattagacataccaatcagcgctttgtatacgatagcgggtcaccttggaacaaatattacagtccttcttaccggagaagaggcaagaatggacagcgcggctgtttgcagaaagggtaagggcgtggaaattgaacgctacccgggatatgatttttcaagtcttgcatataactttaaacacagaacaatggagccgttgattgttacacttgactcatcgaagcctcctgttgaccaagtgtctcatacggggcaggaatttaactttgtaattgaagggcaggtaaaagtaacggttgtaaaaaccgaacatattttaaatcccggcgattctatctattttgacgcacgtctttcccacgcgcaaagcgccgttaacgaaacagcgcaatttttaacggtaattcaggaataa

SEQ ID NO: 20690 - protein, 188 aa, Unknown
  Obtained from environmental sample
  DOMAIN (117)...(186): Cupin domain
  misc_feature (1)..(188): Xaa is any amino acid
MEGLYNMTEKTAHIPERIKELREILEVSAMDLAKDTGIPFDTYSKYESGELDIPISALYTIAGHLGTNITVLLTGEEARMDSAAVCRKGKGVEIERYPGYDFSSLAYNFKHRTMEPLIVTLDSSKPPVDQVSHTGQEFNFVIEGQVKVTVVKTEHILNPGDSIYFDARLSHAQSAVNETAQFLTVIQE

SEQ ID NO: 20691 - DNA, 897 bp, Unknown
  Obtained from environmental sample
  misc_feature (1)..(897): n is a, c, g, or t
atgatcagatggccgaggtactcatgcggcaataaagaaaaacttgacatacaaaaagcgaaaggaataaagctgtcatggcgcgtagactggcctatgagatgggaatacgaaaaagttgattttgaacccgccggcaaggatcaccacagccaggggggaagtttcgataccgcgcgccatgtgtgcaaggacgtttacggccgggacgcgcccgtaactttccgctacgattttatcggcacaaagggaatcgacggaaaaatgtcttcttcttcgggcaacgtgattacaataggagacgttttaaaaatctacacgccccaagtcgcgcgttatctgtttgcaggaacaagacctaacactgaatttgttatttcttttgatcttgacgtaattaaaatttacgaagactacgataaaaccgaacgcatcgcgtggaaaatggaagctgcaaaagacgaagccgtttatcaaaaagaaaaacgcatttatgagctgtcgcaagtaagcgtagacggtaaaactccccgtcttgaagacaagaagccgccgtatcaagttccgttccgccacctgtgcaatttgatccaaatcgcggacggcgacattgagaaagcgctcgtcgatttggccgcaagcgcgggcggccccaaaaccgaacagcttcccgatcttaaaacaagggctgaatgcgccaaatactggatagaaaattacgcgccggaagattttcgtttcaggttactgccggccggagaaacctcagccatttccgaacaagagaagaacgccgtgcgtattctgcgagacgatgttatctgcaagattgaggaatttggcgacgacnaaacctgcagtacggctgtttacgccgccgccgaaaagcgggagtag

SEQ ID NO: 20692 - protein, 298 aa, Unknown
  Obtained from environmental sample
  DOMAIN (2)...(298): tRNA synthetases class I (K)
  misc_feature (1)..(298): Xaa is any amino acid
MIRWPRYSCGNKEKLDIQKAKGIKLSWRVDWPMRWEYEKVDFEPAGKDHHSQGGSFDTARHVCKDVYGRDAPVTFRYDFIGTKGIDGKMSSSSGNVITIGDVLKIYTPQVARYLFAGTRPNTEFVISFDLDVIKIYEDYDKTERIAWKMEAAKDEAVYQKEKRIYELSQVSVDGKTPRLEDKKPPYQVPFRHLCNLIQIADGDIEKALVDLAASAGGPKTEQLPDLKTRAECAKYWIENYAPEDFRFRLLPAGETSAISEQEKNAVRILRDDVICKIEEFGDDXTCSTAVYAAAEKRE

SEQ ID NO: 20693 - DNA, 501 bp, Unknown
  Obtained from environmental sample
  misc_feature (1)..(501): n is a, c, g, or t
atgagccaaaacaatgcgctggagtataaaaacagcggcaatcaaaatctcaataaaggtaactttgaccaggccgccgcagactttaccaatgcgattaaccttaaccctaatgatgctgaggcatatttctgccgtggtgtcgcatatcagggtataggcgttataggtaaagacccttccgcgattgatcgggcaattggagattttaaccaggcgttaaaactgaaccctgatttcgcggcggtatatgccgctcgcggaggtgtgtatattaataagagcgactatgacagggcgctcgaagactttaaccgcgcgatacagcttgatttcaataattgtaacgcgtatgcaggtcgcggcaatatatatattttaaaaaaggaatatgaccgcggaattaaagatctggaaaccgcgctgcggattaatccaaactttcttgaagtcagaaagagcatagaaattgtgcgaatgatgcagaaaacgctaaaatag

SEQ ID NO: 20694 - protein, 166 aa, Unknown
  Obtained from environmental sample
  DOMAIN (6)...(39): Tetratricopeptide repeat
  misc_feature (1)..(166): Xaa is any amino acid
MSQNNALEYKNSGNQNLNKGNFDQAAADFTNAINLNPNDAEAYFCRGVAYQGIGVIGKDPSAIDRAIGDFNQALKLNPDFAAVYAARGGVYINKSDYDRALEDFNRAIQLDFNNCNAYAGRGNIYILKKEYDRGIKDLETALRINPNFLEVRKSIEIVRMMQKTLK

SEQ ID NO: 20695 - DNA, 876 bp, Unknown
  Obtained from environmental sample
  misc_feature (1)..(876): n is a, c, g, or t
atggatgattcaaattctgtcaatatcattctgctgtccattttatttatattaatgtgtttttccgcctttttttccctggcggaaatggcttattcctctcttaacaaaataaagcttaaaagccttggagaaaaaagcaaaaaattgggcaaaagggtcaggcttgccctaaaattacttgaagattatgacaagattctttctacggtggttatcggcaataatattgttaatatcggctcgtcggcgctggcgaccgccatattaatcggtattttcggcaataagggagtaagtatcgccaccgccgtaatgacggttcttgttttggttttctgcgaaatttcacctaaggttttagcgaaggaatcgcccgaattgacagcgataagaaccgcgcctttccttcgtttccttgtatggttttttacgcctttaagccatcttgccgccgaatggaaaaaatttttaattaaacttttttctgttaagcaggaccgttcaaccacggaggacgaacttcttacgtttgtaggggaggtaaggcaggaaggcggcattaatattaatgaagaaaaaatgatccgccaggtaattgattttgacgacctgaaagcgtcggaaatatacacgccgcgcatggacgtgcaggcggtgcccgtaacaagcgccgtgcaggatgttgatcttaaatttacggaaaccggtttttcaaggattcccgtttttcaggattcggttgacaatattttaggaattatcaattttaaggatttttatcacgatgtaataaaagggaataaagcgcttaatgatataataaaaccctgttatttttgtcgccaaaacaataaagataggcaaactccttag

SEQ ID NO: 20696 - protein, 291 aa, Unknown
  Obtained from environmental sample
  SIGNAL (1)...(28)
  DOMAIN (10)...(192): Domain of unknown function DUF21
  misc_feature (1)..(291): Xaa is any amino acid
MDDSNSVNIILLSILFILMCFSAFFSLAEMAYSSLNKIKLKSLGEKSKKLGKRVRLALKLLEDYDKILSTVVIGNNIVNIGSSALATAILIGIFGNKGVSIATAVMTVLVLVFCEISPKVLAKESPELTAIRTAPFLRFLVWFFTPLSHLAAEWKKFLIKLFSVKQDRSTTEDELLTFVGEVRQEGGININEEKMIRQVIDFDDLKASEIYTPRMDVQAVPVTSAVQDVDLKFTETGFSRIPVFQDSVDNILGIINFKDFYHDVIKGNKALNDIIKPCYFCRQNNKDRQTP

SEQ ID NO: 20697 - DNA, 858 bp, Unknown
  Obtained from environmental sample
  misc_feature (1)..(858): n is a, c, g, or t
ttggatatcaccgacgccgcccagatacgccggcttttcccaagagtttacccgctcggtttgggcattaccgcgtcttcgccgttgcgtatagcaagggcgtttgcgaccttcggcaatcagggacgcgccgttacgcctattgccataaggactgtcgaggaccgcaacggccgcgttgtgtttgatgttgaaagggaactcaggcagaaacaaaagagattgggaaacaacattcagattatcagcccgcagaacgcttacattatgacaaaaattatggaaaagacggtcgaggaaggatcgctggcaaacggcgccggatggggagccaagtttacctttatcgattcaaacggcaaatcatttaaatttcccgtagcgggaaaaacaggaactccgcagaactggtcggacgcgtgggctatcgggttcagcccttattacactaccgcggtatggtttggttttgacaggccgggaaattccttaggtgtcgaacttacaggctcgacattgtcggggcctgtgtggggcgattatatgcgcgaaattcacaaagggcttccgtataaaacttttacaaggccgtcttccggcattatcgacgtaactgtctgttccaaatcaggccttttaagaaccgccgcctgcaagggggaagtatcccttcctttccttgacggcactcagccggtcaaatactgcgaaacatgcggcggaaacggagcgtccgtctacccgtcaaggcttccgtacacgcctatccctctaggaggttttgacgaaagcgctttcctggattcgcttcccatgcccaaacttccgcttgatgttcttcctgaaattacccgataa

SEQ ID NO: 20698 - protein, 285 aa, Unknown
  Obtained from environmental sample
  misc_feature (1)..(285): Xaa is any amino acid
MDITDAAQIRRLFPRVYPLGLGITASSPLRIARAFATFGNQGRAVTPIAIRTVEDRNGRVVFDVERELRQKQKRLGNNIQIISPQNAYIMTKIMEKTVEEGSLANGAGWGAKFTFIDSNGKSFKFPVAGKTGTPQNWSDAWAIGFSPYYTTAVWFGFDRPGNSLGVELTGSTLSGPVWGDYMREIHKGLPYKTFTRPSSGIIDVTVCSKSGLLRTAACKGEVSLPFLDGTQPVKYCETCGGNGASVYPSRLPYTPIPLGGFDESAFLDSLPMPKLPLDVLPEITR

SEQ ID NO: 20699 - DNA, 432 bp, Unknown
  Obtained from environmental sample
  misc_feature (1)..(432): n is a, c, g, or t
gtggattcgttttggattgcaagaaagggatatggagcattgattgttctggaaaagagggtaggcttaaaatcttatgttgattcgggcgaagtgataaatggcgatttttccaagaaacttttatgttctattttttatccaggaaccgctctacacgatggtgcggtgatagttttggggaataaaattatagcagcaggttgtgtgctacccatgccaaccggaacagcagcagccgagcaatccggtggaatgcggcacagggcagctaaagccctagctttggaaacagatgcttttgtgatagttgtatctgaagaaacaggctatatatccatagcttatcgcgatagctttcgcacaaggcagagcaaaagagaattggaagaagaaataaaacgccactggaaagaactttatgaagactga

SEQ ID NO: 20700 - protein, 143 aa, Unknown
  Obtained from environmental sample
  DOMAIN (6)...(121): Domain of unknown function DUF147
  misc_feature (1)..(143): Xaa is any amino acid
MDSFWIARKGYGALIVLEKRVGLKSYVDSGEVINGDFSKKLLCSIFYPGTALHDGAVIVLGNKIIAAGCVLPMPTGTAAAEQSGGMRHRAAKALALETDAFVIVVSEETGYISIAYRDSFRTRQSKRELEEEIKRHWKELYED

SEQ ID NO: 20701 - DNA, 738 bp, Unknown
  Obtained from environmental sample
  misc_feature (1)..(738): n is a, c, g, or t
gtgctgcaaatgaaaaccattgccattctaaccgcaatgcagcaagaattagatgccgttcttgaattattcgcttctgcaaacncaagcaaaaccgagctntacggaatgcctgtgtatatttttgagcataatgaaattaaatttatccttgccttatctggagttggcagaacaaacacagcgttaaataccgctttgatagcaaaagaatttgaacccagtgaaataataaatgttggcacagcaggcggtttgcaaacagaacaaaaaattttggatatagttattccaaaagaggttgtagctgttgatgttgatttaaccgctttgggttgcgaatacgggcaagtactcggtgagccaaaatcttattacaccgatgaggaattgcaaagcaaacttgttaaggctgcagcagctttgacatacatacatacaggcacagttggttcttcggaggcttttatttgccaaagcgagcaagtacgcgagattcacaagcgtttcaacaatagggttgtatgtgtggaaatggaggctttttccatagcagttgtttgcagccgttttaaaattccatttgcagttatacgcagcttatccgatgttccagcatctggcgaaggcaatgagcacgatttcaatgcgtttttgagcaaggcatctagcaatgcagctaagttgttgtttaggtatgtttcaaatatcaaaacacagcctttgcctccaaattaa

SEQ ID NO: 20702 - protein, 245 aa, Unknown
  Obtained from environmental sample
  DOMAIN (6)...(234): Phosphorylase family
  misc_feature (1)..(245): Xaa is any amino acid
MLQMKTIAILTAMQQELDAVLELFASANXSKTELYGMPVYIFEHNEIKFILALSGVGRTNTALNTALIAKEFEPSEIINVGTAGGLQTEQKILDIVIPKEVVAVDVDLTALGCEYGQVLGEPKSYYTDEELQSKLVKAAAALTYIHTGTVGSSEAFICQSEQVREIHKRFNNRVVCVEMEAFSIAVVCSRFKIPFAVIRSLSDVPASGEGNEHDFNAFLSKASSNAAKLLFRYVSNIKTQPLPPN

SEQ ID NO: 20703 - DNA, 345 bp, Unknown
  Obtained from environmental sample
  misc_feature (1)..(345): n is a, c, g, or t
atgcgaagaatatcgactgatatgccccacattgacacgcagtatcaattaaggcggcaggaagaacggattgcgaaactgcaatcacaaattacatccgagaacaggatacgagaactgcgcgacgatcccatcgcggcctcccacacggtgcgctatgaatcgtacctcgcgcggcttgagcgtttcgagaaaaacaccttgtacgcgaaggatcactacaatctcgtttatggatatatgaacgaagcgcttggcattatgcagcgggtgcgtgaacttgcggttcagggcgcgaacggaacctacacggaagatgatcaaaaactcatgggcaggaaataa

SEQ ID NO: 20704 - protein, 114 aa, Unknown
  Obtained from environmental sample
  misc_feature (1)..(114): Xaa is any amino acid
MRRISTDMPHIDTQYQLRRQEERIAKLQSQITSENRIRELRDDPIAASHTVRYESYLARLERFEKNTLYAKDHYNLVYGYMNEALGIMQRVRELAVQGANGTYTEDDQKLMGRK

SEQ ID NO: 20705 - DNA, 453 bp, Unknown
  Obtained from environmental sample
  misc_feature (1)..(453): n is a, c, g, or t
ttgcgaaacggggcggattactcggtcgcgcccatcgcccatccttcgggctggatcgaggtgaaccccgccctagtgaaggataccgcgtcggtggcttcgggcttcgggttcaacggcaacgcggccaatcccggcaacggcgacgcggcggccgcaatcgcctcaatcaggaataacccggtaatggttggccagctttccacttttgacgattacttcgccgattctgtcggacgcatgggacttctgggcgagcagagcgagagagctttggcgacggaaaaccttatcatgaagcagcttcatgagatgaggcagtcaatttccggagtgaatatagacgaggaactcgcgaacatgatccgttaccagcacggctacaacgcggcggcgcgttttgtttccacggtcaattccatgctggacgtattaatgaggcttggcgcttaa

SEQ ID NO: 20706 - protein, 150 aa, Unknown
  Obtained from environmental sample
  DOMAIN (110)...(148): Domain of unknown function (DUF1078)
  misc_feature (1)..(150): Xaa is any amino acid
MRNGADYSVAPIAHPSGWIEVNPALVKDTASVASGFGFNGNAANPGNGDAAAAIASIRNNPVMVGQLSTFDDYFADSVGRMGLLGEQSERALATENLIMKQLHEMRQSISGVNIDEELANMIRYQHGYNAAARFVSTVNSMLDVLMRLGA

SEQ ID NO: 20707 - DNA, 843 bp, Unknown
  Obtained from environmental sample
  misc_feature (1)..(843): n is a, c, g, or t
gtgtgcggatcgccgagaactctcgtggtggaagagcttgaaccttttattgaaaacacattaaaagcaaatggcataaaatgtagcggaaaagatttaaccggattgcaaggcgaactcagcgttcaaaaaatacgcgaagtaatattagggcaaaagccattaacggaactcacgcaaaatctccccggtcggcctccggttatgtgtgcgggttgcactcatcgcggagttttttatattatcaacaaattaaaactcaatgtggttggcgatatcggttgctattcgttgggctgttctccgccgctaaacgcaatgcactcgcttatctgtatgggtgcgtccatttcaaatgcacacggaatgtttcaggcaaagggcaaggaattttcaaaaaccaatatagctgttataggcgattccacttttatccacagcggaataacaggtttaatagatgcggtctataataaatcgaacatcaccgttatcattatggataaccgcacaacaggaatgacagggcaccaaaatcacccgggcacgggtctcaccataaaaggcgaacccactcatacgcttgatttaggcgaaataagttgtgcttgcggagtttcaaatgtttcggttattgacccatancatttggcagaaatagaaaacgcaatcaaggaaagtctcaaagcggatagcgtttctgtgataatcgcaaaacgcccctgcgttctcctagacaattcaattcagcgtaaagcgataacgattttcgaatgcaaaaaatgcggtctatgcttgaaaataggttgccttgcccttagccaatgcaaagacaattcgtaa

SEQ ID NO: 20708 - protein, 280 aa, Unknown
  Obtained from environmental sample
  DOMAIN (92)...(238): Thiamine pyrophosphate enzyme, C-terminal TPP binding domain
  misc_feature (1)..(280): Xaa is any amino acid
MCGSPRTLVVEELEPFIENTLKANGIKCSGKDLTGLQGELSVQKIREVILGQKPLTELTQNLPGRPPVMCAGCTHRGVFYIINKLKLNVVGDIGCYSLGCSPPLNAMHSLICMGASISNAHGMFQAKGKEFSKTNIAVIGDSTFIHSGITGLIDAVYNKSNITVIIMDNRTTGMTGHQNHPGTGLTIKGEPTHTLDLGEISCACGVSNVSVIDPXHLAEIENAIKESLKADSVSVIIAKRPCVLLDNSIQRKAITIFECKKCGLCLKIGCLALSQCKDNS

SEQ ID NO: 20709 - DNA, 1017 bp, Unknown
  Obtained from environmental sample
  misc_feature (1)..(1017): n is a, c, g, or t
gtgtttattcgccatgacttcccgaaaatgcgatcccggcatgttttgcgttgggtatcccccatcctggtttgtgttacggtatgcaccttatgtgccatacgctcggcgggaggtcgcgcaggcggcgcgggggaatacgggcgcgtgaccgtcacgccggaagaccgctcaaaaaaaccctttaaagcatgnatgagccatcgggactcggtggtcaacctgccggaggggtttcatgttacggcgcgtaccgacatctgcatagcctcgtgcgaagacgccggcagaaaactttatggcatacaattccatcccgaatccgcgcacactgaaaacgggttggatattatccggggttttttatatgatgtgtgcggtgcttccggcggatacaaattggacgattatatccaagaacagtcccggttaatccagcaaaaggtcggatgccagaatgtcctgctcgcgctgtccggcggggtggattcgtcggtatgcgccgcgttgttgtcaaaagcgataccggggcagcttgtctgcatctttgtcgaccacgggtttatgcgtcttggcgagggcgacgaggttgagcaagcatttcaaaaccaaagcgtccgttttatccgcgtcgacgccaaggagcggttcttgagccgactggtgggcgtgaccgaacccgaagccaagcgcaaaataataggcgaggagtttattcgcgtttttgaggaagaggcctcaaaattcggtaagataccctttttggcgcaggggaccatctatcctgacatcgtggagtccggcgggggttacggcgcgacgataaagagccatcacaatgtgggcggtctgccgaaaaaccttgccttttccgatgtcatcgagccgctttcgggtctctttaaggacgaggttcgtgttctcggcaagaaactcgggcttccgcccgtccttgtcaaccgccagccattcccaggcccagggcttccatccgcatncggggcagtctcgcgataa

SEQ ID NO: 20710 - protein, 338 aa, Unknown
  Obtained from environmental sample
  DOMAIN (1)...(125): Glutamine amidotransferase class-I
  misc_feature (1)..(338): Xaa is any amino acid
MFIRHDFPKMRSRHVLRWVSPILVCVTVCTLCAIRSAGGRAGGAGEYGRVTVTPEDRSKKPFKAXMSHRDSVVNLPEGFHVTARTDICIASCEDAGRKLYGIQFHPESAHTENGLDIIRGFLYDVCGASGGYKLDDYIQEQSRLIQQKVGCQNVLLALSGGVDSSVCAALLSKAIPGQLVCIFVDHGFMRLGEGDEVEQAFQNQSVRFIRVDAKERFLSRLVGVTEPEAKRKIIGEEFIRVFEEEASKFGKIPFLAQGTIYPDIVESGGGYGATIKSHHNVGGLPKNLAFSDVIEPLSGLFKDEVRVLGKKLGLPPVLVNRQPFPGPGLPSAXGAVSR

SEQ ID NO: 20711 - DNA, 702 bp, Unknown
  Obtained from environmental sample
  misc_feature (1)..(702): n is a, c, g, or t
gtgataatccttcccgctccggtgcagggagacgaagccgccgcccttatcgcggcaaggattaagcaggctaaccaatggaaaatagcggacgtgcttatcgtgggcaggggcggcggctcacctgaagacctgctgcctttttcagatgaggaagtagtgcgcgctgtagcggcctctgaaatacctgttgtaagcgcggtggggcatgaaattgactgggctttaagcgatcacgcggcggacaagcgcgcgccgacgccttccgccgcggcggaacttgtaagcgagagccgcgccgcgatgacggatacaattcatacaatgatagaaagttttaagagcgttatacacgcgcgcatagaaagggcgcggttattgttaaaaccgttcgatttaagggatttggaataccgtttccgcgccattttacagccgcgcctgatccgccttgacgacgcgaaagaagcgcttatcaacgcaatttcggacaggaaagagaatctgcgcggcaggatagcgcttgccgccgcggtaatcgaggctgcaaatcctctttcggcaatggaacgcggattttcggttgttacggattcaagcggcaaattagtgcgcgattcanaaaaagtaaaaaagggggagcggctctttatacggccgcttaaaggaaaaataaacgcaatagtggaaagttgcgagtaa

SEQ ID NO: 20712 - protein, 233 aa, Unknown
  Obtained from environmental sample
  DOMAIN (30)...(188): Exonuclease VII, large subunit
  misc_feature (1)..(233): Xaa is any amino acid
MIILPAPVQGDEAAALIAARIKQANQWKIADVLIVGRGGGSPEDLLPFSDEEVVRAVAASEIPVVSAVGHEIDWALSDHAADKRAPTPSAAAELVSESRAAMTDTIHTMIESFKSVIHARIERARLLLKPFDLRDLEYRFRAILQPRLIRLDDAKEALINAISDRKENLRGRIALAAAVIEAANPLSAMERGFSVVTDSSGKLVRDSXKVKKGERLFIRPLKGKINAIVESCE

SEQ ID NO: 20713 - DNA, 426 bp, Unknown
  Obtained from environmental sample
  misc_feature (1)..(426): n is a, c, g, or t
atggacagagcggccgagagctgttgtaaagatttaaaaaaaatcgcctccatgccgcttgatggctgtattaaaggaatgtttatcgccgatcccaccctgcacgataaagtgcggcaaaaatttaaagagcgttttggcaacaaaatagatatagtgcgcagttacccgacttttttggaagttatgaacaacggagtttccaaaggcgaaggtttaagaatagcgatggaacacagggggctaaaacccgaagaagtaatcgcctttggcgacgaagaaaatgatatgccgatgttcccgatagccggtttttctgccgcccccgaaaatgcaagagaaaaaattcgtaaagcggcggattttatttacggtcccaatactgaggaaggactagctgtttatctggaaaagatgtttttgtag

SEQ ID NO: 20714 - protein, 141 aa, Unknown
  Obtained from environmental sample
  DOMAIN (1)...(136): haloacid dehalogenase-like hydrolase
  misc_feature (1)..(141): Xaa is any amino acid
MDRAAESCCKDLKKIASMPLDGCIKGMFIADPTLHDKVRQKFKERFGNKIDIVRSYPTFLEVMNNGVSKGEGLRIAMEHRGLKPEEVIAFGDEENDMPMFPIAGFSAAPENAREKIRKAADFIYGPNTEEGLAVYLEKMFL

SEQ ID NO: 20715 - DNA, 951 bp, Unknown
  Obtained from environmental sample
  misc_feature (1)..(951): n is a, c, g, or t
gtgaacaaaggcaggctagaaatagacgaaaaagagggctggcttgccgaatttgactaccactgccccagcaccgcagacgaagttgattttgcaaccgactaccccacctcgccctcgggttccaaactgcacacattcataaaatcacccgaagatttaccgaaatcatccgactacgattttgtgaaaaaagatttaaataaccttacaggtgccatgtttaataaaacaggttttccagataatggttaccgtgatttggtggatttggagagtgttgccaaatacttaatgcttgagcagttcttggacaattttgattttaacaataagtcaaacaatagcggttttccagcctcaaacttttttcataaagaaaacagtagaagcaaaattaaggcaggacctatatgggatttggatttgatagctggagtggaatataactcttttccaaaacactttacaacgtctaaaacacctataatgccaaggcacgccttttacaagaaattttttgacgacccggtattcaaagccaaatttaaaaagaattgggataagtataaacccgatattcaagcgatgaacaaacaaggcgggtttatagattccatagcatccgccgttgaaggttcggtggtgaagaatttcgcgcttctaaacactggttcatcttgcaaaccaactccttgcactacaacttgtacttgtggagcaggcggattttctggaatgccgccaattgtgctgggaagtttacaggcatacaaagacgaggttactaaattgaaaaactggtggaacgacagaattaaatttttcgatgacgaactgaccaaaatgaacatagacaccagccaagatatagtagatccgtctagcagcagcgtagcaaggtcttctagctccagcaacaggtcaagcagcttccataggttcatctag

SEQ ID NO: 20716 - protein, 316 aa, Unknown
  Obtained from environmental sample
  misc_feature (1)..(316): Xaa is any amino acid
MNKGRLEIDEKEGWLAEFDYHCPSTADEVDFATDYPTSPSGSKLHTFIKSPEDLPKSSDYDFVKKDLNNLTGAMFNKTGFPDNGYRDLVDLESVAKYLMLEQFLDNFDFNNKSNNSGFPASNFFHKENSRSKIKAGPIWDLDLIAGVEYNSFPKHFTTSKTPIMPRHAFYKKFFDDPVFKAKFKKNWDKYKPDIQAMNKQGGFIDSIASAVEGSVVKNFALLNTGSSCKPTPCTTTCTCGAGGFSGMPPIVLGSLQAYKDEVTKLKNWWNDRIKFFDDELTKMNIDTSQDIVDPSSSSVARSSSSSNRSSSFHRFI

SEQ ID NO: 20717 - DNA, 423 bp, Unknown
  Obtained from environmental sample
  misc_feature (1)..(423): n is a, c, g, or t
gtgagttcgcttattttcagcaaagtaaacagatacgatattaaaggaaaaaatgttttttccacgcttgaaaaatattatgttgccgatatgggcttgttgcagttaaggcgtagctatattgatgaaaatttgtctgccaggcttgaaaatattgttgccaatgaacttatatcaaggaattacacaataaatgttggcataatgcctaatgctgagatagattttgtggcaaaaaagaacaacaaaaccgaatatattcaagtttgctacaaaatagactcagataaaaccctgcaaagagaattaaatgcctttaagggcatccccgataaaaaacttctcataacagcagatacctacaattatagccaaaatggagtggagtgtgttaatgtgctggaatggttgattggtggataa

SEQ ID NO: 20718 - protein, 140 aa, Unknown
  Obtained from environmental sample
  misc_feature (1)..(140): Xaa is any amino acid
MSSLIFSKVNRYDIKGKNVFSTLEKYYVADMGLLQLRRSYIDENLSARLENIVANELISRNYTINVGIMPNAEIDFVAKKNNKTEYIQVCYKIDSDKTLQRELNAFKGIPDKKLLITADTYNYSQNGVECVNVLEWLIGG

SEQ ID NO: 20719 - DNA, 948 bp, Unknown
  Obtained from environmental sample
  misc_feature (1)..(948): n is a, c, g, or t
atggccngaagaaatcggggaacatcccaaaatatgcatgcctgtaaagccgacgcctatggacacggcgctgttccggttgcccgatgcgcactggaggcaggagtggaatatctggctgtggcgcttgtttccgagggcagggaactgagggcggcaggaatcacttctccgatactgctccttgcccaggcaatgcctgatgaacttgatgaaatcgtcacgctgggccttattccccatatcggcgacgacgagtttgttgaaattgcggcctatgcggcggagagagcggggaaaaaactgacagttcatctaaagattgaaacaggcatgggacggcttggctgccgtcatgaggaagcggcagccctggctgcgaaaatcgcttcaagcaagtttctctcccttggaggggtggccacacatctcgcggtttcagattccatagacccagatgagatcgcgtacaccaaagcacagctcagcctgctaaaaactgctgtcgcttcgatagaaaaagccgggatcgatccgggtattgtccatgccgccaattccggggctttggtttttcacgaggattcatattttgacatgattcgcccggggatttttctttacggctattcaccggcggactggcttgtaaaaacagggcaggccgattctttaagcgcttatttatccgccgaaccgctgatggagctgcgcagcgccgtggtttcaattaaagagatgagaaagggggagtccgtctcgtacggaaaaacctggacagcgccggaagacacctatgtcggtatagtgccggcaggctacgccgacggttttcgccggagcctttcaacgatcattcgatgcttatccgtggaaaggcatatcccctggtgggcaggatttgcatggatcaatgcatgggtaaacttggccgcgaacctgatgtaa

SEQ ID NO: 20720 - protein, 315 aa, Unknown
  Obtained from environmental sample
  DOMAIN (234)...(315): Alanine racemase, C-terminal domain
  misc_feature (1)..(315): Xaa is any amino acid
MAXRNRGTSQNMHACKADAYGHGAVPVARCALEAGVEYLAVALVSEGRELRAAGITSPILLLAQAMPDELDEIVTLGLIPHIGDDEFVEIAAYAAERAGKKLTVHLKIETGMGRLGCRHEEAAALAAKIASSKFLSLGGVATHLAVSDSIDPDEIAYTKAQLSLLKTAVASIEKAGIDPGIVHAANSGALVFHEDSYFDMIRPGIFLYGYSPADWLVKTGQADSLSAYLSAEPLMELRSAVVSIKEMRKGESVSYGKTWTAPEDTYVGIVPAGYADGFRRSLSTIIRCLSVERHIPWWAGFAWINAWVNLAANLM

SEQ ID NO: 20721 - DNA, 840 bp, Unknown
  Obtained from environmental sample
  misc_feature (1)..(840): n is a, c, g, or t
ttgattccagctaacgaaagcggtaatggcggagggaatcaagactcaattgttgaaatgatctatgtgtccggcggtagtttccagatggggaaagaactgggaaccgccggatcaggcgacacaacgccggtacacacggtaacgctgaccggtttttacatgggcaagtatccggtaacgcaagaacagtatcagacagtaatggggacgaaccccagcaattttagttcaaaccctgcggatggagaagtacaggggaaacgccctgtggagatggtaacatggtatgacgcggtggagttctgcaacaaattgagcgaaagggaaggattgcaaacggtgtacacaatcagcggtaggactccttcgacggggtatcctataaccagcgcgacagtaacggcggactggggcaagaacggctatcgcctgccgacagaggcgcagtgggaatacgcggcgaaaagcgggagtacgccggggaattacacatatgcggggagtaatacggtaggagatgtggcgtggtactccggtaacagcggcagtaaaactcacgaggtagggaagctgtctcccaacggattaggcttgtacgatatgagcgggaacatacatgagtggtgttgggactggtatagttcaagttattattcgagtagtccggttaatgatccgattggctccgatactagcgacacccgggtgctacgcggcgggggctggtactattcggctgagatcgcgcgtttggtgactcgggagagctactacccgaactacaggttcagcaggcttggcttccggctggtgcgcccagcgactggcggaacgtaa

SEQ ID NO: 20722 - protein, 279 aa, Unknown
  Obtained from environmental sample
  DOMAIN (16)...(273): Domain of unknown function (DUF323)
  misc_feature (1)..(279): Xaa is any amino acid
MIPANESGNGGGNQDSIVEMIYVSGGSFQMGKELGTAGSGDTTPVHTVTLTGFYMGKYPVTQEQYQTVMGTNPSNFSSNPADGEVQGKRPVEMVTWYDAVEFCNKLSEREGLQTVYTISGRTPSTGYPITSATVTADWGKNGYRLPTEAQWEYAAKSGSTPGNYTYAGSNTVGDVAWYSGNSGSKTHEVGKLSPNGLGLYDMSGNIHEWCWDWYSSSYYSSSPVNDPIGSDTSDTRVLRGGGWYYSAEIARLVTRESYYPNYRFSRLGFRLVRPATGGT

SEQ ID NO: 20723 - DNA, 927 bp, Unknown
  Obtained from environmental sample
  misc_feature (1)..(927): n is a, c, g, or t
atgatgattgccgccgatcacaaattagacgcgcagcttgttagccgcttaaaggaaattttaaaagactccggtcttgaggcaattgtttttgacggaatagaggatgattcttccgcggaaatggcggataacgttgtctcgctattaagcgcggcgcactgtgacgcgatcatcggttttggcggctttaaaacacagattatttcccgcatggcggcaataatggctcccatgaaaatgacatcgtttgaactgcttgacggcagggactgtcagggaaaattttttccactgcttacaatcccgacagagggaacagacgcttttaccgcgtcggatttttttcttgtcgcagatccacgcagcagattaataaaatatgtttcatctccgcataatctttacgcgtcaataatcatagacagtaatttaatatctatactttcagataacaatgcgccctgctatatttttgatggttttttttcggcggtagaagcgtattgttcatcaagggcaaattttctctccgacactctgctggaaaaagcggttaatttttacgcgaaattattaaaaaaaggctcaagcggcgctataaacgcggaaatcttcgcacaggcctgcctgctcttatccatcggctcttctgtaagttctcccggtataggcgccgcgctctcggcggcaattaacgcgcgctgcggtattccaagacaacagtgttctgcggcgctctttcagtcattgcggagcggcttgtcagcgcgcgccccgaaaaaatggcgcgggttgcctctttgcttggagcggcaaaagcctgcttccgccgcggaggcagcgaacaccgcggtagaagcgattcccaactccatgacggcgctcaatgtgccgcttgaatttaaagacaaccactttccttag

SEQ ID NO: 20724 - protein, 308 aa, Unknown
  Obtained from environmental sample
  DOMAIN (1)...(308): Iron-containing alcohol dehydrogenase
  misc_feature (1)..(308): Xaa is any amino acid
MMIAADHKLDAQLVSRLKEILKDSGLEAIVFDGIEDDSSAEMADNVVSLLSAAHCDAIIGFGGFKTQIISRMAAIMAPMKMTSFELLDGRDCQGKFFPLLTIPTEGTDAFTASDFFLVADPRSRLIKYVSSPHNLYASIIIDSNLISILSDNNAPCYIFDGFFSAVEAYCSSRANFLSDTLLEKAVNFYAKLLKKGSSGAINAEIFAQACLLLSIGSSVSSPGIGAALSAAINARCGIPRQQCSAALFQSLRSGLSARAPKKWRGLPLCLERQKPASAAEAANTAVEAIPNSMTALNVPLEFKDNHFP

SEQ ID NO: 20725 - DNA, 738 bp, Unknown
  Obtained from environmental sample
  misc_feature (1)..(738): n is a, c, g, or t
gtggataacaagtggccttttataacccacctttgcgaggggtttgacgaggaatcaatgtacggaatccagacgcttgaaaaattgaaagtgctggacaaccactgcctgcttgtccactgtatcgcttttagcgatgccgacataaaaacaacggcaaaggccggggcaagcgtttcatggtgcggcttttccaatatgtttatgttcaatgtcaccgcgaaagtccgcaagatgatcaaagccggggtaaatgtcaccatcgggacggattcatcggcaagcggatcggcaaacctgcttgcggaaattaagtacgacagggagctttaccgttccatgtacggcgaggagcttccggcaaaaaaaatattccagatggttacgtataacgcggcaaaagctttctggatggaggacaggattggaacgctggacgaaggcaagctgggcgacattttgatactgaaagccaggcatgacgatccttacgaaaaccttgttaacgcttccatgaaggacattgagcttctggtattggcgggtacgcccatatacggagaaaatcgttttctggatatttttgaaggcgtactgccgtcaggatattcacagattaaagtaagcggccgggccatgtttgtaaaaggcgatcctgccggtttgtattccaatatccggggcaagatcggttttaagaaaaagctggattatctgccttttgaccctgattcataa

SEQ ID NO: 20726 - protein, 245 aa, Unknown
  Obtained from environmental sample
  misc_feature (1)..(245): Xaa is any amino acid
MDNKWPFITHLCEGFDEESMYGIQTLEKLKVLDNHCLLVHCIAFSDADIKTTAKAGASVSWCGFSNMFMFNVTAKVRKMIKAGVNVTIGTDSSASGSANLLAEIKYDRELYRSMYGEELPAKKIFQMVTYNAAKAFWMEDRIGTLDEGKLGDILILKARHDDPYENLVNASMKDIELLVLAGTPIYGENRFLDIFEGVLPSGYSQIKVSGRAMFVKGDPAGLYSNIRGKIGFKKKLDYLPFDPDS

SEQ ID NO: 20727 - DNA, 666 bp, Unknown
  Obtained from environmental sample
  misc_feature (1)..(666): n is a, c, g, or t
atggatcaggacntgggagctttttcccgatttaccagaatattcgagagcgatgaaataatttttagtgagcatgaaccgggtgatactttctaccttattcagtccggaagggtaaagctgttgaaaaacgacggggagtttgagcgaaccctggatattctgcagccaccggatatgttcggtgaaatggcaatactggaaggctcgccgcgcagcgccaccgccattgccatggacgaggtaaaggcgctggaattcaacgcgcagaattttgaaatgctcatgaccaaaaacccccagattggcattaacctgctgcggattttcgcaaagaggatttacgattcaaaacgacgttttatgatccttgcgctacaaaacccccaggcaaaagtcgcggacgttttcctgatgcttgatgaaacaacggcaaatattgacagaagaaccgatactcgtgaattccagaccactattgaagatatagcccattgggccggaatcagcgttgcggaggcaagggacattcttcacacctttgtcgtgcagaaccgccttgagatgtattccacccgcatggttgttaaaaacatcaatgattttacccgcattgtcacctacaagcgcagacagacaaagaatccgattggaacaaaaacctga

SEQ ID NO: 20728 - protein, 221 aa, Unknown
  Obtained from environmental sample
  DOMAIN (12)...(101): Cyclic nucleotide-binding domain
  misc_feature (1)..(221): Xaa is any amino acid
MDQDXGAFSRFTRIFESDEIIFSEHEPGDTFYLIQSGRVKLLKNDGEFERTLDILQPPDMFGEMAILEGSPRSATAIAMDEVKALEFNAQNFEMLMTKNPQIGINLLRIFAKRIYDSKRRFMILALQNPQAKVADVFLMLDETTANIDRRTDTREFQTTIEDIAHWAGISVAEARDILHTFVVQNRLEMYSTRMVVKNINDFTRIVTYKRRQTKNPIGTKT

SEQ ID NO: 20729 - DNA, 630 bp, Unknown
  Obtained from environmental sample
  misc_feature (1)..(630): n is a, c, g, or t
atgcctaaaaagcccaaagaaataactatccgttccagcgcggctgaatacttaacatatattgccgctaccggagacaatccacaaagcattgaaatgcgttatgaggacgaaaatatttggctgacgcaaaaaatgatggcggtattgtacgatgtaggagtcaatacaatcaattatcatttaaaacaaatatttgaggatgcagaactcccagaagggacaactattcgaaaatttcgaatagttcaaaccgaaggcgaacgtacaattgagcgaaatatagaccactataatctgcaagctattatcgccgtgggcttcaaagtctataatgaacgggcggtacaattccgtaaatgggctaacaaaatcgtaaaagattacacaattcaaggctgggcaatggatgaagaacgcctgaagcatggcgggacaataattaccgaagattattttgaaaagcaactcgaaaaaatacgggaaatacgcctttctgaacgtcgattctatcagaagataaccgatatttactcaactgcccttgattacgataaaacagctaaaaccaccagagagttttttgccaaagtgcagaataaactgcatttgccgttccgctcgcgataa

SEQ ID NO: 20730 - protein, 209 aa, Unknown
  Obtained from environmental sample
  misc_feature (1)..(209): Xaa is any amino acid
MPKKPKEITIRSSAAEYLTYIAATGDNPQSIEMRYEDENIWLTQKMMAVLYDVGVNTINYHLKQIFEDAELPEGTTIRKFRIVQTEGERTIERNIDHYNLQAIIAVGFKVYNERAVQFRKWANKIVKDYTIQGWAMDEERLKHGGTIITEDYFEKQLEKIREIRLSERRFYQKITDIYSTALDYDKTAKTTREFFAKVQNKLHLPFRSR

SEQ ID NO: 20731 - DNA, 453 bp, Unknown
  Obtained from environmental sample
  misc_feature (1)..(453): n is a, c, g, or t
atgtttcgtcagcatgttgaattcatcggtcgtgaaagagatgagaatgatgttgagattgaaatttatcgcagcggcgcgggcaaatcaggcggacaacggcagaagctcgcaaccacatgcctcgccgctgcattacgatatcagcttggtggtaatgatcttggcatccccaagtatgctccggttgttcttgatgaagcgtttgacaaagcggataacgaattcactacggtggtaatgaatattttcaataatttcggattccagatgatagtggcaacaccactcaagtctgtaatgacactcgaaccgtttatcggaggcgcatgttttgtagatatcaacgacaggtgtatatcaagcgtcctgattattaagtatgacagcgagcaacagcgattggatcttacgaatcataccggcagggaggctgacattgaagtttcctga

SEQ ID NO: 20732 - protein, 150 aa, Unknown
  Obtained from environmental sample
  misc_feature (1)..(150): Xaa is any amino acid
MFRQHVEFIGRERDENDVEIEIYRSGAGKSGGQRQKLATTCLAAALRYQLGGNDLGIPKYAPVVLDEAFDKADNEFTTVVMNIFNNFGFQMIVATPLKSVMTLEPFIGGACFVDINDRCISSVLIIKYDSEQQRLDLTNHTGREADIEVS

SEQ ID NO: 20733 - DNA, 888 bp, Unknown
  Obtained from environmental sample
  misc_feature (1)..(888): n is a, c, g, or t
atgagggctacaagggccattgtgcatttggacaggtttttggggaattttaaggcaatacaggagaggatagggccacagcggcgtatctgcgttccggtaaaggccgatgcctacggtcatggcgcggcaataatcgccagtgcaagccttgacgccggggcctcctgccttggggttgcggatgtccaggagggcgtagcgctgagaaatgaaggtatatccgctcctattctgctgttttcccagcctctgcccgcagaaattccggaaattatcaaaaatgaactgtcgccactggtttctgacaatgaatttatcgaaatgctggcccaatcggcggctgaagccaggatacggcttcccgtccacctgaaaatcgacacaggcatgggtcgaatgggctgcacgcctgctgaagccccttttttggccaggcaaattgccgcaagctctcttgaatacgcgggaaccgccacccaccttgccgtatcggattccacagccccggaagacctggtctatacagaacgacaaatagccggatttagggaagtgctggggcaaatacagggggcgggcgttgatccaggcattgtccatgcggcgaattcgggcgctgttgtcctccacccggaagcctggtttgacatggtgcggcctggaattatcctgtacggatataatcttacgggaaccccttccccggaggtggagccggtaatggaactgcggaccaatgtcgccttgatcaggcaggtgaaaaaaggcgagaccgtatcctatggccgaacctgggccagcgcctttaacacggcaatcgctgttctgtcggttggttatgccgacngcttgccccgtctggccagcaaaaatggcangcggtga

SEQ ID NO: 20734 - protein, 295 aa, Unknown
  Obtained from environmental sample
  DOMAIN (241)...(295): Alanine racemase, C-terminal domain
  misc_feature (1)..(295): Xaa is any amino acid
MRATRAIVHLDRFLGNFKAIQERIGPQRRICVPVKADAYGHGAAIIASASLDAGASCLGVADVQEGVALRNEGISAPILLFSQPLPAEIPEIIKNELSPLVSDNEFIEMLAQSAAEARIRLPVHLKIDTGMGRMGCTPAEAPFLARQIAASSLEYAGTATHLAVSDSTAPEDLVYTERQIAGFREVLGQIQGAGVDPGIVHAANSGAVVLHPEAWFDMVRPGIILYGYNLTGTPSPEVEPVMELRTNVALIRQVKKGETVSYGRTWASAFNTAIAVLSVGYADXLPRLASKNGXR

SEQ ID NO: 20735 - DNA, 840 bp, Unknown
  Obtained from environmental sample
  misc_feature (1)..(840): n is a, c, g, or t
ttgaaaaaaaacgggcttcttttgttgaacgcacaagataagtttttaagaagcgtaaagttggaaaccagtgaaattttctttattgtttttgtcggcgacagcggcgacatgtgcggaatttccgcgataaatattcaagcggatgataatccctcgtcttttgacgttgtatacaaaggacagactttcccctgttcgcttcctgcaatcggaaggcacaatgtaaccaacgcccttttcgcgcttttttgcggcgttaaattgggcatagatattacagatgcgatagacgagattaagcgttataccgtctcctccatgcgcacggaaaccgcctatgtaaaaggaattacgataataaaagattattacaacgccagccccgattccgcccgagccgcgctggaagttcttgcgaactatccttcatcgggaaagaaaatcgccctattaggcgaaatttttgagttaggcgatttcagcgcgcaggaacacataaatctcgctaaaacttgcaatgaaaaaaagattgattatgtgttttttataggtgcggattttgaatgtttcaaaaaagaattgaaaaacggcgaatgtttcagcggccatgaaagggacgttttttcaaaatcgcttaaaaattatatttccggcggcaatttgaaaaaaggtgacgttatcctgattaaaggctcaagagggatgaagatggaggaattttacgagccgcttaanagttacattaacgccgcaatgagcgattccacccacctgccgccgtccgcgacaaaatgtacgtggacattaacgccggtaaattcaattactcgcagataa

SEQ ID NO: 20736 - protein, 279 aa, Unknown
  Obtained from environmental sample
  misc_feature (1)..(279): Xaa is any amino acid
MKKNGLLLLNAQDKFLRSVKLETSEIFFIVFVGDSGDMCGISAINIQADDNPSSFDVVYKGQTFPCSLPAIGRHNVTNALFALFCGVKLGIDITDAIDEIKRYTVSSMRTETAYVKGITIIKDYYNASPDSARAALEVLANYPSSGKKIALLGEIFELGDFSAQEHINLAKTCNEKKIDYVFFIGADFECFKKELKNGECFSGHERDVFSKSLKNYISGGNLKKGDVILIKGSRGMKMEEFYEPLXSYINAAMSDSTHLPPSATKCTWTLTPVNSITRR

SEQ ID NO: 20737 - DNA, 732 bp, Unknown
  Obtained from environmental sample
  misc_feature (1)..(732): n is a, c, g, or t
ttgctctgccgaaatgcagacaaaataccgggaaaaaggcgaaaaacccgcgcaaatccccttgatctgtttcccgaacaacggccccgcgaacggctgataagcaaagggccgacggctctttccgacgcggaacttttggcggtgcttttaaatacgggaatcaagggaaaaaacgtggccgaactggcggaggacctcctcggcctgcttgatcggaacagggaaattccttccatacaggaaatttccaaactttccggcctgggcagttcaaaggcctgcaccgtagcggccatgctggaattcggcaggcggcgctggggcgctgccggttctgttatcaagcgtcccggggaaattttttctctggtgcggcacaatgccgaccggaagcaggagcgttttatcagcctgtccctcaacggcgcgcatgaggtaatggctgtccgggtggtcactatcggactggtaaaccggactattgtccatccccgcgaggtttttgccgaccttatccaggaccgcgccgccgcttttgccgttgcgcataaccatccttcaggccgtctttctccctcgcccgaagacgatgaaattaccggtcgtcttctcagggcatcggaaatcctgggcctgcattttcttgaccatgtcattttttcggaaaccgcctggtggagctaccgtcaaaacggccgcttcaataaacttaccaaaggaggcgaataa

SEQ ID NO: 20738 - protein, 243 aa, Unknown
  Obtained from environmental sample
  DOMAIN (112)...(235): RadC, DNA repair protein
  misc_feature (1)..(243): Xaa is any amino acid
MLCRNADKIPGKRRKTRANPLDLFPEQRPRERLISKGPTALSDAELLAVLLNTGIKGKNVAELAEDLLGLLDRNREIPSIQEISKLSGLGSSKACTVAAMLEFGRRRWGAAGSVIKRPGEIFSLVRHNADRKQERFISLSLNGAHEVMAVRVVTIGLVNRTIVHPREVFADLIQDRAAAFAVAHNHPSGRLSPSPEDDEITGRLLRASEILGLHFLDHVIFSETAWWSYRQNGRFNKLTKGGE

SEQ ID NO: 20739 - DNA, 720 bp, Unknown
  Obtained from environmental sample
  misc_feature (1)..(720): n is a, c, g, or t
gtggcggctcctgcctctggtcccatggcggccaaagccggtcaggcagccaaatacagcgttaacgttgacggcgttaattataatgtggtagtggctccggcgggaacagtggcaattgccccggccgctgaaccgaaggtagctagcggttcaactgttgcatcgccagccgccgcagccccggtaccctcaggcggcggaactccggttctcgctcccgtggcgggaagcataatccgctatgcggtagctgaaggcgcaaccgtaaaagcgggcgataatgtcatcataatggaatccatgaaaatggaactggaaattaaagcaactgcagcgggaaaggttcatttcctttcaacgcccggcgcgaaagtcgcgtcccaacagccaatcgcggaaataggcggcgtgccgggcgctgcgccggtagcaccggttgccgctgccgctccggccgctcctgtaccggcagcgcctgtagcacccgtttctgctgctcccacaagcgggactgtggtcctcgctccggttgccggaacgatcatccgctacgcaacagcagaaggcgcggctgtaaaagccggagacaatgttgtcataatggaatccatgaaaatggaactggaaattaaagcaactgcggcgggaaaggttcatttcctttctacgcctggcgcgaaagtcgcgtcccagcagccaatcgcggaacttaagtag

SEQ ID NO: 20740 - protein, 239 aa, Unknown
  Obtained from environmental sample
  DOMAIN (172)...(238): Biotin-requiring enzyme
  misc_feature (1)..(239): Xaa is any amino acid
MAAPASGPMAAKAGQAAKYSVNVDGVNYNVVVAPAGTVAIAPAAEPKVASGSTVASPAAAAPVPSGGGTPVLAPVAGSIIRYAVAEGATVKAGDNVIIMESMKMELEIKATAAGKVHFLSTPGAKVASQQPIAEIGGVPGAAPVAPVAAAAPAAPVPAAPVAPVSAAPTSGTVVLAPVAGTIIRYATAEGAAVKAGDNVVIMESMKMELEIKATAAGKVHFLSTPGAKVASQQPIAELK

SEQ ID NO: 20741 - DNA, 948 bp, Unknown
  Obtained from environmental sample
  misc_feature (1)..(948): n is a, c, g, or t
atgaacgaaaaaagaaccatttacatagattacaacgccaccacgcccctaaggccggaaataaaagccgccatggtagaaaacatggaactttacggcaacgcgtccagcatgcacgggtcgggcagggcggcccgcgccggagtagagcaggcgcgtaaggcgatagcttcacttattggagcaaaggacggaacaatagttttcacttccggcggctccgaatccaacaatacggtatttcaaaccatgcgccttctcgcgaaggacaatcctcgcaatgagtttattatatccgccattgaacacccctgcgtattaaactccgcgttaagccttaaaaaagacggctttaacgtaaaaattctccctgtagatgaatacggaaagctcaaaatggacgaattaaaaacggctcttaatgataaaacgctttttgtctcgataatgacggctaacaatgaaatcggcactattcaggatataaaagaaataaccgccttggtaaaaaacgccggcgcttttatgcatacggacgcggtgcaggcaataggaaaaatgccgctggacgtaaaagaaataggggcggattaccttaccatgtccgcgcataaaatttacgggcccaagggcgtgggcgctttgtatgtaaaaaaagacgcgcctttattcccgcttattcacggcggccatcaggaagacgggcttagggcgggaacttacaacagccccgccatcatgggctttgggaaagccgccgaaattgccgccgccgaaatcactaaatacggcaaagaaatttcttcccttcgcgacaaattgcgcaaggggcttttggagaaagttcctaatattaaaataaacggccacttaaaggatgtcccttccnacacgctcaacgtttcttccccggcgcggagggcgagtctattctcctttcctggatag

SEQ ID NO: 20742 - protein, 315 aa, Unknown
  Obtained from environmental sample
  DOMAIN (23)...(277): Beta-eliminating lyase
  misc_feature (1)..(315): Xaa is any amino acid
MNEKRTIYIDYNATTPLRPEIKAAMVENMELYGNASSMHGSGRAARAGVEQARKAIASLIGAKDGTIVFTSGGSESNNTVFQTMRLLAKDNPRNEFIISAIEHPCVLNSALSLKKDGFNVKILPVDEYGKLKMDELKTALNDKTLFVSIMTANNEIGTIQDIKEITALVKNAGAFMHTDAVQAIGKMPLDVKEIGADYLTMSAHKIYGPKGVGALYVKKDAPLFPLIHGGHQEDGLRAGTYNSPAIMGFGKAAEIAAAEITKYGKEISSLRDKLRKGLLEKVPNIKINGHLKDVPSXTLNVSSPARRASLFSFPG

SEQ ID NO: 20743 - DNA, 834 bp, Unknown
  Obtained from environmental sample
  misc_feature (1)..(834): n is a, c, g, or t
gtggatttctatttaaacaacgaatataaagggatttaccaaataacagacatagtccatgtgaacaagggcaggctagaaatagacgaaaaagaaggctggcttgttgaatttgactatcactgccccagcaccgcagacgaggttgatttcgccaccgattatccaacatcgccttcgggttccaagttgcacacattcataaaatcgcccgaagatttacctaactcatccggctacgattttgtgaaaagagaattaaatgcccttatgaccgctatgtttaataaatctggttttccagaaaatggttaccgcgatttagtggatttggaaagcgttgctaaatacttaatgcttgagcagttcatagacaattttgatttcaacaacaagtcaaacaatagcggttttccggcatcaaacttttttcacaaagacaaaggcggcaaaattaaagcaggtcccatctgggatttggatttgacagcgggtgtggaatataactccttccccaagcactttacaacgtctagaacacctgtgatgcccaggcacgcattttacaagaaattttttgacgaccccgtattcttggctaaattaaaaaagaattgggataagtataagcccgaaatccagtcaatgaacaaacaaggcggatttatagattccatagctgccgccgtggaaggttcggtagtgaagaatttcgctcttctaaacactggctcatcttgcagaccaactccttgtactaccacctgtanctgtggggcgggcggattttctggtatgccgcccattgtgctaggaagtttgtcagcatactaa

SEQ ID NO: 20744 - protein, 277 aa, Unknown
  Obtained from environmental sample
  misc_feature (1)..(277): Xaa is any amino acid
MDFYLNNEYKGIYQITDIVHVNKGRLEIDEKEGWLVEFDYHCPSTADEVDFATDYPTSPSGSKLHTFIKSPEDLPNSSGYDFVKRELNALMTAMFNKSGFPENGYRDLVDLESVAKYLMLEQFIDNFDFNNKSNNSGFPASNFFHKDKGGKIKAGPIWDLDLTAGVEYNSFPKHFTTSRTPVMPRHAFYKKFFDDPVFLAKLKKNWDKYKPEIQSMNKQGGFIDSIAAAVEGSVVKNFALLNTGSSCRPTPCTTTCXCGAGGFSGMPPIVLGSLSAY

SEQ ID NO: 20745 - DNA, 591 bp, Unknown
  Obtained from environmental sample
  misc_feature (1)..(591): n is a, c, g, or t
atgcccaaggcggttttcgccgcgaatgttaagccaaaagccagggaagggggagccggtcttgtctgcgggccctggggttctgatgaggtggaattcatgatttccgccaataaaggagagccgttaaaagaacttgcacggattgcatcgggaggcgagttgtcgcgcgtgatgctggcaattaaaactgtactttgcgaaaaggaagcgaaaaatgctggcgcggaaagcctgattttcgacgaggtagataccggaattggaggggaagtggccctttcagtcggggaatacctctcacgtattggtacatcgcctactgataaatcgcctaccgacaatagaaaacaaattttttgtgttacgcatctggccagcattgccgttcgtgccgataatcacttgaaagtggaaaaaaaggtggtaggcgaaagaacagtgacggaggtttcactgttaaaaggtttggccaggcggcaggaaatagcgcggatgcttgccggggattcgggggaagcggctcttgcccacgcggacgaattactggcaaaatacagtggggtgaaagatggcgaaaattacaaatga

SEQ ID NO: 20746 - protein, 196 aa, Unknown
  Obtained from environmental sample
  misc_feature (1)..(196): Xaa is any amino acid
MPKAVFAANVKPKAREGGAGLVCGPWGSDEVEFMISANKGEPLKELARIASGGELSRVMLAIKTVLCEKEAKNAGAESLIFDEVDTGIGGEVALSVGEYLSRIGTSPTDKSPTDNRKQIFCVTHLASIAVRADNHLKVEKKVVGERTVTEVSLLKGLARRQEIARMLAGDSGEAALAHADELLAKYSGVKDGENYK

SEQ ID NO: 20747 - DNA, 858 bp, Unknown
  Obtained from environmental sample
  misc_feature (1)..(858): n is a, c, g, or t
ttggcggttgatgaatggatggttgcacagggcacaatttacccagacaccatagagagcggcggtacggagaatgcagacctgataaaaactcaccacaaccgagtgcagggcattttggatttgcaagaagagggtttgcttttagagcctttggcggatttgtacaaggatgaggtacgagttttaggcgaagaactaggcataccacaaaagtttatatggcggcatccattcccaggcccagggcttggagtgcgtctgttgtgcagcgatggaaaaaccgctggcaaaacgcttgacgaaattcccgccttgaaaaaagccttggacgaactctccatagaagcactgcttttgcccataaaaagcgtaggagtacaaggcgatgcgaggacttatgcacagcctttgctcataaaaaacgagttcccttgggagcttttggaaaggcacagcacttctcttataaaccgcttcaaggaaattaaccgctctgtatggctggtggggagcattgcggatgggccttatacaaccgtggagcagtattgcacaaaagaaaactttgatatgctcagaatttttgacgatatatgccttaaatttttgaatagaaatggtttatacaaaaaaatatggcaaatgcccgttgttcttttgccgctcagaattttgggcaaaccctgcattgttatgcgccctgtgcacagctcagaagcaatgaccgccgatttcgcaagaatagataaagacttgctgaaagacgatttgtggcaaaagctganagaagcgggtgctggagcattattctacgatgtgacccacaaaccgccagcgactattgagtgggaataa

SEQ ID NO: 20748 - protein, 285 aa, Unknown
  Obtained from environmental sample
  DOMAIN (103)...(284): GMP synthase C terminal domain
  misc_feature (1)..(285): Xaa is any amino acid
MAVDEWMVAQGTIYPDTIESGGTENADLIKTHHNRVQGILDLQEEGLLLEPLADLYKDEVRVLGEELGIPQKFIWRHPFPGPGLGVRLLCSDGKTAGKTLDEIPALKKALDELSIEALLLPIKSVGVQGDARTYAQPLLIKNEFPWELLERHSTSLINRFKEINRSVWLVGSIADGPYTTVEQYCTKENFDMLRIFDDICLKFLNRNGLYKKIWQMPVVLLPLRILGKPCIVMRPVHSSEAMTADFARIDKDLLKDDLWQKLXEAGAGALFYDVTHKPPATIEWE

SEQ ID NO: 20749 - DNA, 537 bp, Unknown
  Obtained from environmental sample
  misc_feature (1)..(537): n is a, c, g, or t
atggctgcggctgtgctcgctttgcaatcccttggattgagcgtttccgcttgcatggagcatttaaagagctatgagggtttggaatttcgtttgcagaaaatagggagcaaagttttcaaaaataaaaatttggatttttacaacgattcgtattccacacgcccagaagccgcgatatctgcggcagagtccatgagcaaaccttttataattatactaggcggttccgaaaaacacgcagattttacggaactttctcaaaaactcgcaaagaataacctgctcaaaggggttgctttaataggcgcaacggcagagcgtatgcaaaaatcgctgcaaaccgaaaactgcaaagctaccacgcaaatttttgaaaacctgcaaaccgcttatgagtggtgcttggaaaacactcccgacaacggagcaattctgctctcccccgcttgcgcctcgtttggcctattcgccaattacaaggaaagaggaaaggaatttaataggctgtttaatccctcaaacagcgaacgctga

SEQ ID NO: 20750 - protein, 178 aa, Unknown
  Obtained from environmental sample
  misc_feature (1)..(178): Xaa is any amino acid
MAAAVLALQSLGLSVSACMEHLKSYEGLEFRLQKIGSKVFKNKNLDFYNDSYSTRPEAAISAAESMSKPFIIILGGSEKHADFTELSQKLAKNNLLKGVALIGATAERMQKSLQTENCKATTQIFENLQTAYEWCLENTPDNGAILLSPACASFGLFANYKERGKEFNRLFNPSNSER

SEQ ID NO: 20751 - DNA, 825 bp, Unknown
  Obtained from environmental sample
  misc_feature (1)..(825): n is a, c, g, or t
atgaaaggagacataattgaccgttcctggatgccttacggcaaggtattggtagtggacgatctgccggtgaatcttcagatagcgcgaggactacttgaaccttacggacttctggtggactcagccgagtcgggacaaaaagccattgagttgattaaagcggaaaatcccaggtatgacctcatttttatggatcatatgatgcctgagatggatggtatcgaagtggtcagaattattagggaagaggcagccagcgaatacaggagaaatgtccccattatcgcactcaccgccaatgcccttgtgggaaataccgagatgtttttatccaaagggtttaacgggtttatctcaaaacctgtcgacatttttcaacttgacgaagctctgaataaatatgtacgggacaaaaaagcaatgagtaatgaacaattagaaaagagcaaagataccaattcatcatttctcatttctcattcttcatttccggctatccccggtgtggatgtaaagaaaggcttcgcaatgaccggtggtacggaggcgaactatcggatcgtgttgtcaacttttaagaaaaatgtggaagaaaggctatcgatatttcagacgcctccggattcggataccctgctcatgtttacaacccaggtccactctctcaaaagttcagccggttctatcggagcggcggaagtatcagaccaggctgcgaagcttgaagacgccggcagggctggggatttggcatttattcgggaacacctgagcgatttttggaacactaactacgctgctaactcggccaatctgtcatga

SEQ ID NO: 20752 - protein, 274 aa, Unknown
  Obtained from environmental sample
  DOMAIN (188)...(264): Hpt domain
  misc_feature (1)..(274): Xaa is any amino acid
MKGDIIDRSWMPYGKVLVVDDLPVNLQIARGLLEPYGLLVDSAESGQKAIELIKAENPRYDLIFMDHMMPEMDGIEVVRIIREEAASEYRRNVPIIALTANALVGNTEMFLSKGFNGFISKPVDIFQLDEALNKYVRDKKAMSNEQLEKSKDTNSSFLISHSSFPAIPGVDVKKGFAMTGGTEANYRIVLSTFKKNVEERLSIFQTPPDSDTLLMFTTQVHSLKSSAGSIGAAEVSDQAAKLEDAGRAGDLAFIREHLSDFWNTNYAANSANLS

SEQ ID NO: 20753 - DNA, 375 bp, Unknown
  Obtained from environmental sample
  misc_feature (1)..(375): n is a, c, g, or t
gtgtactttgtgagaggttttttgcgtgatttcggcgagcaggcagacatcgaaatgcaggtgaaccgtagcgacgacgaccttaaagcccgttcccttctttacgcaagccgcctgcttgaaagccagttagggaggggagaacgcttcaaggacgtaaaacgggtatacgttatcttttttctggaccttgtgctgtttccccagagcatgaaagttccccgtcgttacgtttttatggaggaaacggaacatgatcgcctgaacgagcttctcgaagtcgtttactacgagatgcctaagaccgcagatgcggtaagggaatacttgagggaagaaacgctaaaacctgccccggccatcacgggnngttga

SEQ ID NO: 20754 - protein, 124 aa, Unknown
  Obtained from environmental sample
  misc_feature (1)..(124): Xaa is any amino acid
MYFVRGFLRDFGEQADIEMQVNRSDDDLKARSLLYASRLLESQLGRGERFKDVKRVYVIFFLDLVLFPQSMKVPRRYVFMEETEHDRLNELLEVVYYEMPKTADAVREYLREETLKPAPAITGX

SEQ ID NO: 20755 - DNA, 309 bp, Unknown
  Obtained from environmental sample
  misc_feature (1)..(309): n is a, c, g, or t
atgaacggtttacgggtctctttcttaacggcgatcttttccagtgcggcgcgttccacttccacgtcgaagtgtccggcattggaaagcaggacgttgtttttcatcaatttgaaatgctcggtcgtaattacttttttacatccggtagccgtaacaaatatatcgccaagtttcgctgcttctttcatgggcataaccctaaaaccgtccatgagtgcctgcaacgccttaaagcgatctacctcggtgacaatcacgtttgcgccaaggcccttggctcgcatggcgattcctgagccgcaatag

SEQ ID NO: 20756 - protein, 102 aa, Unknown
  Obtained from environmental sample
  SIGNAL (1)...(24)
  misc_feature (1)..(102): Xaa is any amino acid
MNGLRVSFLTAIFSSAARSTSTSKCPALESRTLFFINLKCSVVITFLHPVAVTNISPSFAASFMGITLKPSMSACNALKRSTSVTITFAPRPLARMAIPEPQ

SEQ ID NO: 20757 - DNA, 615 bp, Unknown
  Obtained from environmental sample
  misc_feature (1)..(615): n is a, c, g, or t
gtggcggctttcagaaacagcctgttaatcgccacgacatcggcgtttagcgcgaccgtaatcggcactatcggcgccattggaataaactggtacaagtttaaaatgcgcggttatattcaaacaatctctttcctgcctatgattcttcctgaaattataatcggcgtctcgctttccattttcttcgcgggaataggcgttcctttgggattgtttacgatttttatcgcgcacacaacgtttaaccttccgtttgtttttctgcttgtaatggctcggcttgatgaatttgatttttctataatagaggccgcccatgatcttggagccacggaaagggaaacgctttttaaggtaactcttccaatctgtatgcccggcattatgtccggatttttaacagcaattacgctttctctggaagattttgttattactttttttgtagcggggcccggctcctctacccttccggtattcatttactcggcaattacgcgcaggggcggcgttacgcctcttataagcgcgctttccgttgtaatgatactgggtacggttttcctttccgttatgctcaggaaattcctgaaatttattgcggcaaaataa

SEQ ID NO: 20758 - protein, 204 aa, Unknown
  Obtained from environmental sample
  SIGNAL (1)...(22)
  DOMAIN (4)...(203): Binding-protein-dependent transport system inner membrane component
  misc_feature (1)..(204): Xaa is any amino acid
MAAFRNSLLIATTSAFSATVIGTIGAIGINWYKFKMRGYIQTISFLPMILPEIIIGVSLSIFFAGIGVPLGLFTIFIAHTTFNLPFVFLLVMARLDEFDFSIIEAAHDLGATERETLFKVTLPICMPGIMSGFLTAITLSLEDFVITFFVAGPGSSTLPVFIYSAITRRGGVTPLISALSVVMILGTVFLSVMLRKFLKFIAAK

SEQ ID NO: 20759 - DNA, 726 bp, Unknown
  Obtained from environmental sample
  misc_feature (1)..(726): n is a, c, g, or t
atggcgagaacttgcggactggcaaacgcgcagtggagactcaggggaagaattatcatcccctcgtttgccatcgagcgtacccaggaactggtatattattttcacctgcttgttgacgacgggataataccggaaattccgatctacgtggattccccaatggcgactaacgcgacaacgattttccaggtacaccccgaatgttacgacgaggaaataaaaaaagcctttatcaggcaccacaaaaacccttttgggtttaacaatctccactttactaccagcgtccaggaatccaaagccctgaacgacgaaaaaggacctcttatcatcatctccgcggacgggatgtgcgaagccggacgtatccagcaccatctgatccacagcattcaggatcccaacacaacgattcttcttgtgggttacatggcggaaaacacattgggccgccgcatacgcaaccgcgaaggcgaggtaaaaatccacgggatgtggctcaagctaaaggctcatgtcgaggagataaacgcgttcagcgcgcacgcggattatatagaaacggtagactggctcaatgaactggacaaatcgcgcttaaagggaattttaatggttcacggcgaaaaaaaggcacaggcggcgttaaaaaaataccttgccgaacaagggtatgccaacacggagatagtcaagtacggtaaaacttatgaaatgcagtga

SEQ ID NO: 20760 - protein, 241 aa, Unknown
  Obtained from environmental sample
  DOMAIN (168)...(212): RNA-metabolising metallo-beta-lactamase
  misc_feature (1)..(241): Xaa is any amino acid
MARTCGLANAQWRLRGRIIIPSFAIERTQELVYYFHLLVDDGIIPEIPIYVDSPMATNATTIFQVHPECYDEEIKKAFIRHHKNPFGFNNLHFTTSVQESKALNDEKGPLIIISADGMCEAGRIQHHLIHSIQDPNTTILLVGYMAENTLGRRIRNREGEVKIHGMWLKLKAHVEEINAFSAHADYIETVDWLNELDKSRLKGILMVHGEKKAQAALKKYLAEQGYANTEIVKYGKTYEMQ

SEQ ID NO: 20761 - DNA, 843 bp, Unknown
  Obtained from environmental sample
  misc_feature (1)..(843): n is a, c, g, or t
atggctcgaaatttacagaacgcccaaggctacggcgattcccacgggctgttcgcggcctgcaaggcggtgatgcaggattttcagcttaagggcgttatggacgtcgatattgacgacatatttatcggcaacggcgtaagcgaactgatagtaatggcaatgcaggcgcttctaaattccggagaggaagtgctggtccccatgcctgactaccccctctggaccgcggccgtcacccttgccggcggaaaggcggtacattacctctgcgacgagggctccgactggaacccggatcttaacgacatacgttcaaagatcagttcaagaaccagggccatcgtcgttatcaaccccaacaaccccacaggcgccgtttataaccgttccgtactggaaggcatcgccaatatcgcccgtgagaataaccttatcgtatacgccgatgaaatctacagccgcattacctacgaccaggcggagcatatacctatgtcaacgatagccccggatattcttacggtgagttttgacgggctttcaaaagcctggcgcgcagcgggtttccgcgccggctggctggttctttccggcgcaaaaaaaagcgcggcaagttatatagaagggcttgagatgcttgccagcatgaggctctgcgccaacatgccctcccagttcggcatacaaaccgcgcttggcggctatcaaagcgttaatgagcttttgctgccgggcggccgcctgcacgagcagagggacatcaccgtgaacatggtaagggaaatccccgggctttccgtcgtcatgcccaaaggcgccctgtactgtttcccaaaatag

SEQ ID NO: 20762 - protein, 280 aa, Unknown
  Obtained from environmental sample
  DOMAIN (2)...(280): Aminotransferase class I and II
  misc_feature (1)..(280): Xaa is any amino acid
MARNLQNAQGYGDSHGLFAACKAVMQDFQLKGVMDVDIDDIFIGNGVSELIVMAMQALLNSGEEVLVPMPDYPLWTAAVTLAGGKAVHYLCDEGSDWNPDLNDIRSKISSRTRAIVVINPNNPTGAVYNRSVLEGIANIARENNLIVYADEIYSRITYDQAEHIPMSTIAPDILTVSFDGLSKAWRAAGFRAGWLVLSGAKKSAASYIEGLEMLASMRLCANMPSQFGIQTALGGYQSVNELLLPGGRLHEQRDITVNMVREIPGLSVVMPKGALYCFPK

SEQ ID NO: 20763 - DNA, 993 bp, Unknown
  Obtained from environmental sample
  misc_feature (1)..(993): n is a, c, g, or t
gtggacagattcggccgagtgttctgcccaggtcttggtgtttcctcatcttctaccatacttggcttgtcttctgcttttagctcatcttcaaacataaatttgtcttcaggcgaagtggcaacagctagttcttcttctgaaaccgcaccagaagttacaacctggcccacattgaaagaaggtgaccccggtgttctaaaaggctggggttcgcgctattgggacggctgtaagccgcattgctctctgcgcaataacgtggatacaaatgcagttcccttttccgtttgcagaaattgcaataaaaacaataaggagattccaacttttaccctaagccctgatattgaagtgcgctatcagcaatgggatgggcagatagttgaagactgggtaggttacagagaaacggttagtagttgccaatccggtggcatagcttatgcctgttgggatatggctccttatgcgttaaacgatactctttcctacgcttttatggctactgcacttaaaaatgcttcttgtggtcaatgctttcaaattcaatttgatggcggaaaccacggcaacgatataaaagaagctcataggcttcttaaaggaaaaaccttaattgtgatggctacaaatacaggttctgatgtggaaaccgggcagttcgatattatgatacccggcggaggccctggcatgttcgatagttttgcagagcagataggcgtaaataaagaccagttgggagaaggttatggcggttttctaacaacttgccagcgtgagttaaatgattacgataaacctgccaaagattatcaagactgcgttaaaagaaaatgcaatgcggtattttccaaagcggagcataaagatcttttgaggggatgtttgtggtttgcggaatggtatatggcggcagataacctcacatacctctacaaaaagtggattgcccaaagtattttacggataaatatctatccactataa

SEQ ID NO: 20764 - protein, 330 aa, Unknown
  Obtained from environmental sample
  SIGNAL (1)...(28)
  DOMAIN (68)...(282): Glycosyl hydrolase family 45
  misc_feature (1)..(330): Xaa is any amino acid
MDRFGRVFCPGLGVSSSSTILGLSSAFSSSSNINLSSGEVATASSSSETAPEVTTWPTLKEGDPGVLKGWGSRYWDGCKPHCSLRNNVDTNAVPFSVCRNCNKNNKEIPTFTLSPDIEVRYQQWDGQIVEDWVGYRETVSSCQSGGIAYACWDMAPYALNDTLSYAFMATALKNASCGQCFQIQFDGGNHGNDIKEAHRLLKGKTLIVMATNTGSDVETGQFDIMIPGGGPGMFDSFAEQIGVNKDQLGEGYGGFLTTCQRELNDYDKPAKDYQDCVKRKCNAVFSKAEHKDLLRGCLWFAEWYMAADNLTYLYKKWIAQSILRINIYPL

SEQ ID NO: 20765 - DNA, 654 bp, Unknown
  Obtained from environmental sample
  misc_feature (1)..(654): n is a, c, g, or t
atgcggcgaatgtctgaagagctgcaaattcggcgcggtttcgcggggctaaggaaaaaggagaaacagatgataaacttgaaaataaacggcataccggtccaggctgaggaaggaacctcgattctggaagccgccaagaaagcgaatattattattccctctctttgctacaatcctgatcttccggcctgggcttcctgcggcatctgcatagtccgcgtcgccggcagccccaagctgatccgcgcctgcacgactcccgttgacggagggctggaaggcaaggatattatcacccatgacggcgagataatcgccacgcggcgcaccgtgctggaattgatcctttccaaccatcccaacgactgcctgcaatgctcacgcaacaaaaactgcgagctgcagacgctggccgcggaattcggcatacgcgaatccccctacaaaaaagtgatgaacggaatccccatcgacgattccaaccccgccatagtccttaacccggaaaaatgcatacgctgcggcaggtgcgtaaaagtctgccaggacgtgcagaacgtctgggcgcttgaattcctgggacgaggcatcaagggaaaaatcgccagcgccgccgacgttccgttaggcgacagccctcggccgatctga

SEQ ID NO: 20766 - protein, 217 aa, Unknown
  Obtained from environmental sample
  DOMAIN (165)...(188): 4Fe-4S binding domain
  misc_feature (1)..(217): Xaa is any amino acid
MRRMSEELQIRRGFAGLRKKEKQMINLKINGIPVQAEEGTSILEAAKKANIIIPSLCYNPDLPAWASCGICIVRVAGSPKLIRACTTPVDGGLEGKDIITHDGEIIATRRTVLELILSNHPNDCLQCSRNKNCELQTLAAEFGIRESPYKKVMNGIPIDDSNPAIVLNPEKCIRCGRCVKVCQDVQNVWALEFLGRGIKGKIASAADVPLGDSPRPI

SEQ ID NO: 20767 - DNA, 396 bp, Unknown
  Obtained from environmental sample
  misc_feature (1)..(396): n is a, c, g, or t
ttggccaacgcaatcggcgaagacgaagatcttgtaaagctcgaagagatcggcgttgccatgaccaaggcaagcctctgtatgctcggcggcagcgcggcaaaccccacgctgtccacggtcaaaaatttccgtgatgagtaccttgagcatatccacgacaagaaatgccgcgccggcaaatgcaaacatcttttgcgctttaccattgacacggacaagtgtcttggctgcggagtctgcgcgaagaaatgccccgccaactgcattacggcgctggatccggcgaaatatccaaacaagaaaaagcctccttatactgtcgatcaggccgcctgcgctaaatgcggcgaatgtctgaagagctgcaaattcggcgcggtttcgcggggctaa

SEQ ID NO: 20768 - protein, 131 aa, Unknown
  Obtained from environmental sample
  DOMAIN (106)...(129): 4Fe-4S binding domain
  misc_feature (1)..(131): Xaa is any amino acid
MANAIGEDEDLVKLEEIGVAMTKASLCMLGGSAANPTLSTVKNFRDEYLEHIHDKKCRAGKCKHLLRFTIDTDKCLGCGVCAKKCPANCITALDPAKYPNKKKPPYTVDQAACAKCGECLKSCKFGAVSRG

SEQ ID NO: 20769 - DNA, 483 bp, Unknown
  Obtained from environmental sample
  misc_feature (1)..(483): n is a, c, g, or t
atggccgatggcgacagcaattcgtctaacaaatcgtctaaaaaaacgtctatagcagaattccgttcgctgtttccgtattttcgtaaatattcgataaattatgccgcaggctttttctttcttattatcgtggatgccgcccaggtgatactgccccaattcatccgccaggcggttgatattgcttcgtccggaacgttcgagataaaaaaagtcataatcccctgcgccgtaatggtaggccttatggcaatagtatctttggggcgttttttttggcgctacttcattcatggcgcatcgcgtcgaatagaaacggagcttagagaaaatctgtttgagcacctgctttccctttcttatgatttttaccagaaaaacaaaatcggcgacctgatggcacgggctaccaacgatctgaatgccgtaagggaatccatcggcatgggacttgtggccctggtagacnggtancggtga

SEQ ID NO: 20770 - protein, 160 aa, Unknown
  Obtained from environmental sample
  misc_feature (1)..(160): Xaa is any amino acid
MADGDSNSSNKSSKKTSIAEFRSLFPYFRKYSINYAAGFFFLIIVDAAQVILPQFIRQAVDIASSGTFEIKKVIIPCAVMVGLMAIVSLGRFFWRYFIHGASRRIETELRENLFEHLLSLSYDFYQKNKIGDLMARATNDLNAVRESIGMGLVALVDXXR

SEQ ID NO: 20771 - DNA, 315 bp, Unknown
  Obtained from environmental sample
  misc_feature (1)..(315): n is a, c, g, or t
atgaatttaaaaaccgccgtggtaaatacggatccaaattctccggactatgaacccacgatgtatcacttgaggctgataaaaaaactgcttatgcaagccgccgaccgttaccgtgagaaatacgaattatccaccaaccggattgatgattttaagatgggcataaattttcttaatgctttacgcagaattcacgcgcttcttggggaacggccagaggccgaaacgctcaagaaaaaggcggaaatttggtcttcaaaactggaaacggatcataaaaagcaagaagaagcgcctgccaggaaaagttaa

SEQ ID NO: 20772 - protein, 104 aa, Unknown
  Obtained from environmental sample
  misc_feature (1)..(104): Xaa is any amino acid
MNLKTAVVNTDPNSPDYEPTMYHLRLIKKLLMQAADRYREKYELSTNRIDDFKMGINFLNALRRIHALLGERPEAETLKKKAEIWSSKLETDHKKQEEAPARKS

SEQ ID NO: 20773 - DNA, 318 bp, Unknown
  Obtained from environmental sample
  misc_feature (1)..(318): n is a, c, g, or t
ttggcctctttccccggcatagagcaccggctggaattcttccatgaggcggggggaatccgcttttacaacgacagcgccgcgaccattcccgaagccgccgccgccgccgtcgaagctctgtcgccgcaagcgccgctggtgcttgttaccggaggcacggacaaaaaccttgacttttccccgctggtaaaggccgcgcccagggcaagggcaatgatcctgttggcgggcagcggcagcgaaaaactcnaatcgctgtttgatgaggcgggaatcaataccacggtccctttgacgatctggataaagcggtaa

SEQ ID NO: 20774 - protein, 105 aa, Unknown
  Obtained from environmental sample
  DOMAIN (7)...(86): Mur ligase family, glutamate ligase domain
  misc_feature (1)..(105): Xaa is any amino acid
MASFPGIEHRLEFFHEAGGIRFYNDSAATIPEAAAAAVEALSPQAPLVLVTGGTDKNLDFSPLVKAAPRARAMILLAGSGSEKLXSLFDEAGINTTVPLTIWIKR

SEQ ID NO: 20775 - DNA, 723 bp, Unknown
  Obtained from environmental sample
  misc_feature (1)..(723): n is a, c, g, or t
ttggcagcgcttgaacgtaaaatggatatatacaaaacgttatgcgaagaagcgtatgaggcaaacctcgaaataaaacgccaaagccttgccatctacacatggggcaatgcttcttcttttgatcctgacaggggggtttttgccataaagccgtcgggcgtcgcttatgacatgctgaagccggaatcgatgatagtggttgatcttgacgggaatattgttgaaggcagcttgaacccgtcgtcggacaccaaaacgcatcaagtcctgtaccgggacttccggggcattcggggcatcgcccatacccattcaacatatgcggtcgcctgggcccaggcctgtcgacccgtcccggttttcggtaccactcacaccgatcactgcgccatggaaattccctgcaccgggttcatgagccaggcggtggttaaaaacaactatgagcttgagacggggcacctcattgtgcagacattcaggaagggtaacctggatcccgcccatgtgaacatggttctggtagacgggcacggtccctttacctggggcagcagcgccgcccaggcggtgtataacggcgctgttctggaagaaacctgcaaaatggcgctgtttacgctggcgcttgatccgctggcaaagccgctgcccgaacgcatcatcagaaagcactgggaacgcaagcacgggccggacgcttattacgggcagcggtag

SEQ ID NO: 20776 - protein, 240 aa, Unknown
  Obtained from environmental sample
  DOMAIN (16)...(226): Class II Aldolase and Adducin N-terminal domain
  misc_feature (1)..(240): Xaa is any amino acid
MAALERKMDIYKTLCEEAYEANLEIKRQSLAIYTWGNASSFDPDRGVFAIKPSGVAYDMLKPESMIVVDLDGNIVEGSLNPSSDTKTHQVLYRDFRGIRGIAHTHSTYAVAWAQACRPVPVFGTTHTDHCAMEIPCTGFMSQAVVKNNYELETGHLIVQTFRKGNLDPAHVNMVLVDGHGPFTWGSSAAQAVYNGAVLEETCKMALFTLALDPLAKPLPERIIRKHWERKHGPDAYYGQR

SEQ ID NO: 20777 - DNA, 612 bp, Unknown
  Obtained from environmental sample
  misc_feature (1)..(612): n is a, c, g, or t
gtgaaaaatgaacatataaccaagccaagcgtgagatttcacaatcagactgcttacaaaaacattgttaactgttccctattctggctttttaggccaaaatccttaaaaaagactgtttcgtcctccttccagaccagctcgtcctggtatcaggaccaggacgtcctccccttaaagaattgcttgcttgttgtgcaggtactaccgctgcccgtaataagcgtccggcccgtgcttgcgttcccagtgctttctgatgatgcgttcgggcagcggctttgccagcggatcaagcgccagcgtaaacagcgccattttgcaggtttcttccagaacagcgccgttatacaccgcctgggcggcgctgctgccccaggtaaagggaccgtgcccgtctaccagaaccatgttcacatgggcgggatccaggttacccttcctgaatgtctgcacaatgaggtgccccgtctcaagctcatagttgtttttaaccaccgcctggctcatgaacccggtgcagggaatttccatggcgcagtgatcggtgtgagtggtaccgaaaaccgggacgggtcgacaggcctgggcccaggcgaccgcatatgttga

SEQ ID NO: 20778 - protein, 203 aa, Unknown
  Obtained from environmental sample
  misc_feature (1)..(203): Xaa is any amino acid
MKNEHITKPSVRFHNQTAYKNIVNCSLFWLFRPKSLKKTVSSSFQTSSSWYQDQDVLPLKNCLLVVQVLPLPVISVRPVLAFPVLSDDAFGQRLCQRIKRQRKQRHFAGFFQNSAVIHRLGGAAAPGKGTVPVYQNHVHMGGIQVTLPECLHNEVPRLKLIVVFNHRLAHEPGAGNFHGAVIGVSGTENRDGSTGLGPGDRIC

SEQ ID NO: 20779 - DNA, 711 bp, Unknown
  Obtained from environmental sample
  misc_feature (1)..(711): n is a, c, g, or t
ttgtttgaccatgaatatcctgtagcagcgcagttgtcaaaaagcgcaagcggttatgatacttcaatttttatgaccatgaatacaatgcgccttcttattaataacgcccgcgaattaaattacagatttattgcagacaaatacgaaggtgatctaatatcagcagttttggtaaaaacagatccggtaagatcgcctttgatacttgctagggatattagggagaaaaatgaaggcgtggaagtattaatttcacagggaatattcgcgcgtatcgccgcaacgctttccggacttgttaaatatgtacaaattttttccattgcgctttgggcattggctattattgtgctggcagcggtgttttccggtacaattcacgaacgtaaaaaggaatttgccatcctgcgtatcataggcgcaacaagaaagaaacttgtcggcattgtgttacacgaatcggcgattgcaggaattgccggaggctgcgccggtattgtcctcgcgagcctcgcggtgtttccgttcagcgtctacataagcgaacaacttgaattaccgtatcttgacgcgccttttttctatattatccttcttgttttgggaagcctttttctttccgctattgtgggtccgctttcttccctgtattcggcgatgagaataagcaaagcggaaacatattttacaatgcgggagggcgaataa

SEQ ID NO: 20780 - protein, 236 aa, Unknown
  Obtained from environmental sample
  DOMAIN (54)...(228): Predicted permease
  misc_feature (1)..(236): Xaa is any amino acid
MFDHEYPVAAQLSKSASGYDTSIFMTMNTMRLLINNARELNYRFIADKYEGDLISAVLVKTDPVRSPLILARDIREKNEGVEVLISQGIFARIAATLSGLVKYVQIFSIALWALAIIVLAAVFSGTIHERKKEFAILRIIGATRKKLVGIVLHESAIAGIAGGCAGIVLASLAVFPFSVYISEQLELPYLDAPFFYIILLVLGSLFLSAIVGPLSSLYSAMRISKAETYFTMREGE

SEQ ID NO: 20781 - DNA, 510 bp, Unknown
  Obtained from environmental sample
  misc_feature (1)..(510): n is a, c, g, or t
atggcggtggacttcggcctctcgataggtttcggccccgaagcgctaatggccgcgttggttatatcgcagttgacggcctttcccgcttcgttgcttttcgggtatctcgccgctaagataggggcgggcctgatgatctcggcgggcgtgtcggtgtacctaatcgtaagcattgtaggctcgctcttaatgcgcaccgagacgcacttcatcgttttggcggcgctgaccggccttgcccaaggcggcatacaggcgctaagccgctcatacttcggcaagctgattccgccggaggaatcaaccgaatacttcggcttctacaacgtggtaagccgcttcgcggtcgccggccccgcggtggttggactggtagcgatggccgcaaggggcgccggcgtcggcgaaaccgcggcgtcgaggataggaatgtccgcggtaggcctgtttttcgcggcgggactgattttattgcgcatgagtcaaaggaggcgcttggcggggtag

SEQ ID NO: 20782 - protein, 169 aa, Unknown
  Obtained from environmental sample
  misc_feature (1)..(169): Xaa is any amino acid
MAVDFGLSIGFGPEALMAALVISQLTAFPASLLFGYLAAKIGAGLMISAGVSVYLIVSIVGSLLMRTETHFIVLAALTGLAQGGIQALSRSYFGKLIPPEESTEYFGFYNVVSRFAVAGPAVVGLVAMAARGAGVGETAASRIGMSAVGLFFAAGLILLRMSQRRRLAG

SEQ ID NO: 20783 - DNA, 501 bp, Unknown
  Obtained from environmental sample
  misc_feature (1)..(501): n is a, c, g, or t
gtgggaatgaaaagccggggcgttacgaaacgccgggcgggacaaatcctgtactacgcccaccaggaactggagcacctttgccttgaccggcagacctacgccttcaagcagaccgcctcccaaaaactcgccgaactgatctacggcggcctgtggtttacccccctgagggaagcgctgtccgcgtttgttgacgttacccagaaaacggttaccggaacggtaaaggtaaaactctacaagggatcgataacgtcggcgggagcgtcttcgccctactcgctgtacaatgcgtccatcgccagttttaccaccggcgaactgtacaaccacgccgacgcgaaaggctttatccggctgtacggcctgccgacgctggtgcgggcgttaatgcaaaacgatgccaaaggcggcaaacgcgcagataaagcccgagagacgaaaaaggccggtaaaaaaaacaggcccgattccaaatccaacggaatcacgggatga

SEQ ID NO: 20784 - protein, 166 aa, Unknown
  Obtained from environmental sample
  misc_feature (1)..(166): Xaa is any amino acid
MGMKSRGVTKRRAGQILYYAHQELEHLCLDRQTYAFKQTASQKLAELIYGGLWFTPLREALSAFVDVTQKTVTGTVKVKLYKGSITSAGASSPYSLYNASIASFTTGELYNHADAKGFIRLYGLPTLVRALMQNDAKGGKRADKARETKKAGKKNRPDSKSNGITG

SEQ ID NO: 20785 - DNA, 681 bp, Unknown
  Obtained from environmental sample
  misc_feature (1)..(681): n is a, c, g, or t
atggcctttttttacaggctgctttcgtcgcccttcccctatgccagcgccgtgcttcttgccgcgcccgatgacgcgcccctgcccgacgagcctgattaccaggaatttgttgacatggcggttggccggcttgcctcgatcgccggcggttccgccctggttctgttcacatcataccagtccatgcaaagcgcatggctttccgcccggccggaactggaggcgttaggtattcgctgcctcaaacagggcgatgacgaccgttcccggcttttgcaaagcttccttaacgatacccagtcggtactgtttgccacggattcgttttgggaaggggtagacgcgccgggcgacaccctgcggcttgtgatactctgccgcctgcccttcaggactcccaacgatccggttttcgaggcgcgccgcgaggcggtggaaaagggagggggcaatcccttcatggatctttcgctgcccgaggctgttatgaaattcaaacagggctttggccgcttgatgcgccgctccagcgacagaggcgtcgtggcggtgcttgacgggcgaattctgaagaaacgctacggggcttttttcattcaggcactgccggaaacgcgcaccagctttggtgatttttccggtattctgagagatactgaaaattttcttttttcctga

SEQ ID NO: 20786 - protein, 226 aa, Unknown
  Obtained from environmental sample
  SIGNAL (1)...(21)
  misc_feature (1)..(226): Xaa is any amino acid
MAFFYRLLSSPFPYASAVLLAAPDDAPLPDEPDYQEFVDMAVGRLASIAGGSALVLFTSYQSMQSAWLSARPELEALGIRCLKQGDDDRSRLLQSFLNDTQSVLFATDSFWEGVDAPGDTLRLVILCRLPFRTPNDPVFEARREAVEKGGGNPFMDLSLPEAVMKFKQGFGRLMRRSSDRGVVAVLDGRILKKRYGAFFIQALPETRTSFGDFSGILRDTENFLFS

SEQ ID NO: 20787 - DNA, 435 bp, Unknown
  Obtained from environmental sample
  misc_feature (1)..(435): n is a, c, g, or t
ttggtgtgcgtcgccctcctcgacattgattcttcaaattctacaacgatcgtacgggacattccggaggcgacgaatgtctgcgtgcgtagggcaaggtgtgaacagttaaaagagtcccatgacatttacgcagccaggtggggcggagaggaatttgccctgctgtggttcgaggccgaagtctcgcatgtggatattattgtttcccatttacaggaacaaataaaaaaattgaagattcggcatgaaaaatcaaaagtctcgccgtatctgactgtcagcataggggtatttatacaacaatgcggctcgtccgccgacactcagaccgtatacgatatggcggacaaggcgctgtacaacgccaaagaaggcgggcgtaattgcgcggttatttttggcaataccattgaacaatataaattaaagtaa

SEQ ID NO: 20788 - protein, 144 aa, Unknown
  Obtained from environmental sample
  DOMAIN (16)...(130): GGDEF domain
  misc_feature (1)..(144): Xaa is any amino acid
MVCVALLDIDSSNSTTIVRDIPEATNVCVRRARCEQLKESHDIYAARWGGEEFALLWFEAEVSHVDIIVSHLQEQIKKLKIRHEKSKVSPYLTVSIGVFIQQCGSSADTQTVYDMADKALYNAKEGGRNCAVIFGNTIEQYKLK

SEQ ID NO: 20789 - DNA, 465 bp, Unknown
  Obtained from environmental sample
  misc_feature (1)..(465): n is a, c, g, or t
atgatcagatggccgaggtcaaagggcttgccattgatagaactttgtttagccaaaacggggagagaatcaccgtcttcgcagataaagcaaggcgaggcgttctggattgtttttggtgttaggtcgtttgcttccagccgtgttgataatgtggctctgtctagcattttgccttcgagttttgagatttctaacgaaaggctgaacgaatacgatagaccggggtggctaaataatattccatctctttccacagcggattatatggacataagggacgaccgcatcaactggttctttagcctttatccgggtgaaactaaggcttttgccgttcaaattcatcctagctacgcgggagaattcagatggccaggtcttgttcttgaagcgatgtatagccctgattactttgcgcgtattgccggcagcagaattggggtttcgccgtgggaaatttga

SEQ ID NO: 20790 - protein, 154 aa, Unknown
  Obtained from environmental sample
  misc_feature (1)..(154): Xaa is any amino acid
MIRWPRSKGLPLIELCLAKTGRESPSSQIKQGEAFWIVFGVRSFASSRVDNVALSSILPSSFEISNERLNEYDRPGWLNNIPSLSTADYMDIRDDRINWFFSLYPGETKAFAVQIHPSYAGEFRWPGLVLEAMYSPDYFARIAGSRIGVSPWEI

SEQ ID NO: 20791 - DNA, 906 bp, Unknown
  Obtained from environmental sample
  misc_feature (1)..(906): n is a, c, g, or t
atgggaagcgtccgctctccgaccgagtggcaaaaaactcaggcgtaccgcaaagatttgcaaaaattaattcgcttttccaaagaagcgctgtcctcgcaaacaaaaccgtcccttgttgtgtggccggaaacggcgtttgtcccgacgatttactggcataccacataccgtaataatcaaaatttatggttaatagttaaagaacttttagagtatctcggcgaacaggacgttcctttcttaataggaaatgacgaagcccgcagggacagcgtaaaaaatcccgatgcggaagaaaaaaaccgcgtggattacaattccgcattgctttttgaaaaaggggttaataccgccgcttacagaaaactgcatttagtcccctttaccgagcattttccttacaaaaaacaatttccgtttatttataagtggctgcaaaaagcggacacccacttttgggaacagggcggcgaggaaacggtttttaaaataccggaatttaccttttccgccccgatttgttttgaagacactttcggctacctgtccaaaaaatttgtacagggcggagccgacgtacttgtaaacatctcaaacgatacttggtcgaacagcctgcccgcccagtaccagcaccttacaatggcggtcttcagggcggcggaaaactaccgccccatggtcagagcgacctcttcggggcaaacctgcgccatagaccccaacggcagaattacggcaatggctcccccttttaaggaaatagccttaaatgtaacggttccgctcgtaaaaaaaaccacaatttacacaatttacggcgattatttggcaattttctttgtttttatggcagccgccttgttgatctgtaaagcagtatggtgtacaataaaacaatga

SEQ ID NO: 20792 - protein, 301 aa, Unknown
  Obtained from environmental sample
  DOMAIN (12)...(200): Carbon-nitrogen hydrolase
  misc_feature (1)..(301): Xaa is any amino acid
MGSVRSPTEWQKTQAYRKDLQKLIRFSKEALSSQTKPSLVVWPETAFVPTIYWHTTYRNNQNLWLIVKELLEYLGEQDVPFLIGNDEARRDSVKNPDAEEKNRVDYNSALLFEKGVNTAAYRKLHLVPFTEHFPYKKQFPFIYKWLQKADTHFWEQGGEETVFKIPEFTFSAPICFEDTFGYLSKKFVQGGADVLVNISNDTWSNSLPAQYQHLTMAVFRAAENYRPMVRATSSGQTCAIDPNGRITAMAPPFKEIALNVTVPLVKKTTIYTIYGDYLAIFFVFMAAALLICKAVWCTIKQ

SEQ ID NO: 20793 - DNA, 432 bp, Unknown
  Obtained from environmental sample
  misc_feature (1)..(432): n is a, c, g, or t
ttgcttcaaataatgttcaattcgggaatctttttggtctgtatcgcaggcattattaccgtaatcaatatacttttaatcaccgtttttcgccgtacaagggaaattggtacgctcagggcaatcggcgcgtctgatgtttatatccgttcgcttgttttttccgagaatcttattatcgccgtaatttccgcttttgccggacttattgccggcgtactgtttatcttctggattaacaatctgggtattaacatttcaaacgaactgattgtttcaataatgggcggcaaaatattaaagctggaatttatgcctcaaaccgccgttttttcatttttcatggcggtactattttctttggcggcgtctttatatccggttgaagttacagtacggattgagcctatagtggcggtacagaggggataa

SEQ ID NO: 20794 - protein, 143 aa, Unknown
  Obtained from environmental sample
  DOMAIN (1)...(136): Predicted permease
  misc_feature (1)..(143): Xaa is any amino acid
MLQIMFNSGIFLVCIAGIITVINILLITVFRRTREIGTLRAIGASDVYIRSLVFSENLIIAVISAFAGLIAGVLFIFWINNLGINISNELIVSIMGGKILKLEFMPQTAVFSFFMAVLFSLAASLYPVEVTVRIEPIVAVQRG

SEQ ID NO: 20795 - DNA, 966 bp, Unknown
  Obtained from environmental sample
  misc_feature (1)..(966): n is a, c, g, or t
atgattcttgtagatatgcctgtaaaaacggagagtgaaaaaagtgatgatacagccgcaaaggaaaccaggccggcaaaaaaagctctcgctccaggaaactccggcgggaaaccggcgcgtttttatatggaagactggggttggggagtacgcacctttaccgatgttgaaagcggccttatgctggagggctgttacgcccgcgctgatattccggcgcccgctcaggcaggaatgcctgtccccgtaaccgcgcttgccaaagctatcgcttcttttgatgacagtgagataaccattaccgcaaccgcaaaaagcaaccttcaatggtttggttttacattcttcaatattatccccgtggaaaacaatttcgtcattctcaggactcacgacggccgccgcgttgcggctcttgaaacaggcaaaccggttaaacaatatgacgatccgcttttaacaaaaggcgaactttttaaaatgaaaatcgaacacgacggaaccgcctcggcggctgaagccgcatcaaaagctgactcggttattttcattgccgggaacgatccgatgataaacgggcgcgaagaaatagaccgcccgagcttaaatctgccgccgcgtcatgaagcgttgattaacgcggtaacggatgcgaacaaaaacacagcgctggttcttctctcgggctatccgtataccatcagggaaattgccgaaaaagttccggctattatttggatggcgcacggcattgcggaaacaggcagaggcatcgccgatataattagcggcgcttattctcccgcaggcaggcttccccttacatggtacgaaagtgaaaaacagcttcccgatattatggaatacgacattgttaagggaggaaccacttaccagtactttaccggaaatgtactgtggccttgggcacgggcgagttacagcggctctcggccattctga

SEQ ID NO: 20796 - protein, 321 aa, Unknown
  Obtained from environmental sample
  DOMAIN (126)...(318): Glycosyl hydrolase family 3 C terminal domain
  misc_feature (1)..(321): Xaa is any amino acid
MILVDMPVKTESEKSDDTAAKETRPAKKALAPGNSGGKPARFYMEDWGWGVRTFTDVESGLMLEGCYARADIPAPAQAGMPVPVTALAKAIASFDDSEITITATAKSNLQWFGFTFFNIIPVENNFVILRTHDGRRVAALETGKPVKQYDDPLLTKGELFKMKIEHDGTASAAEAASKADSVIFIAGNDPMINGREEIDRPSLNLPPRHEALINAVTDANKNTALVLLSGYPYTIREIAEKVPAIIWMAHGIAETGRGIADIISGAYSPAGRLPLTWYESEKQLPDIMEYDIVKGGTTYQYFTGNVLWPWARASYSGSRPF

SEQ ID NO: 20797 - DNA, 336 bp, Unknown
  Obtained from environmental sample
  misc_feature (1)..(336): n is a, c, g, or t
ttgtcgaaaagatatttgcattttgcgtcattaacggcaaacattgggaatttgagttttccggcttcgcttctggcgcgcaggcggtggatacccgttgtggtttcctcgcagccgccaagcaggttttttgcgtactcaggcttttcgtcatggagcagggtcacaaggtcgctgccgtcgtcgatgatgatgtcggggcagaactcaagcgccttcacctggtggtcgtggtattcctgcgccgtcgctccgtgccacgcgaaaacctggaccccgaggctgtcaagcgcggcgcacacatcgtcctttgttgaaagggggtggagccggtga

SEQ ID NO: 20798 - protein, 111 aa, Unknown
  Obtained from environmental sample
  misc_feature (1)..(111): Xaa is any amino acid
MSKRYLHFASLTANIGNLSFPASLLARRRWIPVVVSSQPPSRFFAYSGFSSWSRVTRSLPSSMMMSGQNSSAFTWWSWYSCAVAPCHAKTWTPRLSSAAHTSSFVERGWSR

SEQ ID NO: 20799 - DNA, 330 bp, Unknown
  Obtained from environmental sample
  misc_feature (1)..(330): n is a, c, g, or t
atgtggtacccgtcgataaagggcttgcggttttcctttttcacgcagatcttttcaagggcggccttgtcaacttccacatcgaaatgtcccgcgttggcgagcagcacgttgtttttcatcaccataaaatgctctgtcgtgattaccttgttgcagcttgtggcggtgacaaaaacatcgcccagtttggcggcttccatcattggcattaccctgaagccgtccatcagcgcctttagcgctttgaagggatcgatttccgtgatgattacgtttgcgccaaggcctttcgcgcgggccgctatcccggagctgcagtggccgtaa

SEQ ID NO: 20800 - protein, 109 aa, Unknown
  Obtained from environmental sample
  misc_feature (1)..(109): Xaa is any amino acid
MWYPSIKGLRFSFFTQIFSRAALSTSTSKCPALASSTLFFITIKCSVVITLLQLVAVTKTSPSLAASIIGITLKPSISAFSALKGSISVMITFAPRPFARAAIPELQWP

SEQ ID NO: 20801 - DNA, 384 bp, Unknown
  Obtained from environmental sample
  misc_feature (1)..(384): n is a, c, g, or t
atgccgctagtgaaggagcggcttgtcttccttaacgaagtccctgaaaaaatagcctacctgtttagcgagcccgaagtccccgcgcctgaagaatttatccccaaaaagagcgaccttgccaaaacgattgagattttacagataggcaaggagcttatcagtaagctggcggatgcgccgagcgacgaacaggcggaggagtttataaaagccgaggcggaaaagagggaaataaaactcggcgaccttatgatgcctttgcgcgtcgcaattacaggcagccgagtaagcccgccgctctttggatcgcttcgcatacttggagcggagaagtccgtggagcgagtgcagagagcgttggataaattaaatcgaacttaa

SEQ ID NO: 20802 - protein, 127 aa, Unknown
  Obtained from environmental sample
  misc_feature (1)..(127): Xaa is any amino acid
MPLVKERLVFLNEVPEKIAYLFSEPEVPAPEEFIPKKSDLAKTIEILQIGKELISKLADAPSDEQAEEFIKAEAEKREIKLGDLMMPLRVAITGSRVSPPLFGSLRILGAEKSVERVQRALDKLNRT

SEQ ID NO: 20803 - DNA, 462 bp, Unknown
  Obtained from environmental sample
  misc_feature (1)..(462): n is a, c, g, or t
ttgattactcaaaacatcgatcttttacatcaaaagggcggaagcaagaacgtaatagagattcacggctcgccttctatccattactgtatgcggtgttcgggcgtaagggtaagttatgaagaagttgcggcaatcgtccgcaagggagaaatgcctaagtgcccgaagtgcggcagggtgttaaaaccggcaataacttttttcggcgaaggacttccggcggaggcgttaaggcaggctgtgacggaatcgcaaaaggcggacttaatgcttgtactgggaacaagcctgactgtcttccctgccgcaggtatgcccgattacactctgcgtaacgggggtaaggttgttatcgtaaacaatatgcccacaccgttggacggcagggcattactccactttgatgatcttggttctgtctttgaggaattgcaaaattgtttacattcgggcagttaa

SEQ ID NO: 20804 - protein, 153 aa, Unknown
  Obtained from environmental sample
  DOMAIN (1)...(102): Sir2 family
  misc_feature (1)..(153): Xaa is any amino acid
MITQNIDLLHQKGGSKNVIEIHGSPSIHYCMRCSGVRVSYEEVAAIVRKGEMPKCPKCGRVLKPAITFFGEGLPAEALRQAVTESQKADLMLVLGTSLTVFPAAGMPDYTLRNGGKVVIVNNMPTPLDGRALLHFDDLGSVFEELQNCLHSGS

SEQ ID NO: 20805 - DNA, 837 bp, Unknown
  Obtained from environmental sample
  misc_feature (1)..(837): n is a, c, g, or t
ttggataataaacttaacaaagaacaatttgaccgctataaacaatctttaggcaatcttatcattaccgactatctgacatttcggctttttgttgaggggaaccaaatggtttccgttaccatagcccatgaaagtggtggcggcataacgccggataaaaaacaatacgatgcttttattgagctgataaatcaattttcaggctactctggaaaaaccatttgccagtctttagaccttgcccgcatgatggcggcaaaggcaaaactccttgcggaagtgatcaaagccgcattgtcgaacaaggatggagaaggcggcaagctgccagacgacactctttcagggcagctggaagggtttcgcaaaatcctcatccacaatctcagcgaaacggcctttgccgatatgtacgcccaaaccttggcctatggcctctttgccgcccggctcaaccaggcggataaccaaaccttcaaccgcgtgatagcggcacacctcgtgccaaaatccaacccgtttctgcgaaagttttttcagtatatcgccgggtttgaccttgacagccgcatccgctggattgtggacgcgctcgccgatctcttcaactccgtagctatcgaagacattctcaatgaattcggcaaggcgaaccaggacccctacattcatttttacgaaacctttcttgccgaatacgatccggccctgcgggaaagccggggcgtgtattacaccccccttacggcggtgcggtttattgtgcgtgcggtagatgacattttgcagaaggaatttggccttgcgcaagggcttgctgataactcaaagtaa

SEQ ID NO: 20806 - protein, 278 aa, Unknown
  Obtained from environmental sample
  misc_feature (1)..(278): Xaa is any amino acid
MDNKLNKEQFDRYKQSLGNLIITDYLTFRLFVEGNQMVSVTIAHESGGGITPDKKQYDAFIELINQFSGYSGKTICQSLDLARMMAAKAKLLAEVIKAALSNKDGEGGKLPDDTLSGQLEGFRKILIHNLSETAFADMYAQTLAYGLFAARLNQADNQTFNRVIAAHLVPKSNPFLRKFFQYIAGFDLDSRIRWIVDALADLFNSVAIEDILNEFGKANQDPYIHFYETFLAEYDPALRESRGVYYTPLTAVRFIVRAVDDILQKEFGLAQGLADNSK

SEQ ID NO: 20807 - DNA, 417 bp, Unknown
  Obtained from environmental sample
  misc_feature (1)..(417): n is a, c, g, or t
atggatatgggtattgttcatgcgaaaattaccctgaaaaatgccggggatgtaaccaatgtacggcgcggatatattaaagagcntgatatccgccaaactgttgttcaagccatggttgataccggggcaatgaccctggttatcaatgaaaaaatgcgccggcagttggggcttggggaagtaggaaccaaagtggcaacattggcggataataccaaaaaaacagtaaaaatagccgaggcagtggaggttcactggaaaaaccgttttatggtctgccagccgtgggttgttgattccggaaaaatccttttaggcgcaattcctcttgagaacatggacttaatggtggatcccggcaatcaaacgctggtaggcgctcacggtgaaaaagaagtaggactgctgttgtaa

SEQ ID NO: 20808 - protein, 138 aa, Unknown
  Obtained from environmental sample
  misc_feature (1)..(138): Xaa is any amino acid
MDMGIVHAKITLKNAGDVTNVRRGYIKEXDIRQTVVQAMVDTGAMTLVINEKMRRQLGLGEVGTKVATLADNTKKTVKIAEAVEVHWKNRFMVCQPWVVDSGKILLGAIPLENMDLMVDPGNQTLVGAHGEKEVGLLL

SEQ ID NO: 20809 - DNA, 420 bp, Unknown
  Obtained from environmental sample
  misc_feature (1)..(420): n is a, c, g, or t
atggacaagaacggaaaaggtctcttgaacattatcggcacggggagcgtctttgagggaacgatcaacgtcccccacagcatccgcatcgacggttcgtataagggccggatccagactgcggagtcgataacggtcggcgagaccggcgttgtggaggcggagataagggcgcaaaacgcgtttgtcttcggaaaggtgctgggaaacatgtacatcgacgagcgtgtggaactccacaccacggcggtggcgatcggcgatctccacgcgaaagagttggtagtcaaggagggcgcgatctaccacggccactgctccatgcagaagggtcaccaagtcgccgtcgaagcggcagtagaaaagaaagatcgggaaagagatagggacagagatagagataaggaaaaggaaatttaa

SEQ ID NO: 20810 - protein, 139 aa, Unknown
  Obtained from environmental sample
  DOMAIN (2)...(112): Protein of unknown function, DUF583
  misc_feature (1)..(139): Xaa is any amino acid
MDKNGKGLLNIIGTGSVFEGTINVPHSIRIDGSYKGRIQTAESITVGETGVVEAEIRAQNAFVFGKVLGNMYIDERVELHTTAVAIGDLHAKELVVKEGAIYHGHCSMQKGHQVAVEAAVEKKDRERDRDRDRDKEKEI

SEQ ID NO: 20811 - DNA, 561 bp, Unknown
  Obtained from environmental sample
  misc_feature (1)..(561): n is a, c, g, or t
gtgacttcgacgcaggttgaaaatctgaccggctggtcaagggataccatacgcaaggatatttcttacctcggccatgcagccggcacggctgcggggatgaccgtaggcggcagcgcgggttatgagccggaaatactggttccgcttataaagaaagccctgaggctggactgccgcaggaaattctgcgtagtaggactcggaaggcttggttcggcgtacatcaattttgccccttccgaacttgcggaattcgagtttgccgcgggctttgacaccaatgtgaaccggttggagatattgctgtcgccggcgccgctgtaccctgcttacaaactgcaggaagtggtaagccgtttaaagatcgagatagccctgctttgcgttccgtccgaagcggcgcaggctgtcgcggagaaatgtgtggccgcgggaattgtgggcatcctgaattttgcccccacggcgctgaaattaccgccgaaaattgccgtgcggaacatgcatgtggcggatgaattgaggagtttggcaataaaaatgagcaatgagcagtga

SEQ ID NO: 20812 - protein, 186 aa, Unknown
  Obtained from environmental sample
  DOMAIN (56)...(160): CoA binding domain
  misc_feature (1)..(186): Xaa is any amino acid
MTSTQVENLTGWSRDTIRKDISYLGHAAGTAAGMTVGGSAGYEPEILVPLIKKALRLDCRRKFCVVGLGRLGSAYINFAPSELAEFEFAAGFDTNVNRLEILLSPAPLYPAYKLQEVVSRLKIEIALLCVPSEAAQAVAEKCVAAGIVGILNFAPTALKLPPKIAVRNMHVADELRSLAIKMSNEQ

SEQ ID NO: 20813 - DNA, 360 bp, Unknown
  Obtained from environmental sample
  misc_feature (1)..(360): n is a, c, g, or t
atggcccgggatcaaaccgatgccatgattgagccgcctgacgccgtactcggcgtaaacccccttgatggcgatcattgcccgcaggatgtgcgcgtcggttatcagagccgggtcccgggtgaacagaggttccacatagaaggggcgcggagattgtatcacaaaatcaacccagtcgccggggatatctaccctgggcagcgtatcggttattttgtttgcctgaacaacaacaattccctgtttaaactttacagcctcaattatcgtcggcgtatcttcggtattgaatcccgtgtagaggttgccgtttttatccgcggcctcggccgcgacaagcgcgacccgtggcgttaa

SEQ ID NO: 20814 - protein, 119 aa, Unknown
  Obtained from environmental sample
  misc_feature (1)..(119): Xaa is any amino acid
MARDQTDAMIEPPDAVLGVNPLDGDHCPQDVRVGYQSRVPGEQRFHIEGARRLYHKINPVAGDIYPGQRIGYFVCLNNNNSLFKLYSLNYRRRIFGIESRVEVAVFIRGLGRDKRDPWR

SEQ ID NO: 20815 - DNA, 492 bp, Unknown
  Obtained from environmental sample
  misc_feature (1)..(492): n is a, c, g, or t
atgaataagacagacctgcatatatggattaacaacatcgaatactcaggcaaggtaaaaaattccatgactctgctgcaattcatacgcaatgtcgcggggcttacaggcacgaaatccggctgtgagaacggggaatgcggcgcttgtacggtgctgttggatggcaggccaatgcgatcctgcatcattctggcggttgaggcaaacggcagccatataaccactgttgaagggctggcgcaggatgaagagatgcatcccctccaggctgccttcatagaacaaggcgcagtacaatgcggtttttgcatgccgggcatgctgatggcgtccaaagccctgcttgacgggaatccgcagcccacggaagaacaggtgcgttacgcgctaggagggcatatctgccggtgcggcggatataaagcaatcggcaaggccgtcggcaaggccgcggccgatatggccgccggaatatcaaagcaggaatga

SEQ ID NO: 20816 - protein, 163 aa, Unknown
  Obtained from environmental sample
  DOMAIN (11)...(68): 2Fe-2S iron-sulfur cluster binding domain
  misc_feature (1)..(163): Xaa is any amino acid
MNKTDLHIWINNIEYSGKVKNSMTLLQFIRNVAGLTGTKSGCENGECGACTVLLDGRPMRSCIILAVEANGSHITTVEGLAQDEEMHPLQAAFIEQGAVQCGFCMPGMLMASKALLDGNPQPTEEQVRYALGGHICRCGGYKAIGKAVGKAAADMAAGISKQE

SEQ ID NO: 20817 - DNA, 333 bp, Unknown
  Obtained from environmental sample
  misc_feature (1)..(333): n is a, c, g, or t
atgggcgcggggaacaaataccatacccgcgtcggattatttggctccgcggctttgcagttggtgaccggactgccgtaccggcaacaaaattcggatctggatatatatctgctccatcaggggagcgcccgggatctgacgcggttttatcagcggcttgccgtaattgaagaacaattcggaattaaaatagatgcggaaattgagtgccgcggggaatacggcgtaaaactcaaagaactgttcgggcccggggaaaccgttctggctaagggcttatacgatgtggttctgctggaaaaaacctgtcttgaatcattcctgctttga

SEQ ID NO: 20818 - protein, 110 aa, Unknown
  Obtained from environmental sample
  misc_feature (1)..(110): Xaa is any amino acid
MGAGNKYHTRVGLFGSAALQLVTGLPYRQQNSDLDIYLLHQGSARDLTRFYQRLAVIEEQFGIKIDAEIECRGEYGVKLKELFGPGETVLAKGLYDVVLLEKTCLESFLL

SEQ ID NO: 20819 - DNA, 351 bp, Unknown
  Obtained from environmental sample
  misc_feature (1)..(351): n is a, c, g, or t
atgcgcaatcgcatagacaggaaaatccataatattatggtggcgataatagacatcggttcaaataccatccgtctctcggtctacgatatcagttccggcggggatatacgtcagacctataggcagaagagcgtggccgggctggccgggcacgttgacaaacgtaattttttgacggaagaggggctgcgggtggcctgcacggcgctcaaccgcttccgagcgtcggtttccggtatgaacataacggaaacgcacgttttcgccacggcgtcgctgcgcaacgtgctcaacgcctcacgggtgatcgaggacatcaagggggagacgggtacgacgtcatcataa

SEQ ID NO: 20820 - protein, 116 aa, Unknown
  Obtained from environmental sample
  misc_feature (1)..(116): Xaa is any amino acid
MRNRIDRKIHNIMVAIIDIGSNTIRLSVYDISSGGDIRQTYRQKSVAGLAGHVDKRNFLTEEGLRVACTALNRFRASVSGMNITETHVFATASLRNVLNASRVIEDIKGETGTTSS

SEQ ID NO: 20821 - DNA, 411 bp, Unknown
  Obtained from environmental sample
  misc_feature (1)..(411): n is a, c, g, or t
atgctaagcaacgcccccggcgaccccgccgacccggcgaacgacccgatcgtggacgcaatccgcgccataacaaaaaaaggcgtccccatcttcggcatctgcctcggccaccagctgcttgccctcgcaagcggctacaaaacacaaaaactaaaattcggacaccgcggcgcaaaccaaccggtcaaggaaaccgcgacaggccgcgtctacataaccagccaaaaccacggctacgcggtggtggccgaaaacggttccttcaccaacgtaaacgacggcacctgcgaagggttggactacggagtctcgttctccgtccaattccaccccgaagccagaggcggaccgctagacaccgggttcttgttcgataggtttatggagaggatggaggcggggcgataa

SEQ ID NO: 20822 - protein, 136 aa, Unknown
  Obtained from environmental sample
  DOMAIN (1)...(131): Glutamine amidotransferase class-I
  misc_feature (1)..(136): Xaa is any amino acid
MLSNAPGDPADPANDPIVDAIRAITKKGVPIFGICLGHQLLALASGYKTQKLKFGHRGANQPVKETATGRVYITSQNHGYAVVAENGSFTNVNDGTCEGLDYGVSFSVQFHPEARGGPLDTGFLFDRFMERMEAGR

SEQ ID NO: 20823 - DNA, 879 bp, Unknown
  Obtained from environmental sample
  misc_feature (1)..(879): n is a, c, g, or t
atggtacaggccctgcatgacgccggaatcagggtgataatggatgtggtcttcaaccatacctaccggacaggaggctggccctttgacgcccttgtaccgggttattattaccgccttaccgataccggctcatacgccaacggttccggctgcgggaatgagatcgcgtccgaacggcccatggtacggaaattcattatcgattcctgccgttattgggcgaacgaatacaatatagacggcttccgctttgaccttatgggccttatcgacactccgacgatgaaactgttaaccgaagaactgcgccgcgatattgacccgacgctgatcatatacggcgagccatggcaggccggcggctccgttttacccccggagtcgcagacaatcacaggcgcgcaaaaggggctggggtttgccgttttcaacgaccgtatcagaaccgcgataaaaggcggcagcgacgacgactcgcggggctttgccacgggcgggtcttcaagggaagaggccattgtacggggccttatgggttcaatacatgattttacgtctgaggcaaacgagagcgtcaactatgtaactgcccatgacaatctgaacctctgggataaaacagccttctcgttaggcgaaaaaaatctcgccgtatccccctattcaatgctggaaagcgcgcaagacctttttgaagccgacacggtaaagtcctcgctgctggccaacgggattattctcacctcgcagggaattcccttttttcaggccggcgacgagatgctcagaagcaaatacggcgatcacaacagttacgcgagcccggacaacatcaacaaaatacgcggaaaaacgcgttcttaccgaaagtcatga

SEQ ID NO: 20824 - protein, 292 aa, Unknown
  Obtained from environmental sample
  DOMAIN (1)...(283): Alpha amylase, catalytic domain
  misc_feature (1)..(292): Xaa is any amino acid
MVQALHDAGIRVIMDVVFNHTYRTGGWPFDALVPGYYYRLTDTGSYANGSGCGNEIASERPMVRKFIIDSCRYWANEYNIDGFRFDLMGLIDTPTMKLLTEELRRDIDPTLIIYGEPWQAGGSVLPPESQTITGAQKGLGFAVFNDRIRTAIKGGSDDDSRGFATGGSSREEAIVRGLMGSIHDFTSEANESVNYVTAHDNLNLWDKTAFSLGEKNLAVSPYSMLESAQDLFEADTVKSSLLANGIILTSQGIPFFQAGDEMLRSKYGDHNSYASPDNINKIRGKTRSYRKS

SEQ ID NO: 20825 - DNA, 828 bp, Unknown
  Obtained from environmental sample
  misc_feature (1)..(828): n is a, c, g, or t
atgacgcttagatactccgctacccacaaatccgacagtatctacaatatgatttaccgtctcgacgcgttggacgcctataacaagcggcttgtgaagagaatcgcggtcaagggtatttccgagataggaagcactgctaccaatggatatatttatttgcaaaaggttaatctgtcaaaggataaaccgcctaccgcaacaattgaacttgatgttaggggaacgaatagtgtccataaaaaagtacgggtgatttctgaaagggacaacctaaagatcaaatctgaaggtcttcctgagtatgaagatggttatatcgtcagtaaaattgacgggcgtgacctatctgtggagtttcaaaatggcaaaaaattgtttgaaggtgatattatcggttcggtcaacgaggaacaattgcatcgcattcaaatacgggaaactatcctttctcatattgagcgtgaacggcagctattcgggaggggtataaaggtattgtcgttgttttttatcgatgaagttgcgaagtatagacagtacgatgattcgggtaatgtcaaatgcggcgaatatgccactatctttgaggaagaatataagaacatcatagatggaatgcaacatgaattatttgactctgccgaatatcttgcatatcttanaaatatagaaaccaagcggacacatgatggttacttctctatagacaagaaaaacggacagatgacccatggtaaactcagaagagaaaacatcaagaacagcgatggtaaatcaaaacagaaaacatatctgacgatacggatgcctacgaccggattataa

SEQ ID NO: 20826 - protein, 275 aa, Unknown
  Obtained from environmental sample
  misc_feature (1)..(275): Xaa is any amino acid
MTLRYSATHKSDSIYNMIYRLDALDAYNKRLVKRIAVKGISEIGSTATNGYIYLQKVNLSKDKPPTATIELDVRGTNSVHKKVRVISERDNLKIKSEGLPEYEDGYIVSKIDGRDLSVEFQNGKKLFEGDIIGSVNEEQLHRIQIRETILSHIERERQLFGRGIKVLSLFFIDEVAKYRQYDDSGNVKCGEYATIFEEEYKNIIDGMQHELFDSAEYLAYLXNIETKRTHDGYFSIDKKNGQMTHGKLRRENIKNSDGKSKQKTYLTIRMPTTGL

SEQ ID NO: 20827 - DNA, 627 bp, Unknown
  Obtained from environmental sample
  misc_feature (1)..(627): n is a, c, g, or t
atgaacatcgaatggctggaattgctttaccctttcctgaaagagcggcaggaaaagtttgaaagggactatcaggaatttaaaaccgaatgggcgctttgcgtttatttagccggtttctttcccaaagatcacggcatattggcccctctttacctgaacattatagagctggaacctggtacagcgatttacgtcccggcaggcacgcttcacagctacatcaagggctttggaatagagcttatgaacgattccgataatgtactccgggggggccttagctccaaatatatagacaaagcggaacttttaagtatattgaatttctccaaattcaggccggaggttatgaagattcccagcccggctcctttctgctttaggtaccctgccccaatcgaaaattttgtcctttctgtattgcatggctcaggagatacagctttttacgccgaggcaggcccctcaattctgatagtaacctcaggatgcatgataataaaccaaactataaccctggataccggagaatcggcttttgttcttccgaataaaaacctggagctttcaggaacctttaccgcttattcagcttcagtaaaaattgatcaaaaagtttattag

SEQ ID NO: 20828 - protein, 208 aa, Unknown
  Obtained from environmental sample
  misc_feature (1)..(208): Xaa is any amino acid
MNIEWLELLYPFLKERQEKFERDYQEFKTEWALCVYLAGFFPKDHGILAPLYLNIIELEPGTAIYVPAGTLHSYIKGFGIELMNDSDNVLRGGLSSKYIDKAELLSILNFSKFRPEVMKIPSPAPFCFRYPAPIENFVLSVLHGSGDTAFYAEAGPSILIVTSGCMIINQTITLDTGESAFVLPNKNLELSGTFTAYSASVKIDQKVY

SEQ ID NO: 20829 - DNA, 429 bp, Unknown
  Obtained from environmental sample
  misc_feature (1)..(429): n is a, c, g, or t
ttgggatggcgcctttttgagttcaaaaaccagccgtaccggctcgccctttccggattcatcgttgaaactggcaatgccgtcaatgaccttgtcccgcaccaattccccgatacgctcaagcaggggcttgatgtaaataccgtagggtatctcgttgaaaacgatgatttccctgccggacttggttgtttccagggtaaaacgaccccggaggagaatcttgccccggccggtcttataggcatccctcatgcccttgcggccgaagacaatacccccggtggggaagtccggcccctggataaacttcatgagctcatccagggaaatatcgggattgtcaatctgggcgcagatagcgttgcagacttcccccatgttgtggggcgccatgttggtagccatgcccacggctatgccgcttga

SEQ ID NO: 20830 - protein, 142 aa, Unknown
  Obtained from environmental sample
  misc_feature (1)..(142): Xaa is any amino acid
MGWRLFEFKNQPYRLALSGFIVETGNAVNDLVPHQFPDTLKQGLDVNTVGYLVENDDFPAGLGCFQGKTTPEENLAPAGLIGIPHALAAEDNTPGGEVRPLDKLHELIQGNIGIVNLGADSVADFPHVVGRHVGSHAHGYAA

SEQ ID NO: 20831 - DNA, 852 bp, Unknown
  Obtained from environmental sample
  misc_feature (1)..(852): n is a, c, g, or t
gtgcccctcaaggatttttccgatggggataacggcggcccgttcctcttcatgggaaccgcccggggtgtggtcaagaaagccgcggtcagcgaattcgccaacgccaagacaaggggcataatcgccatacacctcgacgaaggcgacaaactggtcagcgccctccttaccggcgggcaggatgaagtagtcctgatttcccggaagggccgggccctgcgtacccacgaagagcatatccgggccatgggccgctcgtcccgcggcgtcaaaggggtgaatctggatggcgacgatgagctctcaggcctcctcagggtggacgaaccggcggcggatgaagaaaaggacgccaaaggcaggaaagtgcccaaacatgaaaagatgctcatcatttccgagtacgggtacggcaagcgggtggatttcagcgagttcagttcccatggccgcggcaccggcgggcagaggatttacacggtaaccgaaaaaaccggcgagatcgcgggctgcgtcggcgtgcttgataacgaagaaatcatgtgcatcacgagccaggggaaatccattaagctcaaggtttcctcaataccggtcatgggccgcagcgcccagggggtcaagatactcagcattgacaagccggatttcgtcatcggcgtggatcggatcgttaaggaagaagaagcggcccaaaacaaagaaggggccggcctttctaatgatacccccatcggcgatgatggcgcgccgccggataatgatacgatcgatgatattgatgatatcgatggtattaaaacgattttcgaagagaatacatcctctccatctgtcttggtnnnttga

SEQ ID NO: 20832 - protein, 283 aa, Unknown
  Obtained from environmental sample
  DOMAIN (127)...(177): DNA gyrase C-terminal domain, beta-propeller
  misc_feature (1)..(283): Xaa is any amino acid
MPLKDFSDGDNGGPFLFMGTARGVVKKAAVSEFANAKTRGIIAIHLDEGDKLVSALLTGGQDEVVLISRKGRALRTHEEHIRAMGRSSRGVKGVNLDGDDELSGLLRVDEPAADEEKDAKGRKVPKHEKMLIISEYGYGKRVDFSEFSSHGRGTGGQRIYTVTEKTGEIAGCVGVLDNEEIMCITSQGKSIKLKVSSIPVMGRSAQGVKILSIDKPDFVIGVDRIVKEEEAAQNKEGAGLSNDTPIGDDGAPPDNDTIDDIDDIDGIKTIFEENTSSPSVLVX

SEQ ID NO: 20833 - DNA, 573 bp, Unknown
  Obtained from environmental sample
  misc_feature (1)..(573): n is a, c, g, or t
ttggccgagtgcttagatgcagattgccgttgtcgcagtttgtcgtcaatctgcggcaagaaagcttttctgcgttggccaaacgacatctatatcgatcaccggaagatcgcaggtctatcaaccgaagtttgcggcgaaggcgatttgattacatggctgtcaggcggaataggagttaacgtgaataatccagtcccaacaggcagggcggcaagctgcacggagatcacaaaacggcaggtttcacgacgggaagtgttaattaaaattcttgataagtttgacaagataaaaaaaacttttgtctcaactgccgcatattcccagggcaaccgcccacttgcctcggaatggaattcattggctgattgtatcggcgcaaaagcggctgtttttgaaccactcccggcgcgggcaagtgacgatgatgattccgcttataaacgcgggaaaatccttgcgcatggagtctttcaggggattgatcccgcaggacggtgcattataaaaacggatgacagtacgctgttttttaatcacggttcagcctcattggcttttttgagctag

SEQ ID NO: 20834 - protein, 190 aa, Unknown
  Obtained from environmental sample
  misc_feature (1)..(190): Xaa is any amino acid
MAECLDADCRCRSLSSICGKKAFLRWPNDIYIDHRKIAGLSTEVCGEGDLITWLSGGIGVNVNNPVPTGRAASCTEITKRQVSRREVLIKILDKFDKIKKTFVSTAAYSQGNRPLASEWNSLADCIGAKAAVFEPLPARASDDDDSAYKRGKILAHGVFQGIDPAGRCIIKTDDSTLFFNHGSASLAFLS

SEQ ID NO: 20835 - DNA, 870 bp, Unknown
  Obtained from environmental sample
  misc_feature (1)..(870): n is a, c, g, or t
gtggtaagcagtatgaacgactacctgatcgaatacgacgtggtaaaccgcaagtggaagcccagaatcgcctcttttgaaataaaaattgacaacaatgcggatactctggacgtaatctataccatgcgcgacgacgtttactggagctattataattcaaccaaaaaagttaaagttacaagcgacgacgtgatcttctggtacgatgaaattcagggtgatcccgaatgcttaagttccagctacaacggtcagtttttaaccatgccggacggcagagaggcgcgcattaccattcataaaattgacgacaggcgtttttattttcattttccaaggataatagccgatcctcttttaacgacaaacatggatttcggcccgtaccatatttaccagagcgccaagaaagaagggggagccgataaagtaagaaatgttattttcaacgtgtcgcaagaccccgtaacaattccctcgatgggcgaatggtttttggttgaatacactcccgggcaaaggcttgtttacaaacggaatcccgattattggaggaaggacgcgaagggcgtatcactaccctacatcgaagaacaaatcgtccgcatcattcccgatgaaaataccaaactgctccttttcaaagacggaaagacagaaacctactctttgcgtcccgaagatttggacggacttgtaaacaagaacgacggcagttacacggtctttaacgcggaaggcgctcttggagccgctttttggacattcaaccaaaatcccgtanacaaggataagcccgtgtatgaatggtttactcaaaaagaattccgtcaggctatgagctgccttctaaccgcgacaggataa

SEQ ID NO: 20836 - protein, 289 aa, Unknown
  Obtained from environmental sample
  misc_feature (1)..(289): Xaa is any amino acid
MVSSMNDYLIEYDVVNRKWKPRIASFEIKIDNNADTLDVIYTMRDDVYWSYYNSTKKVKVTSDDVIFWYDEIQGDPECLSSSYNGQFLTMPDGREARITIHKIDDRRFYFHFPRIIADPLLTTNMDFGPYHIYQSAKKEGGADKVRNVIFNVSQDPVTIPSMGEWFLVEYTPGQRLVYKRNPDYWRKDAKGVSLPYIEEQIVRIIPDENTKLLLFKDGKTETYSLRPEDLDGLVNKNDGSYTVFNAEGALGAAFWTFNQNPVXKDKPVYEWFTQKEFRQAMSCLLTATG

SEQ ID NO: 20837 - DNA, 378 bp, Unknown
  Obtained from environmental sample
  misc_feature (1)..(378): n is a, c, g, or t
gtgtctctatccgacatcatcaccgtatccttagaccgctttcaccacatagccaagaccgagacagtcttcggcgagccattaaaggtgggcgacgacataacgctggtccccgtctccaaggtatcgataggcttcggcgccggcggcgccggcaaagacgacaagtgcgcttccggcgcaggcaccggcggcggagtaaccgtcacccccgtggcgctggtatcaatatccaaagagggcggcgtagaggtgcacccgctgtctaacggcgacctaagcgacttgggaagtctcctatccctagcgcccgaagcggtgaaaaagatggccaaagtgttcaaaaagaaagatgacgatgaaaatcaaaatctttaa

SEQ ID NO: 20838 - protein, 125 aa, Unknown
  Obtained from environmental sample
  misc_feature (1)..(125): Xaa is any amino acid
MSLSDIITVSLDRFHHIAKTETVFGEPLKVGDDITLVPVSKVSIGFGAGGAGKDDKCASGAGTGGGVTVTPVALVSISKEGGVEVHPLSNGDLSDLGSLLSLAPEAVKKMAKVFKKKDDDENQNL

SEQ ID NO: 20839 - DNA, 690 bp, Unknown
  Obtained from environmental sample
  misc_feature (1)..(690): n is a, c, g, or t
atgaatatcggtacaaaaaccgcgttgttccttgttatcatcgtattaatgttagtaataacgccgactgtttgggggcagaagggcgggcccaaatccggtagcggcggcgacctcttggaagccctcctcggcaaaagcgaggcgcggcagcagaagaacaaaaaagacgccgccgtcgattcgagcgaaatcaaagcaaccgcggagcgtgaacgaagacggttggcggaaattaaaaaaaacacctattatttcatcgattcgcggaacgaccgaaaatatcgcgcggtaaaaataggcgatcggatgtggatggcggagaacttgaactatcagacgccaagcggttcttggtgttacggcgataacatgctcggtcagagcaaatactacgacgacatgatcaaatccgactgtaatgaatacggcagactgtatgactgggagacggccaaagccgtttgcccgtcgggatggcacctgccgtctcgcgatgagtggggtgatatggctaaagccgccggaggcttccgcggcgaagaggataaatacggcacatacggcacaagcggtccggccggtaggaatttgaaagcgaaaagcggttggaaagactaccatcgcccgccaatgtatgtgggatgcgcgaactgcaaagcccaaaacggcaacgtctcggccatctga

SEQ ID NO: 20840 - protein, 229 aa, Unknown
  Obtained from environmental sample
  SIGNAL (1)...(26)
  misc_feature (1)..(229): Xaa is any amino acid
MNIGTKTALFLVIIVLMLVITPTVWGQKGGPKSGSGGDLLEALLGKSEARQQKNKKDAAVDSSEIKATAERERRRLAEIKKNTYYFIDSRNDRKYRAVKIGDRMWMAENLNYQTPSGSWCYGDNMLGQSKYYDDMIKSDCNEYGRLYDWETAKAVCPSGWHLPSRDEWGDMAKAAGGFRGEEDKYGTYGTSGPAGRNLKAKSGWKDYHRPPMYVGCANCKAQNGNVSAI

SEQ ID NO: 20841 - DNA, 456 bp, Unknown
  Obtained from environmental sample
  misc_feature (1)..(456): n is a, c, g, or t
gtggccgaaagccgcctgcgcgaggccgacaacatagacctggacgccctcgacgaggaggagctgggaaggccggtcatcctatttatcgaccaagacaaggagtcgacggcgctggccagcacggtgatcgagaacgtctacgatatcttggtggtggagagcggggagcagggccttataacggcgctgacccaaaaaccctctctcatactcatagattcgcgccttccggggctagacgggtacaccatgtgccgcatactgcggtcgctcgacgagacgaagaacatccccatagccatcttctccgccggcgtgcgggacgacgagatacaaaaaggcttctccagcggagccgacgacttcatagtgaagccgttcaccggaagggagcttgtggaaaaggtttgcaggctgctgatgaagaagaaggaagacgaggtatttaaataa

SEQ ID NO: 20842 - protein, 151 aa, Unknown
  Obtained from environmental sample
  DOMAIN (25)...(138): Response regulator receiver domain
  misc_feature (1)..(151): Xaa is any amino acid
MAESRLREADNIDLDALDEEELGRPVILFIDQDKESTALASTVIENVYDILVVESGEQGLITALTQKPSLILIDSRLPGLDGYTMCRILRSLDETKNIPIAIFSAGVRDDEIQKGFSSGADDFIVKPFTGRELVEKVCRLLMKKKEDEVFK

SEQ ID NO: 20843 - DNA, 747 bp, Unknown
  Obtained from environmental sample
  misc_feature (1)..(747): n is a, c, g, or t
atgatcagatcggccgagctcagcgttgattacgttaaagatattcaccctggcgaatttttggttataaacaaagacggaatacactccgagcaactattgaaaaaagaccgaaaagccttttgcatttttgaatttgtctattttgcccgccccgacagcagaatttatgagcaaagcgcagacaaggttcgcagaaaaatgggaaaaaagctcgcacaagaacacccagtagatgcagacatagtaattccctgccccgatagttccacaactgccgcacttggctacgcgcaagagagcggaattagatttgaaataggtcttttgagaaaccattatctaggcaaaacatttatagacccttctcaaaatgttcgcgagcaaagggtgaagcttaaattcaacaccataaacggagtgctaaaagatagaagagtgtgtttggtggatgattccattgttcgcggaacaactctgaaaatcctctgcaaaatgatacgaaacgcgggagcaaaagaagttcacattcgcgttgcaagcccgcccgttgaacacccgtgcaattacggaatggatttcccaagccctgcggaattaatcgcaaccgcactcgcaccagccgaggttgcaaaaatgcttggcgtggatagcctcggttatttgagcgtaaaaggaatgcgagaatgcactggtcagccagatgatttttgctgtgcttgttttgacgatatttatccagaataa

SEQ ID NO: 20844 - protein, 248 aa, Unknown
  Obtained from environmental sample
  DOMAIN (53)...(195): Phosphoribosyl transferase domain
  misc_feature (1)..(248): Xaa is any amino acid
MIRSAELSVDYVKDIHPGEFLVINKDGIHSEQLLKKDRKAFCIFEFVYFARPDSRIYEQSADKVRRKMGKKLAQEHPVDADIVIPCPDSSTTAALGYAQESGIRFEIGLLRNHYLGKTFIDPSQNVREQRVKLKFNTINGVLKDRRVCLVDDSIVRGTTLKILCKMIRNAGAKEVHIRVASPPVEHPCNYGMDFPSPAELIATALAPAEVAKMLGVDSLGYLSVKGMRECTGQPDDFCCACFDDIYPE

SEQ ID NO: 20845 - DNA, 639 bp, Unknown
  Obtained from environmental sample
  misc_feature (1)..(639): n is a, c, g, or t
atgtactcggacatatcgatgcgcaccaacgcgtcttcggtatcaaaaagcgccttggcaagcgctttggcaagctccgtcttccccacgccggtcggccctaaaaatatgaaagaggcgattgggcggcgggtgttgtgcaatccggcgcgcgaacgcctgatgctcctcgccaccgcgccgagcgcttcgtcttggccgatgaccctttggcgcagttcgtcctcaaggtgcagcacctttttagcctcttcctcggcaagccgcgccagcggtatgccggtcatcgtggcgataacctccgtaatcgtcgattcgtctaccaagagccgctcctcggacttggccctccgccacagcgctttggcctctaaaagggcgccgttgagtttttcctgcgtatcgcgtagcgtcgccgccgactcaaagtcttggtgctctatagccgtttctttctcgcgcagaacctcggcaatctccttctcaatctcgcgtatctccgtcggtatctccatgcttgacagccgcttcctcgcgccggcctcgtcaatcacgtctatcgctttgtcgggcaggaaacgatccgatatgtaccgttcggagagcttgaccgccatggcgatagccttctcggaatag

SEQ ID NO: 20846 - protein, 212 aa, Unknown
  Obtained from environmental sample
  misc_feature (1)..(212): Xaa is any amino acid
MYSDISMRTNASSVSKSALASALASSVFPTPVGPKNMKEAIGRRVLCNPARERLMLLATAPSASSWPMTLWRSSSSRCSTFLASSSASRASGMPVIVAITSVIVDSSTKSRSSDLALRHSALASKRAPLSFSCVSRSVAADSKSWCSIAVSFSRRTSAISFSISRISVGISMLDSRFLAPASSITSIALSGRKRSDMYRSESLTAMAIAFSE

SEQ ID NO: 20847 - DNA, 426 bp, Unknown
  Obtained from environmental sample
  misc_feature (1)..(426): n is a, c, g, or t
ttgattccgcagcgcgaggctgagaaggtgaagtacgcgcacaacgggcaggttaagggtatgctcgatattttgaaggagcacaagttcaactatatccgcctgcggctgtttgtcgacccgacggctaaggtgccggaggacaagcccgatgcgagcgggtggagcgcgtcgccgtactccgtcgccgggtactgcgggttggcctccaccgtggccatggccaagagggtcaaggcagcagggatggggctgctcttggacttccactacagcgacacgtgggccgacccgggcaagcagtacaagccggtctcctggcgggatctcaattcggcgcagctggccgagaaattgaggtcgtacaccaaggaaagcctgctggccttcaggaggcgggagcgctgccggacatcgtgcagatag

SEQ ID NO: 20848 - protein, 141 aa, Unknown
  Obtained from environmental sample
  DOMAIN (1)...(139): Glycosyl hydrolase family 53
  misc_feature (1)..(141): Xaa is any amino acid
MIPQREAEKVKYAHNGQVKGMLDILKEHKFNYIRLRLFVDPTAKVPEDKPDASGWSASPYSVAGYCGLASTVAMAKRVKAAGMGLLLDFHYSDTWADPGKQYKPVSWRDLNSAQLAEKLRSYTKESLLAFRRRERCRTSCR

SEQ ID NO: 20849 - DNA, 732 bp, Unknown
  Obtained from environmental sample
  misc_feature (1)..(732): n is a, c, g, or t
ttgccttttccgggaagtatgtcttcaaaaccggtgtctaacccggggatcgcaaaatcttccagaccgccgaatacgtctccgccgtcggtatcaaagccttcgcccaatgaaccggattccgggctaaaactatcgaaagcatctccagggacttcttccagtgttgcctcatcgccggcagccggaagctctccgtcgaaaccaaaagcctcttcatcgccttcagtacccgtgtcatcaaatgggggaaaatctactcccagctcttcttcgccgaaaggttcaggagcgaactcctgcccttcttcaggctctgcgaaaggttcctggctttcattgttgtcaaaatcaggcaatccacccaggtcaaagtctggcagatccgatgttccggtttcttcagcatcttcagtaaacggctcttcttcgccgaaaggttcctggccttcaccgtcgccgaaatcgggcaagtcccccaagtcaaagtctggcagatctgtttccgttgctgtaccatccgcatcgtcggtgctttcggaaattggagccccttcttcaaaaagatccatgttttcgctggtatcaaaatcaggaaaatccggcaagcccaagtcatcggcttcatccgttgtttcatcggtagtttcgggagcaagttgctccgtaattttttcctcggtaaggccaagaccctccaggtcaaaatcaggaagagcccccgcgtcctga

SEQ ID NO: 20850 - protein, 243 aa, Unknown
  Obtained from environmental sample
  misc_feature (1)..(243): Xaa is any amino acid
MPFPGSMSSKPVSNPGIAKSSRPPNTSPPSVSKPSPNEPDSGLKLSKASPGTSSSVASSPAAGSSPSKPKASSSPSVPVSSNGGKSTPSSSSPKGSGANSCPSSGSAKGSWLSLLSKSGNPPRSKSGRSDVPVSSASSVNGSSSPKGSWPSPSPKSGKSPKSKSGRSVSVAVPSASSVLSEIGAPSSKRSMFSLVSKSGKSGKPKSSASSVVSSVVSGASCSVIFSSVRPRPSRSKSGRAPAS

SEQ ID NO: 20851 - DNA, 639 bp, Unknown
  Obtained from environmental sample
  misc_feature (1)..(639): n is a, c, g, or t
ttgcccccggggcaaaaggaattggttctatcctctgtcgccagcgcagccgcagagttcaggtcaaaaggcctgttccccttggcttttggcggtgagcaccttctgtcccacccattgattatgtcggcgtttgaggattgcccagatctggcagttgtccatatagacgcgcacgccgacatccgcccagagctatggggcgacgagctgacgcacgccactttccttggccgcgtggccgatagaatcggctatgaaaatatcaaacagtttggcatccgctcgtgcagcgctgaggagtgggagatcgcggcccgccatgacacttttcgcccattttgcgtagaagcgctgaaacgtcaccttgacgcactttgcgacaggccgatatacctgaccctagatttggacgtgctggacccagctctttacccaggcaccggcacgcccgaaccaggcgggattgaatggaatctgctgatcgaagggctgaagctgttcaggggcaggcgcttggtgggagccgactgcatggagctgagtccgcactacgacgcatcaggcgcgagtgcccaagccatggccaagacactgagggaaatgataataatctccaactctaggcgccaactatag

SEQ ID NO: 20852 - protein, 212 aa, Unknown
  Obtained from environmental sample
  DOMAIN (1)...(207): Arginase family
  misc_feature (1)..(212): Xaa is any amino acid
MPPGQKELVLSSVASAAAEFRSKGLFPLAFGGEHLLSHPLIMSAFEDCPDLAVVHIDAHADIRPELWGDELTHATFLGRVADRIGYENIKQFGIRSCSAEEWEIAARHDTFRPFCVEALKRHLDALCDRPIYLTLDLDVLDPALYPGTGTPEPGGIEWNLLIEGLKLFRGRRLVGADCMELSPHYDASGASAQAMAKTLREMIIISNSRRQL

SEQ ID NO: 20853 - DNA, 441 bp, Unknown
  Obtained from environmental sample
  misc_feature (1)..(441): n is a, c, g, or t
ttgtattcttgcgtggaatataaagccaaacaaaaaacattgaatgaaaatttaacttgggcaattgttgtcgcagttgctcttgggcagctttcagcagctatttttccaggagcatctcgctctgggatggcaattatgtttgcgattttcctagggtttgcgcgtccagctgcggttaagttttcttttttggtgggcattccaactatgattgccgcaggcggctttcaactgctctctgcaataaaaaaaggcgaaactacagatttattcacacctgaagccattgtcgcttatgcggtggcaaccatttctgcttggcttgcagttgtttggcttttgcgttttgtgcaaaaaaagaattttgtccccttcgcgtggtaccgcttggtacttggggttgccattttaaccttggctcatttccaccttatgtga

SEQ ID NO: 20854 - protein, 146 aa, Unknown
  Obtained from environmental sample
  DOMAIN (5)...(137): Bacitracin resistance protein BacA
  misc_feature (1)..(146): Xaa is any amino acid
MYSCVEYKAKQKTLNENLTWAIVVAVALGQLSAAIFPGASRSGMAIMFAIFLGFARPAAVKFSFLVGIPTMIAAGGFQLLSAIKKGETTDLFTPEAIVAYAVATISAWLAVVWLLRFVQKKNFVPFAWYRLVLGVAILTLAHFHLM

SEQ ID NO: 20855 - DNA, 954 bp, Unknown
  Obtained from environmental sample
  misc_feature (1)..(954): n is a, c, g, or t
ttgtgtgaatacaaatacgattttctatcgaataataacctacaaaccgtcaaatggcaacagttgaaatttagtgacggagattatttttttgttccaaagaattttgaatttaagtatgaatacgaaaaaggattcagtgttaatgagttattcactataaaatcaagcggtgttaaaacgcatgatgatgctaatttagtagattttctgccgtttgatgaacataatcaacaatatacctatcgcccttttgatattcgttatatcaattatgatttaaaaaaggtcaagcgtcatagaaatgatgtaatgaagcattttttgaacagtgaaaatgttggtatatgtcttatgcgaagtttaattgacatgaccgattttaaatctgtatttatttgcaaaaacatgatggatataaacttctatcgtttccaatcttttatttttccgctctacctttatccagaatctgacaatctattagcgggtgcccatcgcaaccataatttaaaccaagcaatcatcaccgaactatccaaacgtacaagtttgcggtttacggttgaggaagaagaagactccaaaatattcgcccccattaacctgcttgattatatatacgccgttctccactctcccacctatcgcgaaaaatataaagagtttctgaagatagactttccgcgcatcccctacccggagaacgtcgcccaatttcgcgccctgtcaaaactcggcggaaaactccgcggtttacacttattagacggagtagaaccccaagaaggcacggctgactatccagtccccggcaacgacgaagtagagaagattcaatatgatgaagccgaccgcaaggtattcatcaacaagaagcaatactttgacaacgtcccgcccgaagcgtgggagttctacatcggcggctaccaaccagcccaaaagtggtaa

SEQ ID NO: 20856 - protein, 317 aa, Unknown
  Obtained from environmental sample
  misc_feature (1)..(317): Xaa is any amino acid
MCEYKYDFLSNNNLQTVKWQQLKFSDGDYFFVPKNFEFKYEYEKGFSVNELFTIKSSGVKTHDDANLVDFLPFDEHNQQYTYRPFDIRYINYDLKKVKRHRNDVMKHFLNSENVGICLMRSLIDMTDFKSVFICKNMMDINFYRFQSFIFPLYLYPESDNLLAGAHRNHNLNQAIITELSKRTSLRFTVEEEEDSKIFAPINLLDYIYAVLHSPTYREKYKEFLKIDFPRIPYPENVAQFRALSKLGGKLRGLHLLDGVEPQEGTADYPVPGNDEVEKIQYDEADRKVFINKKQYFDNVPPEAWEFYIGGYQPAQKW

SEQ ID NO: 20857 - DNA, 888 bp, Unknown
  Obtained from environmental sample
  misc_feature (1)..(888): n is a, c, g, or t
atgacagattggccgagtacctacggactgttcgccgcccgattgcatgacaaaacgcccgacacgttcagccgccaaaacgccgcgaacctaataccgaaaacgaacccttttttgcggcaactttttcaaaatatcgcggggtttgacctcgacgaccgcatcgcgtggattgtggacgacctcgccgacacgttccgagccgcaaatatgaccgaatttaaacaaaatttcggcgaccgcgccgcgcaaaacgaccctatgattcatttttacgaggattttctttcggcgtatgaccctgtattacggaaaagccgcggagtatggtacaccccgcaagccgtggttacttttatcgtccgcgccgtagatgaaattttacagaaagagtttaatttgccgacaggcttggcggacacgtcaaaaacgaagattaaaataaacggacgtgaaacagatgtccacaaagtacagattttagacccggcgaccggcacaggcacgttcctcgccgaaacaataaaccgaatctatgaaaaattccgcaaacagggtggaatgtggcaaaaatacgtgaaagaacatcttataccgcgcctcaacgggtttgaagtgcttatggcttcctacactatggcgcatattaaacttgaacagttgctttcacaaacggggtacgacgctacggataatcagcggttacggatttatttgactaactcgttggaagagcagcacccagagacgggatcgctttttgcgcagtttttggcgcgagaggctaatgaggctaacagcattaaacgagatacacctattatggtcgtgttgggccacccaccgtatagcgtaagtagtcaaaacaagggcaaatggattaactga

SEQ ID NO: 20858 - protein, 295 aa, Unknown
  Obtained from environmental sample
  misc_feature (1)..(295): Xaa is any amino acid
MTDWPSTYGLFAARLHDKTPDTFSRQNAANLIPKTNPFLRQLFQNIAGFDLDDRIAWIVDDLADTFRAANMTEFKQNFGDRAAQNDPMIHFYEDFLSAYDPVLRKSRGVWYTPQAVVTFIVRAVDEILQKEFNLPTGLADTSKTKIKINGRETDVHKVQILDPATGTGTFLAETINRIYEKFRKQGGMWQKYVKEHLIPRLNGFEVLMASYTMAHIKLEQLLSQTGYDATDNQRLRIYLTNSLEEQHPETGSLFAQFLAREANEANSIKRDTPIMVVLGHPPYSVSSQNKGKWIN

SEQ ID NO: 20859 - DNA, 414 bp, Unknown
  Obtained from environmental sample
  misc_feature (1)..(414): n is a, c, g, or t
atgaccatcaagcgccggaacagaaccgccgtaagcgaatccagcgcggcaagcgacgttgccttcctcctcatcatttactttttggtaatagccggcttcaacataaaccagggcttcttaatgaaccttccggcaaaagattccacccgcctgattttaaaggacgagctgatgcgttttgaaatggacagctcaggcgcagttttttacaacggcgaaaaattggcgctctcccaaaccgagcgtgaaataagcatggcaatcgcggctcaccctaacctggcggtggtcctttccatcgacggtaaagcaccgtggcagcaggtagtatattttgtggagctggcacaaaagctgaaggtggattcattctcgttcaatataaagcaggggatggggcaggaacaatga

SEQ ID NO: 20860 - protein, 137 aa, Unknown
  Obtained from environmental sample
  misc_feature (1)..(137): Xaa is any amino acid
MTIKRRNRTAVSESSAASDVAFLLIIYFLVIAGFNINQGFLMNLPAKDSTRLILKDELMRFEMDSSGAVFYNGEKLALSQTEREISMAIAAHPNLAVVLSIDGKAPWQQVVYFVELAQKLKVDSFSFNIKQGMGQEQ

SEQ ID NO: 20861 - DNA, 474 bp, Unknown
  Obtained from environmental sample
  misc_feature (1)..(474): n is a, c, g, or t
atgctcaagatagcggaaaacgtgcgtcttgccgataagacctcctataggataggcgggccggcgcggtactacgcggagccgcgctccgagggtgaggttgtggaggcgtgccgctttgccgcggagaaagggatgccgctatttgttctcggcaacggttccaacgtactgataagcgacgccgggttcggcggatttgtgataaacctatccaaatatttttcggcgctcacttgggacaaaaccaccgctttcgtgttgagcggctatccgttggacgatttggccgaagccgccgcggagaggggctgcgccggaatcgagagtttgtcgggcattcccggtacggtaggcggcgcggttgtgatgaacgccggcgcctttgactgtgacatctcaaaaacgttgcgcggcgtacgtgtgctgagggcttccacgcatactatagagaccgttcccgccaaagattga

SEQ ID NO: 20862 - protein, 157 aa, Unknown
  Obtained from environmental sample
  DOMAIN (22)...(154): FAD binding domain
  misc_feature (1)..(157): Xaa is any amino acid
MLKIAENVRLADKTSYRIGGPARYYAEPRSEGEVVEACRFAAEKGMPLFVLGNGSNVLISDAGFGGFVINLSKYFSALTWDKTTAFVLSGYPLDDLAEAAAERGCAGIESLSGIPGTVGGAVVMNAGAFDCDISKTLRGVRVLRASTHTIETVPAKD

SEQ ID NO: 20863 - DNA, 300 bp, Unknown
  Obtained from environmental sample
  misc_feature (1)..(300): n is a, c, g, or t
gtggataagatacgccccgacgccccgtttaaggccgataggagttttgtatgttcgccggattactattgcagatctgtactcaccatgccgctcataaacgttgaggacgaggtggtgggcgtgctgcagcttatcaatagaaagttggaaagggacataacgcttacttccgtcgatcaggtgaaggcgcacgcgtacccattttccaccgatgacataggggtaattcgctttctttcgcgttacgcggcgttgtcgattgataggataagcctctataataccgatgaagagtag

SEQ ID NO: 20864 - protein, 99 aa, Unknown
  Obtained from environmental sample
  misc_feature (1)..(99): Xaa is any amino acid
MDKIRPDAPFKADRSFVCSPDYYCRSVLTMPLINVEDEVVGVLQLINRKLERDITLTSVDQVKAHAYPFSTDDIGVIRFLSRYAALSIDRISLYNTDEE

SEQ ID NO: 20865 - DNA, 657 bp, Unknown
  Obtained from environmental sample
  misc_feature (1)..(657): n is a, c, g, or t
ttgcataacaagtttcacgcgctcttcttgtcttccccgtctttaagcacgtacgaaggcggaatcttgttcacaacggcctctcgcgtcacgataacctccgccacgtcgtcccgcgacggcatctcgaacattaccggcagcaaacacgattccagcacgttgcgcagccccctggcgccggtcttctttcgtaccgcagtgtccaccgtttctttcagcgcctctttctcgaaggtcagtttcacgccctccatggcaaagagtttttggtactgctttgccagcgcgttcttcggctcggtgaggattcgcagcagggagtcttcgtccagttggtccaagcccatcaccaccggcagacggcctatgatttccggtatcaggccgaaggatatgaggtcgtccggctctactttgcgcaaaacctcgcctatcttcttctgtgttttgctcctcacatcggcgttgaagcccatgcggctttggtccatcctcgcctctattatcttgtccagcccctcaaacgccccgccgcagatgaagagtatgtccctcgtgtttatctgtattaaactctgctcaggatgcttgcgcccgcccttgggtggaacgccggccaccgtgccctctaagattttcagcatagcctgctga

SEQ ID NO: 20866 - protein, 218 aa, Unknown
  Obtained from environmental sample
  misc_feature (1)..(218): Xaa is any amino acid
MHNKFHALFLSSPSLSTYEGGILFTTASRVTITSATSSRDGISNITGSKHDSSTLRSPLAPVFFRTAVSTVSFSASFSKVSFTPSMAKSFWYCFASAFFGSVRIRSRESSSSWSKPITTGRRPMISGIRPKDMRSSGSTLRKTSPIFFCVLLLTSALKPMRLWSILASIILSSPSNAPPQMKSMSLVFICIKLCSGCLRPPLGGTPATVPSKIFSIAC

SEQ ID NO: 20867 - DNA, 486 bp, Unknown
  Obtained from environmental sample
  misc_feature (1)..(486): n is a, c, g, or t
ttgatgatgaatgatcagccattggccctggtgccggtagagcgttatgggatattccgctatgaagttcccaaagaaatgctggtcgaagaaaaggcctacaaaatatcggcatactacaattctgaaaccaacaaaaaaatctcaagcccggatcatactgtgtactattcttactttggcccggtactccaggtggaaagccacggagacggcgatgccataacgggacggccctggctttcaggccgcgcctggcttacctttcccgaacccggcgaagaggatcccccccttacccgcgctcagatagcgcagcaaaaaacagagcaaaggataaaacgtataacagtaagccacgataatggtcgtacatttaagtcaaccagaggcggcggtgaaaaatggaaagtccgcatggagaccagcgaacttccccgtgggccgcagccgattttggtaaaagacggaatttgtcagcggtga

SEQ ID NO: 20868 - protein, 161 aa, Unknown
  Obtained from environmental sample
  misc_feature (1)..(161): Xaa is any amino acid
MMMNDQPLALVPVERYGIFRYEVPKEMLVEEKAYKISAYYNSETNKKISSPDHTVYYSYFGPVLQVESHGDGDAITGRPWLSGRAWLTFPEPGEEDPPLTRAQIAQQKTEQRIKRITVSHDNGRTFKSTRGGGEKWKVRMETSELPRGPQPILVKDGICQR

SEQ ID NO: 20869 - DNA, 966 bp, Unknown
  Obtained from environmental sample
  misc_feature (1)..(966): n is a, c, g, or t
atgatcagatggccgaggctccgttctctcagggagcggcaaggatccaatggcataaaaaacatagaatacagcgtggacggcgaaaaatatgtcccgttgtccgggaaggcaaagggtggcagcacttccctggaatttaccttgtcgataaacaccaaagcgttaccggacggtccggtggtttactatttccggacggtggacatgaccggtgtggctgcggttaaaccttatttatttttcgtaaccaacagcgggccggagcttgaggtatacagcccggtgtcgggtgaggatgtttttggcacgtttttcctctccggccgtgcgtatgaaaaaaccggcctttccagactgtactatgagtggggcgctgtcaaagaggatattgaaatgcgtcccggcgacccctattggtatgtcgcgctgcaaaccggtaaggacgaatccggtaagatcaaacccgcggctattaaagtatccgcggtagacaaagtcggtaatgtcagaagtattacctgtaagctggaggaccgccgtaaagtaaaagttcccgtgctggtaatcgactacccgacggagaatatgctcaaagcaatgcaaaaaaacggtatgccgcctgatacggcgatatacggccatattgcgccgggtgccgaatcgttttcggtgttggttgatggctatggggaagtggaagcgctgtcttctttccgtattgacccccacatgatgccccccgataaaaaagcccaaatccttaaactgacccctgttgacgcagcttccgtcaggnggacgacgataagcctgcgttatctgaaattgcagccatcgcaaaaagatgaatcgagaattatcgttgtccaacccgaaaaaaacagctggaaatccggcgatgcttttactttgcaggggagtatcgtcggtcaggcgggtatgcagattgagtttcgcctttaa

SEQ ID NO: 20870 - protein, 321 aa, Unknown
  Obtained from environmental sample
  misc_feature (1)..(321): Xaa is any amino acid
MIRWPRLRSLRERQGSNGIKNIEYSVDGEKYVPLSGKAKGGSTSLEFTLSINTKALPDGPVVYYFRTVDMTGVAAVKPYLFFVTNSGPELEVYSPVSGEDVFGTFFLSGRAYEKTGLSRLYYEWGAVKEDIEMRPGDPYWYVALQTGKDESGKIKPAAIKVSAVDKVGNVRSITCKLEDRRKVKVPVLVIDYPTENMLKAMQKNGMPPDTAIYGHIAPGAESFSVLVDGYGEVEALSSFRIDPHMMPPDKKAQILKLTPVDAASVRXTTISLRYLKLQPSQKDESRIIVVQPEKNSWKSGDAFTLQGSIVGQAGMQIEFRL

SEQ ID NO: 20871 - DNA, 504 bp, Unknown
  Obtained from environmental sample
  misc_feature (1)..(504): n is a, c, g, or t
atgtcgccaacgacacaaaatccactggttggtataataatgggatcgtcttccgattgggagacaatgcaaaatgccgccaacgtcttggatgaactatcaatcctatacgaagcggaggtggtctccgctcaccgtaccccggacaaattgttcagttacgccgagtcggcccgggtgcgcggtatagaggtaataatagccggcgcggggggcgcggcgcacttgccggggatgacggccgccaaaacatcgctgccggtaatcggcgtcccggttcaatcaaaggctctaaacggaatggattccctcctgtcaatcgtacaaatgcccgccggaatccccgtagccgcaatgtcgataggccgcgccggagcggtaaacgcgggtttgatggcggcgtctatattaggtaacaagtactcaaagataaaagacgcattggacgattatcgtaagagacagacggataaagtattggatcatcctgatcccagagcttaa

SEQ ID NO: 20872 - protein, 167 aa, Unknown
  Obtained from environmental sample
  DOMAIN (8)...(166): AIR carboxylase
  misc_feature (1)..(167): Xaa is any amino acid
MSPTTQNPLVGIIMGSSSDWETMQNAANVLDELSILYEAEVVSAHRTPDKLFSYAESARVRGIEVIIAGAGGAAHLPGMTAAKTSLPVIGVPVQSKALNGMDSLLSIVQMPAGIPVAAMSIGRAGAVNAGLMAASILGNKYSKIKDALDDYRKRQTDKVLDHPDPRA

SEQ ID NO: 20873 - DNA, 567 bp, Unknown
  Obtained from environmental sample
  misc_feature (1)..(567): n is a, c, g, or t
atgaacagggatcctgaactagtaagagcgctggattacatactcaatcacactaacgaagcctctatcgaagtgcttgccgaagccgtaatcaggcgaagacgggatctatcaatttatcaggcgacaggaaccacccccgaccttcagcgtatggcaagccagataaccgaacagatcaacgccggggtcggcggaagcgtcgaaaccatgaagagctctatccgcgaaatgatgattaggattatcaaggaaaacgcgccggaactttccccggatcaaatagacgaactttgccggtcgtggcttcccgaaactccctcaaacaaagaaaaagacatgccccgcgatatgcttgcgtccatgatagagcagtttatttccttttcacgcggaaccatgagggcttctgtggacaaaagcctccgcgaggaaatgggcgcgtggccgcagaagtactggaacgcttttcccccgcttatccgttccattattaccgaattcttaaaagataaaataaccgaaaaagaatttaattcaaaaattggaatcgcgttagaactgtaa

SEQ ID NO: 20874 - protein, 188 aa, Unknown
  Obtained from environmental sample
  misc_feature (1)..(188): Xaa is any amino acid
MNRDPELVRALDYILNHTNEASIEVLAEAVIRRRRDLSIYQATGTTPDLQRMASQITEQINAGVGGSVETMKSSIREMMIRIIKENAPELSPDQIDELCRSWLPETPSNKEKDMPRDMLASMIEQFISFSRGTMRASVDKSLREEMGAWPQKYWNAFPPLIRSIITEFLKDKITEKEFNSKIGIALEL

SEQ ID NO: 20875 - DNA, 774 bp, Unknown
  Obtained from environmental sample
  misc_feature (1)..(774): n is a, c, g, or t
atgaataccgtgttggttggtatctctaataatgcccacataacagggagagaacaaataatcaacgagatcagcgtccccctgctgctggccgtgaaaagcatgcgcaagcagcttattggctttattttgggcggcgaggtaaagggctttgaaatggcaaaaagttcggttaataccgccattctctccgccctgtgcgcgttggaaataaaccttcctgaactcagaatcgtgagtattatcaacggagcgctgctccatgacgcgggaatgttaaggctgccaaaggaaatcacggaaaaacgcggagggctttccgaagcggaacgccagcatatactcagccacccggcgcttgcccacaaaatagtgattaaagagctgcattttcaggatgacgtgggcaatatcgttttacagcaccatgagcgatgggacggcaccggttacccccaccaaatggccggagattatattgatataggcgccaggatagtgtccattgccgacgcgtttgaggcgatggtaagccccaagccctaccgcaattccattacgggcaatcaggcggtaaaaaacctcctctccgacaattcgcgccgtttcgaccccacgatactgaaggcgtttgtccttattatggggatttatcccattggctccatagtccgcctgaacaacggcgcggttgcgcgtatatcggaagttcgcgccattgcgccattgcgccccaaagtccagataatgtcgatcaggctcggccgattctga

SEQ ID NO: 20876 - protein, 257 aa, Unknown
  Obtained from environmental sample
  DOMAIN (53)...(176): HD domain
  misc_feature (1)..(257): Xaa is any amino acid
MNTVLVGISNNAHITGREQIINEISVPLLLAVKSMRKQLIGFILGGEVKGFEMAKSSVNTAILSALCALEINLPELRIVSIINGALLHDAGMLRLPKEITEKRGGLSEAERQHILSHPALAHKIVIKELHFQDDVGNIVLQHHERWDGTGYPHQMAGDYIDIGARIVSIADAFEAMVSPKPYRNSITGNQAVKNLLSDNSRRFDPTILKAFVLIMGIYPIGSIVRLNNGAVARISEVRAIAPLRPKVQIMSIRLGRF

SEQ ID NO: 20877 - DNA, 510 bp, Unknown
  Obtained from environmental sample
  misc_feature (1)..(510): n is a, c, g, or t
gtgtctccgctttttagaatgactacgccgaagtttggcattactctggccggaattgtaattcttgtcctgttggggcttttgtccgttctttcgatgctggatgtaatgaagattatcatcatagacagaaaaaaaggaatagaatggcttcccttgattgtttcaggatactttgttattctgctttcgcataatttaatagcgcagtttaacctgaatttttcaagcgctgtaatcagtattatttacgcgcttaccgcgctggtgtggatcattttcggttttatgcgccgctttgtttttatccgccgttttggtctggccctcgctattttcgccgttattaaactgttccttttggatctggcgggtctcgctcaaggatacagaattgtgtcgtattttgcgcttggaatatctcttatcggaatttcatttgtgtatcaatatttcagcaaacggctggagcttaaggaaggaatgtccattcatgctgaaaagaaataa

SEQ ID NO: 20878 - protein, 169 aa, Unknown
  Obtained from environmental sample
  misc_feature (1)..(169): Xaa is any amino acid
MSPLFRMTTPKFGITLAGIVILVLLGLLSVLSMLDVMKIIIIDRKKGIEWLPLIVSGYFVILLSHNLIAQFNLNFSSAVISIIYALTALVWIIFGFMRRFVFIRRFGLALAIFAVIKLFLLDLAGLAQGYRIVSYFALGISLIGISFVYQYFSKRLELKEGMSIHAEKK

SEQ ID NO: 20879 - DNA, 645 bp, Unknown
  Obtained from environmental sample
  misc_feature (1)..(645): n is a, c, g, or t
ttgtttttatccgccgttttggtctggccctcgctattttcgccgttattaaactgttccttttggatctggcgggtctcgctcaaggatacagaattgtgtcgtattttgcgcttggaatatctcttatcggaatttcatttgtgtatcaatatttcagcaaacggctggagcttaaggaaggaatgtccattcatgctgaaaagaaataaaagtcttttgcttttgctgtttctttttgcgccgcttgcgctgccgcttttttcgcatgacgcggatattaaaattgaaggcgaaaaccgttacaagtcagtacggctgattccccggatttacaatgaggcgcacaggaatctttccgatcttttgataaagaacggcgatgagaatattccttattttatcaattcaagtacaggaaaaacaaacgagaccagggaaacatatttaatgaggcagatcaactcttatattaaagacgataattttttctttgatttcgagcttgcccttgcgcgtgacagcgatataatcgcgacttccatggagttttccacgaacaacgccggttttgctaaaccggtggatgtattcggcagttatgataatatacattgggaattcgtgcaaggcgacatgctttaa

SEQ ID NO: 20880 - protein, 214 aa, Unknown
  Obtained from environmental sample
  misc_feature (1)..(214): Xaa is any amino acid
MFLSAVLVWPSLFSPLLNCSFWIWRVSLKDTELCRILRLEYLLSEFHLCINISANGWSLRKECPFMLKRNKSLLLLLFLFAPLALPLFSHDADIKIEGENRYKSVRLIPRIYNEAHRNLSDLLIKNGDENIPYFINSSTGKTNETRETYLMRQINSYIKDDNFFFDFELALARDSDIIATSMEFSTNNAGFAKPVDVFGSYDNIHWEFVQGDML

SEQ ID NO: 20881 - DNA, 465 bp, Unknown
  Obtained from environmental sample
  misc_feature (1)..(465): n is a, c, g, or t
ttggaaaataagaaaattcgcctgatttacgagttcctgaagttcggcataacaggcggcctgggggctataaccaatctgctcatcttctttctgctggccgacttgagcggtttaccggaaactccgatcagtatcggctgtttcattgttgccggaacccagaattattttttgaatcatctgtggtcattcagggaatataccggaaatacgcgcgtttccttaagcagatgggcgatgtttctcttgggatcattggcaggacttggcgtcaatattgcggtaatgaaattgatcatcgccaattttgccttgccgtggaaatttatcgcccaggcatgtgggattgccgctggaatggttatcaattttattatatcaaaattcattatttttcgaaggaaaaaaatgttaactgaaaaacagaataaaacaattaacaaagccgggggatttttatga

SEQ ID NO: 20882 - protein, 154 aa, Unknown
  Obtained from environmental sample
  DOMAIN (14)...(133): GtrA-like protein
  misc_feature (1)..(154): Xaa is any amino acid
MENKKIRLIYEFLKFGITGGLGAITNLLIFFLLADLSGLPETPISIGCFIVAGTQNYFLNHLWSFREYTGNTRVSLSRWAMFLLGSLAGLGVNIAVMKLIIANFALPWKFIAQACGIAAGMVINFIISKFIIFRRKKMLTEKQNKTINKAGGFL

SEQ ID NO: 20883 - DNA, 447 bp, Unknown
  Obtained from environmental sample
  misc_feature (1)..(447): n is a, c, g, or t
atgattatacgttcaaaggcacctttacgtcttgggtttgcaggcggcggaaccgacatcgcaagctatttcagcctgtacggcggatatgtcttaaatgccactatagatatgtatgcctattgtaacattgaaccggataattccggtaacattgaattttatgcggcagatttgaatatacacgaagattatagctcaaaagaaaacctcccggtttcctcttcccttccccttcataccgggatttataaccgcataatttccgattacgccaggaaaccgctctcgttcagaatgacaacttattctgacgcgcctgccggttccgggcttggttcttcatcaactatggttgttgccataataaaagcgtttgtagaatggctaaaccttcctcttggagaatatgatatttgccgcccttgcctancaaatcgaacgtga

SEQ ID NO: 20884 - protein, 148 aa, Unknown
  Obtained from environmental sample
  DOMAIN (99)...(147): GHMP kinases N terminal domain
  misc_feature (1)..(148): Xaa is any amino acid
MIIRSKAPLRLGFAGGGTDIASYFSLYGGYVLNATIDMYAYCNIEPDNSGNIEFYAADLNIHEDYSSKENLPVSSSLPLHTGIYNRIISDYARKPLSFRMTTYSDAPAGSGLGSSSTMVVAIIKAFVEWLNLPLGEYDICRPCLXNRT

SEQ ID NO: 20885 - DNA, 780 bp, Unknown
  Obtained from environmental sample
  misc_feature (1)..(780): n is a, c, g, or t
gtgattatgaatcttaagaaatacgaatactggtttatagtgggaagccaggacctttacggggatgaaacgctaaaacaggccgccggcaacgcccgcattatggcggaaggattcaacaaggatcctctgctttcgggtacggtcgtgttgaaacctacggcgataacgcctgacgcgatacgcggcctttttgaggaagcgaacgcatcgaacagctgcgccggcgtcataacatggatgcatactttttcgccctcaaaaatgtggatacaggggcttgcgctcaaccgcaaaccgcttttacatcttcatacccagtttaacagggacattccctggtccacaatagacatggattttatgaacctgaaccagtcggcgcacggcgaccgtgaacacggttatatccacgcgcgaatgcggctgccccgcaaagtagtcgccggattttggcaggacaaggaactgcgccgccggatagacgtgtggatgcgggccgccgccgcgagaaaagacggcatggattccaccgttatgcggctgggggacaatatgcgggaagtggcggtaaccgaaggcgacaaggtcgaggctcaaatcaaatttggctggcaggtgaacacatggggcataggcgaccttgccgcccgttacgcgaaaatcagcgatacgagggcggaaaaactggcggaagaatacgcctctttatacgagtttgcccctgatcttaaacagggcggcaatgccgtaggcgcgatgctgaacaggcaaaaatag

SEQ ID NO: 20886 - protein, 259 aa, Unknown
  Obtained from environmental sample
  DOMAIN (2)...(259): L-arabinose isomerase
  misc_feature (1)..(259): Xaa is any amino acid
MIMNLKKYEYWFIVGSQDLYGDETLKQAAGNARIMAEGFNKDPLLSGTVVLKPTAITPDAIRGLFEEANASNSCAGVITWMHTFSPSKMWIQGLALNRKPLLHLHTQFNRDIPWSTIDMDFMNLNQSAHGDREHGYIHARMRLPRKVVAGFWQDKELRRRIDVWMRAAAARKDGMDSTVMRLGDNMREVAVTEGDKVEAQIKFGWQVNTWGIGDLAARYAKISDTRAEKLAEEYASLYEFAPDLKQGGNAVGAMLNRQK

SEQ ID NO: 20887 - DNA, 525 bp, Unknown
  Obtained from environmental sample
  misc_feature (1)..(525): n is a, c, g, or t
atgattattcgggcggccaagggcgcgacagcggtccactgccttatcagcaaccttaaactatccgcaggctgggcgcgggtgacaagaatgcaggcgcacgggattaacgtggcgctgagcacggacggggcctgctccaacaataacctcgatttgttcgaggagattaaggccgccgcgttattgcaaaaacacctgacaaaggatcctaccgcgctgcccgcatacgaggcaatcaaactggctacggtaaacggcgcgattgggcaaggccgcgaaaatgagaccggaaaaatcgcggttgattatgacgccgaccttatcatgctgaaccttgattcgccccacctgttcccgcttaacgagccttgctcggccgtggcatactccgcaagaggcagcgacgtatgcctgacaatggtacacggtaaaatcctctacgaagacggcgagtacaaaaccctcgatctggaaaaaatccgtcacgaggtggacaactacgtgattccccgattgaaatag

SEQ ID NO: 20888 - protein, 174 aa, Unknown
  Obtained from environmental sample
  misc_feature (1)..(174): Xaa is any amino acid
MIIRAAKGATAVHCLISNLKLSAGWARVTRMQAHGINVALSTDGACSNNNLDLFEEIKAAALLQKHLTKDPTALPAYEAIKLATVNGAIGQGRENETGKIAVDYDADLIMLNLDSPHLFPLNEPCSAVAYSARGSDVCLTMVHGKILYEDGEYKTLDLEKIRHEVDNYVIPRLK

SEQ ID NO: 20889 - DNA, 417 bp, Unknown
  Obtained from environmental sample
  misc_feature (1)..(417): n is a, c, g, or t
ttgacctttacaggctgggatattaaatgtcaaactggtcccngcgttgacaacgcaattcaaaaacgggcggctcacgccgcgcattaccgtgaaatgcttaaaaacattaccggtattaaactgcctgtcattaaagatggcaataaagaagtgaactatgtgttttgtataaaagcggaaaagcgcgacgctcttgaaaaatatctgcaatcaaaagaaatcggtacgtcagtttactacccgcttccgcttcatctgcaaagatgttttgagtatttagactataaaaaaggcgattttcccatagcggaaaaattatgcgaaaccgtgttggcgcttcccatgtttcctgaattgacagaggatgaagtcagttttgtgtgcgaaagcgtaaaagagttttatagaaaatga

SEQ ID NO: 20890 - protein, 138 aa, Unknown
  Obtained from environmental sample
  misc_feature (1)..(138): Xaa is any amino acid
MTFTGWDIKCQTGPXVDNAIQKRAAHAAHYREMLKNITGIKLPVIKDGNKEVNYVFCIKAEKRDALEKYLQSKEIGTSVYYPLPLHLQRCFEYLDYKKGDFPIAEKLCETVLALPMFPELTEDEVSFVCESVKEFYRK

SEQ ID NO: 20891 - DNA, 504 bp, Unknown
  Obtained from environmental sample
  misc_feature (1)..(504): n is a, c, g, or t
atgagcgaaaataactcctatttcgtccatgaatccagttatgtagacgaaggcgctgagattggcgaaggcacgaagatatggcatttttgccatattatgcccggcgctaaaatcggcaaaaattgttccattggacaaaatgtgaatgtaggttcccgcgcaattatcggaaatggagtaaaaatacaaaacaatgtttctgtatatgatgatgtaattatcgaagatgacgtattttgcggcccatcctgcgtgtttaccaatgtgataaacccgcgcgcctttgtggaacgtaaacatgaatataaaaaaaccatagtaaaaaaaggcgcaagtatcggtgcaaacgcgacaattgtctgcggcattaccatcggagagtacgcgcttatcggcgcgggcagcgtagtaacgcgggatgtgcccgcttacgcgcttgtatacggaaatccggctaaagtacacgggacggtaaatgagaatggggaaaagtatgagtga

SEQ ID NO: 20892 - protein, 167 aa, Unknown
  Obtained from environmental sample
  misc_feature (1)..(167): Xaa is any amino acid
MSENNSYFVHESSYVDEGAEIGEGTKIWHFCHIMPGAKIGKNCSIGQNVNVGSRAIIGNGVKIQNNVSVYDDVIIEDDVFCGPSCVFTNVINPRAFVERKHEYKKTIVKKGASIGANATIVCGITIGEYALIGAGSVVTRDVPAYALVYGNPAKVHGTVNENGEKYE

SEQ ID NO: 20893 - DNA, 756 bp, Unknown
  Obtained from environmental sample
  misc_feature (1)..(756): n is a, c, g, or t
gtggttgcggagaacaaccaaaaagcctctcaggcggagatagaggccactcagatcgttgaaatccgcaaagccgaagcgtttcaaaaggtaggcgagaggaaagccgagtcggagaagaatgtgggaatagcggaggagaagtccaaacaagaggtgcaggaagaggctaagctcaccaaaacgaaggaaatggcggtatttgaggtcgcgaccgttcgcaaggcggagattgagaaaaaggcggtgatcgtaaatacggaagcgcaaaaagagaccgcgataataaaagcggaaggagaccggcagagcgttatagtgagatcggagggagaccggcagagcgttatcgtaaagtcggaaggcgagaaggtatcggccgagaatatttcgactgcgatcaaggctaagggatttgccgaagccgacgtaatacagaaaaccaagatggcggaagcggagggtatcaaggcgaccacgttggcgcaagcggagggcgagaaggcgatgcagctggcgtccgtcaccgcccaaaaggagttggcggcggccatcggcgagaaccagggctatcagcagtacctgataacgatcaggcaggtggaggcgcagcaggggataggggtcgagcaggctaagaatatcggccacgccgatataaagataatatccaacgccgggacccttgaggagggcataagcggggcgaccaagttgttcggctccagctcgggaagaaatacccgcgacgcttga

SEQ ID NO: 20894 - protein, 251 aa, Unknown
  Obtained from environmental sample
  misc_feature (1)..(251): Xaa is any amino acid
MVAENNQKASQAEIEATQIVEIRKAEAFQKVGERKAESEKNVGIAEEKSKQEVQEEAKLTKTKEMAVFEVATVRKAEIEKKAVIVNTEAQKETAIIKAEGDRQSVIVRSEGDRQSVIVKSEGEKVSAENISTAIKAKGFAEADVIQKTKMAEAEGIKATTLAQAEGEKAMQLASVTAQKELAAAIGENQGYQQYLITIRQVEAQQGIGVEQAKNIGHADIKIISNAGTLEEGISGATKLFGSSSGRNTRDA

SEQ ID NO: 20895 - DNA, 633 bp, Unknown
  Obtained from environmental sample
  misc_feature (1)..(633): n is a, c, g, or t
gtgccggatttggtagtgtctactgtagaagtcgccttaactgtaagacttgtcgcggtttctccggcggctacggttaagaggccgccgttagtggtaatgctggttccagatattccgccagttaccgtccatgtaacagtctgcgccgggctattggttccggctaccgtcgcggtaaacgtctgtgttccgcccttggttacgctcgcggttgcggggcttaccgtaacgcttgtgaccgtgggggcgggcgcggtaaccgtaactgttgccgtgccggatttggtagtgtctactgtagaagtcgccttaactgtaaggcttgtcgcggtttctccggcggctacggttaaggttccgttagttgcaatgctggttcccgatatgccgcctgttaccgtccatgtaacagtttgcgccgggttgttggttccggctaccgtcgcggtaaacgcctgtgtcgcacctttggttacgctcgcagtcgcggggcttacggttacgcccgtgactgtagcgcttgcaaccaaaaccactgtagttgccgcgctggttacgctgcctgagtatcctgttcgggtaactgttacttttatgtatttgtctttatcacccgcaaccaatgtataa

SEQ ID NO: 20896 - protein, 210 aa, Unknown
  Obtained from environmental sample
  misc_feature (1)..(210): Xaa is any amino acid
MPDLVVSTVEVALTVRLVAVSPAATVKRPPLVVMLVPDIPPVTVHVTVCAGLLVPATVAVNVCVPPLVTLAVAGLTVTLVTVGAGAVTVTVAVPDLVVSTVEVALTVRLVAVSPAATVKVPLVAMLVPDMPPVTVHVTVCAGLLVPATVAVNACVAPLVTLAVAGLTVTPVTVALATKTTVVAALVTLPEYPVRVTVTFMYLSLSPATNV

SEQ ID NO: 20897 - DNA, 747 bp, Unknown
  Obtained from environmental sample
  misc_feature (1)..(747): n is a, c, g, or t
ttggttgcgggtgataaagacaaatacataaaagtaacagttacccgaacaggatactcaggcagcgtaaccagcgcggcaactacagtggttttggttgcaagcgctacagtcacgggcgtaaccgtaagccccgcgactgcgagcgtaaccaaaggtgcgacacaggcgtttaccgcgacggtagccggaaccaacaacccggcgcaaactgttacatggacggtaacaggcggcatatcgggaaccagcattgcaactaacggaaccttaaccgtagccgccggagaaaccgcgacaagccttacagttaaggcgacttctacagtagacactaccaaatccggcacggcaacagttacggttaccgcgcccgcccccacggtcacaagcgttacggtaagccccgcaaccgcgagcgtaaccaagggcggaacacagacgtttaccgcgacggtagccggaaccaatagcccggcgcagactgttacatggacggtaactggcggaatatctggaaccagcattaccactaacggcggcctcttaaccgtagccgccggagaaaccgcgacaagtcttacagttaaggcgacttctacagtagacactaccaaatccggcacggcaacagttaccgtttaccgcgcccgcccccacggtcacagcgttacggtaagccccgcacccgcgagcgtagcccaaggcgcgacaaagggcttttcccgccaccggtaccggaactaa

SEQ ID NO: 20898 - protein, 248 aa, Unknown
  Obtained from environmental sample
  DOMAIN (128)...(212): Bacterial Ig-like domain (group 2)
  misc_feature (1)..(248): Xaa is any amino acid
MVAGDKDKYIKVTVTRTGYSGSVTSAATTVVLVASATVTGVTVSPATASVTKGATQAFTATVAGTNNPAQTVTWTVTGGISGTSIATNGTLTVAAGETATSLTVKATSTVDTTKSGTATVTVTAPAPTVTSVTVSPATASVTKGGTQTFTATVAGTNSPAQTVTWTVTGGISGTSITTNGGLLTVAAGETATSLTVKATSTVDTTKSGTATVTVYRARPHGHSVTVSPAPASVAQGATKGFSRHRYRN

SEQ ID NO: 20899 - DNA, 981 bp, Unknown
  Obtained from environmental sample
  misc_feature (1)..(981): n is a, c, g, or t
ttgccggggaccccgtcgttgatatcattcgggggcggttccccgggtaactcggtccttccggtcgacatcgtagacgagctttacggcgcgctgtccacccaggcgaagcgggtcgccatgcagtacggggcaacggacgggtatcagccgctcatcgcggagatcgcccgatatttggagtctaagggcatcggcatggacggtcagggtttaatcgtgaccaccggggcgcagcaggccataaacctcgtcgccaaggttttcttagaccccggcgacgtagtcgtcaccgagtaccccagtttcataggcgcgctggccgcgttcaagtcttacggggctgagaccgtcggcgtgccgatggacggcgacgggatcgtcgtccccgaactccttaaaacgctcgaccgcttggggaagaaggccaaaatactctacctcacgccctacttccacaaccccgccggaataatttacggcgcggagcgcaagagggagctcttaggcgctcttaagggccgcgacataattctgcttgaagacgacccctacggcgagctttacttcgacgccgccgacaagcccctcaccgcgaccatgatggccatgccgaaccatccggtagatatttgctacacgggttctttcgcaaaaatattcggccccggaatgcgcctcggctggctatgcgcgccgttggaggtaatagacaaatgccagctcgccaagcaatcgatggacgcgtgctccccgacgttcacgcaggtgcttgccgccgagttcctgtccaaaaacaagatgcccgcctacttggagggcctccgcacggcctacaagcgccgcgcgggaatcatgttgaacagtctaaaagagctgatgccgtccggcgtgaactggaccgtcccgcgcggcggcttctacatctgggtaacgctgccggagtacatgaacgcctccgangtttccaaaaaaccttga

SEQ ID NO: 20900 - protein, 326 aa, Unknown
  Obtained from environmental sample
  DOMAIN (5)...(326): Aminotransferase class I and II
  misc_feature (1)..(326): Xaa is any amino acid
MPGTPSLISFGGGSPGNSVLPVDIVDELYGALSTQAKRVAMQYGATDGYQPLIAEIARYLESKGIGMDGQGLIVTTGAQQAINLVAKVFLDPGDVVVTEYPSFIGALAAFKSYGAETVGVPMDGDGIVVPELLKTLDRLGKKAKILYLTPYFHNPAGIIYGAERKRELLGALKGRDIILLEDDPYGELYFDAADKPLTATMMAMPNHPVDICYTGSFAKIFGPGMRLGWLCAPLEVIDKCQLAKQSMDACSPTFTQVLAAEFLSKNKMPAYLEGLRTAYKRRAGIMLNSLKELMPSGVNWTVPRGGFYIWVTLPEYMNASXVSKKP

SEQ ID NO: 20901 - DNA, 387 bp, Unknown
  Obtained from environmental sample
  misc_feature (1)..(387): n is a, c, g, or t
atgggccaaaatcacaagctctatctggctgtagtcaacggaaatcaaaagacagccgggaccggcaataaaggcctcgcggatacggcggccttcctcggcgcggatggggatattctgcagattcggctcccggctggaaaggcggcctgtcgccgttccgcactggtcaaaatttgtgtgcagccttttcccgttgtccgccatgcctgccagggtgtcaacataagtggatttcagctttgcaagagtacggtgccggagtatcagacagggaagcggatcctcgcgggcaagctcctcaagggtcgcggcgtcggtggaatagccggtcttcattttttttaccggcttcagcttgcgctcggtaaaaagcacctcctgtaa

SEQ ID NO: 20902 - protein, 128 aa, Unknown
  Obtained from environmental sample
  misc_feature (1)..(128): Xaa is any amino acid
MGQNHKLYLAVVNGNQKTAGTGNKGLADTAAFLGADGDILQIRLPAGKAACRRSALVKICVQPFPVVRHACQGVNISGFQLCKSTVPEYQTGKRILAGKLLKGRGVGGIAGLHFFYRLQLALGKKHLL

SEQ ID NO: 20903 - DNA, 681 bp, Unknown
  Obtained from environmental sample
  misc_feature (1)..(681): n is a, c, g, or t
atgggcccgccggcggcagccgcagtgctgaaagagtgcctgtaccggggcgcggattttaccgccctggtgtccgaccggggttttgccggcgcggatacccttgccacctcttacgcgctcaaatgcgccatcaacaaaatcggcgattttgacctggtgttgggcgggcggcaggcgattgacggcgatactgcccaggtaggccctcaaacggcggaaaaactgggtatcaaccagattacctgcgtttccaaaatcgaatcgatagacccctcaaaaaaagaaattattgccattcgttcaatagaaggcggctgggaaaaggtaaaggcaaaactgcccgttctgctgacctttaccgaagaaggcgaaacgccgcggcccgcttccgctatcaagaccatgacctataaaagggcggctcctgtttccggcggagcgggttctcccagtgacccattcgccgaaggtacgcagaccgccaatccgatggcgttatgggatattgccgcgattaacgccgacccgctgcagtgcggtctttcaggttcgccgaccaaggtgaagcatatcaattccgtggtgttgaccgccgcggatatcaggtatatcgatccgggcgaagccggagtcagcgaactgatccacggccttatcgccgatcatacatttggctaa

SEQ ID NO: 20904 - protein, 226 aa, Unknown
  Obtained from environmental sample
  DOMAIN (1)...(158): Electron transfer flavoprotein domain
  misc_feature (1)..(226): Xaa is any amino acid
MGPPAAAAVLKECLYRGADFTALVSDRGFAGADTLATSYALKCAINKIGDFDLVLGGRQAIDGDTAQVGPQTAEKLGINQITCVSKIESIDPSKKEIIAIRSIEGGWEKVKAKLPVLLTFTEEGETPRPASAIKTMTYKRAAPVSGGAGSPSDPFAEGTQTANPMALWDIAAINADPLQCGLSGSPTKVKHINSVVLTAADIRYIDPGEAGVSELIHGLIADHTFG

SEQ ID NO: 20905 - DNA, 897 bp, Unknown
  Obtained from environmental sample
  misc_feature (1)..(897): n is a, c, g, or t
atgctcggtcttactccctttaaatacttgccaaagccaatgcaaacaatactgctgctctgtgcggttacttatttgctaaaatgggttggtataggtggttatattttgttatacggagcctttataccaagccggacatacgagctttggcgttttttgagctacgcatttgtgcactacgattttatgcacctcctattcaatatgcttatgttctggatgttcgggacggaggtctgcaaaagcattggcgaaaagaatttcaccgccctttatttaatatcagcggtttttgcgggcatattcagcatacctttctacagttttggaattatgggaaacaaccctataataggagcatctggagcgctttttgggattatggcagcttacgcatttctgttccccgatagaactatcctgatgttttttgtaattcccatgagggtaaaatacgctatatggatattcatagccatagatttgtttatggcaaacagcggcgatggcatagcgcattatatgcacttgggtggaataatatcgggctatttatttatgctgggttggtctaaaaatatctccttaaaatctttttttgtaccgccaaaaaaacaggaaacttattcaagggaatttttcagagaacaggcaaagaaaaatgaacctcctccgctggaaggcgaactttacaaaggcaattccaacacaaaagaggaaaggttaaacgaaatcttggaaaagataaaccatagcggattgcaatctctaaatcaagaagagcgtgattatctgcaatggttttgggcacaaaacaaaagaagggggttaaatgaaacaagcagttggtgttggcgcggctttgatggacttggtgactacggttaccgatga

SEQ ID NO: 20906 - protein, 298 aa, Unknown
  Obtained from environmental sample
  DOMAIN (44)...(196): Rhomboid family
  misc_feature (1)..(298): Xaa is any amino acid
MLGLTPFKYLPKPMQTILLLCAVTYLLKWVGIGGYILLYGAFIPSRTYELWRFLSYAFVHYDFMHLLFNMLMFWMFGTEVCKSIGEKNFTALYLISAVFAGIFSIPFYSFGIMGNNPIIGASGALFGIMAAYAFLFPDRTILMFFVIPMRVKYAIWIFIAIDLFMANSGDGIAHYMHLGGIISGYLFMLGWSKNISLKSFFVPPKKQETYSREFFREQAKKNEPPPLEGELYKGNSNTKEERLNEILEKINHSGLQSLNQEERDYLQWFWAQNKRRGLNETSSWCWRGFDGLGDYGYR

SEQ ID NO: 20907 - DNA, 462 bp, Unknown
  Obtained from environmental sample
  misc_feature (1)..(462): n is a, c, g, or t
atgggattatttaattcgataaatacggcagccacaggcttaagcgcggacagggtaaggctggacgtaatagcagataacatggcgaatgttaataccacgcggaccaacgaaggcggccctttcaggcgcagccgcgtcatcatgcgcccgagggtggacagcccctactggcgctctccgtttcttccggaatccatggataacggaatcgggcgcggagtgcgggtttcggaaattcaaaaggattattcaacagagaaccgactggtctgggatcctactcaccctgacgcgataaaatccggcgacagaaaaggttatgttgaaatgccgaacgtggacgtggttaccgagatggtggacatgatttccgcctcgcgttcttacgaagcgaacgcggcgataatagaaggttcaaaggcgatgtttttgcgcgctttggacataggttcaagatag

SEQ ID NO: 20908 - protein, 153 aa, Unknown
  Obtained from environmental sample
  DOMAIN (7)...(37): Flagella basal body rod protein
  misc_feature (1)..(153): Xaa is any amino acid
MGLFNSINTAATGLSADRVRLDVIADNMANVNTTRTNEGGPFRRSRVIMRPRVDSPYWRSPFLPESMDNGIGRGVRVSEIQKDYSTENRLVWDPTHPDAIKSGDRKGYVEMPNVDVVTEMVDMISASRSYEANAAIIEGSKAMFLRALDIGSR

SEQ ID NO: 20909 - DNA, 393 bp, Unknown
  Obtained from environmental sample
  misc_feature (1)..(393): n is a, c, g, or t
gtggatttactgcaccgcgcaatggacgcgaatactgtgcgccgaagcgtaattgcaaacaacatcgccaatgccacggttccaaactttaaaagatcgaacgtaaattttgaaagcgagcttaaaaaggcgctggattctgaaaaagaaagaccggctttggaactgaagatgaccaattccaaacatatccccaactggaaggaaagggattacagggacgtacaggtgcgcagggtacttgattataccagcacatataacaacaacggaaacaatgttgatccggaacaggaattaatgcttgcgaaccggaaccagatgacatatacgcttttggcccagtccgcggcgtttgaattcagccaaatcaatcaggtgttaagagggtaa

SEQ ID NO: 20910 - protein, 130 aa, Unknown
  Obtained from environmental sample
  DOMAIN (1)...(31): Flagella basal body rod protein
  misc_feature (1)..(130): Xaa is any amino acid
MDLLHRAMDANTVRRSVIANNIANATVPNFKRSNVNFESELKKALDSEKERPALELKMTNSKHIPNWKERDYRDVQVRRVLDYTSTYNNNGNNVDPEQELMLANRNQMTYTLLAQSAAFEFSQINQVLRG

SEQ ID NO: 20911 - DNA, 729 bp, Unknown
  Obtained from environmental sample
  misc_feature (1)..(729): n is a, c, g, or t
ttggtcttgtacgggatgggtatcgaccagttgaacgcgtttatcgacatgccctccgtctacatcacggtgggcggttccgttgcgtcgacgatcgcgtcgtttccgccagcccgtcttatgaatacggtggcggtcgctaaaaacgttctttttgtaaagagccaggcgccggtgacggtgatcacgcagatcatagagtttgcggagcaggcgcgccgcgagggtattttggcgctggagtctcgggctttggagatcaccgacgagttcatgaagcagggtatcgggctggcggtggacggcacggagcccgacctcatcagggagattctcgaaacggagatagggcacatggagagccgccacgaagacggcgcgaaggtattcgactttctgggggcggcggcgccctcgttcggtatgataggaacgctggtcggcctcgtgctgatgttgggcaacatgagcgacgtggcctctatcggcccgaatatggccgtggcgctcatcaccacgctctacgggtcgattctggcgaacatcgtttgcatacccttcgcggagaagttgaaagcgtattccgccaaggaggttatggtgaaggagctgatgctggaggggataatggcgctgcagtccggcgacaacccgcgtatcgtggcgcanaagctgagcgtcttccttgaaccggtgaatcgggcctcggtcttgaaggaaaagaagtaa

SEQ ID NO: 20912 - protein, 242 aa, Unknown
  Obtained from environmental sample
  DOMAIN (74)...(207): MotA/TolQ/ExbB proton channel family
  misc_feature (1)..(242): Xaa is any amino acid
MVLYGMGIDQLNAFIDMPSVYITVGGSVASTIASFPPARLMNTVAVAKNVLFVKSQAPVTVITQIIEFAEQARREGILALESRALEITDEFMKQGIGLAVDGTEPDLIREILETEIGHMESRHEDGAKVFDFLGAAAPSFGMIGTLVGLVLMLGNMSDVASIGPNMAVALITTLYGSILANIVCIPFAEKLKAYSAKEVMVKELMLEGIMALQSGDNPRIVAXKLSVFLEPVNRASVLKEKK

SEQ ID NO: 20913 - DNA, 729 bp, Unknown
  Obtained from environmental sample
  misc_feature (1)..(729): n is a, c, g, or t
atgagaaactatgaaattgaaacaaagcagcgcgttgaatttatacgaggtcttataaaatccgcaaacgcaaacggtgttgtttatggaaacagcggcggcaaagatagtgcgcttgttgggattctttgcaaaatggcgtgcaacgatacggttggcataattatgccctgtggttcaaaacgaaactacgagatagacaaaacagatggcatcgctcttgccaagcaatttgacatagctgttagagtcgttgatttgtctgcggtgaaaaacgaacttgttcgttccgtgagcgaaaatacaaagctcaccgattccgcaactgcaaatatagcaccacgtcttagaatgactacgctctattccatcgcagcaagcgagaacaggcttgtggcaggaacgggcaataggagcgaaggatatatgggctatttcaccaaatggggagacggtgcttttgactttaacccaattgcagaccttacagtcactgaaatttacgattttctgcgttttctaaaagcccctgaatttatcataagcaaagctccctcggctggtctttttgatggtcaaacagatgagagtgagatgggtgttagttatcgcagtatagatgattttttgttgaatggggttgtgagtgagaaggataaggctgtgatagagaaatttcacaaggttagtgagcataagcgagctggggtggtggtgtattctacttaa

SEQ ID NO: 20914 - protein, 242 aa, Unknown
  Obtained from environmental sample
  DOMAIN (7)...(237): NAD synthase
  misc_feature (1)..(242): Xaa is any amino acid
MRNYEIETKQRVEFIRGLIKSANANGVVYGNSGGKDSALVGILCKMACNDTVGIIMPCGSKRNYEIDKTDGIALAKQFDIAVRVVDLSAVKNELVRSVSENTKLTDSATANIAPRLRMTTLYSIAASENRLVAGTGNRSEGYMGYFTKWGDGAFDFNPIADLTVTEIYDFLRFLKAPEFIISKAPSAGLFDGQTDESEMGVSYRSIDDFLLNGVVSEKDKAVIEKFHKVSEHKRAGVVVYST

SEQ ID NO: 20915 - DNA, 645 bp, Unknown
  Obtained from environmental sample
  misc_feature (1)..(645): n is a, c, g, or t
atgttgcgcgatgttctacgcgaagccgttttgaacgctgtcgtgcacaaggactatagcacgggtaacccgattcacataaagatttacgatgacaaggttatcatatataacaactgccatataccgtcgaatattaagccggaaactctgttaacaggtgtccgctcgaatccccataacccactgattgcgaacgtgttttttcgttcaggtcagattgaggcgtgggggcgcggtattgagaagatgaaaaacggctgtattgccgatggtttaccggagccggaatttacgatactgccaaatgtgttctctatttgctttcatattcggaacaacaataaagcggcgaatagtgatgggatgaagagtgataatcaaggggataacttcggtataaacttcggtataaacttcggtataaacttcggtataaacttcggtataaatgaaacacaatgcaaaattgttgaattgatgattgccaacccagaaatagtcacagaacagatagctgaggctatcggtatcacaaagcgccagatagaggctaacatcagcaaattgaaggctttgggtatagtggaacgcataggcgcgcgcaagaagggccgatgggttgtcaagcaaaaaaataagtaa

SEQ ID NO: 20916 - protein, 214 aa, Unknown
  Obtained from environmental sample
  misc_feature (1)..(214): Xaa is any amino acid
MLRDVLREAVLNAVVHKDYSTGNPIHIKIYDDKVIIYNNCHIPSNIKPETLLTGVRSNPHNPLIANVFFRSGQIEAWGRGIEKMKNGCIADGLPEPEFTILPNVFSICFHIRNNNKAANSDGMKSDNQGDNFGINFGINFGINFGINFGINETQCKIVELMIANPEIVTEQIAEAIGITKRQIEANISKLKALGIVERIGARKKGRWVVKQKNK

SEQ ID NO: 20917 - DNA, 780 bp, Unknown
  Obtained from environmental sample
  misc_feature (1)..(780): n is a, c, g, or t
atggacgctgaaattactggcaaacaaggtggtagaacaagggattctggacagtatttccgaccatgggataggggatctgctaaaaaaaacgacattaagccatggctacagaaggaatggtgtatagcgacaccttccgccgaatatgttcagcggatggaagatgtattagaggtctataaatgtccgtataacgaaaaacggccgcttgtttgcattgatgagaccaatcggcaactcattggggaggcacaaaaaccccgccccgtccagcttggacaaggcgccttatatgactacgaatatgtgcgcaatggagtggctaatctctttatgatgttcgaaccccttgccggacagcgtgaagttatggtaactgaacggcgcactcaaaaagacttcgcccattgtctgcgatatttggctgaggagcggtatccggatgctgaaaaaatagttgtggtaatggacaatcttaacacccactcgctcgcttcattatacgccgcttttgaaccggagctggcgttgcctctcgcacaacggttcgaaatccatcatacccccaaacacggttcatggttgaacatggctgagctagaaatagggataataagcaggcagtgtcttggccggagaatagcgagtattgaaaagatggcaagcgaagtacaaacatgggcaaccgaacggaacaatcataaaaccaccgttcattggcagttcactgccgcagatgcccgcattaaactcaggcatttgtatccatgtttttag

SEQ ID NO: 20918 - protein, 259 aa, Unknown
  Obtained from environmental sample
  misc_feature (1)..(259): Xaa is any amino acid
MDAEITGKQGGRTRDSGQYFRPWDRGSAKKNDIKPWLQKEWCIATPSAEYVQRMEDVLEVYKCPYNEKRPLVCIDETNRQLIGEAQKPRPVQLGQGALYDYEYVRNGVANLFMMFEPLAGQREVMVTERRTQKDFAHCLRYLAEERYPDAEKIVVVMDNLNTHSLASLYAAFEPELALPLAQRFEIHHTPKHGSWLNMAELEIGIISRQCLGRRIASIEKMASEVQTWATERNNHKTTVHWQFTAADARIKLRHLYPCF

SEQ ID NO: 20919 - DNA, 717 bp, Unknown
  Obtained from environmental sample
  misc_feature (1)..(717): n is a, c, g, or t
atgctgcagattcggcaatggtgcgatgaactcggccttggggttaagggggttcatgccaccgccggagagtctaaaaacgacctgaaaggctacacctcagaaaacgaatttaaccggcttgcgggggtagaattggtcaagaaccgggtggatctagcctatattcttaacgccgaagcgattgtacttcatttcaatcagccctggcagcgtattgaacaagaaaaggattattgggataatttttaccgccgctccttacgctcctttgatgagcttgagccctactgcaaaacccggcgcatcaagctctgcgttgaaaatgaattccacgcttccccggcttattccttccgtatgtttgatacgctttttgaacgctatgacccggcgtacatgggactctgttttgatacaggccacgccaacatggcctgcaaagaaaactgccttgatttcgcggaacgctacaacgaccggcttttcatgatccatatccacgacaaccatggagaacacgacgagcacctgataccctttgagggcgggtttaattgggagggctttgcccgaactttggcccgttctccctaccgttttcccatcctcatggagccaagctgcagagtagaaggggacgactcggcctggctgcaaaaggcttttgaagtcggtaaccgtttctcaggcatggtggaaaaacaccgcgggtga

SEQ ID NO: 20920 - protein, 238 aa, Unknown
  Obtained from environmental sample
  DOMAIN (2)...(185): Xylose isomerase-like TIM barrel
  misc_feature (1)..(238): Xaa is any amino acid
MLQIRQWCDELGLGVKGVHATAGESKNDLKGYTSENEFNRLAGVELVKNRVDLAYILNAEAIVLHFNQPWQRIEQEKDYWDNFYRRSLRSFDELEPYCKTRRIKLCVENEFHASPAYSFRMFDTLFERYDPAYMGLCFDTGHANMACKENCLDFAERYNDRLFMIHIHDNHGEHDEHLIPFEGGFNWEGFARTLARSPYRFPILMEPSCRVEGDDSAWLQKAFEVGNRFSGMVEKHRG

SEQ ID NO: 20921 - DNA, 540 bp, Unknown
  Obtained from environmental sample
  misc_feature (1)..(540): n is a, c, g, or t
ttgcgacaaaattggcgagcaaaaaatagatatagttacaacaaataccggggaagaagccattttcaggctggctgtcgcggaaggcattcagttacaatgaatcaaatacatattgatatattgcgagaaaatctttatgcgcttaatttaagcgaaaactgggtacaatggtcatacgaacgagctatagaaattaaaaagaaagacgatttcaacgctgaggaatttgcccaacttgaagtattaacatcacgatttgcaaggacagccgatttgctggtaaacaaagtgttacgaagcatagatattgttgaatctgaagacataggcactataattgatataatgaaccgcgcggaaaaacgcggcattgtttcatcagctgaaatattgcacaccatcaaggacttaagaaacaatattgcacatgaatacaaaattgatgaaataactaatttttttacagatgtaaaagaaaatacccctatattgattgatataataaaaaaagtaaatgaatattgtaagaaatattaa

SEQ ID NO: 20922 - protein, 179 aa, Unknown
  Obtained from environmental sample
  misc_feature (1)..(179): Xaa is any amino acid
MRQNWRAKNRYSYNKYRGRSHFQAGCRGRHSVTMNQIHIDILRENLYALNLSENWVQWSYERAIEIKKKDDFNAEEFAQLEVLTSRFARTADLLVNKVLRSIDIVESEDIGTIIDIMNRAEKRGIVSSAEILHTIKDLRNNIAHEYKIDEITNFFTDVKENTPILIDIIKKVNEYCKKY

SEQ ID NO: 20923 - DNA, 495 bp, Unknown
  Obtained from environmental sample
  misc_feature (1)..(495): n is a, c, g, or t
atggcggagaatttgaattatcaaccgccgaaaggcaactcgtggtgttacggcaacaataatgccaattgcaacaaatacggcaggttatacaattggaacaccgcgatgacggtctgtccgtcgggctggcacttgccatcgcgtggggagtgggagactttggctgatctcgcaggcgatatcagtacttataactatggtataaacaatgcggggaagatgttgaaagcggcaagcggttggaattggtggtatggtgctgttagccaaagcggtgacggtacggatgattttggattttcggccttgcccggcggctaccgttactccgatggcaaattctacagtatcggcgactacggctcctggtggacggccacggagttcgggagtgacagcgcctacttccggaacatgaatagcttcggccacgtgttcgagttctaccccgccaagagcaacgggtactctgttaggtgcctccaggattga

SEQ ID NO: 20924 - protein, 164 aa, Unknown
  Obtained from environmental sample
  misc_feature (1)..(164): Xaa is any amino acid
MAENLNYQPPKGNSWCYGNNNANCNKYGRLYNWNTAMTVCPSGWHLPSRGEWETLADLAGDISTYNYGINNAGKMLKAASGWNWWYGAVSQSGDGTDDFGFSALPGGYRYSDGKFYSIGDYGSWWTATEFGSDSAYFRNMNSFGHVFEFYPAKSNGYSVRCLQD

SEQ ID NO: 20925 - DNA, 894 bp, Unknown
  Obtained from environmental sample
  misc_feature (1)..(894): n is a, c, g, or t
ttggtcgatcagctcgcggcggaattcccaaagatagtgctgaaaggcatgtttcggaattttaacagcgcggggaccacttatgtaaacagcaacggagtggaatttaactcatcgtcagagtggtatgatatgagcacaatgtactcggctaaagacggggccaggtcatcgtcgtttaactcgtactttgtgagaaccgcgtcactcgaaaccccgtttatggaacttggcatgcagcggcaattgctggaggaatcgtcaaaatcgcttgacccgcgcgtggtggacggaaagtttaccgggaaggtgcttttaagccccgccagtgacgacatgatctggggctcgctttttacaaacttcctgtgcgacacgccgcttattaagggcacaagccgctggaaggacgcgcttggctcaaaggtcgccgactccaaattaacgctgcgcctgtcgccgcttaaccctatgattgtcgccggcgaacgttttaccacagacggttttgaaagccaggacatggatataatccgcgacggtgtgctgaaaaatttcgcgctgaccttgtacggctcgcgaaaaaccggaaaaccgatagcgctcaattcagccttctacaacgttgaggtcgcggcgggcggcaaaccgcttaatgagattatcaagagcattgaccgcggcattctgatgaaccgtttttcaggcggctcgtccggctcaggcggcgaaatatccggcgtggcaaaaaacagtttcctgatagagaacggaaaagtgaccgacgccattaaagaaacgatggtgtcatttgacataacagaggtcctcgcgaacattacagacatatcatcggaacgctgccggaancggggtacctcgtgccgaatctga

SEQ ID NO: 20926 - protein, 297 aa, Unknown
  Obtained from environmental sample
  misc_feature (1)..(297): Xaa is any amino acid
MVDQLAAEFPKIVLKGMFRNFNSAGTTYVNSNGVEFNSSSEWYDMSTMYSAKDGARSSSFNSYFVRTASLETPFMELGMQRQLLEESSKSLDPRVVDGKFTGKVLLSPASDDMIWGSLFTNFLCDTPLIKGTSRWKDALGSKVADSKLTLRLSPLNPMIVAGERFTTDGFESQDMDIIRDGVLKNFALTLYGSRKTGKPIALNSAFYNVEVAAGGKPLNEIIKSIDRGILMNRFSGGSSGSGGEISGVAKNSFLIENGKVTDAIKETMVSFDITEVLANITDISSERCRXRGTSCRI

SEQ ID NO: 20927 - DNA, 669 bp, Unknown
  Obtained from environmental sample
  misc_feature (1)..(669): n is a, c, g, or t
atgactgctaacttaataggcgggatttctcttacaggtttaagaagcattgaactcagcggtggctctcccaaagatcctaatgctaaaaaaggcagttttatacaatcttcggttagcggattaaagcaaatcactgggcaggcagaaaacatagcggaaaaaattgaaggcatactgaacaacctgctctccatcacaagcgattacaatcaacaacaccttatgaatatcgtaacaaatttagacaacatctccgccaagatagatactttttttgttaaaaattcaaaagatatgaatgaaattcctgagcaggcaaaattgattttggaaaatgcgaacgctttggttttggaattgaaaaccacggagaaaagtgctacctctgcaatagcaaggctagataccctagctttgcgcacagacaggaaaattcaaaatctgcaaatagaagctgctataaaaagcataaacgatgcggcaaagtctgcggatcttttggcaaaaagaggagaccagcttatttatcgcaatcaggaagatttatctgtgacaattcgttatttaaaggaagcagtggaaaatttaaacgatgttagccgccaagttagggaaaatccttctctccttattcgcggtgaagaaaaacagcagagggtgaggtaa

SEQ ID NO: 20928 - protein, 222 aa, Unknown
  Obtained from environmental sample
  misc_feature (1)..(222): Xaa is any amino acid
MTANLIGGISLTGLRSIELSGGSPKDPNAKKGSFIQSSVSGLKQITGQAENIAEKIEGILNNLLSITSDYNQQHLMNIVTNLDNISAKIDTFFVKNSKDMNEIPEQAKLILENANALVLELKTTEKSATSAIARLDTLALRTDRKIQNLQIEAAIKSINDAAKSADLLAKRGDQLIYRNQEDLSVTIRYLKEAVENLNDVSRQVRENPSLLIRGEEKQQRVR

SEQ ID NO: 20929 - DNA, 534 bp, Unknown
  Obtained from environmental sample
  misc_feature (1)..(534): n is a, c, g, or t
ttgattgcttcatgtttattgcatgatattggaagggaggaacagtataaagatcaaaatatatgtcatgccgaagtaggcggaataatggcaaaagaatttctactaaaaaatggctggtctgaaaaagattctgatcatgtaaaaaattgtatttctacccatagatttaggggaaataatattccagagacattagaagcaaaaatattgtttgattcggataaacttgatgcggtaggctgtttaggtatttccagaactttaatgtataaaggcattgtaggtaataatttatatgaaataaaggataacaaaatatgttttggtgaaaataaaaatgataaagagacatttttaaaggaatataattttaaattaagaaatctctatgataatttttatacaaaagaggcaaccgaaatggctaaaaaacaaaaagaatgtgcacaattattttataaagatttaatagatcaaataatagaaatatataaatcaaaggaaataataaatgaatatattgttgaataa

SEQ ID NO: 20930 - protein, 177 aa, Unknown
  Obtained from environmental sample
  DOMAIN (1)...(80): HD domain
  misc_feature (1)..(177): Xaa is any amino acid
MIASCLLHDIGREEQYKDQNICHAEVGGIMAKEFLLKNGWSEKDSDHVKNCISTHRFRGNNIPETLEAKILFDSDKLDAVGCLGISRTLMYKGIVGNNLYEIKDNKICFGENKNDKETFLKEYNFKLRNLYDNFYTKEATEMAKKQKECAQLFYKDLIDQIIEIYKSKEIINEYIVE

SEQ ID NO: 20931 - DNA, 660 bp, Unknown
  Obtained from environmental sample
  misc_feature (1)..(660): n is a, c, g, or t
atgaagttgcttgttgttttaattcttatttttttttctcttgcaaattcacaagatttagattttgccgttgctggcgatacaataaaacctattcgccttgtggttataggctctggcgttgcaacttcatatacgataatttatttagcccttcttagagacgggtggtgggataaaatggaaccttttcgctttgaaccgctttattccgatatgcattatgcctcaaatttggataaattcgggcatttttatacgggtgttgttattggcgaattgcttgcgatgagctatgactgggcaggaatgaccccttttgcttctgcgctttgggctggcgccaccgttgggtttacgcagattattatagagtttaaggatggcttttctccttatggttatagcgtttgggatgcggcggctggcactttgggtggtttttacgctatggggaaaaggtttatcccagcgatgcagtatgttgattataaatttgcatacttgccaaattcacgagagtattggactaggagtagagaanagggcgaaacaggaatttggtttgatgattattacgggggaaaccaaacacattggctttcctttaaagttccccaatatcgccgcttgcttttgcattggctggggaatgcatga

SEQ ID NO: 20932 - protein, 219 aa, Unknown
  Obtained from environmental sample
  SIGNAL (1)...(17)
  misc_feature (1)..(219): Xaa is any amino acid
MKLLVVLILIFFSLANSQDLDFAVAGDTIKPIRLVVIGSGVATSYTIIYLALLRDGWWDKMEPFRFEPLYSDMHYASNLDKFGHFYTGVVIGELLAMSYDWAGMTPFASALWAGATVGFTQIIIEFKDGFSPYGYSVWDAAAGTLGGFYAMGKRFIPAMQYVDYKFAYLPNSREYWTRSREXGETGIWFDDYYGGNQTHWLSFKVPQYRRLLLHWLGNA

SEQ ID NO: 20933 - DNA, 729 bp, Unknown
  Obtained from environmental sample
  misc_feature (1)..(729): n is a, c, g, or t
atgaagggggagcccatattctccacccttggctggccggacgagctaaaggatttgggaaaagatgctgtagaattttctatgggtgtcgaaaataccaggtacttcagggcgagtatcggtcccgtatatgcaagaaacaaagcccaggtggccaggattattcttttggcagagattaccgacagtgttaatttaatgaaggaactggagaatgcggcctatattgacggccttacaggcctatataaccggaagcatttttttgaacttgcaaatgcagatgtagaaagggcgcagaggctaaatcaaactatttatacagccatgctggatctggatttttttaagaaagtaaatgatacctatgggcattctgccggggatatggtactaaagtcaactgccggggttattcggcagacaatcagggcctatgatcttttgtgccgttacggaggcgaagaatttgctcttttgcttttagacctggaggctattgaagccttaaatctggtggaaagaatccgggaaaacattgaatcaacaataactggctacgaaggcattgagataaagataacctgcagcatagggcttgcgaattttctgcggacggatactctggaatcgtcaataaaaaagtccgacgaagccctttatgccgccaagaattccggccgtaaccaggtgaagatgtttgagaagatgttagaaccgatagcttaa

SEQ ID NO: 20934 - protein, 242 aa, Unknown
  Obtained from environmental sample
  DOMAIN (70)...(230): GGDEF domain
  misc_feature (1)..(242): Xaa is any amino acid
MKGEPIFSTLGWPDELKDLGKDAVEFSMGVENTRYFRASIGPVYARNKAQVARIILLAEITDSVNLMKELENAAYIDGLTGLYNRKHFFELANADVERAQRLNQTIYTAMLDLDFFKKVNDTYGHSAGDMVLKSTAGVIRQTIRAYDLLCRYGGEEFALLLLDLEAIEALNLVERIRENIESTITGYEGIEIKITCSIGLANFLRTDTLESSIKKSDEALYAAKNSGRNQVKMFEKMLEPIA

SEQ ID NO: 20935 - DNA, 816 bp, Unknown
  Obtained from environmental sample
  misc_feature (1)..(816): n is a, c, g, or t
atgataccctttattaatcctgttcgacaacccgtcaattgccgtacaactcttttagttttattgtatactgttttaatgcgtaacaaattgacagatgaacttgccatatgcggaatgaacgcggtattagccgcggcggaatgtcatccgcagaagataaaccgcctcttcctgcgcgaggacaggcttaaatcttttaccggtatctgcaaacagcttgcggaacgcaagcgcccctacaaaatttgcgaagacgaagaacttgagcgtgtttgcaaaagcgtccaccatcagggcgttgtcgcaatgattgaagagcctgtaatcgagcctttaagcgaggaagacctggaactgtgggcaaacgaaaaaaaaaccggcgtcattcttaattcaatcgggaacgatcacaatcttggcgctatcgcaagggcggctgctttttttgacgtaagtttcctgatactgaacgaaaaggacgaggcttttaacggcgaagaaacgcgcccgcttgcgaagcatgcgcttacaacaagcgcgtaccgcgtcgccgaaggcggattcgaacatttaacagtgcgaaaaataaaaaatacagccgcctttttaaaagacgcttcanaattgcttttaacaatcgggacagacataagggcaagacggcgtatcagcgatttaaaaggaattgtaaagaccggaaaaaacagaaagggtatcgctcttgtccttggcacgaaaaaaccggctgccgcaaatgtgaagatcaatgtttatgctgctccgtattccggaaacagcatatcgacagcttaa

SEQ ID NO: 20936 - protein, 271 aa, Unknown
  Obtained from environmental sample
  DOMAIN (126)...(259): SpoU rRNA Methylase family
  misc_feature (1)..(271): Xaa is any amino acid
MIPFINPVRQPVNCRTTLLVLLYTVLMRNKLTDELAICGMNAVLAAAECHPQKINRLFLREDRLKSFTGICKQLAERKRPYKICEDEELERVCKSVHHQGVVAMIEEPVIEPLSEEDLELWANEKKTGVILNSIGNDHNLGAIARAAAFFDVSFLILNEKDEAFNGEETRPLAKHALTTSAYRVAEGGFEHLTVRKIKNTAAFLKDASXLLLTIGTDIRARRRISDLKGIVKTGKNRKGIALVLGTKKPAAANVKINVYAAPYSGNSISTA

SEQ ID NO: 20937 - DNA, 747 bp, Unknown
  Obtained from environmental sample
  misc_feature (1)..(747): n is a, c, g, or t
ttgttttgtatgacgtatccaggctcgccctgcatgggctataaaatatcgtttgaaaaaacatttctttccggcgaaccgttgagaaaccggactttatcaagctatgtgttaaatccagaagataacagagacattctgccggaagattatatttctgacattcttgacgcgcttcctgaaaaacaaaaagcccgctttcgtgatggtctttgggttaaagcggagggcgtgatttatgacaagtttgatgaaagcatgattgtcaagacttctgaccttcctgaccattttgaccgatacgccgccggacaggatttcggtttgaatattactttcgttaagattgcttggcttggtgatgtaatttacgtcatcgccgattatggtgcgttttgcatgactactcaatcatttaatgaggaggttacagcgcggggctggtttgattgtcctgatgaaatgggcttgcctgtgtactgcgaccctgctggcggggaacgaatacaggaagttaccgggggtgttaaagcaaataattctgttgacagcggtattgattttattaacgcaaaaattgaacgccgtcaattttttgtttctgaacaatgtaccggggttctttcggagatatgggactattgcagggacgaggcggggcagattgtcaaggtaaacgaccattatcttgacgctttgcgttatgcgatatttacggacgttcagcaaggggttgtattatcgtga

SEQ ID NO: 20938 - protein, 248 aa, Unknown
  Obtained from environmental sample
  misc_feature (1)..(248): Xaa is any amino acid
MFCMTYPGSPCMGYKISFEKTFLSGEPLRNRTLSSYVLNPEDNRDILPEDYISDILDALPEKQKARFRDGLWVKAEGVIYDKFDESMIVKTSDLPDHFDRYAAGQDFGLNITFVKIAWLGDVIYVIADYGAFCMTTQSFNEEVTARGWFDCPDEMGLPVYCDPAGGERIQEVTGGVKANNSVDSGIDFINAKIERRQFFVSEQCTGVLSEIWDYCRDEAGQIVKVNDHYLDALRYAIFTDVQQGVVLS

SEQ ID NO: 20939 - DNA, 687 bp, Unknown
  Obtained from environmental sample
  misc_feature (1)..(687): n is a, c, g, or t
ttgttcccatttatcaggcaaaaggtaaaggagaaccccgggtntttgacggaatgggaacttgagaagatcctccagcgtgggcttatattcatgtgccagccaaagggaacccatgtactggtaaactcgacaaggattccgttttttaagggcaatgacagcaaagagctttctgacgcaatggtatcgggaagaaagcagattgaggcgacgttccgttttatgaaagcgtttattcccggctttgaaaaagcctttattatggataccgcgagtatgctgggtatccgcgagtcaagacggattacaggcgattatgtttttaccgacgaggacgtgaacaactgcaacaaatttgacgacgcggtggtgagcaattttggcggcctggaaattcatgcggccacaggccagggcataaagatcagcgagccaaaaacgaacgatttttataacgttccctaccggagcataatcgcgaaggattttgacaacctgtatatggcgggccgctgtttcagcgccaaccacgccgccctctcggcggcccggaacatcgcctattgcatggctctgggacaggccgtgggaagtgccgccgcgcaactggtacacagagggaaaaagaacgttcgggaaatcgagataaaagccctacaaaaagaactggcttctattatgtag

SEQ ID NO: 20940 - protein, 228 aa, Unknown
  Obtained from environmental sample
  misc_feature (1)..(228): Xaa is any amino acid
MFPFIRQKVKENPGXLTEWELEKILQRGLIFMCQPKGTHVLVNSTRIPFFKGNDSKELSDAMVSGRKQIEATFRFMKAFIPGFEKAFIMDTASMLGIRESRRITGDYVFTDEDVNNCNKFDDAVVSNFGGLEIHAATGQGIKISEPKTNDFYNVPYRSIIAKDFDNLYMAGRCFSANHAALSAARNIAYCMALGQAVGSAAAQLVHRGKKNVREIEIKALQKELASIM

SEQ ID NO: 20941 - DNA, 606 bp, Unknown
  Obtained from environmental sample
  misc_feature (1)..(606): n is a, c, g, or t
gtgtcgctgctcagaggtctttcaaagattaacagagctgcttccaatatgaaccatgccgcgtttttggtgaccaagggagtccgatggtctctccggtgtcatgtccaatatctcccgtttatgttggagcagcaggattctttggagaaagagctttacaggcttgctaaagatatttggcctgataagttccgtcttcttcagacaatacctggtgtgggtgctaaaacagctgctgttcttctcgtgtgtgccaaaggcatggagtttgagaccagcggtcgtttgtcgtctttctgcggtgttgtttccaagaatagccagagcggggacactgtcaatatcaaaggtagaatagtcaaggttggcaatgcttacttgcgtggcttgctgtatatgtgcgctgagtctgctatatgctggaatcccgcttgttctgatctttattccaggttgagggcaaagggtaaggaaggcaatattccgatggttgccgtcatgcacaggttgcttaaaattgcttggggtgttgtccagagtggtgagccttacaggggtggcaaggttaaaaaaagcttgagggcttctgaggttgttagttag

SEQ ID NO: 20942 - protein, 201 aa, Unknown
  Obtained from environmental sample
  DOMAIN (43)...(150): Transposase IS116/IS110/IS902 family
  misc_feature (1)..(201): Xaa is any amino acid
MSLLRGLSKINRAASNMNHAAFLVTKGVRWSLRCHVQYLPFMLEQQDSLEKELYRLAKDIWPDKFRLLQTIPGVGAKTAAVLLVCAKGMEFETSGRLSSFCGVVSKNSQSGDTVNIKGRIVKVGNAYLRGLLYMCAESAICWNPACSDLYSRLRAKGKEGNIPMVAVMHRLLKIAWGVVQSGEPYRGGKVKKSLRASEVVS

SEQ ID NO: 20943 - DNA, 744 bp, Unknown
  Obtained from environmental sample
  misc_feature (1)..(744): n is a, c, g, or t
atggaaatggaacgtatcgtagaactgaaaaaagagataaacaaagtaataatcggccaagattatatgatagaccgaatcctcattggcctgcttgctggcggccatatattgctcgaaggcgttcccggacttgccaaatccctgaccgcaagcaccgtagcaaaatccgtcggtgtggacttcaaaagaatccaattcacccccgacctgctcccggcggacatattgggcacggaaatctatcaccaaaagaccggcgacttcattattaaaaaaggccccatcttcagcaatttcatacttgcagacgaaatcaaccgggcccccgccaaagtgcaatccgccctgctcgaggccatgcaggaaaaacaggtgaccatcggggaggcaacctaccccctagacaaccccttctttgtaatagccacgcaaaacccgctggagcaacagggcacctacccattaccagaagcccagcaggaccgtttcatgctgaaacttaaaatccagtaccccggcagggaggaggaacgcgaagtcgtgaaacgctacacgcgcgaggccttcacgaacccgaatgtaaacgcggtcatcagccgcaaggacatcgccgccatgcgcgctgctgccgagaacatctacctcgacgaaaaaatcgaaacgtatgtccttgacatcgtcttcaaaaccgcgagccctcgccctatatcgcctgcggcgcctcgccacgcgcgtccctaa

SEQ ID NO: 20944 - protein, 247 aa, Unknown
  Obtained from environmental sample
  DOMAIN (36)...(173): ATPase family associated with various cellular activities (AAA)
  misc_feature (1)..(247): Xaa is any amino acid
MEMERIVELKKEINKVIIGQDYMIDRILIGLLAGGHILLEGVPGLAKSLTASTVAKSVGVDFKRIQFTPDLLPADILGTEIYHQKTGDFIIKKGPIFSNFILADEINRAPAKVQSALLEAMQEKQVTIGEATYPLDNPFFVIATQNPLEQQGTYPLPEAQQDRFMLKLKIQYPGREEEREVVKRYTREAFTNPNVNAVISRKDIAAMRAAAENIYLDEKIETYVLDIVFKTASPRPISPAAPRHARP

SEQ ID NO: 20945 - DNA, 885 bp, Unknown
  Obtained from environmental sample
  misc_feature (1)..(885): n is a, c, g, or t
atgacaattcaacgcgatacaaaggtgctttttgcaattgcctttgcagttattgctgtcgcggtaattctgagtctggcaatccggtattctattgtgaaaccaatcgtcaaggtagccgatacccttaaaattgtggcggaaggcgatttgacgcggagtgtcaatgtcgattcgaaagacgaaataggtaaacttgcccatgactttaactatacggtgggaagaatcagaaaccttataagcacaataaaatataaaatcaacgggcttgatcacaccagttttgagctttccgtcaacatgggaaatacttcctcggctgtggagcagattaccacgaatctggacagcatgagaaacctgatggtcaagcaggaaaacggcgcggaagaagcgggcaaggcggtaggggatataaagatcaatattgacaatctaaaaaaaatgatagaagaacagaccgacagcgtaaacaggtcgtcctccgccattgaggaaatgactgccaatattaattcggtaacccgaacgcttgcagaaaacagtaaaaacgtaagtgtattgaccgaagcgtctgagaacggcaaaacaggccttcaattggttgcgcaggaaatacgggaaatagcccacgattccgaagggcttttggaaataaactcgttaatgaacaatatcgcgagccagactaacctgctttcaatgaatgccgcgattgaagcagcccacgccggagaagcggggaggggttttgccgtagtagccgatgaaatacgcaaactcgccgagtcatcaggtcagcagtcaaaaaccacagctgcgatgctcaaaaagattaaagcgtccatagacaatattaccaaatcctctgacgatgtttga

SEQ ID NO: 20946 - protein, 294 aa, Unknown
  Obtained from environmental sample
  SIGNAL (1)...(21)
  DOMAIN (152)...(294): Methyl-accepting chemotaxis protein (MCP) signaling domain
  misc_feature (1)..(294): Xaa is any amino acid
MTIQRDTKVLFAIAFAVIAVAVILSLAIRYSIVKPIVKVADTLKIVAEGDLTRSVNVDSKDEIGKLAHDFNYTVGRIRNLISTIKYKINGLDHTSFELSVNMGNTSSAVEQITTNLDSMRNLMVKQENGAEEAGKAVGDIKINIDNLKKMIEEQTDSVNRSSSAIEEMTANINSVTRTLAENSKNVSVLTEASENGKTGLQLVAQEIREIAHDSEGLLEINSLMNNIASQTNLLSMNAAIEAAHAGEAGRGFAVVADEIRKLAESSGQQSKTTAAMLKKIKASIDNITKSSDDV

SEQ ID NO: 20947 - DNA, 393 bp, Unknown
  Obtained from environmental sample
  misc_feature (1)..(393): n is a, c, g, or t
ttggcaaaaatttgcatatgtcttaccgcaaaaacaatacaaaaagatttggaaatactcgacaaataccgcaagtataccgatcttgcggaattgcgcgttgactgccttgatcctgatgaacgccttcacatacgccgttttcctgaacttgccgaattgcctgttatcctgacaataaggcgtgattcggacggaggttatttttccggcggcgaaggggcgagagtaagattacttgcgcacgggcttgcctttgcggaggccgacagaagaaaaaacttcgcgtacgtggatattgaagatgacatagaagtgcaaagcctggaagaagcggcaagaactttcggaacaaaaatatccgctcgtatcacatacggaaggaataattga

SEQ ID NO: 20948 - protein, 130 aa, Unknown
  Obtained from environmental sample
  misc_feature (1)..(130): Xaa is any amino acid
MAKICICLTAKTIQKDLEILDKYRKYTDLAELRVDCLDPDERLHIRRFPELAELPVILTIRRDSDGGYFSGGEGARVRLLAHGLAFAEADRRKNFAYVDIEDDIEVQSLEEAARTFGTKISARITYGRNN

SEQ ID NO: 20949 - DNA, 579 bp, Unknown
  Obtained from environmental sample
  misc_feature (1)..(579): n is a, c, g, or t
atgattattccggtttccgcgcttttggtttttaccaaagaatacagggttaggcggttggtcagttttttaaggcctcagtgggatccgcttggcgcggggtttcaggttaacgcgagcaaggacgccattgtttcaagcggtctatggggaaaaggcttcggggaaggaacgcgcaagttggcgagtattccagaaattcactcggattttgtttttagcgcgtatgtcgaagaaacgggatttattggcgttctgttgttttttgccttgtttgtaatttttgcgggttttggatataaagccgcattggacagcaagactttatttggaaaactgttagccgccggattaaccacatcaattgtgtttcaggctctgcttaatacggccgttgtttccggggcgcttcccgccaccggaataccgcttcctttcttttccgcaggcggctcttcgcttattaccactttgatttgcgcgggtttaataaccaatgtcgcaagaaataaatacgaagtttcaagcttaaaagtgaaatcaaattatgacgtatcggagggcgataatgattactga

SEQ ID NO: 20950 - protein, 192 aa, Unknown
  Obtained from environmental sample
  DOMAIN (1)...(173): Cell cycle protein
  misc_feature (1)..(192): Xaa is any amino acid
MIIPVSALLVFTKEYRVRRLVSFLRPQWDPLGAGFQVNASKDAIVSSGLWGKGFGEGTRKLASIPEIHSDFVFSAYVEETGFIGVLLFFALFVIFAGFGYKAALDSKTLFGKLLAAGLTTSIVFQALLNTAVVSGALPATGIPLPFFSAGGSSLITTLICAGLITNVARNKYEVSSLKVKSNYDVSEGDNDY

SEQ ID NO: 20951 - DNA, 867 bp, Unknown
  Obtained from environmental sample
  misc_feature (1)..(867): n is a, c, g, or t
gtgaaccagatgcttccggaggttgacaggcaggtgttcatccgcgcgctcggcgcctttgaattcctgggacgtgtgcaaacggggcactcgcacggcggcctcaggttcgccccctgccgtctcgccgtcgacgatgttgccgcgctcagcgccgacgaacataaacgcgataccgtgataatgccggacttttcagtcatcatcccgcaggaagtctcgccggcggagctatttgatttttctgtgatagggatactctccgctttcgacaaggtgtacaacgggcaaataacgaaggagtccgtctcaaacgcgctcagcgccggcgtggacgccgagcttttgcgcggttggctgcgtaagcgcaacgcggcggcgaacgttgtgaagacggtcgaggagtggataagggagttttgccgcctatacgtgagtcgcggcatagtgctagcctcctgcgacgagacggtcacgcggcagatagcggcgcttgaaccgctgcgcaagcacctgacggagatgaaggcgcacaccgtctttatgatcaagcaaggtagcgagcacaaggtgctcaacatgttggaaaggttgggcttcgacacgcgtatgccgggcggtgaggcggtaaatatagaaaagaacagccgcggcgccggtcgtcggtacgacagcgccgacatacctgccgatgacgaggatgcggaatccgcgtggcaagacgatgatacggacgacgatacccaagatcgtcaaacgccgagtggcttaaggcgcttcgcgccgcttacagatttcggcacagcgccggattcgccgaggcagaagacccgcaatgaccggacaaagtacgggtccggggcttaa

SEQ ID NO: 20952 - protein, 288 aa, Unknown
  Obtained from environmental sample
  misc_feature (1)..(288): Xaa is any amino acid
MNQMLPEVDRQVFIRALGAFEFLGRVQTGHSHGGLRFAPCRLAVDDVAALSADEHKRDTVIMPDFSVIIPQEVSPAELFDFSVIGILSAFDKVYNGQITKESVSNALSAGVDAELLRGWLRKRNAAANVVKTVEEWIREFCRLYVSRGIVLASCDETVTRQIAALEPLRKHLTEMKAHTVFMIKQGSEHKVLNMLERLGFDTRMPGGEAVNIEKNSRGAGRRYDSADIPADDEDAESAWQDDDTDDDTQDRQTPSGLRRFAPLTDFGTAPDSPRQKTRNDRTKYGSGA

SEQ ID NO: 20953 - DNA, 696 bp, Unknown
  Obtained from environmental sample
  misc_feature (1)..(696): n is a, c, g, or t
atggaagcccaccataccgaaggatcagtagaccgatcaatcttcaaaaacatatccccaattgaccatcgctactcgctttcggaagaatctctttttagcgccatggttccgtggatttcggaagaagcggcgctgagggcgtgcgtcaaggcggagatagcccttgttattgcccaccttgcagtccgtggaaaagccacgccggaaatcagggcacagcttgaaaaggcgggcaacagcgttgatccggccgaggtttacgctgaggaagaaaaaacccgccacaacatccgcgctttggtgaacgtgcttaaaaaaaagctccctgtggaatattcccctttgatacatcttggggctaccagcgtcgatattcttgacacaagcctcgcgtggcgaatccggggcgtgacccgcgaagtggcgttaccggagcttaaaaagctggagctgctcctctgcgatctggcggaaaaggaagcggagacgccgcaagttggcaggacgcacggtcagcacgcccttcccatcaccgtgggttttgccatggcggaatatgtttcgcggcttggcaagtccatccttgaaataaagcgccttgaaaaaaaccttaagggcaagcttgccggggcggttggttcttacaacgcgaccgccatgatcgttaaagaccccgaagagctgaacggctaa

SEQ ID NO: 20954 - protein, 231 aa, Unknown
  Obtained from environmental sample
  misc_feature (1)..(231): Xaa is any amino acid
MEAHHTEGSVDRSIFKNISPIDHRYSLSEESLFSAMVPWISEEAALRACVKAEIALVIAHLAVRGKATPEIRAQLEKAGNSVDPAEVYAEEEKTRHNIRALVNVLKKKLPVEYSPLIHLGATSVDILDTSLAWRIRGVTREVALPELKKLELLLCDLAEKEAETPQVGRTHGQHALPITVGFAMAEYVSRLGKSILEIKRLEKNLKGKLAGAVGSYNATAMIVKDPEELNG

SEQ ID NO: 20955 - DNA, 900 bp, Unknown
  Obtained from environmental sample
  misc_feature (1)..(900): n is a, c, g, or t
gtgaaattcattgccgataaatcggcggaaacattaaataaatatgatcttttaaaaatcaatcccaaagaaaaaaaaatacgccagtatatagcgtataccaaattgaattccgcaaacgcggttgtaataacaagtatcgaatacaacaaaatatttgaaggtattgccgctaccacaaggcgaaatatttatcttacaatcgccgtattaagcatatcaattattttcatttggttcttctctaaaacaatttccattccgcttaaaacattagcttccgccgcaagagaaattgagggcggaaaatttgatatggctttatattccaaagccaatgacgaacttggagttttaacaaaaagctttggaaaaatgtgttcggcgttaaatatttttggcagatttacaaataaagatatcgctgtaaaagcgatgcgcggagaaattaaacccggcggcttgccaaaacacggtactgttttcttttccgatattcgtgagtttacggcgaaatccgagaaatttaccaaattctttggggcggaagcttccgacaaaatcgttttttggctcaatcaatattttacgcaaatggttgactgcgtggaaaaaacaaacggctgtgtagacaaatttatcggcgacgccgtaatggctcactggggcactgcgtcctcggcaggcagtccgcgcaaggacgcttttaactgcgttaaggcggctcttatgatgcgtaaggctctctattttatgaacagggaacgcaaaaccggagaccccgccaatccctcaatccgtatcgggtgcggaattaattcaggcgttgtaacggccggtcagcttggcagtgatatgcgaatggagtatacggttataggcgatcctcggccgatctga

SEQ ID NO: 20956 - protein, 299 aa, Unknown
  Obtained from environmental sample
  DOMAIN (63)...(132): HAMP domain
  misc_feature (1)..(299): Xaa is any amino acid
MKFIADKSAETLNKYDLLKINPKEKKIRQYIAYTKLNSANAVVITSIEYNKIFEGIAATTRRNIYLTIAVLSISIIFIWFFSKTISIPLKTLASAAREIEGGKFDMALYSKANDELGVLTKSFGKMCSALNIFGRFTNKDIAVKAMRGEIKPGGLPKHGTVFFSDIREFTAKSEKFTKFFGAEASDKIVFWLNQYFTQMVDCVEKTNGCVDKFIGDAVMAHWGTASSAGSPRKDAFNCVKAALMMRKALYFMNRERKTGDPANPSIRIGCGINSGVVTAGQLGSDMRMEYTVIGDPRPI

SEQ ID NO: 20957 - DNA, 783 bp, Unknown
  Obtained from environmental sample
  misc_feature (1)..(783): n is a, c, g, or t
atgggggaaattgtcgcaggtgattatagcaagtttgcccatgaaggctgtcttgattcagtaacaaattatgaattatacaaaagtctttggtcaagttttcacgatcaaaatatttatgaacttgcttggacattgaaaagggaattttataatgacggtctttgtaaagaccttgccgtatataattttgcggataatcacgatgtaaaccgtgtcgcgtcttcattaaaaaatcaatccaatctttttccattatatggtttattattttgtgtgcctggtattccctcaatttattatggtagcgagtatggcgttttagggaaaaggggcgaatgggacgattatgagttaagacaggcatgggaagataattgggcagaatcaaatatcggcaagggactttttaaggaaatttgtcgtttttctaaattaaggcgtgaatcatatgcgttaaaaaatggtaattattgtgaattattagttgattatgaacaaatattcgctttttcaagggaaactaataatgaaataataattgtggcagtaaatgcgacacacaataataaaaaatgtattttaaataatgaacaaatacgatatgctaaatggtttgatttgcttttgggggaagaatatttttcaaataataatattcttgaattatcattacagtcttcatggttaaaaatattcaaaaaaaatatgaatataaagtacgaccccactgcacataacaaaacagttacagctttgctatgtgcaatgttggtcaaataa

SEQ ID NO: 20958 - protein, 260 aa, Unknown
  Obtained from environmental sample
  misc_feature (1)..(260): Xaa is any amino acid
MGEIVAGDYSKFAHEGCLDSVTNYELYKSLWSSFHDQNIYELAWTLKREFYNDGLCKDLAVYNFADNHDVNRVASSLKNQSNLFPLYGLLFCVPGIPSIYYGSEYGVLGKRGEWDDYELRQAWEDNWAESNIGKGLFKEICRFSKLRRESYALKNGNYCELLVDYEQIFAFSRETNNEIIIVAVNATHNNKKCILNNEQIRYAKWFDLLLGEEYFSNNNILELSLQSSWLKIFKKNMNIKYDPTAHNKTVTALLCAMLVK

SEQ ID NO: 20959 - DNA, 507 bp, Unknown
  Obtained from environmental sample
  misc_feature (1)..(507): n is a, c, g, or t
gtgtgctcgcacgtgccggaggatacgcgcatagagggcttcaacgagcacgtgcgcaacaaggcggcgcggattctcaccgagagcatggcgcgtagcgagaaattcacctcatccgtaaaggacgggattgacatacgcgaaacactgcgcaactggcacaccggcagcgtgtacgtgaaggagctgccgccggcgaaaaacaaagtcgacaccgtggtcatagttttcgacgacgatcacgatgacctctaccccaaccgcactacttggtacgccgagcacgttgacgagtctacgctcagcttctactctaccaaccccttcgacgacctgataggccccggcattgcgcgcagcgtctacggcggtctggggctactcttcccaccgcgcagcgtgcccaacatctttcggtgcgccgaagcggcccggcgtaccggctgcccggcgcaactcactgcgggatctatgatgttcgcaaggaaaaaaacgtggcctttctag

SEQ ID NO: 20960 - protein, 168 aa, Unknown
  Obtained from environmental sample
  misc_feature (1)..(168): Xaa is any amino acid
MCSHVPEDTRIEGFNEHVRNKAARILTESMARSEKFTSSVKDGIDIRETLRNWHTGSVYVKELPPAKNKVDTVVIVFDDDHDDLYPNRTTWYAEHVDESTLSFYSTNPFDDLIGPGIARSVYGGLGLLFPPRSVPNIFRCAEAARRTGCPAQLTAGSMMFARKKTWPF

SEQ ID NO: 20961 - DNA, 897 bp, Unknown
  Obtained from environmental sample
  misc_feature (1)..(897): n is a, c, g, or t
atgagcggcacctctctggacggcatggatgcggccctggtggagatagaaggtgcagggctctcaatgcgcgtaaaattcctggattttcttacgcttccatataatgatgagctacattcaattctaatcaaggcggtgatgggagaagaaggcgggagccgcctaatctgttgtctcaattttcttatgggacacattgcggcggaagcatgcctggaactctgcgggaaagccggaattaaacctacgatggttgattttgttggaagccacgggcagactgtctttcaccagaacgagcaggtttcttttggcggcaggccgatccgcggaaccttgcaaatcggcgaggcgtcgataatcgccgaagaaataggctgtccggtcgtaagtgatttcagggtcagtgatatggccgccggcgggcagggcgcccccttggttccctatacggagtacctgctctaccgtcatgaaagcaaaaccctggccctgcaaaacatcgggggtatcggtaacatcacccttcttcccgcggggcgcggtgcggctgacattgttgcctttgataccgggcctggaataatggttatagatgccatcgcccgctctcttttgggaacgccctgggacgacgagggacgcagcgccgccgccggcaaagttaacgcggggcttctggaatggatgctcgccagagacaaagattaccttgaaaagcgtccgccaaagagtaccggaagggagcgttacaacgatggctttgtccgtacgctgcttaaccgggcgcaggaagccgaccttgcgacaaatgacattctcgcaaccgttacgcgctacacagccgaaaacattttccgtggaataaaaaaaatctgtgtgcctcctccctga

SEQ ID NO: 20962 - protein, 298 aa, Unknown
  Obtained from environmental sample
  DOMAIN (1)...(298): Uncharacterised protein family (UPF0075)
  misc_feature (1)..(298): Xaa is any amino acid
MSGTSLDGMDAALVEIEGAGLSMRVKFLDFLTLPYNDELHSILIKAVMGEEGGSRLICCLNFLMGHIAAEACLELCGKAGIKPTMVDFVGSHGQTVFHQNEQVSFGGRPIRGTLQIGEASIIAEEIGCPVVSDFRVSDMAAGGQGAPLVPYTEYLLYRHESKTLALQNIGGIGNITLLPAGRGAADIVAFDTGPGIMVIDAIARSLLGTPWDDEGRSAAAGKVNAGLLEWMLARDKDYLEKRPPKSTGRERYNDGFVRTLLNRAQEADLATNDILATVTRYTAENIFRGIKKICVPPP

SEQ ID NO: 20963 - DNA, 465 bp, Unknown
  Obtained from environmental sample
  misc_feature (1)..(465): n is a, c, g, or t
atgccgctgcccgtaacaggcggcgatttggttgtcgctaccggcgctattcgcatggaaggaaccaccaaagaatatgtccccattgaatttcccgcggttgcaaacctcgatattacaaacgcacttgttaaagccgcaaagaaactgggagcgcaatggcatgccggaattgtacagtgtaaggattctttttatggtcagcacagccccgaccgtatgcccgccggttatgaactgatgagcaagtgggacgcgtggataaaagccggctgccttgcttcggagatggaaagctccaccctttatattgtcagtcagattcttggcgccagggcgggctgtgtgcttaatgttatttggaaccaggagcgtgagcgtaacggcatgagcaacccccactgccatgacaccagtcttgccatacaaaccgcggtagaggcggtacggattctaattatttaa

SEQ ID NO: 20964 - protein, 154 aa, Unknown
  Obtained from environmental sample
  misc_feature (1)..(154): Xaa is any amino acid
MPLPVTGGDLVVATGAIRMEGTTKEYVPIEFPAVANLDITNALVKAAKKLGAQWHAGIVQCKDSFYGQHSPDRMPAGYELMSKWDAWIKAGCLASEMESSTLYIVSQILGARAGCVLNVIWNQERERNGMSNPHCHDTSLAIQTAVEAVRILII

SEQ ID NO: 20965 - DNA, 333 bp, Unknown
  Obtained from environmental sample
  misc_feature (1)..(333): n is a, c, g, or t
atgttgtttgcagtgttggtgaaggttttttatatatcatcactgcataccggccaacacctgaaaagtggcaggatgggggaaaaaaaaggagaaaaacctatgaaatgtggaatttgtaaagcggagatggaagaagaaactgttacctatacagaagacattgagcaaagtgtcattgtagttcgccatgtcccggcatatgtctgtacggaatgtggaaacaaatggttcaacggaactgttgcatcccagcttgaaaaaattgttgagtcgtttgcttcttcatcatctgaggtttctattgttaattactcaaaatcggtagcataa

SEQ ID NO: 20966 - protein, 110 aa, Unknown
  Obtained from environmental sample
  misc_feature (1)..(110): Xaa is any amino acid
MLFAVLVKVFYISSLHTGQHLKSGRMGEKKGEKPMKCGICKAEMEEETVTYTEDIEQSVIVVRHVPAYVCTECGNKWFNGTVASQLEKIVESFASSSSEVSIVNYSKSVA

SEQ ID NO: 20967 - DNA, 339 bp, Unknown
  Obtained from environmental sample
  misc_feature (1)..(339): n is a, c, g, or t
atgggcgacggcgaggtttctggctgcggagcagaagcgccaggagaagttacccttaaaattagcgtgataaagggcaaggctctgcccacgccttttatctcaggcgaaaaggcctttatgacaatcgcgtcagcccagaccataggcgaggccattgacgaagccgcgctccggggagtcgagtttcttatgaacgaaacaggtatgacgcgggaagaagcggtctcgtttatatcgcttgcctgcgatgtcagggtctgccagatcgtcgatccgttaaaaaccgcccgcctcgaaatgccgaaggaattgcttggtcagatcagggggatataa

SEQ ID NO: 20968 - protein, 112 aa, Unknown
  Obtained from environmental sample
  misc_feature (1)..(112): Xaa is any amino acid
MGDGEVSGCGAEAPGEVTLKISVIKGKALPTPFISGEKAFMTIASAQTIGEAIDEAALRGVEFLMNETGMTREEAVSFISLACDVRVCQIVDPLKTARLEMPKELLGQIRGI

SEQ ID NO: 20969 - DNA, 561 bp, Unknown
  Obtained from environmental sample
  misc_feature (1)..(561): n is a, c, g, or t
ttggtttcttccgccagaaccgacgccaaccagcaggactggctggctgagatcaaaaaacttctggcaacgtcgcagtacaactggatcgtcatcaggaacgaagctaccgacgtttactatcccggcccggatgaaaccaccactcagtcacagagcggaacccttatcggacggatgggacccaacgccaaccagattcaggcggccatcggactcacgtccatggcaaccccggcgctcggttcccaattccaggcagccgcccggaagcccgacgcgacaagaatcgttcttaccggccttgctacaccgaacgcgattaaatcctacatcaagaacgcgaccaaccccatggacaacggggtactctgggattgcatggatctcggctatcttgccattcaggcagcataccagcttgcccgcggaaccatcaccaccaattcggcttcttttacggccggacggctcggcaaccgcagcatcaccaaccagatgatcgtccttggcgacgccctggttttcgacgttgctaacgtggatcggtataactactaa

SEQ ID NO: 20970 - protein, 186 aa, Unknown
  Obtained from environmental sample
  misc_feature (1)..(186): Xaa is any amino acid
MVSSARTDANQQDWLAEIKKLLATSQYNWIVIRNEATDVYYPGPDETTTQSQSGTLIGRMGPNANQIQAAIGLTSMATPALGSQFQAAARKPDATRIVLTGLATPNAIKSYIKNATNPMDNGVLWDCMDLGYLAIQAAYQLARGTITTNSASFTAGRLGNRSITNQMIVLGDALVFDVANVDRYNY

SEQ ID NO: 20971 - DNA, 597 bp, Unknown
  Obtained from environmental sample
  misc_feature (1)..(597): n is a, c, g, or t
ttgtcacgagtaatatataaaaaaagcgattgcaaaaaaatgaacagaataataatcattggcaacggttttgatttagcccatggcatagaaacacgctatcgggatttcattgatgatctttgggagaaagaaagaaaaagatttagtcctcataacattatttattgccctgattcaaaccctcgtttttctcatcaatacaatggcatttttattaaaatatatatgaaatcatcccttacatcaaaagatattgcatatggacacggatgtgattggtttaaaaatcttaatgaatatagagataagcaagtagaaacagaaaatgcgtttttaaaaaccattagtgaaaaaacacatttgcaaaaatgggtagacattgaagaagaatatttcagtgagttaaaaaaatgtttaaacgacaaaagaactggtgggataaagaaactcaacaaagaattttctgatgtaaagacgatcttggaagagtatttaaagaatttacaaaaaaacttttcttttaagaatacatttttctcacatttagcnaaaaacagtcacaatggaacccccattggcaacacgtttttctaa

SEQ ID NO: 20972 - protein, 198 aa, Unknown
  Obtained from environmental sample
  misc_feature (1)..(198): Xaa is any amino acid
MSRVIYKKSDCKKMNRIIIIGNGFDLAHGIETRYRDFIDDLWEKERKRFSPHNIIYCPDSNPRFSHQYNGIFIKIYMKSSLTSKDIAYGHGCDWFKNLNEYRDKQVETENAFLKTISEKTHLQKWVDIEEEYFSELKKCLNDKRTGGIKKLNKEFSDVKTILEEYLKNLQKNFSFKNTFFSHLAKNSHNGTPIGNTFF

SEQ ID NO: 20973 - DNA, 474 bp, Unknown
  Obtained from environmental sample
  misc_feature (1)..(474): n is a, c, g, or t
ttgagagatcagcttgatacggcgcagaaaattcttgacgccgcaaaaagcgcaaacgtgcagatcgttctgccgcttgaccatgttgccgcgacaagctttgacgttaccgctgttccaatccctgtcgatggtctcgatcttcccgacaatctgcttggactggacgtagggccaaagacgcttgccaaatacaaagaagtgcttgcgggagccaagaccattgtgtggaacggtcctgtcggcgtttttgaatttgatgcttttgcgaaaggaaccgaagcagtcgcaaagcttgtggcggaagcgactggtaagggaaccatcaccgttgtcggcggcggcgattcggtcgcggctgtaaacaaattcggtcttgcttcaaagatgagccatgtctcaacgggtggcggcgcttcgcttgaattgcttgaaggcaggaaacttcccggtatcgaagtttgcaggggctag

SEQ ID NO: 20974 - protein, 157 aa, Unknown
  Obtained from environmental sample
  DOMAIN (1)...(155): Phosphoglycerate kinase
  misc_feature (1)..(157): Xaa is any amino acid
MRDQLDTAQKILDAAKSANVQIVLPLDHVAATSFDVTAVPIPVDGLDLPDNLLGLDVGPKTLAKYKEVLAGAKTIVWNGPVGVFEFDAFAKGTEAVAKLVAEATGKGTITVVGGGDSVAAVNKFGLASKMSHVSTGGGASLELLEGRKLPGIEVCRG

SEQ ID NO: 20975 - DNA, 360 bp, Unknown
  Obtained from environmental sample
  misc_feature (1)..(360): n is a, c, g, or t
ttgtttacagccgcgaccgaatcgccgccgccgacaacggtgatggttcccttaccagtcgcttccgccacaagctttgcgactgcttcggttcctttcgcaaaagcatcaaattcaaaaacgccgacaggaccgttccacacaatggtcttggctcccgcaagcacttctttgtatttggcaagcgtctttggccctacgtccagtccaagcagattgtcgggaagatcgagaccatcgacagggattggaacagcggtaacgtcaaagcttgtcgcggcaacatggtcaagcggcagaacgatctgcacgtttgcgctttttgcggcgtcaagaattttctgcgccgtatcaagctga

SEQ ID NO: 20976 - protein, 119 aa, Unknown
  Obtained from environmental sample
  misc_feature (1)..(119): Xaa is any amino acid
MFTAATESPPPTTVMVPLPVASATSFATASVPFAKASNSKTPTGPFHTMVLAPASTSLYLASVFGPTSSPSRLSGRSRPSTGIGTAVTSKLVAATWSSGRTICTFALFAASRIFCAVSS

SEQ ID NO: 20977 - DNA, 804 bp, Unknown
  Obtained from environmental sample
  misc_feature (1)..(804): n is a, c, g, or t
atggtagtatggtcggagacggcttttgtcccgcggatttactggcatgaaacctaccgtgatgatccgtcatcatggcttctggtaaaggaattacgggaatacctgtcggcgcaagatgtgccattcgttattggcaatgacgatgccatcaaagaccctacaaagaacccccgcgcgcaggaagattttcgggttgattacaacgcggttatactttttcaccaggggaaaaatatcgccgtctaccgcaaactccacttggttccctttaccgaacattttccctacgaaaagcagctacccctggtacaccgcgccctagtcaatgccgacacccacttttgggaaaagggaaccgaggcgacggtgttttccggtccaggttttactttctccacaccgatttgttttgaagacagcttcggctacctttcccgaaaattcgtgcgaaacggcgcggatttgattatcaacctttccaatgatgcctggtcgcacagccttcccgcccagaaccagcacctgtccatggcggtattccgggcagtggaaaacggccgctcaatggtcaggtcaacggcatccggacaaacctgcggcataactcccgatggaaggatcattgccatggcgccgccctttacgccagcatggctgaccgttgccattcccatcgtcaagggcgatacggtatatacccgccggggcgattatctgggaattggttttaccatagccgctttcctcctcttgcttttaggcggtcttgcaggtataatcagcataagaaggagaccatga

SEQ ID NO: 20978 - protein, 267 aa, Unknown
  Obtained from environmental sample
  misc_feature (1)..(267): Xaa is any amino acid
MVVWSETAFVPRIYWHETYRDDPSSWLLVKELREYLSAQDVPFVIGNDDAIKDPTKNPRAQEDFRVDYNAVILFHQGKNIAVYRKLHLVPFTEHFPYEKQLPLVHRALVNADTHFWEKGTEATVFSGPGFTFSTPICFEDSFGYLSRKFVRNGADLIINLSNDAWSHSLPAQNQHLSMAVFRAVENGRSMVRSTASGQTCGITPDGRIIAMAPPFTPAWLTVAIPIVKGDTVYTRRGDYLGIGFTIAAFLLLLLGGLAGIISIRRRP

SEQ ID NO: 20979 - DNA, 534 bp, Unknown
  Obtained from environmental sample
  misc_feature (1)..(534): n is a, c, g, or t
atgccggaaacgacgccatctttctatgatattgagacaaaagcgcaggaaacggcgcggcatttggtagaaagcctgagccgcaagcgtttgacgcttgcccttgccgaatcctgtaccgccggccttattgccgatttattggcgcagtcaagcggggcttccgcggtattgtggggatcgtttgtgtgttacactcctgaagcaaaagatcggatgcttggtatggacgccaattttcttgaacagcatggattggtgagcagggaaaccgcccgcacaatggccctcaacgcgctggaacggtccggcgcgtcccttgccgccgccgttaccggcattgccggccctctgggtgacggaagcgatactccggtgggaacggtatggacggcggttgcctggcagggaaattgccgggaaaaagaattgcattttcaggggacgcgggcggcaatacggatgcaggcggcggcggcagttgtgaaggaaatgcttgagattgttaatttaccgctgacaaaaaaaatataa

SEQ ID NO: 20980 - protein, 177 aa, Unknown
  Obtained from environmental sample
  DOMAIN (15)...(169): Competence-damaged protein
  misc_feature (1)..(177): Xaa is any amino acid
MPETTPSFYDIETKAQETARHLVESLSRKRLTLALAESCTAGLIADLLAQSSGASAVLWGSFVCYTPEAKDRMLGMDANFLEQHGLVSRETARTMALNALERSGASLAAAVTGIAGPLGDGSDTPVGTVWTAVAWQGNCREKELHFQGTRAAIRMQAAAAVVKEMLEIVNLPLTKKI

SEQ ID NO: 20981 - DNA, 324 bp, Unknown
  Obtained from environmental sample
  misc_feature (1)..(324): n is a, c, g, or t
ttgctggtgcagggaaaatttaagggaaccattgacgcggcgggagcgcttattgtagacaaggaagccgtcgtagacgctgaccgcattacggtaagttcgctgaccgtgtatgggacggtgataggcgacattcatgccattgataaggtagacatgatgagcggggcaaaggtacagggtgatgttaccgccgcccggctccgtatagccgacggcgttttgtttgaaggtcagtgtagcatgaccagcgtagacaaagaagtggaaatcttttcccggcctgtcgaagaaataaaagctgaactgttgcgggttggttaa

SEQ ID NO: 20982 - protein, 107 aa, Unknown
  Obtained from environmental sample
  DOMAIN (3)...(86): Protein of unknown function, DUF583
  misc_feature (1)..(107): Xaa is any amino acid
MLVQGKFKGTIDAAGALIVDKEAVVDADRITVSSLTVYGTVIGDIHAIDKVDMMSGAKVQGDVTAARLRIADGVLFEGQCSMTSVDKEVEIFSRPVEEIKAELLRVG

SEQ ID NO: 20983 - DNA, 333 bp, Unknown
  Obtained from environmental sample
  misc_feature (1)..(333): n is a, c, g, or t
atgcggattgtatcggcaaggctttccccctttgaggcggaactggaaccggggtctgcaaaaccgagacagcttcccccaaggcgcagcatggctgcctcaaagctaaggcgggttctggtgcttggttcaaaaaacagggtggctaaaagtttacccctgcagctgtcccgcaggtatttttcgtctttttctattttttcagccagagtaaaaagtccgtccaattccgcgagcgaaaagtcttcaggttctacaaaggatcttccttttaacatttatcccctcttaaaggttgctttatctcttaatttaatgtattattgggtatga

SEQ ID NO: 20984 - protein, 110 aa, Unknown
  Obtained from environmental sample
  misc_feature (1)..(110): Xaa is any amino acid
MRIVSARLSPFEAELEPGSAKPRQLPPRRSMAASKLRRVLVLGSKNRVAKSLPLQLSRRYFSSFSIFSARVKSPSNSASEKSSGSTKDLPFNIYPLLKVALSLNLMYYWV

SEQ ID NO: 20985 - DNA, 540 bp, Unknown
  Obtained from environmental sample
  misc_feature (1)..(540): n is a, c, g, or t
gtgggaatgcgggaaatgtttatcaaaaacggttttaatgattttatttcaaagccggtagacgtttccaaaatggatgaaattcttaaccgctggataccggtagagaaaagagcaaataacaacgaacagttaacattaaacaaagaaaatgaaaaacaagataaactaccggacaaggatgccaattccttattgcccattatccccaatgttgatacggcaaaaggagttgctatgctcagaggaaggttggacgcctataagaaagttttatccatgttctgcaatgatgttgatgaacgactgccgcaactgcaaataatgcctgaggctgatacactgtcggcatttataatccaggttcactctctgaaaagcgtgtccgcttctattggcgcacaggaagtatcgtccaatgccgcaggacttgaagccgcaggcaaagctgcagatatggtttttattcgcgaacatttatctgactttacggtacagcttacggtactggtaaaaaatatacgcgctgctataacttaa

SEQ ID NO: 20986 - protein, 179 aa, Unknown
  Obtained from environmental sample
  DOMAIN (90)...(177): Hpt domain
  misc_feature (1)..(179): Xaa is any amino acid
MGMREMFIKNGFNDFISKPVDVSKMDEILNRWIPVEKRANNNEQLTLNKENEKQDKLPDKDANSLLPIIPNVDTAKGVAMLRGRLDAYKKVLSMFCNDVDERLPQLQIMPEADTLSAFIIQVHSLKSVSASIGAQEVSSNAAGLEAAGKAADMVFIREHLSDFTVQLTVLVKNIRAAIT

SEQ ID NO: 20987 - DNA, 471 bp, Unknown
  Obtained from environmental sample
  misc_feature (1)..(471): n is a, c, g, or t
ttggaagttgagaataaaataatagcggcacgcattcaggaaactgtcaaagcggttgtggcgcgctacaccgcagaggaattgctttccttgcgcgaacaagttaaaaatgaaatttccgagagcctaactaagcagctatgggaatacaatatcatagtggacgcaggtggtgtgcaaataactaattttgattttagccgctcttttaacgaagcgattgaagacaagcaggttgccgagcaaaaagcccttaccgcaaaaaataaccttgaaagagtaaaggttgaggcggagcaaaaagtagcccaagcaaggggcgaggcagaagcgattcgcattcaggcagaggctattcgcgctcagggcggcaaagaatatgtgaacctgaaggccattgaaaaatgggatggcaaactgccgatttacaccggcggaaacggaccaatgccgtttttggaagtgaagtga

SEQ ID NO: 20988 - protein, 156 aa, Unknown
  Obtained from environmental sample
  misc_feature (1)..(156): Xaa is any amino acid
MEVENKIIAARIQETVKAVVARYTAEELLSLREQVKNEISESLTKQLWEYNIIVDAGGVQITNFDFSRSFNEAIEDKQVAEQKALTAKNNLERVKVEAEQKVAQARGEAEAIRIQAEAIRAQGGKEYVNLKAIEKWDGKLPIYTGGNGPMPFLEVK

SEQ ID NO: 20989 - DNA, 465 bp, Unknown
  Obtained from environmental sample
  misc_feature (1)..(465): n is a, c, g, or t
atgtccattgacccgccctgctttgtgcccgtcggccacctgaacaggttacggcgacagaccgtggagctactggttgagaaaaggctcgaatcccaccctcggcagatcagaagaacaaagcggccagccgcagcccccttgggcaacaggcacctaggctatgagtggaacgtctccaacagtcttgcgagggcgttctacacgcgccacggggcagggcacattgaaccagcatttgaactgggcttctgtcagggcggcgcagacttgcctgaccaagtggtgatgacgaccaggctctgtctcaaatacgagctgggctggtgcccaaagcacaaaggcaacgcgccgccgaaaaaggcagcctgccccaatggcaacctctatctgaaaaatggcgagaccatcctgaaatgcgagttcgactgcgaaaagtgccgcatgaagctctgcctgcggtag

SEQ ID NO: 20990 - protein, 154 aa, Unknown
  Obtained from environmental sample
  misc_feature (1)..(154): Xaa is any amino acid
MSIDPPCFVPVGHLNRLRRQTVELLVEKRLESHPRQIRRTKRPAAAPLGNRHLGYEWNVSNSLARAFYTRHGAGHIEPAFELGFCQGGADLPDQVVMTTRLCLKYELGWCPKHKGNAPPKKAACPNGNLYLKNGETILKCEFDCEKCRMKLCLR

SEQ ID NO: 20991 - DNA, 798 bp, Unknown
  Obtained from environmental sample
  misc_feature (1)..(798): n is a, c, g, or t
gtggatgaggtagtcaaggtattaattgccacaaaacggaaactccgggaaggcgacaaaatggcgggccgccacggcaacaagggcgttgtagcccgcatactgccggaagaggatatgccctacatggaagacggtaccccgctcgacctttgccttactcccctgggggttccttccagaatgaacatcggtcagcttcttgaaacggagcttggctgggcagcctcgactctggacgagtggtattcggcgccggtattccagtcgccctctaccgaccagatcgaggaaaagctaaaagaagcggggcttcccgtaaccagcaaggccgtgctaagggatggccgcacaggcgagccttttattaaccccattttctgcgggatcatttacttccttaagcttcaccaccttgtcgatgacaagatgcacgcccgctccaccggcccatactcgctggtaacccagcagcccttgggcggcaaggcccagtttggcggccaaaggttgggcgaaatggaagtctgggcgcttgaagcttacggcgctgcccacactctgcaggagcttctcaccatcaaatccgatgatatgaccggaaggtcaaagatctacgaagccattgtgaagggcgagccttctaccacagcgggaatacctgaatccttcaacgttttggttcaggaactgcggggccttgcgctggatcttaccatttatgataacaagaacaagcagattcccctcaccgagcgtgatgaggatcttattgccaagagcgggtccaatttttaa

SEQ ID NO: 20992 - protein, 265 aa, Unknown
  Obtained from environmental sample
  DOMAIN (1)...(165): RNA polymerase Rpb2, domain 6
  misc_feature (1)..(265): Xaa is any amino acid
MDEVVKVLIATKRKLREGDKMAGRHGNKGVVARILPEEDMPYMEDGTPLDLCLTPLGVPSRMNIGQLLETELGWAASTLDEWYSAPVFQSPSTDQIEEKLKEAGLPVTSKAVLRDGRTGEPFINPIFCGIIYFLKLHHLVDDKMHARSTGPYSLVTQQPLGGKAQFGGQRLGEMEVWALEAYGAAHTLQELLTIKSDDMTGRSKIYEAIVKGEPSTTAGIPESFNVLVQELRGLALDLTIYDNKNKQIPLTERDEDLIAKSGSNF

SEQ ID NO: 20993 - DNA, 585 bp, Unknown
  Obtained from environmental sample
  misc_feature (1)..(585): n is a, c, g, or t
gtgaacttcggttttgataacatctttattcttatctgcgctttttttatcattccgtttgccgcggttattttctcgcgtatgaaaaatccttttgtagccgccattcctctcggcgctcccggcggaactccatttaaaacttcgcacataaacggcattgtcaagttactcaaatttttggaattcgccggattgtttttgctttttttcagcgcggcgggtccttcaatgaagacatcggagattgtttggctgaaccgaggcgcggatattatttttattttagacataagccccagcatggcggcaattgacatggaagggaaaaatcgttttaacgccggtaaaaaattgatagaagactttgcgaacaagcggcctacggacagtatagggcttgtcgcgttcggcgatgacgccgcgttgcttcttccgcctacgacagacagacatgcgctggaaacgcgtctggaacaactcagcataggagaaatgggagacacaaccgctctcggcaagggaatagcggttgccgcttaccatcttgataaatcggcggcaaaaagaaaaatcgctgtgtga

SEQ ID NO: 20994 - protein, 194 aa, Unknown
  Obtained from environmental sample
  misc_feature (1)..(194): Xaa is any amino acid
MNFGFDNIFILICAFFIIPFAAVIFSRMKNPFVAAIPLGAPGGTPFKTSHINGIVKLLKFLEFAGLFLLFFSAAGPSMKTSEIVWLNRGADIIFILDISPSMAAIDMEGKNRFNAGKKLIEDFANKRPTDSIGLVAFGDDAALLLPPTTDRHALETRLEQLSIGEMGDTTALGKGIAVAAYHLDKSAAKRKIAV

SEQ ID NO: 20995 - DNA, 825 bp, Unknown
  Obtained from environmental sample
  misc_feature (1)..(825): n is a, c, g, or t
gtgcaggcaaaacatcccctgttgaacaatgccgtgcctattgacctgaccatggacggcggcactctggcgcttatcattaccgggccgaataccggcggcaaaacagtcgcgcttaaaaccgccggcattttcgccctgatgaatcaaatcggccttgccctgcccgcggcggcaggcactacccttccggtgtttgacggcgttttcgccgacattggcgatgagcagtccatcggtcagtcgctttcaactttttccgcccacattaccaatattgccaatatcgtcagccattccaccgactgttcactggtactgcttgacgaactcggttccggcaccgacccgcaggagggcagcgcgattgctatggcgatactcgaccgccttatcgaaaggaaagcccgtctgatcattaccactcaccacggcattctgaaaaattacgggtacagccggcaggaggtggaaaacgcgtcagttgaatttgacgtgcgaaccctttcccctacctaccggattataaccggtatacccggtgaaagccgcgcccttgaaatagccgggcggaatggtctgcctcaggatattatcgcgcaggcgaaaagttatttggactcaggacattccgacgtttccgccctaatcagcgggctcaaagaaaaacaccgagaactggacacgctgaccgaaaaggcacgttctgaggatagccgcctgacggatgaacggcgaanagccgatctganagaactgcggctgagacagaaagaaatggaactaaaaagccggtcttgcggggaaaactccgcctgctcttaa

SEQ ID NO: 20996 - protein, 274 aa, Unknown
  Obtained from environmental sample
  DOMAIN (1)...(212): MutS domain V
  misc_feature (1)..(274): Xaa is any amino acid
MQAKHPLLNNAVPIDLTMDGGTLALIITGPNTGGKTVALKTAGIFALMNQIGLALPAAAGTTLPVFDGVFADIGDEQSIGQSLSTFSAHITNIANIVSHSTDCSLVLLDELGSGTDPQEGSAIAMAILDRLIERKARLIITTHHGILKNYGYSRQEVENASVEFDVRTLSPTYRIITGIPGESRALEIAGRNGLPQDIIAQAKSYLDSGHSDVSALISGLKEKHRELDTLTEKARSEDSRLTDERRXADLXELRLRQKEMELKSRSCGENSACS

SEQ ID NO: 20997 - DNA, 459 bp, Unknown
  Obtained from environmental sample
  misc_feature (1)..(459): n is a, c, g, or t
atggagcctcttgcgcgggaaatgagttgggggcgatgggaggccgtgcccaacagccaaataccggcggaggatcgggccctggtccggcgcctctattcacccggcggtggggaggaggaccagccctgccccgggggcggggaaagttccacgggcttccgcggccgcgtggcagaagccttggcggccttgagggccgcccaccccgagggcgggcgggtggccctggtggcccacggcggggtctgcaaaatgctctgggccctgattctaaagatacccccggaacaggcctgggccgtcatccagcaggatttcgccgccctcaacgtggttgacctctaccccgagcccagccgccgggccatcgcccacttggtcaacggctatgtcgggggttatcaccaggccgggccgggcctggaccggctgaggggcgaagccgttttcggctga

SEQ ID NO: 20998 - protein, 152 aa, Unknown
  Obtained from environmental sample
  misc_feature (1)..(152): Xaa is any amino acid
MEPLAREMSWGRWEAVPNSQIPAEDRALVRRLYSPGGGEEDQPCPGGGESSTGFRGRVAEALAALRAAHPEGGRVALVAHGGVCKMLWALILKIPPEQAWAVIQQDFAALNVVDLYPEPSRRAIAHLVNGYVGGYHQAGPGLDRLRGEAVFG

SEQ ID NO: 20999 - DNA, 858 bp, Unknown
  Obtained from environmental sample
  misc_feature (1)..(858): n is a, c, g, or t
atgcaggcacgaaagagcatcaagaaggcgctgcaggcgcaaagggacggcaagggttttgcgctggtggagatcctggcgccctgtccatcgggctggaaggtgagtccgcaggagagcgccgcctgggttgagaaaaatgtattaccggtattttcgcttggcgaatttaaggatgaaacggcaagccgcaagggcatttcccgcgcgcgcgcagccgcgagtgacgagcagatcgtttcagtgctcgggctggacacgatagaaccgcatttcgcgctggctaatacaaaggccgcttcattgcgcgtactctgcgcggggtttggcgggcaggggatcatgctgctggggcagatgctcgcgcatctggggatgcggcacgggctggaggtttcgtggctgccttcctatggtccggagatgcgcggcggtacggcgaattgttcggtggtcttttctgaagaggcggtcggttcccccgttgtggaacacccggatctgctggtgatcatgaacgggccgtcgctggagaaatttctgcccgcgcttgttccgggcggagtgcttatctacaactcttccatcattgagcgcgcgccggagcgcggtgacataacaatcatttccgttccggcaagcgaacttgcgctgcaagccggaagcgagcgcgccgcgaatatcgtgatgtttggggttctggtttcctggtacggctcatttcatgaagaggcatacagccatctgcttgcggagttttttacgtccggaacgatactggaaataaacgagaaagctctgcgcataggcatggagtatatgctgacaaagatgcaggggatgaactcctcaggttaa

SEQ ID NO: 21000 - protein, 285 aa, Unknown
  Obtained from environmental sample
  DOMAIN (110)...(272): Pyruvate ferredoxin/flavodoxin oxidoreductase
  misc_feature (1)..(285): Xaa is any amino acid
MQARKSIKKALQAQRDGKGFALVEILAPCPSGWKVSPQESAAWVEKNVLPVFSLGEFKDETASRKGISRARAAASDEQIVSVLGLDTIEPHFALANTKAASLRVLCAGFGGQGIMLLGQMLAHLGMRHGLEVSWLPSYGPEMRGGTANCSVVFSEEAVGSPVVEHPDLLVIMNGPSLEKFLPALVPGGVLIYNSSIIERAPERGDITIISVPASELALQAGSERAANIVMFGVLVSWYGSFHEEAYSHLLAEFFTSGTILEINEKALRIGMEYMLTKMQGMNSSG

SEQ ID NO: 21001 - DNA, 606 bp, Unknown
  Obtained from environmental sample
  misc_feature (1)..(606): n is a, c, g, or t
gtggaacgttgtagtacttttgcccgtgttccatcggtacgagtgattgtaatttccatccccgagaacgacgaggatgccgcccgcgccgcgttacctgcaaatttattaacaagtgaaaccccaaaaatcctttttgtcacaggcggcaatacgcgcagacaatcagtctttaacgccctccgtctccttacggactttaatcccgattacgcgctaatccatgacggcgcaagaccgtgggtcagcacttcgcttgtagaaaatattataaaggcggtaaaaaaacacaacgccgtcatcccccttttgcagctgaccgataccccaaaggagtgcgagtctccctttgaggcgcaaacagataacgatgcctccgcagtgttcattaaaaatcatctaaagcgaaaaaataccggaatcgcccagacaccgcaagcatttaaatttccagaaattcttgaggcgcataaaaaggcggcaaacgtagaaactgaagaatttacagatgacgctgaaatatggggcagattctgcggccaagtagccgttattctaggagaacctgagaatagaaaaataacttttccggaggatttaatttga

SEQ ID NO: 21002 - protein, 201 aa, Unknown
  Obtained from environmental sample
  DOMAIN (2)...(200): Uncharacterized protein family UPF0007
  misc_feature (1)..(201): Xaa is any amino acid
MERCSTFARVPSVRVIVISIPENDEDAARAALPANLLTSETPKILFVTGGNTRRQSVFNALRLLTDFNPDYALIHDGARPWVSTSLVENIIKAVKKHNAVIPLLQLTDTPKECESPFEAQTDNDASAVFIKNHLKRKNTGIAQTPQAFKFPEILEAHKKAANVETEEFTDDAEIWGRFCGQVAVILGEPENRKITFPEDLI

SEQ ID NO: 21003 - DNA, 810 bp, Unknown
  Obtained from environmental sample
  misc_feature (1)..(810): n is a, c, g, or t
atgatgggctcagcgggaaacccccgccagtacgcgctggacaaagggtacgcgaacatcagcgtccccacaaatacagtcgcttcggacaataacgcccacacgggcgcgttctatacgctctacccttggaacaccacggtaagcagtcagcggactggcgtattaatggcgtgggcgtggggcgcgagcaaggtgctggacgcccttgaaaacggagccgcggcggcgctcaacatcaatgcaaacaacacgattattaccggaacctcaagaaacggaaaagccgccgccgtagcgggagcttttgaagaaaggtttaaaatcacagtccccacttcatcaggcgcgggaggagccgccatataccgctactacagcgctgggcagcaatacgacctgagcggctacttcggttacaacggcggaggcagttgggctgtaaacgacggcaacccgcaaggcttcgagtctataaagagcgattcaggcggcggctggttcaacgacaaattccagaccttcacaaaacccgaagacctgcccttcgaccagcatttccttttcgccatgtgcgccggtgaaaacaggcatatgttcatggtaaacggttttgaatgggacaagtggacgaaccctcccggcttcctctacaactttgaactgacaaaacccgtatttgatcttttaagcataccgcacaacatatccgttttcatgcaccgccataggcacggcttagaacaggaaaacatggtaaaactgataaaatacgcgaactatgtattccacgggatttcaggaatttaa

SEQ ID NO: 21004 - protein, 269 aa, Unknown
  Obtained from environmental sample
  misc_feature (1)..(269): Xaa is any amino acid
MMGSAGNPRQYALDKGYANISVPTNTVASDNNAHTGAFYTLYPWNTTVSSQRTGVLMAWAWGASKVLDALENGAAAALNINANNTIITGTSRNGKAAAVAGAFEERFKITVPTSSGAGGAAIYRYYSAGQQYDLSGYFGYNGGGSWAVNDGNPQGFESIKSDSGGGWFNDKFQTFTKPEDLPFDQHFLFAMCAGENRHMFMVNGFEWDKWTNPPGFLYNFELTKPVFDLLSIPHNISVFMHRHRHGLEQENMVKLIKYANYVFHGISGI

SEQ ID NO: 21005 - DNA, 855 bp, Unknown
  Obtained from environmental sample
  misc_feature (1)..(855): n is a, c, g, or t
gtgctgccaaatatcaccaatgaaatttatccgtttatcatacacggcgttgaggagacggtaagcccccgccatacctgtgttttttccgcgaattccggcggcatccgcgagcgggaattacgcataatcagcgaaatggtcaacaatgcggtcgacggcattattcttgaaccgatatattcgggttcggatcagacggactctcagcttgtttcgcttctcgaaagcctttccatcccggtggtattgctcaacaatgacattccctcatttgagtgttcaaaggtgatgcaggatgacaaagacgggggcaggctcgttacggaacatcttctggaatggggccacaaaaggatcgcctttatttacaatgacagggtaagcgccgcttacgagaggctgagaggataccgtgctgccctgaacgccgccggagtcggcaatgatccggaacttgaaatagcgtataacgacgaagaagggcatgcgtatccgggttatctttttaccaaacagcttcttgaaaggccggaactgggcgttaccgccattttttactttaacgatgatcttgccatacagggcatgaccgccgcgcagagccttaatctggacatcccccgcgatctttccattgcgggctacgacgacattccccgttcccgcctgaacggcatccggctgacaaccgtctcgcatcccaaagagctaatcggcgcgtgggcggcgacgctgctgcgggagcaattcgagcagaccgacatcaatcccatttaccgtaaaatcaccgtacactcgtccatgatttacagggatacggtggcggaacccagacaacaagagaaaaaataa

SEQ ID NO: 21006 - protein, 284 aa, Unknown
  Obtained from environmental sample
  DOMAIN (1)...(267): Periplasmic binding proteins and sugar binding domain of the LacI family
  misc_feature (1)..(284): Xaa is any amino acid
MLPNITNEIYPFIIHGVEETVSPRHTCVFSANSGGIRERELRIISEMVNNAVDGIILEPIYSGSDQTDSQLVSLLESLSIPVVLLNNDIPSFECSKVMQDDKDGGRLVTEHLLEWGHKRIAFIYNDRVSAAYERLRGYRAALNAAGVGNDPELEIAYNDEEGHAYPGYLFTKQLLERPELGVTAIFYFNDDLAIQGMTAAQSLNLDIPRDLSIAGYDDIPRSRLNGIRLTTVSHPKELIGAWAATLLREQFEQTDINPIYRKITVHSSMIYRDTVAEPRQQEKK

SEQ ID NO: 21007 - DNA, 567 bp, Unknown
  Obtained from environmental sample
  misc_feature (1)..(567): n is a, c, g, or t
atgataatttcatccgacataagcggccttgacaattcagttactgaattatttaacagttccgtattttctcttgccggcgtgcaactgccgtcaggatatatcgatcttctttctaatgacggcgcgtcccttattactgacagaggtttattttttcttctgattggcacaatagtaattaccgcggtcgggattaaccgtggctggataccgttggtcttcttggccgtttacggttttcttatccggtttgccggtgatttgtcgggaacgtattggaacggggatatgttgtacggtattttttcaggaggtacgatagccgcggcttttattctttctgctgaacccgcaagcggcgccaaattattaccgggcataatatttacagtcgtcttaagcgcgattctttcgtggtttttcaggtacaaatgcatggaatatatgggatgttttatcgcccttgccctggtaaattgcataacgccccttgtcaggctttttgaggaaaaagtttttctctcccgcaatattcgccgtaaattccgggagaaccgcctatga

SEQ ID NO: 21008 - protein, 188 aa, Unknown
  Obtained from environmental sample
  misc_feature (1)..(188): Xaa is any amino acid
MIISSDISGLDNSVTELFNSSVFSLAGVQLPSGYIDLLSNDGASLITDRGLFFLLIGTIVITAVGINRGWIPLVFLAVYGFLIRFAGDLSGTYWNGDMLYGIFSGGTIAAAFILSAEPASGAKLLPGIIFTVVLSAILSWFFRYKCMEYMGCFIALALVNCITPLVRLFEEKVFLSRNIRRKFRENRL

SEQ ID NO: 21009 - DNA, 897 bp, Unknown
  Obtained from environmental sample
  misc_feature (1)..(897): n is a, c, g, or t
ttgagcagctcgggcgcggccgttacccgtggagggggagaaatcaggacctgcccgtttgtggttcgtgggccgctcaagggcggacgcgccacagtggacggcatatcgtcgcagtttgtgtcaagccttctcttcgccgccccgctgatgcccaaagatacgcacatcaccgtgcacaacctgcacgagcagccgtacatcgagatgacgctttggtggctcgccaaccaaggtatagaggtggagtattctaaggagctgacctcctacaaggtgcgcggcggccagcgctacaagccctttgacacggtaatacccgccgacttctcctccgcggccttcgcggcggtggccgccgcgatatgcggctcgcccatagaactatgcgggctcgacttctcagacacgcagggcgacaaggagatcttccgccacttggagtctatgggcgcgacggtagaacgcagccgagacacggtgatagtctccggcggcgaactgagaggcgcgataatagacctaaaccgcacccccgacgccctgccggccctggcggtagccgccgcgacggccgagggagaaacggtcttcacaaacgtagcccaagcaagaatcaaagagaccgacagaatagccgtgatggcggaggaactggggaaaatgggagtatcggtaaaagaactcccggacggcatggtagtacacggcgggaaaatgataggaacgcacgtaaacagccacagagaccatagggtagcgatggcgttagcgctggcgggaatgaaagcggaaggggagacggagatagaaggaacagaagccgcggaggtcacgtacccgacattcgttgaagattttgtgaggatcggcgccaatatcgttgttaggagttga

SEQ ID NO: 21010 - protein, 298 aa, Unknown
  Obtained from environmental sample
  DOMAIN (4)...(287): EPSP synthase (3-phosphoshikimate 1-carboxyvinyltransferase)
  misc_feature (1)..(298): Xaa is any amino acid
MSSSGAAVTRGGGEIRTCPFVVRGPLKGGRATVDGISSQFVSSLLFAAPLMPKDTHITVHNLHEQPYIEMTLWWLANQGIEVEYSKELTSYKVRGGQRYKPFDTVIPADFSSAAFAAVAAAICGSPIELCGLDFSDTQGDKEIFRHLESMGATVERSRDTVIVSGGELRGAIIDLNRTPDALPALAVAAATAEGETVFTNVAQARIKETDRIAVMAEELGKMGVSVKELPDGMVVHGGKMIGTHVNSHRDHRVAMALALAGMKAEGETEIEGTEAAEVTYPTFVEDFVRIGANIVVRS

SEQ ID NO: 21011 - DNA, 585 bp, Unknown
  Obtained from environmental sample
  misc_feature (1)..(585): n is a, c, g, or t
atggaattagcagacaagattcagatgatcatccgcgaatcagcggcgcttaccgacgctctccttcaggatgaggcattgcatacggatatcgcgcgggcggcggatatgctcatccgggttttccgcgaaggcgggaaagcgctcttttgcggaaacggcggaagcgccgccgacgcgcagcacttcgcggcggaactcgccggaaaattttaccttgagcggcaggccctcgacgcggaggccctgcacgtcaatacgagttttatcacggccttcgcgaacgatcatgcctacgagggcgcctttgcgcggcttgtacaggccaaggggcgccggggagacgcgctggtcggcatctccacctccgggaagtcgcgcaatatcattctcgcgcttgaggaagcgggcaggcttggtatgcggcgcattgtcctgaccggtgccggcggggtcatgcgcgatctggcggatatcacgctctccgttccgtctgccattacgccgcgcattcaggagtgccacgtgttgatcgggcatatcctctgcgaattggttgaagagcggctgaccgcagagttatag

SEQ ID NO: 21012 - protein, 194 aa, Unknown
  Obtained from environmental sample
  misc_feature (1)..(194): Xaa is any amino acid
MELADKIQMIIRESAALTDALLQDEALHTDIARAADMLIRVFREGGKALFCGNGGSAADAQHFAAELAGKFYLERQALDAEALHVNTSFITAFANDHAYEGAFARLVQAKGRRGDALVGISTSGKSRNIILALEEAGRLGMRRIVLTGAGGVMRDLADITLSVPSAITPRIQECHVLIGHILCELVEERLTAEL

SEQ ID NO: 21013 - DNA, 852 bp, Unknown
  Obtained from environmental sample
  misc_feature (1)..(852): n is a, c, g, or t
gtgcagactgtagagcaggataacgcaagccttgttaccgtatattcaggcatagttatcgagtaccttgacagaatggacgtacttccgtgggttatctccacagatacgcttgaatacgatttaacatccagaatacgctcacttgttaacgacagcgaacgctggataggaattcttgttggcgacagtttcaggcaatggagagaagatttcagctacctgtccgctacgttagacgaagccggttacagagtgcgtttgctttctgttggcgatgaaatttccgaagctatccccgcgctttttgtgcttgggggagcggaagatttagacgactggatgctttaccgtatcgacagatacattcaacagggcgggaaagttctttttgcggtaaagggagtgtacatagatactgtttccggttcgatagaaccaagacttcaacgcagccagacgttattcgaaatgatcgcttcttacggagtaatcataagacaggagctcgctctggatcgcaatgcgcttacgttgcagtatcagacaagagcgcctaacggatcagtccagtacagaattatgcgttatccgctttggattggcgttttaggcgataacggaaatgaaaaacaccccgtatgctccgctttcagcggtcttgatctttactgggcaagtccgttggaattggttccgccttccgattccgtagaagcggtttctctttttacaagctctccgcaaggctgggctatgagggatgctttttataccaaccctngaatagcctatatgcttgagatggaagcgaatgaaacaaggggcgtaaagattctgggagcgcgttaa

SEQ ID NO: 21014 - protein, 283 aa, Unknown
  Obtained from environmental sample
  misc_feature (1)..(283): Xaa is any amino acid
MQTVEQDNASLVTVYSGIVIEYLDRMDVLPWVISTDTLEYDLTSRIRSLVNDSERWIGILVGDSFRQWREDFSYLSATLDEAGYRVRLLSVGDEISEAIPALFVLGGAEDLDDWMLYRIDRYIQQGGKVLFAVKGVYIDTVSGSIEPRLQRSQTLFEMIASYGVIIRQELALDRNALTLQYQTRAPNGSVQYRIMRYPLWIGVLGDNGNEKHPVCSAFSGLDLYWASPLELVPPSDSVEAVSLFTSSPQGWAMRDAFYTNPXIAYMLEMEANETRGVKILGAR

SEQ ID NO: 21015 - DNA, 843 bp, Unknown
  Obtained from environmental sample
  misc_feature (1)..(843): n is a, c, g, or t
gtgctggtggacattcctaaaagcgttcagactgatttctgcgaatattcaggcaaagcgcctgttctggaagcaaaacaacactgttcttttgacattgagcaggctgccgtcgcgattaaaaatggtaaacgcccctttatctatgcgggaggcggtataatcgccggcgaggcggaggcggaactgcgcgccttatctgaaaagctgtccgcgccggtcggcttcagtatgatggggctgtcggctctgccggatgattatccgctgaatctgggcatgacgggaatgcacggaaaatacgccgcgacggtcgccaagtccgaatgtgacgtacttatagcgttgggtgtccggttttcagaccgcgctaccggcaatgtcggcgaataccgggaagggaaacacatcatccatgttgatattgacattgccgaaatcggcaaaaatgtggcgtcgcagatggacatttgcggcgatgtaaaagatgtccttacgcagttgctgccggttcttccggcacagcgcaacgatgaatggctggcgcgtatcgaacaattaaagaaatcgccgcaggcggaatatatcagcgccgggttttcgccgcagaatattatcgaaacagtaaggcgtttttgcggcgatgataccgttgtcgctaccgatgtgggccagcatcaaatgtgggtagtgcagcactatacttttcaaaaaccgcggacattgctcagctcangcgggctgggaacgatgggctatggtttgggcgcggcgattggagcctgtatagtaaagaacaaacaaaggacggtcttgtttacggagacggcagctttggaatga

SEQ ID NO: 21016 - protein, 280 aa, Unknown
  Obtained from environmental sample
  DOMAIN (32)...(184): Thiamine pyrophosphate enzyme, central domain
  misc_feature (1)..(280): Xaa is any amino acid
MLVDIPKSVQTDFCEYSGKAPVLEAKQHCSFDIEQAAVAIKNGKRPFIYAGGGIIAGEAEAELRALSEKLSAPVGFSMMGLSALPDDYPLNLGMTGMHGKYAATVAKSECDVLIALGVRFSDRATGNVGEYREGKHIIHVDIDIAEIGKNVASQMDICGDVKDVLTQLLPVLPAQRNDEWLARIEQLKKSPQAEYISAGFSPQNIIETVRRFCGDDTVVATDVGQHQMWVVQHYTFQKPRTLLSSXGLGTMGYGLGAAIGACIVKNKQRTVLFTETAALE

SEQ ID NO: 21017 - DNA, 438 bp, Unknown
  Obtained from environmental sample
  misc_feature (1)..(438): n is a, c, g, or t
atggacggcgcttttgagaacaactatctgacccagatcgttattccgggcggcgttacattaatcagaaaaaacgcgttcgcgaataataaattgacgagtataactattggagacagcgtgacttccattgatgattatgcttttgcgtataataatttaagaagtataaccattggcggcggcgttacatcaattggggcttatgcctttatggacaaccagctggccaatgtcaccattcccaagagcgttacttccatcggagaacacgcgttccggaacaaccaactgacccgcataatgattggggaaggagtatcgcttggcggagattcatttggagacgggtttgaagctttctatagtgccaggagaaaggccgccggcgtttatacgcgggccagcgacggctggaagttcaccgccggtatttag

SEQ ID NO: 21018 - protein, 145 aa, Unknown
  Obtained from environmental sample
  misc_feature (1)..(145): Xaa is any amino acid
MDGAFENNYLTQIVIPGGVTLIRKNAFANNKLTSITIGDSVTSIDDYAFAYNNLRSITIGGGVTSIGAYAFMDNQLANVTIPKSVTSIGEHAFRNNQLTRIMIGEGVSLGGDSFGDGFEAFYSARRKAAGVYTRASDGWKFTAGI

SEQ ID NO: 21019 - DNA, 417 bp, Unknown
  Obtained from environmental sample
  misc_feature (1)..(417): n is a, c, g, or t
gtgaaacaggggttgccgctgcggtggatctcaaaggccagctgttctttacgcggggccatgtccggccaaaccgggacacgccgtcggtccatcgccccgacaaccagcatgcgcatggacggctttgttgaaatgacctttgaactgggccttatcggcatgattggcaagggggatcgttctgattttgtccccggcctctgcaaaaaataccagcgggtatatttcctcggcattggaggcgcctcagcgctcatctcaaaacaggtaaaaagctgcgaagttgccgcatgggaagacctcggaacagaatccgtcaaaaaactggaagttgaaaaattacgcctgatagtgggcatagatgccaaaggccgcgttttccaggacggggagatcgctaaataccggcggtga

SEQ ID NO: 21020 - protein, 138 aa, Unknown
  Obtained from environmental sample
  DOMAIN (1)...(134): Fumarase C-terminus
  misc_feature (1)..(138): Xaa is any amino acid
MKQGLPLRWISKASCSLRGAMSGQTGTRRRSIAPTTSMRMDGFVEMTFELGLIGMIGKGDRSDFVPGLCKKYQRVYFLGIGGASALISKQVKSCEVAAWEDLGTESVKKLEVEKLRLIVGIDAKGRVFQDGEIAKYRR

SEQ ID NO: 21021 - DNA, 864 bp, Unknown
  Obtained from environmental sample
  misc_feature (1)..(864): n is a, c, g, or t
atgtgggaaaatgtccctatagtagcttgcggaataggcaagcaactagcagaatctgtatctgacccagcggtaacagaatttattgaaccttcagattctccagattctgaaagcacagaggaatcattggaacaaatagactctgttgcaaccaaaaaatccttatggtctggcatttacgaattttacgatttgcctgctcaaatagattttatacagcgcatacaaggcaatgttaaaagaattatattcataaccgataacacagaagctagcagagatgttagtgatcaattgaattcagtcgcatatgtgcaaaaaaatataaatctggaagaatggaaaaagccatcattggaaagtctcgcagattctcttagtcatttgaacccaaaccaagacgcagttgtattggtaggtgtagagttaaatggttccattagaaatccgcaaaaattatggcaagatatgaccaaatacgtggacagcaacagcacggctcccgtatattcattttgggacattggaatacaaaacggcgttattggaggaaatataattctcgcatctttaataggaaaaaacataggattaattgccgaggcaattctcgcaggcaacgatacttataattctggattcagaagaagttcaaacatgcctatggtggacgatcaagcagcaacaaacagaaaattgaaactatacaggcttcctccagaaaccataaggcttaacaaggaagaatcttcgataatcagcaagtatcagaactttgtatataatatgaggaatgccattattgcagagcttgtgattatattgctactcggattttcttttatcatattctcgcgataa

SEQ ID NO: 21022 - protein, 287 aa, Unknown
  Obtained from environmental sample
  misc_feature (1)..(287): Xaa is any amino acid
MWENVPIVACGIGKQLAESVSDPAVTEFIEPSDSPDSESTEESLEQIDSVATKKSLWSGIYEFYDLPAQIDFIQRIQGNVKRIIFITDNTEASRDVSDQLNSVAYVQKNINLEEWKKPSLESLADSLSHLNPNQDAVVLVGVELNGSIRNPQKLWQDMTKYVDSNSTAPVYSFWDIGIQNGVIGGNIILASLIGKNIGLIAEAILAGNDTYNSGFRRSSNMPMVDDQAATNRKLKLYRLPPETIRLNKEESSIISKYQNFVYNMRNAIIAELVIILLLGFSFIIFSR

SEQ ID NO: 21023 - DNA, 801 bp, Unknown
  Obtained from environmental sample
  misc_feature (1)..(801): n is a, c, g, or t
ttggagcgtatgcggaaagacctgctgagcaccgaactaatgagcaggagcacctctaaggccggcatagaggttagcgaacaggctgtgcgcgaatactacgagagcaaccgcgagcaatttgtccgcgagtacagcgtggttcgctatgaggacattgtggtggctgacattaacctggcgttcgagatccgccgcaccgtgacgcacgagactttcaaaaatgtggcgaaaacccactcgaagaacccgaacgcggacgagagcgtcccgtacgtggcattggacgccataccgccgaagacgcgtaacgccataatctccacaacggtcatcccgtctataatcgggccgtacggcgaggccgacggctttcacgttatgcgggttataggtaagtacgacaaggggacgatagcctctatagacgaggctcgcgacgaaattgtctcgcgtctctcgaacatcacccagaagggtgagacggagcggttaatatcggagatacgcgcgaagtcggatgtggagttcaacatagacgtgatacccggagtaggggccgtctctgccgacgacgcgtccaagccgggagcgtccgcgcaggaggttgctaagccggaaccgcctaaaccgactacgacggcgcctgcggcgcctaagccgacggtaacgcctgttacgccgagaccggctgtgccggcggcgcagcccaaacggcgggtgctgcgccaacgcccgcaccggcacccgcaccggcaccccgcaccggcggcgggcgcctacacccgtcgcaagaattga

SEQ ID NO: 21024 - protein, 266 aa, Unknown
  Obtained from environmental sample
  misc_feature (1)..(266): Xaa is any amino acid
MERMRKDLLSTELMSRSTSKAGIEVSEQAVREYYESNREQFVREYSVVRYEDIVVADINLAFEIRRTVTHETFKNVAKTHSKNPNADESVPYVALDAIPPKTRNAIISTTVIPSIIGPYGEADGFHVMRVIGKYDKGTIASIDEARDEIVSRLSNITQKGETERLISEIRAKSDVEFNIDVIPGVGAVSADDASKPGASAQEVAKPEPPKPTTTAPAAPKPTVTPVTPRPAVPAAQPKRRVLRQRPHRHPHRHPAPAAGAYTRRKN

SEQ ID NO: 21025 - DNA, 525 bp, Unknown
  Obtained from environmental sample
  misc_feature (1)..(525): n is a, c, g, or t
atgttggggcaggcgtgcgagcgcgccggggattggaacggcgcgattgcggcatatacaaattatctgccatacacgggaacaatagtccccgggtttccccaggccgatcaatacgcgaaaaaccaggtggatcttagcaggtctcaaaaagattggacgtttgaaagccttagcgcgttaaggaacgcggttgaagatgccctggactccggaagcgccagtacgctcatgagataccagacaaaggtaaacttttttgcccgttcatgggagcaggtagaaaccgatgatatcgggttaaacaaatttaatctttcccagtttatgtccggcaaccatatcaaatataaccccactttggacgcgtcttcaaattcaacagaagcttttttaaggacaagcggctggtcattttcgcttaatacatggtatttgtacttcagaaaaatttatttcccgcaagaccctgaaattcacggaagatgggaatgggccggaatttactacggagaaaaattttga

SEQ ID NO: 21026 - protein, 174 aa, Unknown
  Obtained from environmental sample
  misc_feature (1)..(174): Xaa is any amino acid
MLGQACERAGDWNGAIAAYTNYLPYTGTIVPGFPQADQYAKNQVDLSRSQKDWTFESLSALRNAVEDALDSGSASTLMRYQTKVNFFARSWEQVETDDIGLNKFNLSQFMSGNHIKYNPTLDASSNSTEAFLRTSGWSFSLNTWYLYFRKIYFPQDPEIHGRWEWAGIYYGEKF

SEQ ID NO: 21027 - DNA, 342 bp, Unknown
  Obtained from environmental sample
  misc_feature (1)..(342): n is a, c, g, or t
atgaaactgttgcttgacgcgaatgtttcatggcgttcaaccgcagtactggcagaacattttggcgactgtattcatgtaaacaatacagagcttccaaaacccgcgaaagatattgaaatatggaaatatgccgcagaaaatggatatactatagttactcaggattctgactttttgaatctttttgagacaaagggatttccaccaaagataatcctgctacgtataggaaatattgatagaaaagctacggagaatatattgctgactaacaaatcatctatttttgatttagaacacagtaattatgggctgcttgaaattattggttatcaataa

SEQ ID NO: 21028 - protein, 113 aa, Unknown
  Obtained from environmental sample
  misc_feature (1)..(113): Xaa is any amino acid
MKLLLDANVSWRSTAVLAEHFGDCIHVNNTELPKPAKDIEIWKYAAENGYTIVTQDSDFLNLFETKGFPPKIILLRIGNIDRKATENILLTNKSSIFDLEHSNYGLLEIIGYQ

SEQ ID NO: 21029 - DNA, 750 bp, Unknown
  Obtained from environmental sample
  misc_feature (1)..(750): n is a, c, g, or t
gtgatagtaaccgacatcactgaaaaagaagatttaatacgccggcttaatgaatctaacgccaaaattgagcgttttaacaaagagctgcaatctgaagttgaccggcagactgaaagtatacgcaatcttcaaaaggcaattgtatattcgataagtgacttaatagaaaaaaaagacggctataccggcgtacacactaaacgtgtaagcgaatatgtagctattctgctgcgtgaattggcgcggcgcggctatcaactgactgaattggaaattcaaagaatagcggaatcttctttgctgcatgacatgggaaaaattgcaatacctgacagtatccttcttaaaaacggaaaattggacgacgatgaatttgatgtaatgaaaagccatagtacgacgggggcggattctttgcaaaagtcaatgcagtttgcaaaggatagcgattttttgaaaaatgcgttcgtaatggctaaacaccatcatgaaaagtggaacggcaacggctatcctgacggtaaaaaaggaaatgatatacctcttcttgcccgtgtaatcgctattgccgatgtatatgacgcattgcgttcgaaacgttcatataaagcgccattcagccgagaaaaagcaaaatcaattattttggaagaaaacggacgtcaattcgatcctgaactggttgatatttttttagcggtagaacctgagtttaacgagttctgtgaagctaataaagaattgtag

SEQ ID NO: 21030 - protein, 249 aa, Unknown
  Obtained from environmental sample
  DOMAIN (63)...(197): HD domain
  misc_feature (1)..(249): Xaa is any amino acid
MIVTDITEKEDLIRRLNESNAKIERFNKELQSEVDRQTESIRNLQKAIVYSISDLIEKKDGYTGVHTKRVSEYVAILLRELARRGYQLTELEIQRIAESSLLHDMGKIAIPDSILLKNGKLDDDEFDVMKSHSTTGADSLQKSMQFAKDSDFLKNAFVMAKHHHEKWNGNGYPDGKKGNDIPLLARVIAIADVYDALRSKRSYKAPFSREKAKSIILEENGRQFDPELVDIFLAVEPEFNEFCEANKEL

SEQ ID NO: 21031 - DNA, 354 bp, Unknown
  Obtained from environmental sample
  misc_feature (1)..(354): n is a, c, g, or t
gtggttcaggccctgcgcaaagttaagggcaggggaaacattattattcgggtgaacatggcggatctgaaacttactagcgagcatacaaaggattttatcaatcttgtggaaggcgccaaatcaattcaaatagtggaggatacttcgattgatgaaggcggctgcataatagaaaccgactttggcgagattgacgcccgcatttcaagccagcttatggaactggaatcgaagatccttgaaatttctcccatcaagtcatgggcccaaaaacgaacctatcgagagctgaaactatgggcagcatttttgaaaaatacctggaaaccgcgaaccagatcgaccccataa

SEQ ID NO: 21032 - protein, 117 aa, Unknown
  Obtained from environmental sample
  misc_feature (1)..(117): Xaa is any amino acid
MVQALRKVKGRGNIIIRVNMADLKLTSEHTKDFINLVEGAKSIQIVEDTSIDEGGCIIETDFGEIDARISSQLMELESKILEISPIKSWAQKRTYRELKLWAAFLKNTWKPRTRSTP

SEQ ID NO: 21033 - DNA, 567 bp, Unknown
  Obtained from environmental sample
  misc_feature (1)..(567): n is a, c, g, or t
ttgtttttcncggtaaagaggagtacattctggcccctcttctatgtgcgaaagcacttggaacacgtgctggtgttcatcatgaaagaacaggagcttttgcggatccagaaaaagattcacaaagaaataaacgaaaaaatcgagaaatcccaaagggattatttccttaaagaagacttgaaggcgataaagggcgagctgggaatgaccacggacgccaaaagttcggattaccagccgttcaaagaaacgattgaagcctttaaatttgaaggcgaggtaaaggaagcggtggagcaggaactggaaaaattcaacctgatggagccggtctcgcccgaataccttgttacgcgcaattaccttgaccttatcgtcagccttccctggaaccagcctgagccctataatttcttcatgaaaaacgcccaggcaattctggaaaccaaccattacggccttaatgacctaaaaaaccgcataacggagtaccttgccgtaacaaagctgcgcggctataatcctccggtcaaagctcaagcgcgagcggaaagcggggcatag

SEQ ID NO: 21034 - protein, 188 aa, Unknown
  Obtained from environmental sample
  misc_feature (1)..(188): Xaa is any amino acid
MFFXVKRSTFWPLFYVRKHLEHVLVFIMKEQELLRIQKKIHKEINEKIEKSQRDYFLKEDLKAIKGELGMTTDAKSSDYQPFKETIEAFKFEGEVKEAVEQELEKFNLMEPVSPEYLVTRNYLDLIVSLPWNQPEPYNFFMKNAQAILETNHYGLNDLKNRITEYLAVTKLRGYNPPVKAQARAESGA

SEQ ID NO: 21035 - DNA, 933 bp, Unknown
  Obtained from environmental sample
  misc_feature (1)..(933): n is a, c, g, or t
ttgttggagaggttctattttttaaaggagttgtttttgctggaaagggatgatctggattttactattgaagaacttggaaaagcgtcggttcattcgccgttaaaaatgtccaaggaacttggagataaggttgccaattatgttgtaaacgataagtttctacgtttaaatccgtatgttgtaccgggaccgcaagctcatgttaagagaactcaagtgctggaattagcgggtcctcgtgaaatgatctatttttcacccgcccatgtacacgtgggaattgtaagttgcggcggtctttgtccgggcattaacgatgtgattcgcgccattgtccgctgtttatggtacagatacggagtcaccaggatttccggtattcgttacgggtataggggtttcttaccggagtctcagtttggggtaaaagaacttgatcctgacagtgttgacgacattcataaaatcgggggcacatatttagggagcgcaaggggcggcggcaggcaagtagagcaaattgttgacgcgatggaaaaactcaatttaaatgtgctttttacaataggcggagacggcactcagcgcggtatgcttgatattgccggagaagttgataaaagaaaattaaagatagcgataatcggtataccaaaaacagttgataatgattttgccctaatagaccgttcttttggttttaatacggcggtacagaaagcggtggaagttgtgtccgcggcgcatatggaagcgtcatccgcgattaaacgaatcggtcttgtaaagctgatgggaagggattccggttttatcgcggcgcatacggcgttggcgagccacgaggtgaactttgtgctgatccccgaagtgcgttttaaccttgaaggtacaatggatttttattcccctggaaaaagcggtttttaa

SEQ ID NO: 21036 - protein, 310 aa, Unknown
  Obtained from environmental sample
  DOMAIN (92)...(309): Phosphofructokinase
  misc_feature (1)..(310): Xaa is any amino acid
MLERFYFLKELFLLERDDLDFTIEELGKASVHSPLKMSKELGDKVANYVVNDKFLRLNPYVVPGPQAHVKRTQVLELAGPREMIYFSPAHVHVGIVSCGGLCPGINDVIRAIVRCLWYRYGVTRISGIRYGYRGFLPESQFGVKELDPDSVDDIHKIGGTYLGSARGGGRQVEQIVDAMEKLNLNVLFTIGGDGTQRGMLDIAGEVDKRKLKIAIIGIPKTVDNDFALIDRSFGFNTAVQKAVEVVSAAHMEASSAIKRIGLVKLMGRDSGFIAAHTALASHEVNFVLIPEVRFNLEGTMDFYSPGKSGF

SEQ ID NO: 21037 - DNA, 819 bp, Unknown
  Obtained from environmental sample
  misc_feature (1)..(819): n is a, c, g, or t
atgaacggacatcacgcaagatacatgaataatccattaaaagattctttgccttttgatgttcataatatagcaatggaccttgagataaatgaatttattgacgatttgcctaaagatgcatataaagcaaaagattttgatttccctgaaaaaaagagttatgaagaatatctgcaattaataaataaagatcacgctcgttactttcaaggtaaaatgccgattaatgatctcaattttgatgattacaatgatggctatcaagatgccttgaatgaattgatcgaggaatgtaaaaagcatgaaagaaacgccgaaacgagaaatagaccctataataataatcgcggaataaaaaaaattaaataccgctgggagcaggtgtttcaaaatattcttacgacaaaaataacggaaattacagacgggttaaaatacagaacatctgaagaagcagaccgcgggaatgtccatactcccgatattattcttcccgttgttattgacggaaaagttaaaatgtctcttgcgattattatggatatttccggttccatgtgtagtataattaataaaatgtacggcgttatgaagagcctaattgatattcctgatatggaaattgatattacagtgcttgaagtagatacagatgtcgaaaatataatgcatgaattcgatctgaaaaggaaaatcattataagacgggaaggcggcggaacaaatatgggtgcgggattgttttatcttcgggaaaataaaatggagccggatttaatcgttgtaataaccgactcatacacaccctggccctaa

SEQ ID NO: 21038 - protein, 272 aa, Unknown
  Obtained from environmental sample
  misc_feature (1)..(272): Xaa is any amino acid
MNGHHARYMNNPLKDSLPFDVHNIAMDLEINEFIDDLPKDAYKAKDFDFPEKKSYEEYLQLINKDHARYFQGKMPINDLNFDDYNDGYQDALNELIEECKKHERNAETRNRPYNNNRGIKKIKYRWEQVFQNILTTKITEITDGLKYRTSEEADRGNVHTPDIILPVVIDGKVKMSLAIIMDISGSMCSIINKMYGVMKSLIDIPDMEIDITVLEVDTDVENIMHEFDLKRKIIIRREGGGTNMGAGLFYLRENKMEPDLIVVITDSYTPWP

SEQ ID NO: 21039 - DNA, 327 bp, Unknown
  Obtained from environmental sample
  misc_feature (1)..(327): n is a, c, g, or t
atgaaagagactttcacaccatgggcttttatggatgaataccggggaaaggtttttaatggcgtctggcccaccttgcctgaactgttcaggatcaccgtttcccggcatgggcagcggcagtgttttaccgtgtttgaaccggatcgtgtaagccttaactatgttgaatcacttgcacttgtacaggccgtggcaaggtggctttacagcanaggcatccgtaagggcgaccaggtagccttgaccggaaaaaaactcgccccaaatgggcagttgcttacctggggcatagttttcccggagaacggttggaattccctataa

SEQ ID NO: 21040 - protein, 108 aa, Unknown
  Obtained from environmental sample
  misc_feature (1)..(108): Xaa is any amino acid
MKETFTPWAFMDEYRGKVFNGVWPTLPELFRITVSRHGQRQCFTVFEPDRVSLNYVESLALVQAVARWLYSXGIRKGDQVALTGKKLAPNGQLLTWGIVFPENGWNSL

SEQ ID NO: 21041 - DNA, 321 bp, Unknown
  Obtained from environmental sample
  misc_feature (1)..(321): n is a, c, g, or t
atggcaattggaaaagtcaaaaagggccggagcctttttattagacggggaaaatgcagcttgatgcccgcccgggttacttctgtttggaaaaaaaaggcccccggcagtcccgtcaggggccagggtaaataccctttatatttccggacctgcaagccgggaaatatcggcataaagctgatacagcgcatcggcaaaatcaacggatatggtcctttcntgcagggcttcgcaaaaccaataagcgatctatccaggggcacatcggtcgaagaactagtaaatacctgcgcgtttaccattgcccaggtcaagtag

SEQ ID NO: 21042 - protein, 106 aa, Unknown
  Obtained from environmental sample
  misc_feature (1)..(106): Xaa is any amino acid
MAIGKVKKGRSLFIRRGKCSLMPARVTSVWKKKAPGSPVRGQGKYPLYFRTCKPGNIGIKLIQRIGKINGYGPFXQGFAKPISDLSRGTSVEELVNTCAFTIAQVK

SEQ ID NO: 21043 - DNA, 723 bp, Unknown
  Obtained from environmental sample
  misc_feature (1)..(723): n is a, c, g, or t
atgagttggatcttatactatttcggtatcctgcatgggttaattgtactgccgcttgtgtttaagacaaagacctattacgaggacggtaacaggcaaaacgggcggcttaagggcggaaccataattatttcaaaccaccgttcctttatggaccctaccgttatagcgctcaggtttccctttcataaactgcattttataatcgccaattattataaggacaaatggaaagcggcaaaagttatgatggaaactttaggcggaattcttgtagatatggaggggcaaaaccttgattttatcgaaaagagcaaacggataaccgcaaagggcggcgccatcctgatgtttcccgagggtgactttaagtttgcgtacgagccagaaaagttttccacggggtacataatgcttgccgtcaagacggaagcgaaaattctcccgattgtcaacgattttaattacgggctttttaagcgggtgcacttaatgatagggaacggtatagatttgtcacgctataaaggcgaagaattgactaaagcgaaattaaaagagattaacgacgaaataagcgggaaatatagaatgcttttttacaaattaaaaagaaaaaaggcggaaaggttttccaataaatacgaatttattttcgcgaaaagatgcgacgttatccgcattttttgccggctctcactaccatttacggggaatatctaa

SEQ ID NO: 21044 - protein, 240 aa, Unknown
  Obtained from environmental sample
  DOMAIN (23)...(153): Acyltransferase
  misc_feature (1)..(240): Xaa is any amino acid
MSWILYYFGILHGLIVLPLVFKTKTYYEDGNRQNGRLKGGTIIISNHRSFMDPTVIALRFPFHKLHFIIANYYKDKWKAAKVMMETLGGILVDMEGQNLDFIEKSKRITAKGGAILMFPEGDFKFAYEPEKFSTGYIMLAVKTEAKILPIVNDFNYGLFKRVHLMIGNGIDLSRYKGEELTKAKLKEINDEISGKYRMLFYKLKRKKAERFSNKYEFIFAKRCDVIRIFCRLSLPFTGNI

SEQ ID NO: 21045 - DNA, 651 bp, Unknown
  Obtained from environmental sample
  misc_feature (1)..(651): n is a, c, g, or t
atgaatatagcggcgcaccatcttgatttcaaggaattgaacagccgaataaggaccgccaaagaggccgtctgcatagacggttgttacgggcaaaggtttatcgcaagcggaatgtccggcaagaacctgactattaacggaacgccggggaacgcgttaggcgcttattttaacggcggaaccattacggtaaacggcaacgcacaggatgccgtcggcgacacgatgaatgacggtgaaattatcattcacggcagcgcgggtgacgcgctcggttacgccatgcgaggcgggaaaatatatgtccgcgataacgccggatacagagtcggcattcatatgaaagaatacaaagagaaaaaaccggtaatcgtcattggcggcagagcgggtagtttcctgggcgaataccttgccggcggaatcattgtagtgctgggcataggctgtcatcatgaaatccctgtctggtattttacgggaactggaatgcacggcggaaaaattttcatccgaaccgacaaagaactttcttcgcttccggcgcaggtcgttgaggatgtggctgatgatgaggatctgcatgagattgcgccgtatatcggcgagttcgcgaagtattttggcatggaagcgcagcaactttga

SEQ ID NO: 21046 - protein, 216 aa, Unknown
  Obtained from environmental sample
  DOMAIN (1)...(211): GXGXG motif
  misc_feature (1)..(216): Xaa is any amino acid
MNIAAHHLDFKELNSRIRTAKEAVCIDGCYGQRFIASGMSGKNLTINGTPGNALGAYFNGGTITVNGNAQDAVGDTMNDGEIIIHGSAGDALGYAMRGGKIYVRDNAGYRVGIHMKEYKEKKPVIVIGGRAGSFLGEYLAGGIIVVLGIGCHHEIPVWYFTGTGMHGGKIFIRTDKELSSLPAQVVEDVADDEDLHEIAPYIGEFAKYFGMEAQQL

SEQ ID NO: 21047 - DNA, 579 bp, Unknown
  Obtained from environmental sample
  misc_feature (1)..(579): n is a, c, g, or t
atgccgctctttccgaacgaggggtcgaggctgaccatcaccccggagagagccgggttgggcggcgactacaggtttctcaagggtacggtctcctacgagaactacttcaggctgcccgccaagttagttttcggcagcgaggtgaagttgggcgcgataacagcgcttggcaacaagttgaaaatatccggggacgacttgttcacgggcggcggcgcctacggcgacgcgataatcaggggttaccccgactgggcgttcggcgggtaccgccatagggtggagggcaacggggtatcgatgttcgcggtaaatatgtcgctgcgctaccccattatcgaccagcagatatatgtgggtatatttgccgatatgggcaacacgtggactacgatctcaggaattgatttgggcgatttgtaccgcggcgttggcggcggactccgcataaatttgccgatgatcggagtgatgggcgttgacgtcggatacgggcttgacccgcttgacaagagcggaattgacaataagcccaacggaatgagttggcatattattatgaacaagggtttttga

SEQ ID NO: 21048 - protein, 192 aa, Unknown
  Obtained from environmental sample
  misc_feature (1)..(192): Xaa is any amino acid
MPLFPNEGSRLTITPERAGLGGDYRFLKGTVSYENYFRLPAKLVFGSEVKLGAITALGNKLKISGDDLFTGGGAYGDAIIRGYPDWAFGGYRHRVEGNGVSMFAVNMSLRYPIIDQQIYVGIFADMGNTWTTISGIDLGDLYRGVGGGLRINLPMIGVMGVDVGYGLDPLDKSGIDNKPNGMSWHIIMNKGF

SEQ ID NO: 21049 - DNA, 345 bp, Unknown
  Obtained from environmental sample
  misc_feature (1)..(345): n is a, c, g, or t
atgaaaaaacgtgcgcttatcagtgtatatgacaaggacggcatattggatctggcggcttttcttgttcaatcaggctgggaaatactttcaaccggaggcacatcaaaacacctgcaaaaaaataaaatccccgttaccgatctttcctccataacaggctttcccgaatgtcttgacggcagggtgaaaaccctgcatccgacagtacacgccggtatccttgcgcggcgggacgaaacttcccacatggacaccctgaaaaacctgggcattgaaaccatcgaccttgtctgcgtaaacctctatccgttttttgaaaaagtcccaagccgccggccttaa

SEQ ID NO: 21050 - protein, 114 aa, Unknown
  Obtained from environmental sample
  DOMAIN (14)...(111): MGS-like domain
  misc_feature (1)..(114): Xaa is any amino acid
MKKRALISVYDKDGILDLAAFLVQSGWEILSTGGTSKHLQKNKIPVTDLSSITGFPECLDGRVKTLHPTVHAGILARRDETSHMDTLKNLGIETIDLVCVNLYPFFEKVPSRRP

SEQ ID NO: 21051 - DNA, 678 bp, Unknown
  Obtained from environmental sample
  misc_feature (1)..(678): n is a, c, g, or t
gtgggtagtacccacccgctccgggacgcgtttacttctctcgccgacgatctcgccgaccccgagggctcccagtgttcgtcgataggaatggtcgtaggaaccgcggcgcgcggaaaaacccataccgcccaatggtacgcgaaaaaccaccctgacgcctgttatgtgctctttgtcgaatgttcgacccgcgtccagctcctccgcgacatctgcgaggcccttgccaacgcccgccccatcacgttcggcggctgccttgacctcatccacaacgtctgcgccaaacgccaccgcctcattatcatagacgaggccgacaagttacccatcgcgttcatggaactcctgcgcggaatcaacgaacgctgcaaggttcccatcatcctttccggcgaagaaggcctcaaagccaaagtagaccgcgtcccccggctccgcagccgcatccgcaaccccgtcgtgctttacgagcccatcggctccgtcgatgtcgccgccttctacgccctcgcctgcggaatagagatcgatctggaaaccgccgaggccctcgccaagcgttcccgcggcgcgtggcgcgtcctcgtcaacgacgccctggcactggcccgcatgggccgcgcctccggcatcgccaccgtcactcccgagatgatcgggaaactgcagtga

SEQ ID NO: 21052 - protein, 225 aa, Unknown
  Obtained from environmental sample
  misc_feature (1)..(225): Xaa is any amino acid
MGSTHPLRDAFTSLADDLADPEGSQCSSIGMVVGTAARGKTHTAQWYAKNHPDACYVLFVECSTRVQLLRDICEALANARPITFGGCLDLIHNVCAKRHRLIIIDEADKLPIAFMELLRGINERCKVPIILSGEEGLKAKVDRVPRLRSRIRNPVVLYEPIGSVDVAAFYALACGIEIDLETAEALAKRSRGAWRVLVNDALALARMGRASGIATVTPEMIGKLQ

SEQ ID NO: 21053 - DNA, 975 bp, Unknown
  Obtained from environmental sample
  misc_feature (1)..(975): n is a, c, g, or t
gtgggcatgggcgacctagaggtcgcgctcccgagaggggcaaaagacgagttcgcctttctgtcccgcagcttcaacgccatgacccgcgacatcaagaccgccaatgaagaaaacaggcactacgttcagcgcatcgacagccagagggcctatctgaaccaactgctggacacgcttcccgtgggagttctgtccgtgtccaacgatgggcgccttcgcacctgcaacaacacggcccagtcctggctcggcatggcgtcgtttgacaccgaggtggattactggggcgaccccaactggcgctcgcggtcgggggatttgcccagtcttctggacggagtcaggcagagcggcgagccgcgccgcgaagaactgcggattggtagcgacgcggaaggacggcctgtcaacgcaacgatggtccccctctccggcggcggagggctggctgttttggaggacctcagcctcatcgcccaggccgagaagcgcgcggcctggcaggaagtcgcccgcaggatggcccacgaggtgaaaaacccgctcacgccgataaagctgacggcgcagaggttggccaggagggtgcgcgagggtcggctggagccgcaggcggtttccgagggcgccaccacaatccttgaagaagttgagagcctcgcccgcctggtggagagcttcacgcgctttgccaagctgccggttccgcagcccgcgccgtgcgacgcatgtgaactgatgcgccaggttcacgcgctctatctgcccgaccaggacaaggccgacctcgaactgttgctgcctgacggacccgtgcctgcgaactgggacggcgacatggtgaagcgcgccctattcaacttcaccgacaatgccatgcacgccatacagggcagggggaaaatcacgctggaggtcagagcgacgggcaacagggtgcggctctccgtcaccgatatggctcggccataa

SEQ ID NO: 21054 - protein, 324 aa, Unknown
  Obtained from environmental sample
  DOMAIN (167)...(237): His Kinase A (phosphoacceptor) domain
  misc_feature (1)..(324): Xaa is any amino acid
MGMGDLEVALPRGAKDEFAFLSRSFNAMTRDIKTANEENRHYVQRIDSQRAYLNQLLDTLPVGVLSVSNDGRLRTCNNTAQSWLGMASFDTEVDYWGDPNWRSRSGDLPSLLDGVRQSGEPRREELRIGSDAEGRPVNATMVPLSGGGGLAVLEDLSLIAQAEKRAAWQEVARRMAHEVKNPLTPIKLTAQRLARRVREGRLEPQAVSEGATTILEEVESLARLVESFTRFAKLPVPQPAPCDACELMRQVHALYLPDQDKADLELLLPDGPVPANWDGDMVKRALFNFTDNAMHAIQGRGKITLEVRATGNRVRLSVTDMARP

SEQ ID NO: 21055 - DNA, 936 bp, Unknown
  Obtained from environmental sample
  misc_feature (1)..(936): n is a, c, g, or t
atggagattacagccgaggcggacggaattcttatttctttcagcaaggaagttgacgcccccgacgtagtaggaaaagcaataggcaaagggttaagggactcgctcgcgcaaatgggctgcaaatacgacggccctattgtgctgttaaacgacaccgccgccaccttgctctcgggttttgcctcaatttcacccgacggcgaagcgaagcgcacaaaaaacgactttgacacggcgggcggccctgtaatcggttttattcttggaaccggttttaacacagcttacatggaaaccgttatcccgaagataggttttaattctccttcttctccgcagattgtggtttgcgaaagcggaaatttcaacgtcctccaccgcgggcagttggacagggaatatgacagcacaacaaaaaaccccggcgcttttacgctggaaaaggcgacagccggcgcgtacttaggccctttgactttgcacattctgaaacaggcgataaaagataaagttttatgttttaaaaaatcagacgaaattctggcaatgcctcatctagaaacgcgttttgtaaacgagtttatgcacgcccccttaaaagcggaaggtccgcttggctcgctctttgccgccgacgaaagcgccgctcttgccgccatacagtacattacgtcgataatcactgaacgcgccgctcttttttccgcggctgtgttagccgcaaccgtgttgaaggcgggcggcggatacgagccctactcccccgtccgcgtcgctgtagagggaacaacatacatgatctacaaaggaatgcgccgctcccttgagtcttatcttcatcagctgctgttcaaggaaaagccgcgcccttacgttgtatctcccgtggaacaggcgagccttttcggcgcgngcgttgcggcgttgaagtaa

SEQ ID NO: 21056 - protein, 311 aa, Unknown
  Obtained from environmental sample
  DOMAIN (82)...(310): Hexokinase
  misc_feature (1)..(311): Xaa is any amino acid
MEITAEADGILISFSKEVDAPDVVGKAIGKGLRDSLAQMGCKYDGPIVLLNDTAATLLSGFASISPDGEAKRTKNDFDTAGGPVIGFILGTGFNTAYMETVIPKIGFNSPSSPQIVVCESGNFNVLHRGQLDREYDSTTKNPGAFTLEKATAGAYLGPLTLHILKQAIKDKVLCFKKSDEILAMPHLETRFVNEFMHAPLKAEGPLGSLFAADESAALAAIQYITSIITERAALFSAAVLAATVLKAGGGYEPYSPVRVAVEGTTYMIYKGMRRSLESYLHQLLFKEKPRPYVVSPVEQASLFGAXVAALK

SEQ ID NO: 21057 - DNA, 816 bp, Unknown
  Obtained from environmental sample
  misc_feature (1)..(816): n is a, c, g, or t
atgaaaatggaaattcgttacgcggaacatcctgatgacgcgaaacattacgacacaaaaacaatgagggaacattttctttttgaaaatgtttttattaaagatgaaatcagcctgtgttatacgcatgttgacaggatggtgttcggcggcgcttgcccggcggaaaatgatctgtctcttgagggaggcaaagattttgggagcgaagtttttcttgatcgcagggaactgggaattatctgtattgcgggtaatgggaaaatatccgcggacggaacggaatacgcaatgaaaaaaggcgacggcctgtatgtgggcaaggggattaaaaacattgttttttcagccgcggataaaaaagatccgcctaaattctaccttgcaagctctcccgcccatacttcttatcctgttgtttttattccgattgaaaaagcaaatccgcgcaaactgggcgaggccgcgacagtgaacgtgcgtaccatctatcaatatgttcatcccgccgtctgtcagagctgccagttggtcatgggaatgacagtgcttgaagaagggtcggtctggaataccatgccatgccacacgcacgagaggcgtatggaagtttacctgtattttgatataaaacccggagccgtagtctttcatatgaacggccgaccgcatgaaacgcgccatattgtcatgaacaacgaacaggcggttatttcgccttcatggtcgatccattccggcgctggaaccgcggcttatacatttatctgggcaatggcgggagagaccaaacatttgacgatatggacaatgtaa

SEQ ID NO: 21058 - protein, 271 aa, Unknown
  Obtained from environmental sample
  DOMAIN (3)...(267): 5-keto 4-deoxyuronate isomerase
  misc_feature (1)..(271): Xaa is any amino acid
MKMEIRYAEHPDDAKHYDTKTMREHFLFENVFIKDEISLCYTHVDRMVFGGACPAENDLSLEGGKDFGSEVFLDRRELGIICIAGNGKISADGTEYAMKKGDGLYVGKGIKNIVFSAADKKDPPKFYLASSPAHTSYPVVFIPIEKANPRKLGEAATVNVRTIYQYVHPAVCQSCQLVMGMTVLEEGSVWNTMPCHTHERRMEVYLYFDIKPGAVVFHMNGRPHETRHIVMNNEQAVISPSWSIHSGAGTAAYTFIWAMAGETKHLTIWTM

SEQ ID NO: 21059 - DNA, 456 bp, Unknown
  Obtained from environmental sample
  misc_feature (1)..(456): n is a, c, g, or t
atgcaaaacaacacttacgctcgcccaggtttaggccaatatcgccaggcttctgttgaaacagcagatcgcgggcagttgataataatgatttacgatcattgcataaaatggtgcggcatagccaaagaagctcttgaggctggccagctggctcgcaaagcggaagcctgccataaaattgaagcgggcataagcgagttgatgacttccctcgatatgcagaagggcggcgatattgcaaaaaatctttggcgtctatacgatttttacagccaccatatccacgaaggcaacatgaaaaacatagctaaaaattttacggaagttcaaaatatgatgggggaactgagagaggcttggcaaaaggcccttggggaagttcgccaagacagaacattggcaagcaaattatccaccggaaccccccgcagctatgtaagcatggtaggttga

SEQ ID NO: 21060 - protein, 151 aa, Unknown
  Obtained from environmental sample
  DOMAIN (6)...(128): Flagellar protein FliS
  misc_feature (1)..(151): Xaa is any amino acid
MQNNTYARPGLGQYRQASVETADRGQLIIMIYDHCIKWCGIAKEALEAGQLARKAEACHKIEAGISELMTSLDMQKGGDIAKNLWRLYDFYSHHIHEGNMKNIAKNFTEVQNMMGELREAWQKALGEVRQDRTLASKLSTGTPRSYVSMVG

SEQ ID NO: 21061 - DNA, 579 bp, Unknown
  Obtained from environmental sample
  misc_feature (1)..(579): n is a, c, g, or t
gtggagatttcagacgcttacgcgacaggctcctcaattatgccgcagaagaaaaaccccgagatggcggagctgattcgcggcaaaacgggccgggtttacggcggtctgacaaccctccttacggttatgaagggtctgccgctgtcgtataacaaggacatgcaggaagacaaggaagctgtcttcgatgccgttgacacggtaaaagcctgcctggatgttttccgcgggatgtttgagaatattacgtttaacacggaaaatatgtacaaaagcgcgctcggcggctatacaaacgccacggacgcggcggactggctggttaaaaaaggcgtccctttcagggaagcccacgaaataaccggcaggcttgtgttatacgctattaacaaaaaagcgcgtcttgaggatttaacactggacgagttaaaatccatatcgcttgtgtttgacgaaaccctttacaaagctatttccgtagaagcatgcgttaacgcgaggaatttacccggcggccctgcggagaaagcggttctggaagcgatagaacaattaacaatgaacaatgaacaatga

SEQ ID NO: 21062 - protein, 192 aa, Unknown
  Obtained from environmental sample
  misc_feature (1)..(192): Xaa is any amino acid
MEISDAYATGSSIMPQKKNPEMAELIRGKTGRVYGGLTTLLTVMKGLPLSYNKDMQEDKEAVFDAVDTVKACLDVFRGMFENITFNTENMYKSALGGYTNATDAADWLVKKGVPFREAHEITGRLVLYAINKKARLEDLTLDELKSISLVFDETLYKAISVEACVNARNLPGGPAEKAVLEAIEQLTMNNEQ

SEQ ID NO: 21063 - DNA, 621 bp, Unknown
  Obtained from environmental sample
  misc_feature (1)..(621): n is a, c, g, or t
atggtcgcttgcctgttgcttaagcagttgtataatcttggggatgagacactggctacatattgggttagagacgtttattttcagtattttagcgggatgacgttttttgaacataattttccgtttgattcgagtgatttttcacattttcgcaagcgtatcggcgtttcaggttttgagaaaatatttgcatacagtgtttgtcttcatggcaaagaagtgacacgtcaggcaaaatttgttttgtccgacacgactgttcaagagaataatactacgtttccaaccgattccaaattgcgcaaaaaggtaatagacaaatgcaataagattgctgctacagagggtatattgcaacgtcaaacatttcaaaaagaaagcaaacaattacttcgcgacagttacaacgcaaatcatcccaagcgttttaagaaggcgaaaaaggcacaaaaacgtttgcaaactatagccaatcatcaaattcgtgagcttgaaaggaaaatgacatccgaacaaaaattatcctacagtgaaacattatctcttttaaaaagcgtgtcaaaccaacaaaaaaacgacaaaaggcgagatttccgagttggcgcaggattttattaa

SEQ ID NO: 21064 - protein, 206 aa, Unknown
  Obtained from environmental sample
  misc_feature (1)..(206): Xaa is any amino acid
MVACLLLKQLYNLGDETLATYWVRDVYFQYFSGMTFFEHNFPFDSSDFSHFRKRIGVSGFEKIFAYSVCLHGKEVTRQAKFVLSDTTVQENNTTFPTDSKLRKKVIDKCNKIAATEGILQRQTFQKESKQLLRDSYNANHPKRFKKAKKAQKRLQTIANHQIRELERKMTSEQKLSYSETLSLLKSVSNQQKNDKRRDFRVGAGFY

SEQ ID NO: 21065 - DNA, 762 bp, Unknown
  Obtained from environmental sample
  misc_feature (1)..(762): n is a, c, g, or t
gtgacgacgcggtggacgacaatgaaaaaaaacacgtctgcttttgcgttatatttcttgcgaaatttcaaagaacttgaactaaaaaaactgatttgcacacatttcggcggcggaatagatttatttaatcaaggtacaaagggttacgtttttacaaaagacggatttagcgaaataggggaaaaagaatatcccaaaggatattccggcagttttgacgacccgctgtctataaagatacttaaagaagaggcggatatagtatgcacaaatccgccgttttcaagagcgatagattattggaaaaccgtaatagaaagcggaaagaagtttttaataatttctaatataacaaatcctataacaaaagcatttattccttatttcaaagataataaagtgtgggcgggatataatagagttgactggtttcaaacccctaaaaaacaacttgtagatgcggcgggtcattggtatacaaacattaccatagaagacagaccgaaatataaacatttgaaaataatgccgttatcgaaaatacctgaaaaacataaaaaatatgacgataacaaaatgcttttagttaatgattgttatattccaaacgattacaaaaagccatttgccgtgtctgcgcgttcaatattaaacggtttattagaaaatggctataaaattgttgaagagaacgaatcttacatagcggtagtaaacggtaaagaatgttttagaagagtgctgttgcagaanatatag

SEQ ID NO: 21066 - protein, 253 aa, Unknown
  Obtained from environmental sample
  misc_feature (1)..(253): Xaa is any amino acid
MTTRWTTMKKNTSAFALYFLRNFKELELKKLICTHFGGGIDLFNQGTKGYVFTKDGFSEIGEKEYPKGYSGSFDDPLSIKILKEEADIVCTNPPFSRAIDYWKTVIESGKKFLIISNITNPITKAFIPYFKDNKVWAGYNRVDWFQTPKKQLVDAAGHWYTNITIEDRPKYKHLKIMPLSKIPEKHKKYDDNKMLLVNDCYIPNDYKKPFAVSARSILNGLLENGYKIVEENESYIAVVNGKECFRRVLLQXI

SEQ ID NO: 21067 - DNA, 912 bp, Unknown
  Obtained from environmental sample
  misc_feature (1)..(912): n is a, c, g, or t
gtgaacgcngggaatacggatgataatgtgggcagggtctatatgaccgcgtataacgccgattacaagagcctgtggttcggcgttagaaacggcacaaacagtaccgcgatgattattgacggaggaacaaccccaggtataaacaatattggagcttccggagcggtagcaaacgcgggccagtacagcgcggtagattacgacggcaccggccccattatcgcctactatgacgggaccaatgacaccgtgcgcgtcgccttgggaactctgaataatggtactctgggtaccggcgactggacccggcgcaatctgctgccctccggcaatgacctgtacaagggttccggcaagtttatcagcatcaaggtggatagcagcaacggcatacacattgccttctctaacagcaataacaataccgtcgtgtactactatgcccaaaccagagctgatatcggcaatgcgcccggtaccagggttaaatgtcacgccgttgacagcgtggtgaccggcggcgaatggacggacatctcggtggacggcagcggcaacccctggatcgtgtacggcgacaactcacgcaccggcaactacgacggcgttcgcgtcgcgtacaggaccggtaattatgctaacaataccgatcccgctgtcgccaacacgttcagcaggccgttgaccgacccgattagcaaaacgaccattagaggctgggaagccctgaccatgccggcggactatacggtaaacaacgaccgcctgaacctcgaagtttggccgcccaccgttcgcggcggaacgcttacaagcagcgcccccaactggagcgcagccataggctacgccagcgatttgttccgcgtggggtatttcatcaagccgacggtgccagcggggttctag

SEQ ID NO: 21068 - protein, 303 aa, Unknown
  Obtained from environmental sample
  misc_feature (1)..(303): Xaa is any amino acid
MNAGNTDDNVGRVYMTAYNADYKSLWFGVRNGTNSTAMIIDGGTTPGINNIGASGAVANAGQYSAVDYDGTGPIIAYYDGTNDTVRVALGTLNNGTLGTGDWTRRNLLPSGNDLYKGSGKFISIKVDSSNGIHIAFSNSNNNTVVYYYAQTRADIGNAPGTRVKCHAVDSVVTGGEWTDISVDGSGNPWIVYGDNSRTGNYDGVRVAYRTGNYANNTDPAVANTFSRPLTDPISKTTIRGWEALTMPADYTVNNDRLNLEVWPPTVRGGTLTSSAPNWSAAIGYASDLFRVGYFIKPTVPAGF

SEQ ID NO: 21069 - DNA, 891 bp, Unknown
  Obtained from environmental sample
  misc_feature (1)..(891): n is a, c, g, or t
atgtacattcccattgttggcgtcaatgatttccctgatgaaacttaccccgccattctcgacagccttaaccgcgcccgtcttccataccgttgggttacgcgatatatctgccttgacaaggaagaaggcgttaaagaagcaagaaaaaaagaaaaatttcacaggggaagcagaaaaaccctccttcaaacttttgcggaacaaacttccggtgaagcagcaaaatcggtaaaccacggcgccagcgttaaagaaaatgattccgttcaggctaacattgacatcgaaaatgatgttgccgcgcttggttatctcactacctgcgtaatggtttgggacgcatccctgaagaaggcgaaaattaaagctgatcttgttaaaaccttgatcaactccaagggcttcacttgtaaagacgaaaaaattaacgcccttgaagcttttaaatcaatgcttcccggccaaatatacgccaattaccgcgccctgcccgtcatgaccaataacatggcccatgtcgttcccctctcgtcagtctgggccggcaatacgtccaacagccacgcgttagccgtcaccggcgtggatacgccgcatcttatatgtacaactatcgaaggcacgcctttctatctttctctgaacgtcggagacgttgaacattcggcggtttgggggccaaccggaggcggtaaatcaacagtgctaaatcttcttgaaatgcaggtttttaaatatcccggttcccaggttatcgtctttgataaaggccgcagctgcaggcagccttgcctggcttgcgggggcttgttttttgaacccgcagcggaaaaagcggacggcgtcaacttacagccgttacgccatctgaaaccgacagggacatga

SEQ ID NO: 21070 - protein, 296 aa, Unknown
  Obtained from environmental sample
  misc_feature (1)..(296): Xaa is any amino acid
MYIPIVGVNDFPDETYPAILDSLNRARLPYRWVTRYICLDKEEGVKEARKKEKFHRGSRKTLLQTFAEQTSGEAAKSVNHGASVKENDSVQANIDIENDVAALGYLTTCVMVWDASLKKAKIKADLVKTLINSKGFTCKDEKINALEAFKSMLPGQIYANYRALPVMTNNMAHVVPLSSVWAGNTSNSHALAVTGVDTPHLICTTIEGTPFYLSLNVGDVEHSAVWGPTGGGKSTVLNLLEMQVFKYPGSQVIVFDKGRSCRQPCLACGGLFFEPAAEKADGVNLQPLRHLKPTGT

SEQ ID NO: 21071 - DNA, 474 bp, Unknown
  Obtained from environmental sample
  misc_feature (1)..(474): n is a, c, g, or t
ttgagaactgagaattattttacaattctggtaatttttggagttgtgtttaagatgtattcttgcactcctctgcggcctcttgctccttatgcagctataagaaacattcctttgaacaccgatgtaacgggaattgccgcttgggacaatgttcttataccttggcttggaactccttatttgccgggtggaaccacaaaaaacggtgcggattgcagcggttttgtaagtagcgtgtttatggaaaaagaaagaatgtatattcccagaagcacaacagaggaatataaaatgggaaaagatgtgaccggagataatttagttataggcgatttggttttttttggcgatggcagaagagttagccacgttggtatttatgtgggtagaggcaattttattcacgcgagttcttctaacggagttatggtaagcccttggaagacaattatggaaactcggccgatctga

SEQ ID NO: 21072 - protein, 157 aa, Unknown
  Obtained from environmental sample
  DOMAIN (58)...(155): NlpC/P60 family
  misc_feature (1)..(157): Xaa is any amino acid
MRTENYFTILVIFGVVFKMYSCTPLRPLAPYAAIRNIPLNTDVTGIAAWDNVLIPWLGTPYLPGGTTKNGADCSGFVSSVFMEKERMYIPRSTTEEYKMGKDVTGDNLVIGDLVFFGDGRRVSHVGIYVGRGNFIHASSSNGVMVSPWKTIMETRPI

SEQ ID NO: 21073 - DNA, 891 bp, Unknown
  Obtained from environmental sample
  misc_feature (1)..(891): n is a, c, g, or t
atggatatcagtacctccagcctttcggaacttgccgcgtggtgcagaattctggggctttccgaagggggaaccagcgccgaacttgccaggcggctgagagagtatttcaaaataggcgaagaggaggaaaaaccggaagacaatcggaaagtcattacgattgagtccgcgcgcagcaccgaatatttcaggattgaaaaaaccggcgaagattatgcccgcctcagcggggaggtaaaaataagcctgaaagatggcgacgcaattcataaaattcaggcggggagtattttgtttaaccggacgcggaatatgctgacagcgacagggggggttgaatacaaaaaagaagaaggtgacaaaatcgaaacgtttcggggagagtcaatcaccgttgatcttgacaactggtccagcatatttctgggcggcgtgtcggaacgttcgctgcaaagcgacagcactacctatttgttttcaggaaccgttatctcccgcgatgaggaagatgtcaccgttttgaacaacgcggtaatcagcaacgcgaataacccggaatcgctgtggtcgctgaacgcttcccgcgtatttttgctgccgggttccgatttttccatattcaacgcggtgctgaaagtcggtgaaataccggttctgtatattccgtttttttattttcccgctgacgaggttgtttttcatccggtcatagggttccgtaccagagaaggaaattttgtccagacgacgacgtatattcttggcaggcccagggcaagttcgtcttcgcaaagttccctcacaaaaattctgggcaattcaagcgacatggaaaaaaaacgggaagggatgttttgggagccgcaaaagcgtgtcataaccnnntaa

SEQ ID NO: 21074 - protein, 296 aa, Unknown
  Obtained from environmental sample
  misc_feature (1)..(296): Xaa is any amino acid
MDISTSSLSELAAWCRILGLSEGGTSAELARRLREYFKIGEEEEKPEDNRKVITIESARSTEYFRIEKTGEDYARLSGEVKISLKDGDAIHKIQAGSILFNRTRNMLTATGGVEYKKEEGDKIETFRGESITVDLDNWSSIFLGGVSERSLQSDSTTYLFSGTVISRDEEDVTVLNNAVISNANNPESLWSLNASRVFLLPGSDFSIFNAVLKVGEIPVLYIPFFYFPADEVVFHPVIGFRTREGNFVQTTTYILGRPRASSSSQSSLTKILGNSSDMEKKREGMFWEPQKRVITX

SEQ ID NO: 21075 - DNA, 960 bp, Unknown
  Obtained from environmental sample
  misc_feature (1)..(960): n is a, c, g, or t
atgcgaagggcatgtaggaggcgatccaagttctccgtgtccgcggcgctccggctatcggcgtggcggcggctttcgggctttatctcggcgttcgcgattttaacggcgggcggcgttaattcatttttaggccatgtgaatgaacgcgccgcctacttatcctcctcccgccccacagccgtcaacctcttttgggcgcttgacaggatgaagaaattcgctcgcgcccaagcggagtcttgcggggatattgatgtcgatacattaaaaaaacgtatcttagaggaggccgtccgtatcttagaagaggacaaacggatgtgtcgggcgataggggagcatgggtttgagcttatcaaggataaagagtgcatcctgacccactgcaacgccgggggtttggcgacaagcgaactcggaacggcgctcgctcccatatacgtaggtcaggagcgcggggtaacgtttcgggtattcgccgacgagacgcgcccgctgttgcagggcgctagaataaccgcgttggagttgagcgaggccggaattcccgtgactgtgatatgcgacaacatggccgcctccgtcatggcgagcggtcagatcaaggcctgcatagtgggcgccgaccgcatagcggccaacggcgacacggccaacaaaatcggcacctacggcgcggctatatctgccgcctaccacaagatacccttctacgtagccgccccctcgtctacattcgacctaaaaatcaagagcggcgcggacatacctatagagaagcggggtagggaagaggtggcgctcttgggaggcgtcaagaagagtatcccggacaaggcggaggtgttcaatccgtcctttgacgtcactcctgcggatctgatcgcggcaatcatcacggaaaaaggggtgatttatccgccgtttactggaaatattgcgaaaataattcaataa

SEQ ID NO: 21076 - protein, 319 aa, Unknown
  Obtained from environmental sample
  DOMAIN (2)...(310): Initiation factor 2 subunit family
  misc_feature (1)..(319): Xaa is any amino acid
MRRACRRRSKFSVSAALRLSAWRRLSGFISAFAILTAGGVNSFLGHVNERAAYLSSSRPTAVNLFWALDRMKKFARAQAESCGDIDVDTLKKRILEEAVRILEEDKRMCRAIGEHGFELIKDKECILTHCNAGGLATSELGTALAPIYVGQERGVTFRVFADETRPLLQGARITALELSEAGIPVTVICDNMAASVMASGQIKACIVGADRIAANGDTANKIGTYGAAISAAYHKIPFYVAAPSSTFDLKIKSGADIPIEKRGREEVALLGGVKKSIPDKAEVFNPSFDVTPADLIAAIITEKGVIYPPFTGNIAKIIQ

SEQ ID NO: 21077 - DNA, 369 bp, Unknown
  Obtained from environmental sample
  misc_feature (1)..(369): n is a, c, g, or t
atgatcagatcggccgagcttagggcatttctgcttttattttccgcaggattcgcggtaatgtcaggctttcaaatgattatagcggcaacatcgttcaaatgggtgggaaatccgcgcttgtcggatattttagacagtatattatcatttggaaaatatcctttatcaatatttccaagaggaataaaaacgctcacgtcatttataattccggtaggcatgattggtttttttccggcaagcgctctgttggggcggcttgaaccggctgttttattttcagttatcccatgcgtgttgttcatgattttcgggatatggctgtatcactttatggttaaattatacgaaggagtcggcggctga

SEQ ID NO: 21078 - protein, 122 aa, Unknown
  Obtained from environmental sample
  SIGNAL (1)...(29)
  misc_feature (1)..(122): Xaa is any amino acid
MIRSAELRAFLLLFSAGFAVMSGFQMIIAATSFKWVGNPRLSDILDSILSFGKYPLSIFPRGIKTLTSFIIPVGMIGFFPASALLGRLEPAVLFSVIPCVLFMIFGIWLYHFMVKLYEGVGG

SEQ ID NO: 21079 - DNA, 600 bp, Unknown
  Obtained from environmental sample
  misc_feature (1)..(600): n is a, c, g, or t
atgtttattattaaagttaataatcttgtaaaaacctacactactttcaaacgcggaagcggcgtaaaggaaacattgaagagttttttcaaacgggaaaaagtgattatcaacgcggttgacaatatatcgtttaacgttaaagccggcgaaatatgcggcgttctaggccccaacggcgctggcaaatctacgacgataaaaatgctctgcggcgcgctctaccctacttcgggagaaattgacgttatgggatattcgcccggcaaagaacgcaaaaggtatgtgcgcgagatcggcgcggtattcggacagcgttcgcagttaatatgggatattccgcctgttgacagttttaacatgaaccgcgccatttacgggataacgcanacggaatataaatcgcgccttaacgagttagccgaaatgtttgaagttcaggaagttattaacaaaccgacaagggtgctgtcgcttggcgagcgcatgaaatgtgaattttatatggctatgcttcacaagccgaanaatatctttctggacgagccgacnatcgggcttgacgttatcgcaaaagcaaaatacgcgagttcatcctga

SEQ ID NO: 21080 - protein, 199 aa, Unknown
  Obtained from environmental sample
  DOMAIN (50)...(199): ABC transporter
  misc_feature (1)..(199): Xaa is any amino acid
MFIIKVNNLVKTYTTFKRGSGVKETLKSFFKREKVIINAVDNISFNVKAGEICGVLGPNGAGKSTTIKMLCGALYPTSGEIDVMGYSPGKERKRYVREIGAVFGQRSQLIWDIPPVDSFNMNRAIYGITXTEYKSRLNELAEMFEVQEVINKPTRVLSLGERMKCEFYMAMLHKPXNIFLDEPTIGLDVIAKAKYASSS

SEQ ID NO: 21081 - DNA, 300 bp, Unknown
  Obtained from environmental sample
  misc_feature (1)..(300): n is a, c, g, or t
atgaaacgtcttgagcttcccaaactgcttcatgaaaagggaaccaggctcaaagaagggctcattgcctgcgccaagaaacatggctacgatctccatgttaccggtgcgcccgcgcttttctacctgcgcctggccgatgacgattcgctcatgctccaccagaggtggatcgcagaaatggtcaagcggggaatttacatgacaaaccaccacaaccattttctcaactacagccttagcgacgccgacatacaaaccaccatcgaagtagccgatgaagcctttgcggtgttgtaa

SEQ ID NO: 21082 - protein, 99 aa, Unknown
  Obtained from environmental sample
  misc_feature (1)..(99): Xaa is any amino acid
MKRLELPKLLHEKGTRLKEGLIACAKKHGYDLHVTGAPALFYLRLADDDSLMLHQRWIAEMVKRGIYMTNHHNHFLNYSLSDADIQTTIEVADEAFAVL

SEQ ID NO: 21083 - DNA, 597 bp, Unknown
  Obtained from environmental sample
  misc_feature (1)..(597): n is a, c, g, or t
atggtattacgacgagctatttcnacgtttttggatcagatagacaagggccagtcttacttcatgcttggtcaggcctgtgaaggcaccggggactggaacaacgcgattaaggcttatgcccaatacctttcctacatgggttccaatgttccgggctttccaaacgccgacaactacgcaaagcaactggtggacttttacaattccgccaaggactggacttttgaaaacttaaacgcccttgtaagcgccgtaaaagacgcgctggacaacggcttttcaaacaggctctggcaataccacgccaaggtgaattttttcaccagaacctgggagcaggaagacgctggcgaagtgggcgtggcggggcacgttgattttaacctttcggactttatgagggggaaccgcatacgctacgcggaaaaccttgatctaagctccaccgccaacgaagcgtacctgagaacctggggttggtcgcaatatatttccacctggtacctttatttcagaaaaatctatttccctttagacccggaaatacacggccgctgggaatgggccggaatttactacggagaaaaattctaa

SEQ ID NO: 21084 - protein, 198 aa, Unknown
  Obtained from environmental sample
  misc_feature (1)..(198): Xaa is any amino acid
MVLRRAISTFLDQIDKGQSYFMLGQACEGTGDWNNAIKAYAQYLSYMGSNVPGFPNADNYAKQLVDFYNSAKDWTFENLNALVSAVKDALDNGFSNRLWQYHAKVNFFTRTWEQEDAGEVGVAGHVDFNLSDFMRGNRIRYAENLDLSSTANEAYLRTWGWSQYISTWYLYFRKIYFPLDPEIHGRWEWAGIYYGEKF

SEQ ID NO: 21085 - DNA, 579 bp, Unknown
  Obtained from environmental sample
  misc_feature (1)..(579): n is a, c, g, or t
atgaaccaagaggtcatacgcaaacacctggagagagtcggcctgcgcattataattgccgagaacggcaaggtgggcgtggacattgtcaaagagcgaggggagcgcggtgaaaagcccttcgacctaatcttcatggacatcaacatgccggtaatggacgggctggaagcgtcggcgcaaatgatggcgatgggcgtggaaacgcccgtggtggccatgaccgcaaacgttttgtcgaccgacagggaactctacgagcgaagcaatatgcgcgactgcataggaaaacccttcacatcgcaagagttgtggcactgcctgctcaaatacataaaacccgtagacaagccgcanaagaagcaaacagacaaggcccaagaaagaacaggcgtacggagacgacatcatncaaagagatgcgaccatcttcgtaaacgacaatcaaaacaccctgtccgaatttnaggactccatatgtcaaaacgaccttcaaaaaggccaaggatgggcccaccccctaaaaagcaaccccggatcttcggaaaaaaaccttgcaaccccccccttcaaccttaa

SEQ ID NO: 21086 - protein, 192 aa, Unknown
  Obtained from environmental sample
  DOMAIN (1)...(109): Response regulator receiver domain
  misc_feature (1)..(192): Xaa is any amino acid
MNQEVIRKHLERVGLRIIIAENGKVGVDIVKERGERGEKPFDLIFMDINMPVMDGLEASAQMMAMGVETPVVAMTANVLSTDRELYERSNMRDCIGKPFTSQELWHCLLKYIKPVDKPXKKQTDKAQERTGVRRRHHXKRCDHLRKRQSKHPVRIXGLHMSKRPSKRPRMGPPPKKQPRIFGKKPCNPPLQP

SEQ ID NO: 21087 - DNA, 456 bp, Unknown
  Obtained from environmental sample
  misc_feature (1)..(456): n is a, c, g, or t
ttgttgagcatggtcgcgtccgcgaaattccaagcgtggcttgtccgctatccgaatgaaacgcagtccgcgttacggtttctcgcggaggaattgggttggtatatctccgaactttttatcgcaggcgcaaaggttgtctccctgtccgacccgcacgctcaacggaacattataggagattcccgtttccgcgaattttgcgccgaaagtcaaatggctttgttaaaacaagtattaaaaataaacgtaaaaggcgcgctgcacctttgtccgtactgttttatgccgcttgaagaatacggactaataggcataaaagaaaaaaagacggcaaacgaaacctacgaactctcattactgatagccgccgacaacgccgatgaaacagttttaatcggaaggcaatgcccccacaccaaaaaagcggattttatttattacttgtctatatag

SEQ ID NO: 21088 - protein, 151 aa, Unknown
  Obtained from environmental sample
  misc_feature (1)..(151): Xaa is any amino acid
MLSMVASAKFQAWLVRYPNETQSALRFLAEELGWYISELFIAGAKVVSLSDPHAQRNIIGDSRFREFCAESQMALLKQVLKINVKGALHLCPYCFMPLEEYGLIGIKEKKTANETYELSLLIAADNADETVLIGRQCPHTKKADFIYYLSI

SEQ ID NO: 21089 - DNA, 600 bp, Unknown
  Obtained from environmental sample
  misc_feature (1)..(600): n is a, c, g, or t
atgaatatggaaaacactattgaattattacgcgaatccaacgcgatgcttgaagggcatttccttctcagttccggccgtcattcggataaatattttcaatgcgcaaaacttctgcagtatccggacaaagcgcaggccgcgtttaagccgattgtacaaaaaatcagcgaagatattaaaaacggaaaaatcaaggttgacatagttgcggggcctgctatgggcggaataatcgccgcgtgggaagcggcaaggcagctttctcttccggcgatttttacggaacgcgacgatacgggaacaatgactctgcgccgcggatttgagttaaagcccggagaaaacatccttattgtggaagatgtcgtaacaaccggaaaatcctcgatggaatgcgcaaaagcgcttaaagccgcgggcggaacggtaaccgccctcgcatgtattgtagaccgccgcacggaaaaagcggaagacattccctggccgttttatcccggagtaaaagtaagttccgcaaactgggaagcatccgaatgtcctctatgcaagcagggaattcccgcggtaaaaccaggttcaagaaaaattatataa

SEQ ID NO: 21090 - protein, 199 aa, Unknown
  Obtained from environmental sample
  DOMAIN (34)...(161): Phosphoribosyl transferase domain
  misc_feature (1)..(199): Xaa is any amino acid
MNMENTIELLRESNAMLEGHFLLSSGRHSDKYFQCAKLLQYPDKAQAAFKPIVQKISEDIKNGKIKVDIVAGPAMGGIIAAWEAARQLSLPAIFTERDDTGTMTLRRGFELKPGENILIVEDVVTTGKSSMECAKALKAAGGTVTALACIVDRRTEKAEDIPWPFYPGVKVSSANWEASECPLCKQGIPAVKPGSRKII

SEQ ID NO: 21091 - DNA, 711 bp, Unknown
  Obtained from environmental sample
  misc_feature (1)..(711): n is a, c, g, or t
atgacagaatcggccgagtattatgaggagatgggaattgacggattaaccgcttactccaaaactcttgagtatatccgcaaaaagaactgtcttgttatcgccgacataaaacgcggcgacattgcggatacggcgcgctgttacgcgaaagcccaccttacgggcgggtttaaggctgactttgtaactttaaacccctacatgggaatggattccatagagccgtggctttctgaagcgcgtaattcaggcggcggcgcgtttgtccttatgagaacaagcaacccgggaatgaaggactttcagtatctggaaacatccgacggtaaaaaactttacaacaaggtaggagataaattgtctgaacttgcggctaaacacaacggaaaaagcggatacgggcttttcggcgccgttgtcggatgtacggaaaggcaggaagccgctgttataagaaaaaattatcccaatctttttttccttattcccggatacgggacgcagggcggcggtgcgcaggacgcggcggtgctgcttcgctataaaaacggcggcgtagtaaacgcttcccgttcgataataacggcatggcaaaaagaagataacaatgaaaatgccgataacgcttttgccgccgcttccgcccgcaaagccgccataaaaatgcgcgatgaaattttatttgccgtaaacggagacagtaaatga

SEQ ID NO: 21092 - protein, 236 aa, Unknown
  Obtained from environmental sample
  DOMAIN (1)...(207): Orotidine 5'-phosphate decarboxylase / HUMPS family
  misc_feature (1)..(236): Xaa is any amino acid
MTESAEYYEEMGIDGLTAYSKTLEYIRKKNCLVIADIKRGDIADTARCYAKAHLTGGFKADFVTLNPYMGMDSIEPWLSEARNSGGGAFVLMRTSNPGMKDFQYLETSDGKKLYNKVGDKLSELAAKHNGKSGYGLFGAVVGCTERQEAAVIRKNYPNLFFLIPGYGTQGGGAQDAAVLLRYKNGGVVNASRSIITAWQKEDNNENADNAFAAASARKAAIKMRDEILFAVNGDSK

SEQ ID NO: 21093 - DNA, 630 bp, Unknown
  Obtained from environmental sample
  misc_feature (1)..(630): n is a, c, g, or t
gtgtcagggagattttatatgatacgcagaaacgactatatttccgacgctgaatggcggaattttcttgaattttcacaaaaccttgaaacgccgtgtctcgtagtcaatctgcgcggcataagggacaattatattaaaatacgcgattctttcccgtatgcgaaaatttactacgcggttaaagcaaatcctgatatgacgatactttccatgcttgataagttagacgcaaatttcgacattgcctcccgctatgaacttgatcaggtcatgtcgctggggatttcacccgaccggatgtcttttgggaatacgatcaaaaaggcaaaagatgttgcgtacttttatgaaaaaggcgtgcgaatgttcgcgaccgacagtgaagacgatcttaaaaacattgcctctaatgctccgggcgcccgcgtttatgtgcggatcgtcatgggcgattccagcaccgcggactggccgctttcgcgtaaattcggctgtcaccctgacatggcgtacagccttttaattatggcgcgagatctcggcttaattccctacggcatatcatttcatgtgggaagccagcagagggatattggccagtggacgaggcatcctcggccgatctga

SEQ ID NO: 21094 - protein, 209 aa, Unknown
  Obtained from environmental sample
  DOMAIN (37)...(208): Pyridoxal-dependent decarboxylase, pyridoxal binding domain
  misc_feature (1)..(209): Xaa is any amino acid
MSGRFYMIRRNDYISDAEWRNFLEFSQNLETPCLVVNLRGIRDNYIKIRDSFPYAKIYYAVKANPDMTILSMLDKLDANFDIASRYELDQVMSLGISPDRMSFGNTIKKAKDVAYFYEKGVRMFATDSEDDLKNIASNAPGARVYVRIVMGDSSTADWPLSRKFGCHPDMAYSLLIMARDLGLIPYGISFHVGSQQRDIGQWTRHPRPI

SEQ ID NO: 21095 - DNA, 663 bp, Unknown
  Obtained from environmental sample
  misc_feature (1)..(663): n is a, c, g, or t
gtgatgtcccgcgagtttgtcgcgcagctggatgccggcgacaagcgcttcctcttgcgcttgacgcgcaacctccttgaacagggaggggccgttcatgaggtattgcagacctttgcccgcagcctcaagcactttgttcaaagccgcgaataccttgagcagcggcgcttaaaccagctccttaaagacgcggaacgcacggcccttgcgctcaaggatgggattaaagcgacagaagagcttaaatacacgcttgtgcttacaagcagccgcgtccgctccttgtcccaatgggtgctttacgatccgtccatgcaagccttgcctgacggaatgcgggatggggaagcttctatcagggatctggaatctgtcggggaattgcttgcacaatcggagatagattttagatcgcttaaagcggatgtgcgcgatgttctggaaaaactttcacaggcgtcaatttatgaggtgcttgaacagcatccagcggctcaggggctgggcagcgttgtcgggcttatcgcgctgggcagccggcacggtatagcgtcgggtagccgggagacggtctcctgggttggcaatgacgagcaacagcggagtgcgcggatacccaaaatatttttcttgcgggagcggatggatgagcttgtctga

SEQ ID NO: 21096 - protein, 220 aa, Unknown
  Obtained from environmental sample
  misc_feature (1)..(220): Xaa is any amino acid
MMSREFVAQLDAGDKRFLLRLTRNLLEQGGAVHEVLQTFARSLKHFVQSREYLEQRRLNQLLKDAERTALALKDGIKATEELKYTLVLTSSRVRSLSQWVLYDPSMQALPDGMRDGEASIRDLESVGELLAQSEIDFRSLKADVRDVLEKLSQASIYEVLEQHPAAQGLGSVVGLIALGSRHGIASGSRETVSWVGNDEQQRSARIPKIFFLRERMDELV

SEQ ID NO: 21097 - DNA, 657 bp, Unknown
  Obtained from environmental sample
  misc_feature (1)..(657): n is a, c, g, or t
atgatcagatcggcacgagtgggcgggagaaccgctgtttttgtcgatttgggcttttcttcggacggcaggatatatatgttcggtcaatacggggtattatccacgtctttacgcccttgggcggatttgtacattgtagatgtagttaccaattcttttgttcaaaacggcagggtatcgcttaccgaaagcgctccgataaaagcgggacaggacggttccggcattttacacagattagtttccaataactcaagcctgacaaatcaatacggaattaattttcagaatcagggacttccgctttacatttccagagacgaaagacctccatcgcgcggagaaaaaatcgatttccgcgatttcctttccggcaagtcatatatcgcgcagttaattcccacagttacaggaagcgggcggaacgcaagatcgcaattttatattaacgttgatgtttcttcacctaacggtcaattcagaacatacaaagtcggcgctcctacttttgtccgtcagggaattgttcaatacaacattaaaagagttttgattaacgcaaacggcaactctgttatttttgtaatagaaacaatgcatgccaccgacaacggctacgatatccgttacatgatagaagccctaagactttag

SEQ ID NO: 21098 - protein, 218 aa, Unknown
  Obtained from environmental sample
  misc_feature (1)..(218): Xaa is any amino acid
MIRSARVGGRTAVFVDLGFSSDGRIYMFGQYGVLSTSLRPWADLYIVDVVTNSFVQNGRVSLTESAPIKAGQDGSGILHRLVSNNSSLTNQYGINFQNQGLPLYISRDERPPSRGEKIDFRDFLSGKSYIAQLIPTVTGSGRNARSQFYINVDVSSPNGQFRTYKVGAPTFVRQGIVQYNIKRVLINANGNSVIFVIETMHATDNGYDIRYMIEALRL

SEQ ID NO: 21099 - DNA, 834 bp, Unknown
  Obtained from environmental sample
  misc_feature (1)..(834): n is a, c, g, or t
atggcaatccgcagtctttcgataaaagcgcctgtcagtgatattaattacagggactacatcgcgaaacaggacttatttcaatatcaaaatacaaggccgaatatacagttgaaaattcagggcgaaagagcggtgcgccgttccgatccttcgctgtacccaaattacgaccgttcttccggcgcgaccgagccgcccagcgtggcgagaatccgacttaacatgataggcggtgaaagatggcgcgtcgcgggccagtggatcgaatgggaagttgatatacccgaagacggcttgtaccgcttgtcggtaaaaggtcggcagaattataaccgcgggtttgtatctaaccgcactgttcttattaacggaaaaactccctgccgcgagctttcagccataccgtttacatataacaacaaatggcagcttataactcttcgcgacaatgaaaaaaaagattttatggttttcccgcttaacaggggcgcaaatacaattcgtttgcaggcgaccttaggcgatatgggcgcgatattaaatgtaatggaagaaagcgtgttccgcctgaacggaatttacagaaagatacttgtgcttacgggaaccgagcctgacgtataccgcgattaccgcgttgaatatgtttatcctgaagtaatagaagcgatggctctggaaagcaaaatcctctacaaactggtagacgatttaacccgctattcgggcgagcgcagcgctcaggcggccgcaacgcttacccttgcgcgccagcttgaacttttttgccagcgtcccgataaaattcccgcgcactcttacaaactttaa

SEQ ID NO: 21100 - protein, 277 aa, Unknown
  Obtained from environmental sample
  misc_feature (1)..(277): Xaa is any amino acid
MAIRSLSIKAPVSDINYRDYIAKQDLFQYQNTRPNIQLKIQGERAVRRSDPSLYPNYDRSSGATEPPSVARIRLNMIGGERWRVAGQWIEWEVDIPEDGLYRLSVKGRQNYNRGFVSNRTVLINGKTPCRELSAIPFTYNNKWQLITLRDNEKKDFMVFPLNRGANTIRLQATLGDMGAILNVMEESVFRLNGIYRKILVLTGTEPDVYRDYRVEYVYPEVIEAMALESKILYKLVDDLTRYSGERSAQAAATLTLARQLELFCQRPDKIPAHSYKL

SEQ ID NO: 21101 - DNA, 417 bp, Unknown
  Obtained from environmental sample
  misc_feature (1)..(417): n is a, c, g, or t
atgatgaaaagacaaaaaaaactggttggcggcagaagattaaaccggtcttacggcggcgacgcttttattattacattactcacaattttcggcgtgtttttcgcgttcccgcttgtgtttaatattaaccacgcgtttaaaccgttaaacgaaatcttcctgtttccgccaaatgtttgggtgcgcaatcctacggcaaataactttcaggatctgtttattattatgagcaagtcttgggtaaccgggattgtggattccggggttgtctttatcgatttccccagtggtgatatcctcgcctttggcgttcgttacgctaagactgcggaaagtggaatacacgtctatcggcagttctataacgccgccgcggtagttaatcagtatcgcgggttgcccgttagtctttag

SEQ ID NO: 21102 - protein, 138 aa, Unknown
  Obtained from environmental sample
  misc_feature (1)..(138): Xaa is any amino acid
MMKRQKKLVGGRRLNRSYGGDAFIITLLTIFGVFFAFPLVFNINHAFKPLNEIFLFPPNVWVRNPTANNFQDLFIIMSKSWVTGIVDSGVVFIDFPSGDILAFGVRYAKTAESGIHVYRQFYNAAAVVNQYRGLPVSL

SEQ ID NO: 21103 - DNA, 657 bp, Unknown
  Obtained from environmental sample
  misc_feature (1)..(657): n is a, c, g, or t
ttgttcagggcggttgtttatatgcctaatcttctgacagccgtatcggttgctttgcttttccgcagtatnntcgggttcggcgcttttgccacttctcctgcgaatcaatttttaagttcattaggtataagagcgacaaaagtggatccaattaccaaggaaataataaaagacgcttttgattttttccgaaatgtcgcgttttcacgcggacttgtggcgtttattcaatggtggatgtggtatggttatacgatgatcatacttatggcgggtattactactatccccatatcattgtatgaatccgcgtccattgacggcgctaacagcagccaaaccacatggtatataacattgccgcttctgcgtcccataatgctctatatccttgttacatccatgatcggaggtatgcaaatgtttgatattccattcctgcttaccgatatgatgggcggtcctgatttcaaaatcaggactacaacggtgtaccagtacaacagggcttttttcagaggaaataccgaatacgcgtacggcgcagcaatttccgtaggcatatttattgttacaataatcctggctttaataatatttttcttcctgcaggatagaagtgaaatcaagaaaaacaagggaggcgcggtatga

SEQ ID NO: 21104 - protein, 218 aa, Unknown
  Obtained from environmental sample
  SIGNAL (1)...(28)
  misc_feature (1)..(218): Xaa is any amino acid
MFRAVVYMPNLLTAVSVALLFRSXXGFGAFATSPANQFLSSLGIRATKVDPITKEIIKDAFDFFRNVAFSRGLVAFIQWWMWYGYTMIILMAGITTIPISLYESASIDGANSSQTTWYITLPLLRPIMLYILVTSMIGGMQMFDIPFLLTDMMGGPDFKIRTTTVYQYNRAFFRGNTEYAYGAAISVGIFIVTIILALIIFFFLQDRSEIKKNKGGAV

SEQ ID NO: 21105 - DNA, 588 bp, Unknown
  Obtained from environmental sample
  misc_feature (1)..(588): n is a, c, g, or t
atgtggcaaggaatgacgcgattacaagcggcgtcaggaatccaatttacgatgtatcggagggagaatatgatatctgaatattattatgaatctaaatcctccgagagtatgctgttaaaaaagaaatccgcggaaaaaatagaaaaaggacttaaaagaattttaattatagccggtattatttttgccgccgaattagtttggcttcttggaataagtccgtttattccgttctccacagttgaagttcaagggttctccgatttctcgcgctctcaaatcctttaccttggcggtattgacgacaattcttcatatttttcaactaacgttaaccttgtaaaagaaagactttcatcaaatattcttgtggagtcggcggttgtaatgaagcgtttccctgataaattgtcaatctatttgaatccgcgcaaacccgccgccgttacactggtaaatacaacttcaggtcaagcaatgatgtacatcgacaggcacggagttatttataagtttgaagaaacagcctcaatggaaaaaagcggatattcccgttatttcgggaatagagaatcctcagcttaa

SEQ ID NO: 21106 - protein, 195 aa, Unknown
  Obtained from environmental sample
  DOMAIN (77)...(145): POTRA domain, FtsQ-type
  misc_feature (1)..(195): Xaa is any amino acid
MWQGMTRLQAASGIQFTMYRRENMISEYYYESKSSESMLLKKKSAEKIEKGLKRILIIAGIIFAAELVWLLGISPFIPFSTVEVQGFSDFSRSQILYLGGIDDNSSYFSTNVNLVKERLSSNILVESAVVMKRFPDKLSIYLNPRKPAAVTLVNTTSGQAMMYIDRHGVIYKFEETASMEKSGYSRYFGNRESSA

SEQ ID NO: 21107 - DNA, 315 bp, Unknown
  Obtained from environmental sample
  misc_feature (1)..(315): n is a, c, g, or t
atgagaagggacattcttcacccgggagcgggaaagcttagatacgaaattagggaaatcgtaagttttgccaagactctgggaaaatggaatataccaatccattgggaaaacatcggggatccggttcaaaagggcgaaccggtggcagactggattaaggatatcgttcgggaaaaagcctgggaaaatctttcttatgcatattcagagacagagggagtccgttccgccagggaattcatttccgcccaggcaaacctgcggcctgtaattgaactgccgggcgcgggcgcgcaaacaacgcctcattaa

SEQ ID NO: 21108 - protein, 104 aa, Unknown
  Obtained from environmental sample
  misc_feature (1)..(104): Xaa is any amino acid
MRRDILHPGAGKLRYEIREIVSFAKTLGKWNIPIHWENIGDPVQKGEPVADWIKDIVREKAWENLSYAYSETEGVRSAREFISAQANLRPVIELPGAGAQTTPH

SEQ ID NO: 21109 - DNA, 531 bp, Unknown
  Obtained from environmental sample
  misc_feature (1)..(531): n is a, c, g, or t
atgaaaaatatcaagagtaatgaatttgattcgtattggaaaagctgcgcgtaccggaaagatgatgaggctgttgaaaccgttgtaaaagaaattattgccgctgtcggcaaggatggcgacgcggcggtgcgcggtttcgcgtcaaggtttgacaagagctcccctcagcggcttgaagttccaatgcaagcggttatacaggccgccgctgaattaaagcggaacgattctgaattgaccgccgccatggagcttgccgcagatcatataaaacgtttttctttgcggcagcgggagcagttttccgattttgattacgagatggaagaagggctttttaccgggcagagggtaatacccgtggacagggcggcggtttatgttcccgcaggccgtttccctctgttttcatctgtgcttatggngttgatccccgctttctgcgccggtgtggatgaaatatacttgtttcgcccgctctggaagacggcctccctgacaggaatatccttgccgccgccgcaatag

SEQ ID NO: 21110 - protein, 176 aa, Unknown
  Obtained from environmental sample
  DOMAIN (13)...(176): Histidinol dehydrogenase
  misc_feature (1)..(176): Xaa is any amino acid
MKNIKSNEFDSYWKSCAYRKDDEAVETVVKEIIAAVGKDGDAAVRGFASRFDKSSPQRLEVPMQAVIQAAAELKRNDSELTAAMELAADHIKRFSLRQREQFSDFDYEMEEGLFTGQRVIPVDRAAVYVPAGRFPLFSSVLMXLIPAFCAGVDEIYLFRPLWKTASLTGISLPPPQ

SEQ ID NO: 21111 - DNA, 327 bp, Unknown
  Obtained from environmental sample
  misc_feature (1)..(327): n is a, c, g, or t
atgtcagatgataaatattttgataacgaaccgcattctcgccacgacagaggaatggatatgcagatggacgaccgtgacggcgacgaccgaggacgcggcggtaaagggcagaaagtttttttcaagaaaaaggtctgcaaattttgcgcccaaaaaatgaagatagactacaaagaggccgataccctccgcaggtttatcaccgaaaggggaaagattcttccccgcaggattaccggaacctgcgcgaaacatcaacgcgccctggctttggccattaaacaggcaagaagcatcgctcttcttccatacgtggcggaataa

SEQ ID NO: 21112 - protein, 108 aa, Unknown
  Obtained from environmental sample
  DOMAIN (50)...(103): Ribosomal protein S18
  misc_feature (1)..(108): Xaa is any amino acid
MSDDKYFDNEPHSRHDRGMDMQMDDRDGDDRGRGGKGQKVFFKKKVCKFCAQKMKIDYKEADTLRRFITERGKILPRRITGTCAKHQRALALAIKQARSIALLPYVAE

SEQ ID NO: 21113 - DNA, 450 bp, Unknown
  Obtained from environmental sample
  misc_feature (1)..(450): n is a, c, g, or t
ttgctcgaaaaaatgcgcaagcgggagtatggaatgcttgacatcaacatcaccgccctgatccaggcgctgaacttttttatcgccgttattgtcctgaactggctgctcatccgtcccgtcagggagatcctcaggcagcgcaaggcaaaaatggacgagttgctggcttcggcccaaagcttcgtccgttccgcggatgaacagcttgccgggtatgaggacagcctgggcctggcccgccgggatgcgtcccaggcgcgcgccggcgcccgcgcggacgccctgaacgaacaacaggctctcgtggcggaggctggcaaacgcgcccaggaacagcttgcccggacaaagaactccctcgcgcaggaagcgcagagcgtccgggccgaattggccaggcaggtgcagcccctggccgccaaagccgtggacaggatgataggctga

SEQ ID NO: 21114 - protein, 149 aa, Unknown
  Obtained from environmental sample
  DOMAIN (18)...(149): ATP synthase B/B' CF(0)
  misc_feature (1)..(149): Xaa is any amino acid
MLEKMRKREYGMLDINITALIQALNFFIAVIVLNWLLIRPVREILRQRKAKMDELLASAQSFVRSADEQLAGYEDSLGLARRDASQARAGARADALNEQQALVAEAGKRAQEQLARTKNSLAQEAQSVRAELARQVQPLAAKAVDRMIG

SEQ ID NO: 21115 - DNA, 342 bp, Unknown
  Obtained from environmental sample
  misc_feature (1)..(342): n is a, c, g, or t
gtgtactgttgcgcggcgcgccggcgccggaaccaaggggggtggacattgagcagatacgcaaccatagcggcggcccttgccctggcgctcctcagcgcggccatcgccttcgcctccgacggacaggagggcgggcaggcccctgtgctgaattttgtctggcgcttgctcaatatcgctgtgttcgtcggtattctgtacaagctggtcggcaagaaggccaaggacttcttcatcggtcgccgcgacggcatccgcgcggacctggaaaatctggaagccggaaagacggaagccgaacgccgccttgcggaagtccggcacgcatcgccaacctga

SEQ ID NO: 21116 - protein, 113 aa, Unknown
  Obtained from environmental sample
  misc_feature (1)..(113): Xaa is any amino acid
MYCCAARRRRNQGGWTLSRYATIAAALALALLSAAIAFASDGQEGGQAPVLNFVWRLLNIAVFVGILYKLVGKKAKDFFIGRRDGIRADLENLEAGKTEAERRLAEVRHASPT

SEQ ID NO: 21117 - DNA, 639 bp, Unknown
  Obtained from environmental sample
  misc_feature (1)..(639): n is a, c, g, or t
gtgaacgtctgcgacgaaacttcagtcggggcgatgtttaggaccattgccgaaacctcaggcggcctggatctctgcgtcagcaacgccggggtgctaaaagccggcagcgttctggaacagccactggacgactttaaatttgtcacggatataaactacacaggcttttttataatatgcaaacacgccggccggttcctgcgaatccagcatcttacagcgcctgattggaaaacagacattgtgcagattaattcaaaatccggcctggaaggctccaataaaaacggcgcttactcaggaggcaaattcggcggcattggactcgtagcaagctttgccctggaattggtcgaatataatattaaagtaaatgccatttgccctggaaattttttggacggccccctctggtcggatcctgaaaaagggctttttgtccaatacctgaaaacaggcaaagtacagggagcaaagaccgttgccgatgtccgcgcgttttacgagtccagggttccgatgaaaaggggctgcaccggaaaagacctggttcgcgctcttttttacatcgtggagcaggaatacgaaacagggcaggccattcctgtaaccggtgggcaggtaatgctgcactga

SEQ ID NO: 21118 - protein, 212 aa, Unknown
  Obtained from environmental sample
  misc_feature (1)..(212): Xaa is any amino acid
MNVCDETSVGAMFRTIAETSGGLDLCVSNAGVLKAGSVLEQPLDDFKFVTDINYTGFFIICKHAGRFLRIQHLTAPDWKTDIVQINSKSGLEGSNKNGAYSGGKFGGIGLVASFALELVEYNIKVNAICPGNFLDGPLWSDPEKGLFVQYLKTGKVQGAKTVADVRAFYESRVPMKRGCTGKDLVRALFYIVEQEYETGQAIPVTGGQVMLH

SEQ ID NO: 21119 - DNA, 606 bp, Unknown
  Obtained from environmental sample
  misc_feature (1)..(606): n is a, c, g, or t
atgaccgaacatctgcgcaacaccaacagcaacaaaacctatgacccaacatgggccgccgtttggagttttgcggaagattttcataactgtatgatcaatgattacaacgcctatgtttattggtatgcaaaacgtttttatggcttaatcggggactcagaggcgggcgttaccaaccagcgtgacggacaaccccagcttcgcggtcttttaatgtcccattactcaaaatacgccgccggtaaatatcggtataacgccaattgggttaaaaatgactggactacatcaagtaatgaacctgataatgtccgcgcaaccgtttatatggatgaagaaacaattactatggtgttaaccaataaatcaactgtaagcggtcaaaacggcaacatgtgggttcatgtaaaactgccggctgcggttaagtcgggatttgccatcgtcacctataattcaaatggacccgatcaaactctcagcgccaccgcttctactatggtaaaacaacagccaataacgcttcaattcaacactgacaaaacgaccgcctcggttaaaatgcccgcatccagttttgtgtcgattaggttctacaagtga

SEQ ID NO: 21120 - protein, 201 aa, Unknown
  Obtained from environmental sample
  misc_feature (1)..(201): Xaa is any amino acid
MTEHLRNTNSNKTYDPTWAAVWSFAEDFHNCMINDYNAYVYWYAKRFYGLIGDSEAGVTNQRDGQPQLRGLLMSHYSKYAAGKYRYNANWVKNDWTTSSNEPDNVRATVYMDEETITMVLTNKSTVSGQNGNMWVHVKLPAAVKSGFAIVTYNSNGPDQTLSATASTMVKQQPITLQFNTDKTTASVKMPASSFVSIRFYK

SEQ ID NO: 21121 - DNA, 306 bp, Unknown
  Obtained from environmental sample
  misc_feature (1)..(306): n is a, c, g, or t
atgattctcgcggtttcaggttccatcagcgcgtttgaaccgccctatgttataacaaacggcacattcgataccgctacatattntgttacaatgcacagcatggcgcatgaaaaacagaaagtcggccttgcttcggcaatggccattgttttaatgctgctgattattctgattactctgttacagcggtttgtcagcagaactttctttgaggaagacaagtacggatattcattcagcgaacgccgcgcgatgcgaaagcgggcccgaatgaaaattattcaggcggagaacgttaaatga

SEQ ID NO: 21122 - protein, 101 aa, Unknown
  Obtained from environmental sample
  misc_feature (1)..(101): Xaa is any amino acid
MILAVSGSISAFEPPYVITNGTFDTATYXVTMHSMAHEKQKVGLASAMAIVLMLLIILITLLQRFVSRTFFEEDKYGYSFSERRAMRKRARMKIIQAENVK

SEQ ID NO: 21123 - DNA, 852 bp, Unknown
  Obtained from environmental sample
  misc_feature (1)..(852): n is a, c, g, or t
gtgctcaattacatgtggcacggcaacccgcgttacacgtgggatccggtcaatcacgtgattataaatagggcgaacacctctcaacgcgacgccgggcagcgcttcgccaagttcctatgggataggcggcaggcgccctggaacgacacatgcgagaagataatcggcgagggctcttggtggggcccgtctatgctcaaataccactactcgccggacggcagggcgctgacggtctaccccctaaactggattcacgggacgggttcgccctccgccgtcgccgcccaagacgccgatctcatggccgagatgtaccggcaagccgaactcgaatgggacgtcgaggagccaggcgacaggtatctgacgagcaccccgcattacttccacggattcttcagattattggggatgaccaccctcaccggcaacaaccacgcccccttgaacatgaaaagggcggctaacatgaaggtctatcttgacgttgataaaacctacgcctttgaggacgacaccatcacatatactatagactacagaaactacggggcggacgaggccaagggagtgcggatcgtcaacaaactgcacccggatttcgtcttcatctccggtaccggttcgccgtcgtacgacgccgcctcgaataccgttacttggaacataggcaacgtaacaggattcaagacgtcgaccggcgttaatcccacaaaaggaaccgtaactctaaaggtcaaaataccggccgcgaaactcanacgctacgagaacaaagtctcgatatcatgctcaaacgggtcgggttggacgtcaagcgaatatcccaacagatatcctccgtga

SEQ ID NO: 21124 - protein, 283 aa, Unknown
  Obtained from environmental sample
  DOMAIN (136)...(209): Domain of unknown function DUF11
  misc_feature (1)..(283): Xaa is any amino acid
MLNYMWHGNPRYTWDPVNHVIINRANTSQRDAGQRFAKFLWDRRQAPWNDTCEKIIGEGSWWGPSMLKYHYSPDGRALTVYPLNWIHGTGSPSAVAAQDADLMAEMYRQAELEWDVEEPGDRYLTSTPHYFHGFFRLLGMTTLTGNNHAPLNMKRAANMKVYLDVDKTYAFEDDTITYTIDYRNYGADEAKGVRIVNKLHPDFVFISGTGSPSYDAASNTVTWNIGNVTGFKTSTGVNPTKGTVTLKVKIPAAKLXRYENKVSISCSNGSGWTSSEYPNRYPP

SEQ ID NO: 21125 - DNA, 678 bp, Unknown
  Obtained from environmental sample
  misc_feature (1)..(678): n is a, c, g, or t
atgaatctgaatcggctggtctcggaaagctacgaggaaaacaagcccctgtccctggattttatgcggcataaaaaaaaggaaataatcgaaaacgaggctgccggacttttggaatttatggagacttcattcaacctttcccatgtatccggccatgactttgtgaagaagcgcttcaagaacgcggcaaaggcgatcaagatgggccgtcacgatgtgctgcccatgggctacctaatcgcagggcctgttggcacgggaaaaagttttatggtcagcgcctttgccggtgaaatcggaatcccaatggtaaagttccgtaatttccgcaccaagtggcagggagaaaccgaatccaaccttgaaaaagtccttaatattcttgtcgccatgtctcctgtggcggtgatgatcgatgaggccgacgcttttttgggcgaccggaatcaggaaggggactccggtaccagcaaccgcgttttcgcgcagattgccagttttatgggcaataccgaatacagggggaaaatcatctggttcctgattacctgccgccccgaccttattcccatcgacctgaaacgcgcgggccgtgccgaagagcatcttgccctgttctaccccgaatcgaccggnagcgggaggaccttttcaaaccctggttcgcaaacttga

SEQ ID NO: 21126 - protein, 225 aa, Unknown
  Obtained from environmental sample
  DOMAIN (78)...(223): ATPase family associated with various cellular activities (AAA)
  misc_feature (1)..(225): Xaa is any amino acid
MNLNRLVSESYEENKPLSLDFMRHKKKEIIENEAAGLLEFMETSFNLSHVSGHDFVKKRFKNAAKAIKMGRHDVLPMGYLIAGPVGTGKSFMVSAFAGEIGIPMVKFRNFRTKWQGETESNLEKVLNILVAMSPVAVMIDEADAFLGDRNQEGDSGTSNRVFAQIASFMGNTEYRGKIIWFLITCRPDLIPIDLKRAGRAEEHLALFYPESTGSGRTFSNPGSQT

SEQ ID NO: 21127 - DNA, 678 bp, Unknown
  Obtained from environmental sample
  misc_feature (1)..(678): n is a, c, g, or t
ttggcgctctttccggaagccgccccgattgcctgggacagcgcggctctgaaccgttccatgagttttatatacgactggacccaggaggcgaatgccggcaataacgcagaagaggaatttacattcaaatacttttttgagcctccggtaaagatggtccagtccggccgtatcctctttacttatatggaaagcagcgacttttttacattgagcgaagatagccgcggcagtctagacttccgctggattgccgaacagaacaccattcccctggccgaaggcgctgtgtacatggggcttcccaaaaaaggcaaatccccccaggcggcaaaagcttttgtccagtggtttttccggctcgaaacccagcgccagcttctggaaagcagcagtgacaaccgtatggacgaaactgttttcggcatttgcggcggtttttccgctctgtccccggtaacagaacaggtattccccaaattctacgaggatcttttggggcatatgcctcccgccgaactcctttctcccgcgaacatccttcccggcaattggactgtccttaaaaaccggataatcctcccttacctccgcgaccgcgcccgcagcgcgcgtacaagcgatgtgtatcccctggaaaggcgtatctctgactggctccgggtaaaccggtaa

SEQ ID NO: 21128 - protein, 225 aa, Unknown
  Obtained from environmental sample
  misc_feature (1)..(225): Xaa is any amino acid
MALFPEAAPIAWDSAALNRSMSFIYDWTQEANAGNNAEEEFTFKYFFEPPVKMVQSGRILFTYMESSDFFTLSEDSRGSLDFRWIAEQNTIPLAEGAVYMGLPKKGKSPQAAKAFVQWFFRLETQRQLLESSSDNRMDETVFGICGGFSALSPVTEQVFPKFYEDLLGHMPPAELLSPANILPGNWTVLKNRIILPYLRDRARSARTSDVYPLERRISDWLRVNR

SEQ ID NO: 21129 - DNA, 471 bp, Unknown
  Obtained from environmental sample
  misc_feature (1)..(471): n is a, c, g, or t
atgaaccatgtgtcggttaacgccgaagaagtggcgcttcccaagtggagcgattccatgagccgctttgcccttaaagtgctggatgaaataaaacgcgacaactgggagctttctatacttttgtgcggggataagacaattaccgcccttaattcccaatacaggaacaagtttgaacccacggatattctgtcgtttactttaggcgagacggtacaggagcaaggtaaaaccgtttatctgccgggtgaccttgtaatttccctggacacattgcgcgaaaacgcaaagtattttgacacatgcgaagatgaggagttacgcaggctgttaattcatggtatccttcatttagacggcatggatcacgaaaccacggataaagaagagcccatgctcatctttcaggaggaaatactggtcaggttaaaagacgagcatatattgggagccgggggaaaaacgtga

SEQ ID NO: 21130 - protein, 156 aa, Unknown
  Obtained from environmental sample
  DOMAIN (43)...(139): Uncharacterized protein family UPF0054
  misc_feature (1)..(156): Xaa is any amino acid
MNHVSVNAEEVALPKWSDSMSRFALKVLDEIKRDNWELSILLCGDKTITALNSQYRNKFEPTDILSFTLGETVQEQGKTVYLPGDLVISLDTLRENAKYFDTCEDEELRRLLIHGILHLDGMDHETTDKEEPMLIFQEEILVRLKDEHILGAGGKT

SEQ ID NO: 21131 - DNA, 765 bp, Unknown
  Obtained from environmental sample
  misc_feature (1)..(765): n is a, c, g, or t
atgtcagaagtattgtccataatattgggcggcggcaagggaactcgtctgttcccattgactcagtttcgttcaaagccggctgttccatttggcggcaaatatcgccttatcgacatacctctgtctaactgtataaatgcgaatttaaagcgaatttacattgtaacccagttcaatactgcttctttgcacctgcatatcaatcaaacttacatttttgacccctttacaaacggtttcgtcgaaattctggctgctgaacaaagtcttgtacattcgggctggtacgagggcacggcggacgcagtacgaaagaattttccgcacttcagaacgcagaatccttcctactatataatactttcaggcgaccagttgtacaggatggacttacaggatcttttagaaaagcatattgagtcaaaagcggccattactatcgcctgtaccggcgtaacccgtgaaaacgcgagcggtttaggcatcctcaaggccgataagaacaaccaaatcactgaatttatggaaaaacccggtccgacaaaggatatttccgactttaaagctccaaaagagctgcttcgcgataaaaacaagggcgattgtttcctcggttctatgggaatttatgtttttaacgcanaagcaatggaaagctgccttgcaaatgaacttacagactttggaaaggaagtaatccccgaagccatcagcaaacttaaagtaacgcctatctttttgacggctactgggaagatatag

SEQ ID NO: 21132 - protein, 254 aa, Unknown
  Obtained from environmental sample
  DOMAIN (5)...(252): Nucleotidyl transferase
  misc_feature (1)..(254): Xaa is any amino acid
MSEVLSIILGGGKGTRLFPLTQFRSKPAVPFGGKYRLIDIPLSNCINANLKRIYIVTQFNTASLHLHINQTYIFDPFTNGFVEILAAEQSLVHSGWYEGTADAVRKNFPHFRTQNPSYYIILSGDQLYRMDLQDLLEKHIESKAAITIACTGVTRENASGLGILKADKNNQITEFMEKPGPTKDISDFKAPKELLRDKNKGDCFLGSMGIYVFNAXAMESCLANELTDFGKEVIPEAISKLKVTPIFLTATGKI

SEQ ID NO: 21133 - DNA, 513 bp, Unknown
  Obtained from environmental sample
  misc_feature (1)..(513): n is a, c, g, or t
atggacgtggtggaatacaaacatgtcgtgctggggcttattttcctcaaatacatttcggataaattcgaggagcgttaccgtgagcttgaagccgatgatgacgatgtagaagataaagacgcgtatgccgaggtgaacgtgtttttcgtgccgcctcaggcgcactggagcgccatctgtgaagcggcgcacaaagaggaaatcggtacagttattgatgacgatatgcgggcgattgagaaagagaacaaacggctgaaagacgtattgccgaaaaactacccccgcggcgaacttgataagcaccgcctgggaaacgttgttgacctgttcaccaacattcagatggttgagcacggcacggactatgtcgggattaaggagcaaacggatgacggtgaaccttttgaggataagatggcgcggctgacgggcgaactctcagagatgttcaaacgctcccgcaaactggaggacgaaatccgcgaaaggctgggggcgattgggtaa

SEQ ID NO: 21134 - protein, 170 aa, Unknown
  Obtained from environmental sample
  misc_feature (1)..(170): Xaa is any amino acid
MDVVEYKHVVLGLIFLKYISDKFEERYRELEADDDDVEDKDAYAEVNVFFVPPQAHWSAICEAAHKEEIGTVIDDDMRAIEKENKRLKDVLPKNYPRGELDKHRLGNVVDLFTNIQMVEHGTDYVGIKEQTDDGEPFEDKMARLTGELSEMFKRSRKLEDEIRERLGAIG

SEQ ID NO: 21135 - DNA, 612 bp, Unknown
  Obtained from environmental sample
  misc_feature (1)..(612): n is a, c, g, or t
ttggcgaaaagggaaacntacgagatcatgactccgcagtcaataggcattccccaaaaccgcatggttctaggcaaacattcgggccgccacgcttttgaggagcgccttaaagacctgggtataagtgtcgaagcggaggcgtttgaaaaaatatttgccgactttaaagaacttgccgacaaaaagaaagttgtcagcgaccgcgacattgaagccctggcaatggacagggccgtgtccgttcccgaaacatggaagctggatcattgggcggtgaacaccggttccgctttgggcgcggccggcgttatacgcctgcggcacaaggacggcgagtataaaaaactggtctgccttggcgacggccccatcgactcgatcttcaaagcgatcaacgagattacgggccaggagcctgagcttgagctttatgaaatcggcgccgttacgggcggctcttcctcgcagggcgaagctatggtaaaaatcatgatggaaggacgccgctggaacggccgcggcgtttccaccgatgtaattgaagcctcaataatggcctatctttcggcgattaacgccatggaatgggatttatcaagtaacaaataa

SEQ ID NO: 21136 - protein, 203 aa, Unknown
  Obtained from environmental sample
  DOMAIN (65)...(196): LeuA allosteric (dimerisation) domain
  misc_feature (1)..(203): Xaa is any amino acid
MAKRETYEIMTPQSIGIPQNRMVLGKHSGRHAFEERLKDLGISVEAEAFEKIFADFKELADKKKVVSDRDIEALAMDRAVSVPETWKLDHWAVNTGSALGAAGVIRLRHKDGEYKKLVCLGDGPIDSIFKAINEITGQEPELELYEIGAVTGGSSSQGEAMVKIMMEGRRWNGRGVSTDVIEASIMAYLSAINAMEWDLSSNK

SEQ ID NO: 21137 - DNA, 402 bp, Unknown
  Obtained from environmental sample
  misc_feature (1)..(402): n is a, c, g, or t
atgagaagcaatatctcaacactcgcactcacggcagctttgatgcttgccataacattcaccctttcctgctctggcaaccccgatgatgacggcggtggcggttctgggggcagtaatacgatagacggcggtacgttcacggatagccgagacaatatatcttacaagtgggtgaaaatcggttctcaaacttggatggctgagaacctaaggtattcaccaaatggcaaaaattgcgactacaactgccagacttacggtaggtattacaactggactgcggcaatgggtatagatggagaatattatcataataaatggggcggaagcgatgtaaggcatcaagggatatgcccatctggttggcatttgcctagcaatgccgaatggaaagcatga

SEQ ID NO: 21138 - protein, 133 aa, Unknown
  Obtained from environmental sample
  SIGNAL (1)...(26)
  misc_feature (1)..(133): Xaa is any amino acid
MRSNISTLALTAALMLAITFTLSCSGNPDDDGGGGSGGSNTIDGGTFTDSRDNISYKWVKIGSQTWMAENLRYSPNGKNCDYNCQTYGRYYNWTAAMGIDGEYYHNKWGGSDVRHQGICPSGWHLPSNAEWKA

SEQ ID NO: 21139 - DNA, 867 bp, Unknown
  Obtained from environmental sample
  misc_feature (1)..(867): n is a, c, g, or t
ttgtgcaagctctttaacggaattatccccgacattaccgaaggacgttttttagggaacgttaccatagacggcgaaaacacaagagaaactcaaacccctctccttgcccttaaagtgggaatggttcttgacgatccggacgcccaactttttacatctaccgtgcgagaagaagccgcctttggacctgagaacctgctcttgccgccgaaagaaattgaggaacggatttcattcgcgctcaacgcaacaggcctttgcggtttccaagagcgttccgtatcaacgctttcgggcggagagaaacagcgccttgccatcgcctgcgcgcttgcaatggcggggaaaattcttgtgctggacgagcctttgtcccgccttgatccgcgcggagcacaggaagtgatttctgttttaagggacatcagggaaaaatatcagataacggtaattatggcgactcataacagcaaaacagccgccgccgttgccgacaaggtttgcgtcatgaaagacgggcgcattgccgcctgtgataagacggaaaaaattcttgccaataccgcactgcttgaagagaacggcatacaagcgccgtgtgaagcggatattgaaaagacatttaccgccggaagcaaacctgttttaacagaggcggtaaaaattacaaatttttgttttaattatgacaaaacgggcgtttccattgaaaatataaatctgacagttgcagataacgattttcttgcgattatcgggaagaacggctgcggaaaaacaactttgttaaaatgtattacggggcttttgcgtccttcttccggagatatattattaggggaaaaaatacctcggccgatctga

SEQ ID NO: 21140 - protein, 288 aa, Unknown
  Obtained from environmental sample
  DOMAIN (2)...(174): ABC transporter
  misc_feature (1)..(288): Xaa is any amino acid
MCKLFNGIIPDITEGRFLGNVTIDGENTRETQTPLLALKVGMVLDDPDAQLFTSTVREEAAFGPENLLLPPKEIEERISFALNATGLCGFQERSVSTLSGGEKQRLAIACALAMAGKILVLDEPLSRLDPRGAQEVISVLRDIREKYQITVIMATHNSKTAAAVADKVCVMKDGRIAACDKTEKILANTALLEENGIQAPCEADIEKTFTAGSKPVLTEAVKITNFCFNYDKTGVSIENINLTVADNDFLAIIGKNGCGKTTLLKCITGLLRPSSGDILLGEKIPRPI

SEQ ID NO: 21141 - DNA, 756 bp, Unknown
  Obtained from environmental sample
  misc_feature (1)..(756): n is a, c, g, or t
atggaaacaaatacagaagaagtaaaaaaattattcgagatgattaagtccgcgaaacatttagttgcgctgaccggcgccggcgtaagtacgctttcggggattcgggattttcgcgggaagaacgggctttacaacgacatggacgcggaaaagattttcagcctggattattttgaacaggacccgtctttttattacgatcacgcgggggcgttcatttacaaccttgatgaaaaagaggcgtctatcgttcatcttgttttgggagagcttgaaaagcgcgggtaccttaaagcgctgattacccagaatatcgatttactgcaccaaaagggcggatgtaaaaatgtgattgaaattcacgggtcgcccgttattcattactgcatgaggtgcgcgggggtgcgcgtgagttttgaggaagccgccgccgctgtgaaagcggggaagatgccgctgtgtcccaagtgcggcagggtgctgaaaccggcgatcacatttttcggcgaaagtctgccggaacaggccttaaggcaggcggtgaccgagtcccagaaagcggacttgatgcttgtgctgggtaccagtttgacggttttccccgccgcgggaatgccgcagtatacgcttcgtaacggcggaaaaattgtcatcgtgaacaatcagccgacgccgctggacggcagggcggaaatgcactttgacgatcttggatccgtgtttgaagaactgaaccgattagtagttggttaa

SEQ ID NO: 21142 - protein, 251 aa, Unknown
  Obtained from environmental sample
  DOMAIN (26)...(202): Sir2 family
  misc_feature (1)..(251): Xaa is any amino acid
METNTEEVKKLFEMIKSAKHLVALTGAGVSTLSGIRDFRGKNGLYNDMDAEKIFSLDYFEQDPSFYYDHAGAFIYNLDEKEASIVHLVLGELEKRGYLKALITQNIDLLHQKGGCKNVIEIHGSPVIHYCMRCAGVRVSFEEAAAAVKAGKMPLCPKCGRVLKPAITFFGESLPEQALRQAVTESQKADLMLVLGTSLTVFPAAGMPQYTLRNGGKIVIVNNQPTPLDGRAEMHFDDLGSVFEELNRLVVG

SEQ ID NO: 21143 - DNA, 363 bp, Unknown
  Obtained from environmental sample
  misc_feature (1)..(363): n is a, c, g, or t
gtgtattcaagagaggaaggaactgcggcatactcgatgaagggtcgcatttccgccaaaaccgcaaaagagcggaaacaaataatcgaggagcgtcaaattccgattacggaaaaaaacatggatcgctttgttaatcaaaacatggacgtgttagttgaagaacaaatcgccgcaagcgaagccgacacggaagaaaatgaaactctttggctgggacggttatactgccaagcccccgacatagacggcgcggcggtaatcgtaaaaagcaaggcgagcgaaaaaaatccgcaagtgggaacatttgcgaaatgcaaagttgtcgcacggcgcgggtttgatttggaagtgagtgtttaa

SEQ ID NO: 21144 - protein, 120 aa, Unknown
  Obtained from environmental sample
  misc_feature (1)..(120): Xaa is any amino acid
MYSREEGTAAYSMKGRISAKTAKERKQIIEERQIPITEKNMDRFVNQNMDVLVEEQIAASEADTEENETLWLGRLYCQAPDIDGAAVIVKSKASEKNPQVGTFAKCKVVARRGFDLEVSV

SEQ ID NO: 21145 - DNA, 747 bp, Unknown
  Obtained from environmental sample
  misc_feature (1)..(747): n is a, c, g, or t
ttgttaatgacactgggaaaatataaaattaatgatgattggttaaatatttttgggaaaatggttataatgcaaaaacccgacgaaatgcctttgtttcctccagcggactggataggtaaatgtcaaaaactcacttatttgatgatatttgaagatggtaataaaatagacttaaaaataatgcttataagtgaaatgaagctatattttaatttatttgctgactctctttgtaaaattatattggataaagataatttatgctctttaatccgtgaaccgtcagatattgattttcatgttaaaaagccaagtgaagaatttgtggataattgtagtaatgaattttggtgggtgtctacatatgtaacaaaaggtatatgcagaaatgaattattatatgttatagaacatttgaatattatgaggaagcaattgcttttaatggtttcatggaaagtaggcatagaaacttctttttcaataagtgttggaaaatcatataaatatttagataaatatgtatcaaaagaaacatgggaggcaatattaaaaacatacaattgtaatacgatagattccgcatgggattcattaatattatgttgcaatttatttcaagaaatggaaaactatgtttcaaaagaattgtgttataaatgtccagaatataacaaaaaagtaataaaatatatagaacagtatattccaaaaaatataatagggaaaataaaaattgtgtaa

SEQ ID NO: 21146 - protein, 248 aa, Unknown
  Obtained from environmental sample
  DOMAIN (1)...(239): Streptomycin adenylyltransferase
  misc_feature (1)..(248): Xaa is any amino acid
MLMTLGKYKINDDWLNIFGKMVIMQKPDEMPLFPPADWIGKCQKLTYLMIFEDGNKIDLKIMLISEMKLYFNLFADSLCKIILDKDNLCSLIREPSDIDFHVKKPSEEFVDNCSNEFWWVSTYVTKGICRNELLYVIEHLNIMRKQLLLMVSWKVGIETSFSISVGKSYKYLDKYVSKETWEAILKTYNCNTIDSAWDSLILCCNLFQEMENYVSKELCYKCPEYNKKVIKYIEQYIPKNIIGKIKIV

SEQ ID NO: 21147 - DNA, 750 bp, Unknown
  Obtained from environmental sample
  misc_feature (1)..(750): n is a, c, g, or t
gtgccggtactctttatccttgacgaatttgacaaacttggccgtatggacgagcttgaaatgaatatgggtatccacaacggcttcggtatccattattttttaattttccagtcattgaaccagcttaacaaaatttatactaaagaccattcttttcttgcccacgcccgtaatacgattatttacgcgcccggtccgggtgaaaccgattccgcggaacttgtttcaaaaatctgtggaaaggaatcgatcagccggacgaatatttcatactccggaggaaaagcccaggtcggttactccaataaaaatatttccgcgcaggatcaggaacgcaatcttattaatgccgatgaagtcatgaaactgccccttgatcagcttattctattgtgccagggtttgccgccctatattggcaaaaagaacgtctactatgaggacccggtctttaaggcgcgaatgtttcccccggcgtttaccacacgcgaagaagccctgaaagccgccgcgggaactataaaaaaactcgacaagcggcgctggtttgaccgcggcgatacctaccgatccgttgatatgagcgatgatgacattgcagatatttgggataaagtcggcgatcttttcaatgaaccggatgaagcgaccattctggaaacatcggataaaccgggaagccccatcgccagtaaaacagaagatgaattctcacccccaccggataccgccaattttttgaaataa

SEQ ID NO: 21148 - protein, 249 aa, Unknown
  Obtained from environmental sample
  misc_feature (1)..(249): Xaa is any amino acid
MPVLFILDEFDKLGRMDELEMNMGIHNGFGIHYFLIFQSLNQLNKIYTKDHSFLAHARNTIIYAPGPGETDSAELVSKICGKESISRTNISYSGGKAQVGYSNKNISAQDQERNLINADEVMKLPLDQLILLCQGLPPYIGKKNVYYEDPVFKARMFPPAFTTREEALKAAAGTIKKLDKRRWFDRGDTYRSVDMSDDDIADIWDKVGDLFNEPDEATILETSDKPGSPIASKTEDEFSPPPDTANFLK

SEQ ID NO: 21149 - DNA, 414 bp, Unknown
  Obtained from environmental sample
  misc_feature (1)..(414): n is a, c, g, or t
ttgtgggaaatagaaaaacggtctcttggtaatatcagaataattgaatatgacgcggctgccgtaactgaaaaaatgatccctgcgaattctctcgacgccgtacatatctttttccccgacccctggcccaaaaaaaggcatcataaacgccgtcttattcaaaatccttttacgctcactcttgcaaagcggcttaaacccggcggctgtttatacatggttacggattgggaagattacgccctctgcgcgcttgcttcttttgcttcctgtccttttctgaaaaacgcctacgatgatttcgccgttccgcaaagctggcggcctaaaacaaaatttgagcaaaaagggcttgccaaagatcataaaataagggaattattttttatccgcgttgaggagaaaaggtag

SEQ ID NO: 21150 - protein, 137 aa, Unknown
  Obtained from environmental sample
  DOMAIN (2)...(133): Putative methyltransferase
  misc_feature (1)..(137): Xaa is any amino acid
MWEIEKRSLGNIRIIEYDAAAVTEKMIPANSLDAVHIFFPDPWPKKRHHKRRLIQNPFTLTLAKRLKPGGCLYMVTDWEDYALCALASFASCPFLKNAYDDFAVPQSWRPKTKFEQKGLAKDHKIRELFFIRVEEKR

SEQ ID NO: 21151 - DNA, 894 bp, Unknown
  Obtained from environmental sample
  misc_feature (1)..(894): n is a, c, g, or t
gtgggaattgtaggctgcgatttcgacgcccagttcctctacgattccataaagtcccaggtaatacagcagatacttttaggcttgctctttgccgtagcgggggtgggagtcatgtttttattcctctatattatctttaaacgcctgggagaaatctccgagattctcgctgttattgccgaaggagaggggaacctttccacaaagaggatcaccgtaataaacaatgatgagataggagttatgggcaccctctttaaccagacattggacaagataagcgcgctggtactccttataaaagatcagaccataaacctttccaatgttggcgaggaacttacggataacatgaatcaaacatccaaggtggttactgagattacaggcaatatcaagaaaatcaagggccaggtcataacccagtccgaagttgcaaccgagacaaccgccaccatgggacaggtagttgaaaacatcagccgacttaataccagcgtggaagtccaaaccgaaagcgttgcccagtcgtcttccgcggtggaggaaatgctcgctaacataaaaagcgtaaccagtacgcttatgcagaacgccgagaacgtaaagcacctcaccagtgcctcagagcttgggaggaccagccttgaggaagtctcccaggacatccagggcattgcgaaagagtctgaggggcttcttgagatcaattcggtcatgcagaacatcgcaagccagaccaaccttctttccatgaacgcggccatagaagcggcccatgcgggggaatcagggaaagggtttgccgtagtagcgaatgaaatccgcaagctcgccgaatcatccagcgtacagtccaagaacattttccacggtgttgaaaaaggataa

SEQ ID NO: 21152 - protein, 297 aa, Unknown
  Obtained from environmental sample
  DOMAIN (169)...(296): Methyl-accepting chemotaxis protein (MCP) signaling domain
  misc_feature (1)..(297): Xaa is any amino acid
MGIVGCDFDAQFLYDSIKSQVIQQILLGLLFAVAGVGVMFLFLYIIFKRLGEISEILAVIAEGEGNLSTKRITVINNDEIGVMGTLFNQTLDKISALVLLIKDQTINLSNVGEELTDNMNQTSKVVTEITGNIKKIKGQVITQSEVATETTATMGQVVENISRLNTSVEVQTESVAQSSSAVEEMLANIKSVTSTLMQNAENVKHLTSASELGRTSLEEVSQDIQGIAKESEGLLEINSVMQNIASQTNLLSMNAAIEAAHAGESGKGFAVVANEIRKLAESSSVQSKNIFHGVEKG

SEQ ID NO: 21153 - DNA, 561 bp, Unknown
  Obtained from environmental sample
  misc_feature (1)..(561): n is a, c, g, or t
ttgtttatcnttgtcgatggaagactttatcctttttcaacaccgtggaaaatgttcttggactgtacgctggatgattcggcgagcttgcggatttcattcgctactacggcaaaccctttccctgattcccccgcatgggccgcttctatggccgcgttcatggaaagaaggttggtctggcttgcgatgttctgcatgaccgaattgatctcaagaagcccctcagactctttcgcaatgccctggatgtcctgggagacttcctcaaggctggtcctcccaagctctgaggcactggtgaggtgctttacgttctcggcgttctgcataagcgtactggttacgctttttatgttagcgagcatttcctccaccgcggaagacgactgggcaacgctttcggtttggacttccacgctggtattaagtcggctgatgttttcaactacctgtcccatggtggcggttgtctcggttgcaacttcggactgggttatgacctggcccttgattttcttgatattgcctgtaatctcagtaaccaccttggatgtttga

SEQ ID NO: 21154 - protein, 186 aa, Unknown
  Obtained from environmental sample
  misc_feature (1)..(186): Xaa is any amino acid
MFIXVDGRLYPFSTPWKMFLDCTLDDSASLRISFATTANPFPDSPAWAASMAAFMERRLVWLAMFCMTELISRSPSDSFAMPWMSWETSSRLVLPSSEALVRCFTFSAFCISVLVTLFMLASISSTAEDDWATLSVWTSTLVLSRLMFSTTCPMVAVVSVATSDWVMTWPLIFLILPVISVTTLDV

SEQ ID NO: 21155 - DNA, 345 bp, Unknown
  Obtained from environmental sample
  misc_feature (1)..(345): n is a, c, g, or t
atgaatggtacaattaccgggcataaggaaagcaagcccggccagacaggaacccaggccaaagctgtccgcttttccctcgaccagggcgatgacgtgccgatttaccggcagatcatcaagcagatcgagtacggaattctgtccggcagactaaagagcggggacaagctgccgaccatccgcgctctggcagtggaattaaaaaccaaccctaataccatagccaaggcatatggagagctggaaatacgcggcattttggcgacccaggtcgggagcggtacttatatttcgaataaaaagccggagcctgaaagagaaaggccccgagcgcaaaattaa

SEQ ID NO: 21156 - protein, 114 aa, Unknown
  Obtained from environmental sample
  DOMAIN (35)...(98): Bacterial regulatory proteins, gntR family
  misc_feature (1)..(114): Xaa is any amino acid
MNGTITGHKESKPGQTGTQAKAVRFSLDQGDDVPIYRQIIKQIEYGILSGRLKSGDKLPTIRALAVELKTNPNTIAKAYGELEIRGILATQVGSGTYISNKKPEPERERPRAQN

SEQ ID NO: 21157 - DNA, 534 bp, Unknown
  Obtained from environmental sample
  misc_feature (1)..(534): n is a, c, g, or t
gtgcggattctcgctgcaacaaacaaagacattgaggaacttgtacaaacaggcaagttccgcgccgatttatactatcgccttaacgtactgcctatttatattccgcctctgcgccgccgtccggaggatattccggaattggcgcgccattttcttgaaatttacatgaaacaaaataacaggcaatttgacggttttacgcaagacgccctgcaggcgctgctttctcattcgtggcccggaaatgtccgcgagcttcaaaattgcatagaacgcgcctgtgtaatcggcaaaaacaagcttgtcggccatgaagaccttttcataaaactggcggatttccccgatatccggggaaaaatcaaggatcgcagtcttaaaactgccgttaatgtatttaaggccaattttatccggacagtgcttgaagagaacaactggaaccagactgaggccgccagggtacttgccatacagcgcacttatttgtcaaaattgataaaagagctaagaataaacgtaaaggagtaa

SEQ ID NO: 21158 - protein, 177 aa, Unknown
  Obtained from environmental sample
  DOMAIN (1)...(88): Sigma-54 interaction domain
  misc_feature (1)..(177): Xaa is any amino acid
MRILAATNKDIEELVQTGKFRADLYYRLNVLPIYIPPLRRRPEDIPELARHFLEIYMKQNNRQFDGFTQDALQALLSHSWPGNVRELQNCIERACVIGKNKLVGHEDLFIKLADFPDIRGKIKDRSLKTAVNVFKANFIRTVLEENNWNQTEAARVLAIQRTYLSKLIKELRINVKE

SEQ ID NO: 21159 - DNA, 681 bp, Unknown
  Obtained from environmental sample
  misc_feature (1)..(681): n is a, c, g, or t
atgcctcttgtcagaaacgggaaaaccctcctttcgggtgtagaccctgtccgccgggccgagcgcacggcggacgcggtttctgtcagggataacactctttacttttgcccttccgttctgtatggttacggccttgcccggttgttggcccgccttgagcgggaagcgcccaattcggcagtcctgtgcgtcgaaacggacggcgaactttacgaattaacggaaaaaaacatcgaaagctctcttgcggcgaaccgcagattgcgcataacgaatatttgcgatgaggccggtctttgcgcttttgtgcgcgaagcgtggggggcaagggcgtttcgttatcttgagattatccgttttacgggcggttggcagttattcccggaactgtacgactctctttgcggcgcgcttcgccgcgaaattgccacagactggagcaacgccctgacccttgccaaacttggacgcttgtacatccgcaacgctttgcgcaatctttcgcttattccgcgctttccctcttttgcaaacctttcttttggcgcggctcctgttcttgtccttggagcgggtccctcgctggatgaaacattagacgctcttgtaaaacatatccgcaaaacttggaacgtcctttcaggattgtttgcgtggatacctgtcttggttcgctga

SEQ ID NO: 21160 - protein, 226 aa, Unknown
  Obtained from environmental sample
  misc_feature (1)..(226): Xaa is any amino acid
MPLVRNGKTLLSGVDPVRRAERTADAVSVRDNTLYFCPSVLYGYGLARLLARLEREAPNSAVLCVETDGELYELTEKNIESSLAANRRLRITNICDEAGLCAFVREAWGARAFRYLEIIRFTGGWQLFPELYDSLCGALRREIATDWSNALTLAKLGRLYIRNALRNLSLIPRFPSFANLSFGAAPVLVLGAGPSLDETLDALVKHIRKTWNVLSGLFAWIPVLVR

SEQ ID NO: 21161 - DNA, 366 bp, Unknown
  Obtained from environmental sample
  misc_feature (1)..(366): n is a, c, g, or t
gtgacggagacagcaaataaggatgagggcggcagtaaagaaatgccgcttatagcccatattgctgaattgcgattcgtactgattcgctccggttgtgctcttattgtctgtgccattccttgcggatattattggaaacagatttttgatttagttgtgtctcgtaccttggaattgtgcgaacctttggcggtgcatataatttacaccgctccggtagaatctgtgatgttaagcataaaaattgcatttatatgcggactgatgctcgcttcgcctattatattccagcaggcttggggatttgtgtcgccggctctttcaaaaaagaaaagctgcttatctccctcgtgccgattctga

SEQ ID NO: 21162 - protein, 121 aa, Unknown
  Obtained from environmental sample
  misc_feature (1)..(121): Xaa is any amino acid
MTETANKDEGGSKEMPLIAHIAELRFVLIRSGCALIVCAIPCGYYWKQIFDLVVSRTLELCEPLAVHIIYTAPVESVMLSIKIAFICGLMLASPIIFQQAWGFVSPALSKKKSCLSPSCRF

SEQ ID NO: 21163 - DNA, 645 bp, Unknown
  Obtained from environmental sample
  misc_feature (1)..(645): n is a, c, g, or t
ttggatcgttatgaagaactggaacgaagcaacgcggaaatttatcaggagaatataaggttaaaagaacagcttgatttttcaaagactcttagatacagacggataccggcgcaaatatcaggaagagatccaaataatcttttttccgctcttgtcattaacaagggaagctattcgggggtttcaaataacatgactgtcgtcgcgtggcaaaacggcgttcaggcattagtgggaaaagtaatacaaacaggattgcttgaaagccttgttatgcccgtttttgacattaattctctggtatcgtgccgtttttccgtttcgcgttttgagggaatcgtggaagggcagggaagttccgaatcttctttgataatgcgttttgttcctaggcgcgcaagagatgaagtaaatatcggagatataattattacaagcggaatgggcggaatatatccgccgggaattaacttgggacgcgtcagcagtataaatgttcttgaatatgaaacaactttggaaattgaagtaattccaatgatagatttttcaaggcttgaatatgtttttgttatagaagaagaaagttcagcttatgattcaatggaaatatacaatgaaacaggaataaacaatgattag

SEQ ID NO: 21164 - protein, 214 aa, Unknown
  Obtained from environmental sample
  DOMAIN (38)...(197): rod shape-determining protein MreC
  misc_feature (1)..(214): Xaa is any amino acid
MDRYEELERSNAEIYQENIRLKEQLDFSKTLRYRRIPAQISGRDPNNLFSALVINKGSYSGVSNNMTVVAWQNGVQALVGKVIQTGLLESLVMPVFDINSLVSCRFSVSRFEGIVEGQGSSESSLIMRFVPRRARDEVNIGDIIITSGMGGIYPPGINLGRVSSINVLEYETTLEIEVIPMIDFSRLEYVFVIEEESSAYDSMEIYNETGINND

SEQ ID NO: 21165 - DNA, 930 bp, Unknown
  Obtained from environmental sample
  misc_feature (1)..(930): n is a, c, g, or t
ttgtccagttatggaagacatatatatatactcaaaagaattcgcacatttggaattgtttttttctctattgcggtggtaattttctccgtatttattatttcacatttaaaaaacagttcaaagaatgaaaaaaaagaactttcccgtatttggaatgacggcaattatgaacaagcgtatataatcagcaaagcgtcgttacaagaaaaacctgtggattattttttacttacgattaatggtttttccgcgtatcaaatgggaatagcgcaaattaacagtcaaaatactttgtcttttattaacgaatgtattttttctctcagaaaagcgctgcttcacagagaagccgcgaaagacggacgcattttttatgttttgggaaaagcatacggttacaagggcagtgaatacgccgacctttccgtaaaatatcttgaaatggcaaacagtttgtcttacaaagcctatgacattcccgaatatcttggactcgcgtacgcggcttacggcgattaccgaagcagcgtggaagcgtttactcaggcttttgtttcaggcaaacagccttccgataatcttttattgtcaatatcgcgatcctacatcgaaatgggagaatacaatatggcgttaggttatcttaaccgctgtatagatttttccgccgattcaaaatcaattattttatcgcgctttatgttagctgaaatatacagaaacaacaacgattatgaaggcgcggagaaacaatacataagcattataaatgactcaggcgaaaacgccgaagtgcattatcaattaggcgagctttataaccttaagggcgattcgacaagagcgcgttctgagtggagaacagcttatagacaggatccggctcacgcaaaagcaagagcgcggcttatatataaaacggagtag

SEQ ID NO: 21166 - protein, 309 aa, Unknown
  Obtained from environmental sample
  DOMAIN (264)...(297): Tetratricopeptide repeat
  misc_feature (1)..(309): Xaa is any amino acid
MSSYGRHIYILKRIRTFGIVFFSIAVVIFSVFIISHLKNSSKNEKKELSRIWNDGNYEQAYIISKASLQEKPVDYFLLTINGFSAYQMGIAQINSQNTLSFINECIFSLRKALLHREAAKDGRIFYVLGKAYGYKGSEYADLSVKYLEMANSLSYKAYDIPEYLGLAYAAYGDYRSSVEAFTQAFVSGKQPSDNLLLSISRSYIEMGEYNMALGYLNRCIDFSADSKSIILSRFMLAEIYRNNNDYEGAEKQYISIINDSGENAEVHYQLGELYNLKGDSTRARSEWRTAYRQDPAHAKARARLIYKTE

SEQ ID NO: 21167 - DNA, 783 bp, Unknown
  Obtained from environmental sample
  misc_feature (1)..(783): n is a, c, g, or t
atgcttgaatttaaacgcatagaggagctaagccattcgcttgaaagcgtttttatagcaatgcgggacaaacagataactttttccgataatgcgataaaacttatcttctcttctttggatcttctaaaaaccggttttagcgtattacaaacgtctaaagacgacaatatagaaacaggcgaatatgtaaataatctttcccttcttgcggataataaagaattttcattaccaataacggaaaaatccgctgaatcggaaaaacaggaaattaaagaggaaaaacataaagaatcaaaaactgaaacgattcgcctttctcttgataaaatagacgaaattattaaaaatattatgtcgctacatactttggaggtaaacgcaaaaattctttctcaaaacagcgcggaaattggtaatttaattaaaaaattctcaaaatcatttaaagaacataaaaatattgatcccgcgcatgcggtttatctaaaaaagctggaaaggttatgcggaagattaaattcatctttaaaagattatgttatagacgcgggaaacagcataaaaacagcttatgacggcgtaatctctcttcgcactctcccaatatcgactatttttgacagctacccgcgttatgtgtatgaacttgcgcaggagctcggcaaaaatgtgcagctgacacttgaaggcaaagaaaatgaaatagataaaaatattattgaagcattatctgaagtattactgcacatggtcagaaactccgtgatcatggtatga

SEQ ID NO: 21168 - protein, 260 aa, Unknown
  Obtained from environmental sample
  misc_feature (1)..(260): Xaa is any amino acid
MLEFKRIEELSHSLESVFIAMRDKQITFSDNAIKLIFSSLDLLKTGFSVLQTSKDDNIETGEYVNNLSLLADNKEFSLPITEKSAESEKQEIKEEKHKESKTETIRLSLDKIDEIIKNIMSLHTLEVNAKILSQNSAEIGNLIKKFSKSFKEHKNIDPAHAVYLKKLERLCGRLNSSLKDYVIDAGNSIKTAYDGVISLRTLPISTIFDSYPRYVYELAQELGKNVQLTLEGKENEIDKNIIEALSEVLLHMVRNSVIMV

SEQ ID NO: 21169 - DNA, 624 bp, Unknown
  Obtained from environmental sample
  misc_feature (1)..(624): n is a, c, g, or t
atggaggcatgctcggcgatgaacggcataggtctggtaaaagtcatgggacgcgaatcgggatttatcgccgcctgtaccgcgctggcaagccacgaggtgaatttcgtgcttatccccgaagtgcctttcaacctggaaggctataacggcttcctccaccaccttgaagaacgccttaaaaagcgcaaacacgccgtaattatcgtggcagaaggggctatgcaggaacagcttctaaccgagaagaaaaccgacgccgggggtaacttaaaactggccgatgtaggcacctatatcaaggacaggatcgtcaagtattttgatgagaaaaaaattgacatcagtctcaagtacatcgatccaagttatatgataaggtcggctccggcgaatcctgcggattcgatttactgcgagcgtcttggaaacgcggcggcgcatgcggcgatggccggaaaaaccactgtggtaatcggactggtaaataacaagtatgtgcatgtacccattaaagcggctattgcccagcgccgccatgtcgatcccgaaggaaacctctggcgcgatatgcttgacgctacccagcaacccgcgcagatggtgaacaaatttgagaaataa

SEQ ID NO: 21170 - protein, 207 aa, Unknown
  Obtained from environmental sample
  misc_feature (1)..(207): Xaa is any amino acid
MEACSAMNGIGLVKVMGRESGFIAACTALASHEVNFVLIPEVPFNLEGYNGFLHHLEERLKKRKHAVIIVAEGAMQEQLLTEKKTDAGGNLKLADVGTYIKDRIVKYFDEKKIDISLKYIDPSYMIRSAPANPADSIYCERLGNAAAHAAMAGKTTVVIGLVNNKYVHVPIKAAIAQRRHVDPEGNLWRDMLDATQQPAQMVNKFEK

SEQ ID NO: 21171 - DNA, 354 bp, Unknown
  Obtained from environmental sample
  misc_feature (1)..(354): n is a, c, g, or t
atgagggagcacaccaaaaacggcgctttcatcctttccacatatcccaataacatggcaaaagaaattgccctttcccatcatgaacgctgggacggctcaggatacccttatcagctttccggcgaaatgatacccttggccgccagaattgttaccattgcggacgtatacgatgccctcagaatggaaagaagctacaagcccggttttgatcatgaagtaacagtagaaaaaatgattgaaggaaaggaaacccagtttgatcccttcctgctcgaagtttttcattccgtagagggtgattttaaaaagattttcgacgaaaatcaggatatagggaaggcttcctag

SEQ ID NO: 21172 - protein, 117 aa, Unknown
  Obtained from environmental sample
  misc_feature (1)..(117): Xaa is any amino acid
MREHTKNGAFILSTYPNNMAKEIALSHHERWDGSGYPYQLSGEMIPLAARIVTIADVYDALRMERSYKPGFDHEVTVEKMIEGKETQFDPFLLEVFHSVEGDFKKIFDENQDIGKAS

SEQ ID NO: 21173 - DNA, 717 bp, Unknown
  Obtained from environmental sample
  misc_feature (1)..(717): n is a, c, g, or t
atgaatatccttgcgcttgattcctcaagtgatgttttgtcggttgccctggaaacagaaaaccgggttttacatgaggaaattgataagggccatagccattcggagtacttaatggaatgtgccgacaatctttgcaaatcggcaggtatccggccttccgatttaagcatggttgcctgcatgaaagggcccggttcgtttaccggcctcaggattggcttttcagcagcaaagggcatagctcttgccctgggaattcccttgatcgccgttcccaccctggattgcctcgcgcaccccttttctatgcggccgggattggtccttccggtacttgatgccaaaaaaggctgcttttttaccgctttttacaggggaggaaaacggcttacggatttttttgacgaacaccccgtggagctcgtaaaaataatgtcaaagatcatggtttccgaagacgaacccttacttttaacaggcgcgggggcgaaattattctactcccggctggaaaacaccaaacaggaagatttcatttattataatagtattattgaaaatttaattatagacaacgaattcgccaaaggaggggcaattgaattgctaaaaattgcaaaaaatgataaactatatataanncagcatatccatggggcccctgtatatctgcggaaaagcgatgcngagttaaattgcaaaaatgatggctga

SEQ ID NO: 21174 - protein, 238 aa, Unknown
  Obtained from environmental sample
  DOMAIN (22)...(234): Glycoprotease family
  misc_feature (1)..(238): Xaa is any amino acid
MNILALDSSSDVLSVALETENRVLHEEIDKGHSHSEYLMECADNLCKSAGIRPSDLSMVACMKGPGSFTGLRIGFSAAKGIALALGIPLIAVPTLDCLAHPFSMRPGLVLPVLDAKKGCFFTAFYRGGKRLTDFFDEHPVELVKIMSKIMVSEDEPLLLTGAGAKLFYSRLENTKQEDFIYYNSIIENLIIDNEFAKGGAIELLKIAKNDKLYIXQHIHGAPVYLRKSDAELNCKNDG

SEQ ID NO: 21175 - DNA, 354 bp, Unknown
  Obtained from environmental sample
  misc_feature (1)..(354): n is a, c, g, or t
gtgcgtatgggcggcgccgcgctggaaaaagtccttgacgatccccagcggctgatggcccggctgctttttgaatttcacaatagcctcagttacgggaatgacaagcctgtccccgtatggataaccggctattccgaaatgaaaaaaacaggggtatttgccgcatatacagacgaactgaaaacaatctataataaatccggactggtaaaaacgctttgcctgtaccgccatttttccatgaaccagttcacgatagacctgaagcggcagactgccgccggggaatccgccgcaagggcccttaaacgcataggcgccgcctacaggcggaagtttttgtatgattaa

SEQ ID NO: 21176 - protein, 117 aa, Unknown
  Obtained from environmental sample
  misc_feature (1)..(117): Xaa is any amino acid
MRMGGAALEKVLDDPQRLMARLLFEFHNSLSYGNDKPVPVWITGYSEMKKTGVFAAYTDELKTIYNKSGLVKTLCLYRHFSMNQFTIDLKRQTAAGESAARALKRIGAAYRRKFLYD

SEQ ID NO: 21177 - DNA, 807 bp, Unknown
  Obtained from environmental sample
  misc_feature (1)..(807): n is a, c, g, or t
ttgcaagaccttctccgcggacaaatgggctaccggggcatcatcattaccgacgacctgatgatgaacggggcaacgtcatgggcgggcagtctttcacgcgcggcgaaacaggcgctgcttgcggggaatgacattatcctgttttcaaaaacgccgaacatgttcgatccggtgtggatttcgctgtcgagttccatgaaggaagacaccgcattccgcctgagggtgcgtgacgcggcgcggcggacgttgaccataaaactccgttatttgcgcggcgatcaggcggttccctttattccgaatttgcaaaaagtggtcagcggtattcccgatcccgaaggcagcgctttttttctgaatctggcggcgcgcagcgttactatagtaaagccgccgcaggataaacaatccgcggtttttcccctgaagccggaaaatgccggaagggttttgctggccggtcagtacatggatttttttaaagcgggaaaagccgcttttcccggcgccgtttcctattggtattcagactccaatgccgaactgttgtcttatgtccgtcaatccgacacaattattttctgtctttccgataccgtcggcgtacggctgctgcggcagcttgaaccgctgaaaaaaaaggtcattgtactttcggttttaaaccccgtgtatctggaaagtgttccctgggtggatggggctgtggcggtatacagttacgcccccgaatcgctggcggcgggcttttctgtaatcaccggtagaatcgccgccgggggaaaactgccttatgactga

SEQ ID NO: 21178 - protein, 268 aa, Unknown
  Obtained from environmental sample
  misc_feature (1)..(268): Xaa is any amino acid
MQDLLRGQMGYRGIIITDDLMMNGATSWAGSLSRAAKQALLAGNDIILFSKTPNMFDPVWISLSSSMKEDTAFRLRVRDAARRTLTIKLRYLRGDQAVPFIPNLQKVVSGIPDPEGSAFFLNLAARSVTIVKPPQDKQSAVFPLKPENAGRVLLAGQYMDFFKAGKAAFPGAVSYWYSDSNAELLSYVRQSDTIIFCLSDTVGVRLLRQLEPLKKKVIVLSVLNPVYLESVPWVDGAVAVYSYAPESLAAGFSVITGRIAAGGKLPYD

SEQ ID NO: 21179 - DNA, 705 bp, Unknown
  Obtained from environmental sample
  misc_feature (1)..(705): n is a, c, g, or t
gtgctggacgccctaaaagcgaatgaaaacgggctcgtagcccaaccgctgtttgaaacgatagaccggcttgaagaaaacatcaaggggatagagaaggaacttcgtttattggcaaaaggcgaccggatggtggaattgctgatgacggtacccgggtgcggtgagatctgctcgtggacaatccgggcgtacactgatgacatcaagcggtttgccagcgcgaagaaatacgcgtcgtttgcgggattggcgccgtgggtgcagaattcaaatgagacgatacatcatgggagtataacgaagcggggccccaaggaactgcggacggcaatggtccaggtggtgatggggctgaggcgaatgaaggagaagacgttttcctggcggtttatgcagcggtatgaggcgatgaaaaagagcaagggttccgggagggcgataatagcgacggcgaggaaaatagccgttgttatatggaatatgttaactgaagatgttgagtttgacatagggctgatggtagaccgcaaacttgcgaataaatcggagagcatgagcgggatggcagggatcgtcgaacaggctttgaataaagtgcaagaaaaacctgtaataattgaggaagtgaaaagaagtgcgggtgtgaaaaagactgtaaaaatatctggcgttgccagagaaaaaagaaaaaaagttggctaa

SEQ ID NO: 21180 - protein, 234 aa, Unknown
  Obtained from environmental sample
  DOMAIN (21)...(135): Transposase IS116/IS110/IS902 family
  misc_feature (1)..(234): Xaa is any amino acid
MLDALKANENGLVAQPLFETIDRLEENIKGIEKELRLLAKGDRMVELLMTVPGCGEICSWTIRAYTDDIKRFASAKKYASFAGLAPWVQNSNETIHHGSITKRGPKELRTAMVQVVMGLRRMKEKTFSWRFMQRYEAMKKSKGSGRAIIATARKIAVVIWNMLTEDVEFDIGLMVDRKLANKSESMSGMAGIVEQALNKVQEKPVIIEEVKRSAGVKKTVKISGVAREKRKKVG

SEQ ID NO: 21181 - DNA, 828 bp, Unknown
  Obtained from environmental sample
  misc_feature (1)..(828): n is a, c, g, or t
atgggctggagggtattcggtttaggcgatggttcgctttttactgtaggggacggtgttactctgattctggaagaaaatcttattctgtttggcaaaaacaataataccgacaaaaacaataataccgcttcccttgttcaggtaaattccggcggtacattgattatgaatcagggcgtgaaaattaccggtaataccgttatcgctactgctacctatacctcctctagccaaaccgacaacaactcttatggcggcggggtgtatgtgaacggcggaaccttcaccatgaacggcggagaaatctccagtaatacctcttactcctcccctccgtcatcatcatcatcatccagctacagaagttactcctacggcggcggggtgtatgtgaacagcggaaccttcaccatgaacggcggagaaatttccggtaattcctcttactcctcccctccgtcatcatcatcaccatccagctacagaagttactcctacggcggtggggtgtatgtgaacagcggaaccttcactatgagcggcggggaaatttccggtaattcctcctcctcctactactcatcctcctacggcggtggggtgtatgtgaacagcggaacccttgaaaaaaccggcggaaccatatatggctacaccgaaggagacagtaagagcaatgtattgaagaacacggacggtgttgtacaaaacaaccaaggtcatgcaatatatgctggttccaatatgcgtagagaaagtaccgcangacaggaggtaaatcttgattcgagagtgagcggcacagcggggggatgggagaattaa

SEQ ID NO: 21182 - protein, 275 aa, Unknown
  Obtained from environmental sample
  misc_feature (1)..(275): Xaa is any amino acid
MGWRVFGLGDGSLFTVGDGVTLILEENLILFGKNNNTDKNNNTASLVQVNSGGTLIMNQGVKITGNTVIATATYTSSSQTDNNSYGGGVYVNGGTFTMNGGEISSNTSYSSPPSSSSSSSYRSYSYGGGVYVNSGTFTMNGGEISGNSSYSSPPSSSSPSSYRSYSYGGGVYVNSGTFTMSGGEISGNSSSSYYSSSYGGGVYVNSGTLEKTGGTIYGYTEGDSKSNVLKNTDGVVQNNQGHAIYAGSNMRRESTAXQEVNLDSRVSGTAGGWEN

SEQ ID NO: 21183 - DNA, 477 bp, Unknown
  Obtained from environmental sample
  misc_feature (1)..(477): n is a, c, g, or t
ttggagattcgcaattttacaataagcaacctggatctgatgaaaaaactgtcaaaggctacttttcagaagcccattgacgagatcctcgcgatgcccgacgttaaagaacgtatagatacctattttgaacagcataacctttttattgaaatggcaaaaaaacacgcgaaggtcgaaggaaatgccatcatttgtgatctgcgggatatcgatacaatatacgcgggcaaccgcttcctgctttttacgctctttcccgaacagaacatttccgtttgggtggtggacgggaaaaagaaagtcaacacggtaattaccgtaggttatagcattataaacaaaaccgccacggtcgacgtgggcagtttaatgcttaaatacggcggcggcggacacaaggcggtaggtacctgccaggtggcttatgaaaataccgataaaattctcaatgaaattatcgccgcggtaaagtag

SEQ ID NO: 21184 - protein, 158 aa, Unknown
  Obtained from environmental sample
  misc_feature (1)..(158): Xaa is any amino acid
MEIRNFTISNLDLMKKLSKATFQKPIDEILAMPDVKERIDTYFEQHNLFIEMAKKHAKVEGNAIICDLRDIDTIYAGNRFLLFTLFPEQNISVWVVDGKKKVNTVITVGYSIINKTATVDVGSLMLKYGGGGHKAVGTCQVAYENTDKILNEIIAAVK

SEQ ID NO: 21185 - DNA, 894 bp, Unknown
  Obtained from environmental sample
  misc_feature (1)..(894): n is a, c, g, or t
gtggctgtgtataatcattacaaaaggctttatttagggaattcccaaaaattttccccgactgttgaaatagaaaaatcgaatgttctttttgttgggccaacaggttctggcaaaacgctactcgcacaaacccttgcccgctttttgcaagttccatttaccatagcagatgccaccgttttaaccgaagtcggttatgtgggcgaagatgtagatagcattttggttcgcctttatcaagcggcggactacaatatacaagcggcagaaagaggcattgtttttatagacgaattagataaaattgcccgcaagtcagccaacccttcaattaccagagatgtctctggtgaaggtgttcagcagggtttgctaaaaattttagagggaacagtttccgctattcctccaaagggtggccgcaagcatccagagcagaatttggttcacataaatacccgcaacattttattcgtgtgcggcggcgcgtttgaaactctggacaaggttatttcaaagcgtgtgaattccggcggtggaatgggttttggcgcggagatagtatcaaagaacgaaagcaagttgggcgagatactcagcaagtgcgaaccggaggatttgataagctacgggcttctccctgagttggttggcaggttgcctgttatagttagccttgacgagttggatgaagaagcgcttatgaacattctcacaaaaccgcaaaacgctcttgtgaaacaatacgccaaactctttgcaatggatgggatagaactctctttttcagatgaggctttaaacgcaatagtcaaaaaaacccttgagcaaaaaacaggagcgcgtgggcttcgctcggtgatggaaaaatcttatgccttatatgtttga

SEQ ID NO: 21186 - protein, 297 aa, Unknown
  Obtained from environmental sample
  DOMAIN (28)...(286): ATPase family associated with various cellular activities (AAA)
  misc_feature (1)..(297): Xaa is any amino acid
MAVYNHYKRLYLGNSQKFSPTVEIEKSNVLFVGPTGSGKTLLAQTLARFLQVPFTIADATVLTEVGYVGEDVDSILVRLYQAADYNIQAAERGIVFIDELDKIARKSANPSITRDVSGEGVQQGLLKILEGTVSAIPPKGGRKHPEQNLVHINTRNILFVCGGAFETLDKVISKRVNSGGGMGFGAEIVSKNESKLGEILSKCEPEDLISYGLLPELVGRLPVIVSLDELDEEALMNILTKPQNALVKQYAKLFAMDGIELSFSDEALNAIVKKTLEQKTGARGLRSVMEKSYALYV

SEQ ID NO: 21187 - DNA, 714 bp, Unknown
  Obtained from environmental sample
  misc_feature (1)..(714): n is a, c, g, or t
ttgccaaaaaagggggttataaaagaattgagcggcactgtcgaagttaaaggcgcaggttccacggcatttgtagcggcgaaagccggagacatcgttaatcaggatactgttatctccactggctttaaaagcaccgcgctgatagaaattggaagcacagttattaccgtgcgccctttgacacgccttacgctgacagagatacgcgcttcatcgggaagcgaaagcctgaacgtgaacctccagagcggcaggatacgggtggacgtgaacccgcctgccggggttaaagcttcgatggcggttagcagcccaagcgcaaccgcttccgtgcgcggaacgagctttgagtttgacacgcggaatctttatgtaaacagcgggaacgtggccttcaaaggagtgcgcggagaggcgacgcttataacggccggattcaatagtacaaccgatcagaaagggaacgcagtaaacccgcttacctatggggccgcagcctataagccgcaaatgccggcagggacacagcctaacacatcccccgctccgattgcaacagggagcagcggggaaacaaagcctaccgagcctggtaaaccgacaaacccgaccattcctaccaagccgacagacccaaccgatctggaccctccagctaatccacccaccgacggtagcgataacacggatgtaggagtgaatttcaggtaa

SEQ ID NO: 21188 - protein, 237 aa, Unknown
  Obtained from environmental sample
  misc_feature (1)..(237): Xaa is any amino acid
MPKKGVIKELSGTVEVKGAGSTAFVAAKAGDIVNQDTVISTGFKSTALIEIGSTVITVRPLTRLTLTEIRASSGSESLNVNLQSGRIRVDVNPPAGVKASMAVSSPSATASVRGTSFEFDTRNLYVNSGNVAFKGVRGEATLITAGFNSTTDQKGNAVNPLTYGAAAYKPQMPAGTQPNTSPAPIATGSSGETKPTEPGKPTNPTIPTKPTDPTDLDPPANPPTDGSDNTDVGVNFR

SEQ ID NO: 21189 - DNA, 843 bp, Unknown
  Obtained from environmental sample
  misc_feature (1)..(843): n is a, c, g, or t
atgacactaccctggaaaggcggaaaaacggagctggttgtcgccgccgcggaaggcaagcattttttgttcttgctttgctgcgcagcgacactggcagccgttattttttcttttcttaccccgcagataatacgcttcaccatagactctgttcttggaacagaaccgcttaaagtccccgcctttgtttcggcttttgtggatcaaatcggggggcttgggtatatcaaaaaaaatatctggatatgcgcggcctttattctggcggcggccctgctgtccgcgttttgcaatatgttccgcaggtataactgcggtataatcggcgagactgtagcgtggaaactgcataacgtcctttacgcccatatacagaagcttccttacagttggcatatcggctgccaaacaggggacatcatacaacgctgtactaccgatgtcgataatatccgaaactttatccacaaccagttaagcgagcttatgcgtaccttttgcgtttttgtatttgcgctggtgattatgttttccatggacatatttatgtccattgtatccctgattcttattccggttattgtcgctttttcaatcctcttcttccgcaaggtaagcgttgaattcaaccgagccgacatagccgaagggcaagtgcaggccgcgtctcaggaaaattacacgggtgtcagggtagtccgcgctttcggcagagaatcttacgaaatggaaaaattctcggaaaaaacaaaaaaatatcaggatatttgggttcataccggcaagatgctcgggcttttctggggcgcgggcgatttttctccggacttcagcttgtaa

SEQ ID NO: 21190 - protein, 280 aa, Unknown
  Obtained from environmental sample
  DOMAIN (24)...(280): ABC transporter transmembrane region
  misc_feature (1)..(280): Xaa is any amino acid
MTLPWKGGKTELVVAAAEGKHFLFLLCCAATLAAVIFSFLTPQIIRFTIDSVLGTEPLKVPAFVSAFVDQIGGLGYIKKNIWICAAFILAAALLSAFCNMFRRYNCGIIGETVAWKLHNVLYAHIQKLPYSWHIGCQTGDIIQRCTTDVDNIRNFIHNQLSELMRTFCVFVFALVIMFSMDIFMSIVSLILIPVIVAFSILFFRKVSVEFNRADIAEGQVQAASQENYTGVRVVRAFGRESYEMEKFSEKTKKYQDIWVHTGKMLGLFWGAGDFSPDFSL

SEQ ID NO: 21191 - DNA, 717 bp, Unknown
  Obtained from environmental sample
  misc_feature (1)..(717): n is a, c, g, or t
atgaaaaagatttctctgacaggcataaaacccacgggcgatttgcacatcggcaattattttggcgctataagacctgcgcttgaacttgccaaagaatacgacgcgcgttattttatcgccgattatcacgctcttaatacaatgaaaaatcctaaagaactcaatactacaataagggaagtagccgcgggctggctcgccgcaggccttgacccggataaagtaattttttacaggcagagctcaatccccgaagtttttgaacttactacaatgctcatggcgtttacatcaaagggtctgatgaaccgcgcccacgcatacaaagacgccgtacagaaaaacaacgataagggcgatgataccgacgcgggaatcaacatgggattgtttacataccctgtgctcatggcggctgacattattctttttgactccgatatagttcccgtcggcaaggatcagctgcagcacattgagatggcgcaggatatagcgcagtctgtaaacgcaaattacgggcagcaggttttaaaagttccgcaggccggaattcaggaagacgtcgccgtagtgcccggtcttgacgggcgaaaaatgagcaagagctacggtaacgttatccctctcttcgcgcctgaaaaaatactgcgcaaaacgattatgaggataacgacaaattcccaaactgtgaagagccctcggccgatctga

SEQ ID NO: 21192 - protein, 238 aa, Unknown
  Obtained from environmental sample
  DOMAIN (2)...(236): tRNA synthetases class I (W and Y)
  misc_feature (1)..(238): Xaa is any amino acid
MKKISLTGIKPTGDLHIGNYFGAIRPALELAKEYDARYFIADYHALNTMKNPKELNTTIREVAAGWLAAGLDPDKVIFYRQSSIPEVFELTTMLMAFTSKGLMNRAHAYKDAVQKNNDKGDDTDAGINMGLFTYPVLMAADIILFDSDIVPVGKDQLQHIEMAQDIAQSVNANYGQQVLKVPQAGIQEDVAVVPGLDGRKMSKSYGNVIPLFAPEKILRKTIMRITTNSQTVKSPRPI

SEQ ID NO: 21193 - DNA, 375 bp, Unknown
  Obtained from environmental sample
  misc_feature (1)..(375): n is a, c, g, or t
atgtccaatgaacatgggcaaaagacccttattgtgcattttttcaaaacttcttcgggaaaagagccggtgcgagattggttgaaacttcggactcaggatgaaaaaagggaaataggggaagatattagagcaattgaatttttatggccggttggatatccccgtgtcaggaaattggataaggatttatgggaaattcgtactgatttacagaaaggaattagtcggatattttttactgtttggaaaaaatatatggttttattacatagtattattaagaaaactcaaaaaacgcctcagcaggatttggatcttgcaaagaaacggcgtgatttggtactggcaggaggaataaccggtgaaaaataa

SEQ ID NO: 21194 - protein, 124 aa, Unknown
  Obtained from environmental sample
  DOMAIN (61)...(115): Phage derived protein Gp49-like (DUF891)
  misc_feature (1)..(124): Xaa is any amino acid
MSNEHGQKTLIVHFFKTSSGKEPVRDWLKLRTQDEKREIGEDIRAIEFLWPVGYPRVRKLDKDLWEIRTDLQKGISRIFFTVWKKYMVLLHSIIKKTQKTPQQDLDLAKKRRDLVLAGGITGEK

SEQ ID NO: 21195 - DNA, 450 bp, Unknown
  Obtained from environmental sample
  misc_feature (1)..(450): n is a, c, g, or t
atgagaatgcgtgatgatcaggaactgcgaataaatatgctcatggtgcttcttgcatctgtatttcttatttacagcggcaggcttttcagcttgcagatactgtcaggtgaaatatatcttagccgcgcgctggatatttcacgcagaacatatacaattcctacccaaaggggagaaatatacgaccgtgatatgaaaaaaccccttgttatgaacagggattcttttgcagtaagcataaccccggctgatgttcccagaaacagcatagataatgtaattgaaattgtttcagaaatactcggtatatcatccggtgaaatcagggcaaagcttccaagtcagtatttgcagctttatcagccgctggaaattgcagctaatgtttctttctctacgatttccgccctgcggaaagaaaaaatntcggccgatctgtcatgttga

SEQ ID NO: 21196 - protein, 149 aa, Unknown
  Obtained from environmental sample
  misc_feature (1)..(149): Xaa is any amino acid
MRMRDDQELRINMLMVLLASVFLIYSGRLFSLQILSGEIYLSRALDISRRTYTIPTQRGEIYDRDMKKPLVMNRDSFAVSITPADVPRNSIDNVIEIVSEILGISSGEIRAKLPSQYLQLYQPLEIAANVSFSTISALRKEKXSADLSC

SEQ ID NO: 21197 - DNA, 495 bp, Unknown
  Obtained from environmental sample
  misc_feature (1)..(495): n is a, c, g, or t
atgattagatgcgttatttggacagttatactgtgcatatcagcaggtatacttcaatcaacactaattgcaaaaattgcgtatttnaatgtatttcccgatttagccctatgtattcttgttttctctgcttatgttaacggaaccatgccgggacaggtttcaggttttttctctggactttttctggattttctctccgccgctcctcttggattaaactgccttacacgtactctgattggcgctcttgcaggtattttcaaagattcatttttccttgatatactttttatgccggtaattctctgcgcttttgcaaccatactcaaggcagtaatactgtttgtttttcatttaattttcagctccgtacctgcctattcatttacatcttcgcttttctggattgagcttggtcttaattgccttagcgcaccgcttttatttctgattttaaaacgtattaagccgctttcaatcggacggaattaa

SEQ ID NO: 21198 - protein, 164 aa, Unknown
  Obtained from environmental sample
  SIGNAL (1)...(24)
  DOMAIN (1)...(156): rod shape-determining protein MreD
  misc_feature (1)..(164): Xaa is any amino acid
MIRCVIWTVILCISAGILQSTLIAKIAYXNVFPDLALCILVFSAYVNGTMPGQVSGFFSGLFLDFLSAAPLGLNCLTRTLIGALAGIFKDSFFLDILFMPVILCAFATILKAVILFVFHLIFSSVPAYSFTSSLFWIELGLNCLSAPLLFLILKRIKPLSIGRN

SEQ ID NO: 21199 - DNA, 639 bp, Unknown
  Obtained from environmental sample
  misc_feature (1)..(639): n is a, c, g, or t
atggggagcaatccgagttcctttaatagttcacctgcgtccggtgaaactcaaggaaagcgccctgtagagagtgtaagctggtatgatgttttggtattctgcaataagttaagcataaaagaaggattaactccagtatacagcattagcggaagtaccgatcctacagtatggggaacagttccaacaaactttaattcaacatggaatgcagtaacaattgttgccgattctaccggttatcggttaccgacagaggcgcagtgggagtatgccgccagaggaggatacgggtcgcctgggaattacacatattcagggagtaacactgtaggcgatgtggcatggtattttggtaacagtgatagtaagacccatgaagtagggaagaaggctcccaatggtttggggttgtacgatatgagcgggaatgtgtgggagtggtgttgggacaggtacggaagctacagaagcgaagcgcagactgatcccgtgggagcagctaccggcactcgccgggtgctacgcggcggcggttggcgcagcagcggcaacaacctgcgttccgcgtttcgggacgtcgacttcccggacgaccggtacgacaacaacggcttccgtctggtgcgcccctga

SEQ ID NO: 21200 - protein, 212 aa, Unknown
  Obtained from environmental sample
  DOMAIN (1)...(211): Domain of unknown function (DUF323)
  misc_feature (1)..(212): Xaa is any amino acid
MGSNPSSFNSSPASGETQGKRPVESVSWYDVLVFCNKLSIKEGLTPVYSISGSTDPTVWGTVPTNFNSTWNAVTIVADSTGYRLPTEAQWEYAARGGYGSPGNYTYSGSNTVGDVAWYFGNSDSKTHEVGKKAPNGLGLYDMSGNVWEWCWDRYGSYRSEAQTDPVGAATGTRRVLRGGGWRSSGNNLRSAFRDVDFPDDRYDNNGFRLVRP

SEQ ID NO: 21201 - DNA, 936 bp, Unknown
  Obtained from environmental sample
  misc_feature (1)..(936): n is a, c, g, or t
atggcgagagtagatgaattcacctttttattcttgctctttgccagccttgcatttgctcaaaagaatgcaccaaaaaatattaaaccagctaaagatgacaaaaatgctaaaagcgttaaagagattcaaattaacctaaacgatattaaaggcacattcacagatttccgcgaaaacaagaaatataaaaccctaaaattaggcgggcgggtttggatggcagaggatttaaattataaaaaaaacagacttttcaattttgattcagtgaaaaaggcttgcccagccggttggcgtttgcctagcaaaagtgcttgggaagatttaaaaaaagaattaagcgacatggatcccaaactcaaagcgaaaatcggattgggcactcaaggcaaatggtgggcggttaccagtagcagcccggactctgtggtttactacgttgtaaattctggttttgggggtataaataaattaaatgatgttgaaactgctaatttggctgttcgttgtatacagaacatcaaagctaaaccaagcgaaaagaaaaatgatataagatactacaatacagttaaaataggctctgggttatggatggcagaaaatttaaactataaaaccggaaaatcttggtgctacgaaaacgatgattacaactgcaacacatacggtcgcttatacgactggagcaccgctgttaaagcgtgccccaatggttggcatttacccacgcggcgcgaatggggcgaggtatcaaaggaggagttttccgctatgctcggagggagtttaagcggcgaatatagccatacggtgtctgcagatgaatacaaatttttggataaagaaaaatctggaaattggtggggcatagcggagtatgggattaacgatgcatatacttggcatattaagcaaatgaaaatgacatag

SEQ ID NO: 21202 - protein, 311 aa, Unknown
  Obtained from environmental sample
  SIGNAL (1)...(20)
  misc_feature (1)..(311): Xaa is any amino acid
MARVDEFTFLFLLFASLAFAQKNAPKNIKPAKDDKNAKSVKEIQINLNDIKGTFTDFRENKKYKTLKLGGRVWMAEDLNYKKNRLFNFDSVKKACPAGWRLPSKSAWEDLKKELSDMDPKLKAKIGLGTQGKWWAVTSSSPDSVVYYVVNSGFGGINKLNDVETANLAVRCIQNIKAKPSEKKNDIRYYNTVKIGSGLWMAENLNYKTGKSWCYENDDYNCNTYGRLYDWSTAVKACPNGWHLPTRREWGEVSKEEFSAMLGGSLSGEYSHTVSADEYKFLDKEKSGNWWGIAEYGINDAYTWHIKQMKMT

SEQ ID NO: 21203 - DNA, 447 bp, Unknown
  Obtained from environmental sample
  misc_feature (1)..(447): n is a, c, g, or t
atggctaagataagggtttatttagacaattgcgcgtataaccgcccctatgatgatcaaacgcagccaaaagtgacacttgagacattggcaaaactgcatattcaagaacttgctcttaaacggaaaattgatattgtatggtcgtatatcctcaaatttgaaaatagccggaatttatttgcggcaaaaagagaagccattgcccaatgggaaaagatcagcgtctcttttgttcaaaaatcagattcggtaacagctctggcacggcaaatagaaacaaccggaataagaccggcagattcattacatatcgcctgtgctattacagcccaatgtgattacatggttacggtggataaacgtatactaaaatataaagataaccggattatcatctgtaacccggttgattttatcaatagggagaatgaatatgaccaatag

SEQ ID NO: 21204 - protein, 148 aa, Unknown
  Obtained from environmental sample
  misc_feature (1)..(148): Xaa is any amino acid
MAKIRVYLDNCAYNRPYDDQTQPKVTLETLAKLHIQELALKRKIDIVWSYILKFENSRNLFAAKREAIAQWEKISVSFVQKSDSVTALARQIETTGIRPADSLHIACAITAQCDYMVTVDKRILKYKDNRIIICNPVDFINRENEYDQ

SEQ ID NO: 21205 - DNA, 915 bp, Unknown
  Obtained from environmental sample
  misc_feature (1)..(915): n is a, c, g, or t
gtgagcgttnttaaggaaacagataaaacaatcaggccgaaacccccgtttatcacatcggaactacaaaagaccgccgcgaaccggctgggttatacgtcacggaaaaccatgcaggtggcccagcagctttacgaaggggtgaatatcggttctacccgcatagggcttatcacctacatgaggaccgattcggtgcgcgtgtcagaaaccgcccttggagaactgcgggaatggctcggcgagcattaccccaaagagcttcccgagaaagcgctggagtatacttccgggaaaaaagcccaggacgcgcatgaggcgatacgaccgacctatgtcagttatacccccgactcggtcgccgaattcctgaacagggatcagctcaggttgtacacgataatctgggaacgctttgtttcaagccagatgaccagcgccaaaacccgcaccgtcagcgttgagataaaggctgtctcgggcggcggcaccgtaaacggcggggaagaagggctgttcagggtttccgggacaaaacttgttgaaaaaggtttttacaaagttatcaaactgctctcgtcaaaagaagacaaggggaacccatatcctccgcttaaagccggggacaaggtcaccattgaaaaattccatcctgagcagcattttacccaggggccgccccgttatacggaggcttcaatcatcgacattttgcgggagaaggaaataggcaggccctcgacttacgcgcccattatttcggtgttgctggaccgctattatgttacgcggtcaaacaagcagcttgtccccaccctgctgggaaagaaaatctgcgaaatgttggttgaatattttcccggttatgtcgacgttgattttacggcctctaggaatcaaagctggacaaggtag

SEQ ID NO: 21206 - protein, 304 aa, Unknown
  Obtained from environmental sample
  DOMAIN (1)...(301): DNA topoisomerase
  misc_feature (1)..(304): Xaa is any amino acid
MSVXKETDKTIRPKPPFITSELQKTAANRLGYTSRKTMQVAQQLYEGVNIGSTRIGLITYMRTDSVRVSETALGELREWLGEHYPKELPEKALEYTSGKKAQDAHEAIRPTYVSYTPDSVAEFLNRDQLRLYTIIWERFVSSQMTSAKTRTVSVEIKAVSGGGTVNGGEEGLFRVSGTKLVEKGFYKVIKLLSSKEDKGNPYPPLKAGDKVTIEKFHPEQHFTQGPPRYTEASIIDILREKEIGRPSTYAPIISVLLDRYYVTRSNKQLVPTLLGKKICEMLVEYFPGYVDVDFTASRNQSWTR

SEQ ID NO: 21207 - DNA, 384 bp, Unknown
  Obtained from environmental sample
  misc_feature (1)..(384): n is a, c, g, or t
atgactactgaatgttctttaaaggtgagaacctatgaatgcgacagctataatcatgtaaataacgctaattatttaaactaccttgaatacgcgcgttatgaatatttaaaggatatcggctttgattatattaaagctgttgaaaaaggttatggaatttacatagcgcgtatagagattgattacaagaaacccgcttttaccgatgatgtacttgttataagatcgactccgataaaaaaaggcgcggtcagcggcattatttcgcaggaaatccggcgcggcgaagatattcttattcaggcgaaagttacatgggcctttgtcgattcaagaggaacgcctgtaaaaattcccgcagaatgggacttgccgggttaa

SEQ ID NO: 21208 - protein, 127 aa, Unknown
  Obtained from environmental sample
  DOMAIN (17)...(102): Thioesterase superfamily
  misc_feature (1)..(127): Xaa is any amino acid
MTTECSLKVRTYECDSYNHVNNANYLNYLEYARYEYLKDIGFDYIKAVEKGYGIYIARIEIDYKKPAFTDDVLVIRSTPIKKGAVSGIISQEIRRGEDILIQAKVTWAFVDSRGTPVKIPAEWDLPG

SEQ ID NO: 21209 - DNA, 447 bp, Unknown
  Obtained from environmental sample
  misc_feature (1)..(447): n is a, c, g, or t
ttgaaaagagttgaaaaaattgtaaaatcagcaatgtttaatttttgtccctcgtgcgcttccaaatcgattaattttagtgaggaaaaagttttccgctgccctgactgcggttttacatattttcacaacaatgccgcagccgcaggctgccttatacgtgtaccgcagccgcatggagaaagacttgtgtttacggttcggggcaaagaaccgggaaagggatttatggatatgccaggcggttttatcgatcccggcgaaggcgttcttgaaggcctttaccgtgaattgaaagaggaacttgactggacgccgganattccgccccgagaaagccttatcaatgtttttaaactgtacgcttcttttccgatgtatanctatataaaagtattaattacaacacctgcgatctgtatttttctgtatccgcacctgggctaa

SEQ ID NO: 21210 - protein, 148 aa, Unknown
  Obtained from environmental sample
  misc_feature (1)..(148): Xaa is any amino acid
MKRVEKIVKSAMFNFCPSCASKSINFSEEKVFRCPDCGFTYFHNNAAAAGCLIRVPQPHGERLVFTVRGKEPGKGFMDMPGGFIDPGEGVLEGLYRELKEELDWTPXIPPRESLINVFKLYASFPMYXYIKVLITTPAICIFLYPHLG

SEQ ID NO: 21211 - DNA, 534 bp, Unknown
  Obtained from environmental sample
  misc_feature (1)..(534): n is a, c, g, or t
atgtcctttagactggaactgcggaaagtgtcatatcggcacggggaaaatactatattggatagtgtggacctgaccgtgccgtccggcggcgtggctatagtgggcgggcgcagcggatcggggaagtcgacgctgctcgagctctgcgccggccttatcaagccgcgcggcggcgccgttctgtgggacgacgaagacataactaacgcgccgcgctacgatctgtacggacggcgcaagtctatgggctacgtctttcaggggcacgcgttgatatcgaaccattccgctttcgacaacatcgcgttaccgctgaagtgcggcggaacggatttgggttccgacgtcatagaaacgcgggtaagacagctgatggacgaactcggcataggcggcggcattgaaaaaaggtttccggaggcgctctccgccgcgcagctcaagtgcgtcgccgtggcgagggcgctcgtaaacgagcccgagtttttgatactcgacgaaccgtcagcgggtgacccctctcggcgataa

SEQ ID NO: 21212 - protein, 177 aa, Unknown
  Obtained from environmental sample
  DOMAIN (30)...(177): ABC transporter
  misc_feature (1)..(177): Xaa is any amino acid
MSFRLELRKVSYRHGENTILDSVDLTVPSGGVAIVGGRSGSGKSTLLELCAGLIKPRGGAVLWDDEDITNAPRYDLYGRRKSMGYVFQGHALISNHSAFDNIALPLKCGGTDLGSDVIETRVRQLMDELGIGGGIEKRFPEALSAAQLKCVAVARALVNEPEFLILDEPSAGDPSRR

SEQ ID NO: 21213 - DNA, 453 bp, Unknown
  Obtained from environmental sample
  misc_feature (1)..(453): n is a, c, g, or t
gtggggcgttcgggcacgccgcttgccgcctacatagggactatgcgcgtgtcgagggaggtggacgctctagaggtgatggggatagaccccatacagttcatcgtgcagccggcattcgtgggcatcgtggcctccgtgatctgcctaaacctatacttcatcgccatagcgatctgcggcgggcttgtcgtggcgggattatcgaccggcgtgccgattagcatatatttcggcagggtgctcgacgcgcttcagtttaaggacgtggcggtcagtctgcttaagagcgtggcgttcggtactatcgtcgccctcaccagttcgtattacggtttgggcgtgcgcaacgtgcgcatggtgcccatcgcggccataaacgcggtggtgggatctatgtttttcactatagccgtcaacctgctcctgagcgtcggatactatgtcctttag

SEQ ID NO: 21214 - protein, 150 aa, Unknown
  Obtained from environmental sample
  DOMAIN (1)...(148): Domain of unknown function DUF140
  misc_feature (1)..(150): Xaa is any amino acid
MGRSGTPLAAYIGTMRVSREVDALEVMGIDPIQFIVQPAFVGIVASVICLNLYFIAIAICGGLVVAGLSTGVPISIYFGRVLDALQFKDVAVSLLKSVAFGTIVALTSSYYGLGVRNVRMVPIAAINAVVGSMFFTIAVNLLLSVGYYVL

SEQ ID NO: 21215 - DNA, 771 bp, Unknown
  Obtained from environmental sample
  misc_feature (1)..(771): n is a, c, g, or t
gtggcgttgcgaatgaagggcgagaccccggacgagataaccggcgcggcctacgtcatgcgcgacaaggccacgcacatctacgcgagctcccgccaaaatctcatagacacgtgcggcaccggcggcgacggctcaaacaccttcaacatctccaccgtagcggcgtttatagccgccggcgccggggcgaaggtggccaagcacggaaaccgctccttctccagccgcagcggcagcgccgacgtcttggagagcctgggggtaaacatcggcctgagcgcggcgcagataggcgtatgcctgaaagaactgggtataggtttcctcttcgcgccggccctccataccgctatgaagtacgccgccgccgcccgcaagcagatcggcatcagaaccatattcaatataataggcccgctggcgaacccggcgcgcaccacaagccagctgctgggcgtcttctcccccgacctcacggagaccatggcccaagccctcaaaaacatgggcagcgacaaggctttcgtcgtccacgggctcgatcccttagacgagatatccatctgcggccccaccaaaatctcggaggtgcgcggcggcgggatagccacctaccagataaccccggaagatttcggcttcaaaagggcgacgctggatgatataaaaggcggcgacccggagtacaacgccaccataatcaagggcatactggatggggaaaagaggcgtccacagagacgtggccgtgctctcggccgattctga

SEQ ID NO: 21216 - protein, 256 aa, Unknown
  Obtained from environmental sample
  DOMAIN (32)...(256): Glycosyl transferase family, a/b domain
  misc_feature (1)..(256): Xaa is any amino acid
MALRMKGETPDEITGAAYVMRDKATHIYASSRQNLIDTCGTGGDGSNTFNISTVAAFIAAGAGAKVAKHGNRSFSSRSGSADVLESLGVNIGLSAAQIGVCLKELGIGFLFAPALHTAMKYAAAARKQIGIRTIFNIIGPLANPARTTSQLLGVFSPDLTETMAQALKNMGSDKAFVVHGLDPLDEISICGPTKISEVRGGGIATYQITPEDFGFKRATLDDIKGGDPEYNATIIKGILDGEKRRPQRRGRALGRF

SEQ ID NO: 21217 - DNA, 552 bp, Unknown
  Obtained from environmental sample
  misc_feature (1)..(552): n is a, c, g, or t
gtgcggcaccggcggcgacggctcaaacaccttcaacatctccaccgtagcggcgtttatagccgccggcgccggggcgaaggtggccaagcacggaaaccgctccttctccagccgcagcggcagcgccgacgtcttggagagcctgggggtaaacatcggcctgagcgcggcgcagataggcgtatgcctgaaagaactgggtataggtttcctcttcgcgccggccctccataccgctatgaagtacgccgccgccgcccgcaagcagatcggcatcagaaccatattcaatataataggcccgctggcgaacccggcgcgcaccacaagccagctgctgggcgtcttctcccccgacctcacggagaccatggcccaagccctcaaaaacatgggcagcgacaaggctttcgtcgtccacgggctcgatcccttagacgagatatccatctgcggccccaccaaaatctcggaggtgcgcggcggcgggatagccacctaccagataaccccggaagatttcggcttcaaaagggcgacgctggatga

SEQ ID NO: 21218 - protein, 183 aa, Unknown
  Obtained from environmental sample
  misc_feature (1)..(183): Xaa is any amino acid
MRHRRRRLKHLQHLHRSGVYSRRRRGEGGQARKPLLLQPQRQRRRLGEPGGKHRPERGADRRMPERTGYRFPLRAGPPYRYEVRRRRPQADRHQNHIQYNRPAGEPGAHHKPAAGRLLPRPHGDHGPSPQKHGQRQGFRRPRARSLRRDIHLRPHQNLGGARRRDSHLPDNPGRFRLQKGDAG

SEQ ID NO: 21219 - DNA, 534 bp, Unknown
  Obtained from environmental sample
  misc_feature (1)..(534): n is a, c, g, or t
gtggctatcccgccgccgcgcacctccgagattttggtggggccgcagatggatatctcgtctaagggatcgagcccgtggacgacgaaagccttgtcgctgcccatgtttttgagggcttgggccatggtctccgtgaggtcgggggagaagacgcccagcagctggcttgtggtgcgcgccgggttcgccagcgggcctattatattgaatatggttctgatgccgatctgcttgcgggcggcggcggcgtacttcatagcggtatggagggccggcgcgaagaggaaacctatacccagttctttcaggcatacgcctatctgcgccgcgctcaggccgatgtttacccccaggctctccaagacgtcggcgctgccgctgcggctggagaaggagcggtttccgtgcttggccaccttcgccccggcgccggcggctataaacgccgctacggtggagatgttgaaggtgtttgagccgtcgccgccggtgccgcacgtgtctatgagattttggcgggagctcgcgtag

SEQ ID NO: 21220 - protein, 177 aa, Unknown
  Obtained from environmental sample
  misc_feature (1)..(177): Xaa is any amino acid
MAIPPPRTSEILVGPQMDISSKGSSPWTTKALSLPMFLRAWAMVSVRSGEKTPSSWLVVRAGFASGPIILNMVLMPICLRAAAAYFIAVWRAGAKRKPIPSSFRHTPICAALRPMFTPRLSKTSALPLRLEKERFPCLATFAPAPAAINAATVEMLKVFEPSPPVPHVSMRFWRELA

SEQ ID NO: 21221 - DNA, 402 bp, Unknown
  Obtained from environmental sample
  misc_feature (1)..(402): n is a, c, g, or t
gtggacgacgaaagccttgtcgctgcccatgtttttgagggcttgggccatggtctccgtgaggtcgggggagaagacgcccagcagctggcttgtggtgcgcgccgggttcgccagcgggcctattatattgaatatggttctgatgccgatctgcttgcgggcggcggcggcgtacttcatagcggtatggagggccggcgcgaagaggaaacctatacccagttctttcaggcatacgcctatctgcgccgcgctcaggccgatgtttacccccaggctctccaagacgtcggcgctgccgctgcggctggagaaggagcggtttccgtgcttggccaccttcgccccggcgccggcggctataaacgccgctacggtggagatgttgaaggtgtttga

SEQ ID NO: 21222 - protein, 133 aa, Unknown
  Obtained from environmental sample
  misc_feature (1)..(133): Xaa is any amino acid
MDDESLVAAHVFEGLGHGLREVGGEDAQQLACGARRVRQRAYYIEYGSDADLLAGGGGVLHSGMEGRREEETYTQFFQAYAYLRRAQADVYPQALQDVGAAAAAGEGAVSVLGHLRPGAGGYKRRYGGDVEGV

SEQ ID NO: 21223 - DNA, 420 bp, Unknown
  Obtained from environmental sample
  misc_feature (1)..(420): n is a, c, g, or t
atgggatttgcgatagatcttctggaacaggcttacggcgataattcaaaatggagatggacgtttgttgatcttgagggacgttttgccgtaactgcaaaaaatatgcttgatttaaaaaatatttacgagaatatgtctcccggagcggaatattatgattctactgtgtatcatcttagactggtaaaaaaacttatctcgcaagccgccgaccgttaccgtgaaaaatacgaactgagtacaggacaggttcttgattttaaaacggggataaactttcttggcgcgcttcgccgcttgcacattgttctctccgagaacgaagaatccaatgaaataaaaaagaaattggcaatctggtcggcaaaacttgagaccgatcataaaaagcaggaagaagccaaaaagagagcatga

SEQ ID NO: 21224 - protein, 139 aa, Unknown
  Obtained from environmental sample
  misc_feature (1)..(139): Xaa is any amino acid
MGFAIDLLEQAYGDNSKWRWTFVDLEGRFAVTAKNMLDLKNIYENMSPGAEYYDSTVYHLRLVKKLISQAADRYREKYELSTGQVLDFKTGINFLGALRRLHIVLSENEESNEIKKKLAIWSAKLETDHKKQEEAKKRA

SEQ ID NO: 21225 - DNA, 894 bp, Unknown
  Obtained from environmental sample
  misc_feature (1)..(894): n is a, c, g, or t
gtggccatccggggggatctggacattaacgaggtaaagcttacggcccttctcaaggcttctgaagttgagttggccggagaggcggatgtccagcgaatcaccggcgcgccggtgggttttgccgggcctgtgggcctcaagggggttcccctcatcatagattcttcggtgacagccattaacgacggaatatgcggaggcctcgcgaaagaccttcactacaaacacgcggcctggggcagggattttgaggcctggaaaaccgcggacctccgtaccgtaaaagccggggatgtgtgtcccctttgtggggctgagctctacgaaaaaaaaggcaatgagctgggccatattttcaagctgggcaataaatacaccagtaccatgaacgtgacgtacctggacgaaaatggaaaaacctgtgtccccataatgggctgttacggtattggccttgaccgcaccctggcctcagtaatcgaagagcaccacgacgaagacggcattatctggcccatgagcgtggctccctaccatngtatcatcgtgcccatcaaatacgacggcgcggtcaaagaagcggcggactctttggcggcggccttggaacacgcgggtgtggaatgtctcctggacgaccgggaaagaacggccgggggtcaaagttcaaggacgccgaaccttatcggcatacccctcagaaatcctggtgggggaaaaaaaacctggcccggaaataccccccaaggtggaaactcaaaagccccgaagggaaaaaggaaagcccccctgggggaaacttggccaagggccccggaaaaaaattttcagggtcttggtcccaacaggaaaatagggattttggcggaaactttgaaaaagttctcgtaa

SEQ ID NO: 21226 - protein, 297 aa, Unknown
  Obtained from environmental sample
  misc_feature (1)..(297): Xaa is any amino acid
MAIRGDLDINEVKLTALLKASEVELAGEADVQRITGAPVGFAGPVGLKGVPLIIDSSVTAINDGICGGLAKDLHYKHAAWGRDFEAWKTADLRTVKAGDVCPLCGAELYEKKGNELGHIFKLGNKYTSTMNVTYLDENGKTCVPIMGCYGIGLDRTLASVIEEHHDEDGIIWPMSVAPYHXIIVPIKYDGAVKEAADSLAAALEHAGVECLLDDRERTAGGQSSRTPNLIGIPLRNPGGGKKTWPGNTPQGGNSKAPKGKRKAPLGETWPRAPEKNFQGLGPNRKIGILAETLKKFS

SEQ ID NO: 21227 - DNA, 642 bp, Unknown
  Obtained from environmental sample
  misc_feature (1)..(642): n is a, c, g, or t
ttgacgccggagcaaacacgcgacctgcttgccgcaccgggttttgcagcacgctcaaaccgccgtaatacgacactattgagcgtactgtatgattccggcgcgcgggtacaggaattttgtgatttgcgcgtccgtgacattcgtctcgaccacccgtccgtgattacactgacaggcaaagggcgtaaaacaagacatgtgcccctcatggcggacaccgtgaaactactgcgatcctacatgaaagaaaactccctattccaaaacggccgccaagacacgccgttgttctgtaaccagcatcgttcaaagctgacccgcggaggtgttaatcacattctgtgcaaatattccagcacattgtcgataaaatatcctgatatattaaaaaggcttacgccccatgtgctgaggcattctaaggcaatgcatctgtatcaagccggcgtgagccttatatatatacgtgatatcctcgggcacgttgatatcgctactactgataactacgccagagccgacgccgagtccaaacgcaaggcgcttgagaatatttacccgggtataacgcctgttgattcttcgttgcctgattggaaccgcgatttaaatttgcttgattacttgaacggcctctaa

SEQ ID NO: 21228 - protein, 213 aa, Unknown
  Obtained from environmental sample
  DOMAIN (9)...(181): Phage integrase family
  misc_feature (1)..(213): Xaa is any amino acid
MTPEQTRDLLAAPGFAARSNRRNTTLLSVLYDSGARVQEFCDLRVRDIRLDHPSVITLTGKGRKTRHVPLMADTVKLLRSYMKENSLFQNGRQDTPLFCNQHRSKLTRGGVNHILCKYSSTLSIKYPDILKRLTPHVLRHSKAMHLYQAGVSLIYIRDILGHVDIATTDNYARADAESKRKALENIYPGITPVDSSLPDWNRDLNLLDYLNGL

SEQ ID NO: 21229 - DNA, 600 bp, Unknown
  Obtained from environmental sample
  misc_feature (1)..(600): n is a, c, g, or t
atgaactttttgccggacgtttacataacgtgcgacgtatgccagggcaaaagatttaacaaagagacgctggagatccgatacaaaggaaaaaacatcgccgaagtactggacatgaccatcgaagaagcagcagtctttttcgcccccattccgcagatgncaaggaaaatgcagacactgctgtccgtgggactcggttatgtgaaacttggacagtccgcgcttacgctctccggcggggaggcgcagagggtaaagctcgcccttgagctttcaaaacgctccaccggcagaaccctgtatatgcttgacgaaccgacgacgggccttcattttgccgacgtaaaacagttaatggacgtaattcaacggttggtagatcagggaaatacggttataatgatagaacacaaccttgacgtgcttttacagtcggatcatattattgatttgggtcctgagggaggcgaaaaagggggacaaataatcgctacgggaactcctgagcaaattgccaaatgtggcgggtcctacaccggcgcgtttctggctgaaatgctaaatcgtaacgcggtacgcaagaataaaagacaatga

SEQ ID NO: 21230 - protein, 199 aa, Unknown
  Obtained from environmental sample
  DOMAIN (1)...(156): ABC transporter
  misc_feature (1)..(199): Xaa is any amino acid
MNFLPDVYITCDVCQGKRFNKETLEIRYKGKNIAEVLDMTIEEAAVFFAPIPQMXRKMQTLLSVGLGYVKLGQSALTLSGGEAQRVKLALELSKRSTGRTLYMLDEPTTGLHFADVKQLMDVIQRLVDQGNTVIMIEHNLDVLLQSDHIIDLGPEGGEKGGQIIATGTPEQIAKCGGSYTGAFLAEMLNRNAVRKNKRQ

SEQ ID NO: 21231 - DNA, 387 bp, Unknown
  Obtained from environmental sample
  misc_feature (1)..(387): n is a, c, g, or t
atgatgatctactcaacagagcttgccaaattggctgaaattccgcgcgccatgtgggaaccgcttgtgataatggcgggggcttacgctccgcaccttggcgaagaattgtgggaaaaacttgggcacaaagaatctgtttccctaagccaatggtcatcttttgatcctgcgttgaccgtttttgacgaggtgaccgtcgtagttcaggtgggcggtaaaatccgcgaaaaatttaccgccgccgccggaacggcgaaagaggagcttgaaaaaacagcccttgccctgcccggaacgcaaaaatggcttgagggacagacaatagcgaagattattacagtaccggataaattagtgaatattgttttgcaaaaaaacaattaa

SEQ ID NO: 21232 - protein, 128 aa, Unknown
  Obtained from environmental sample
  misc_feature (1)..(128): Xaa is any amino acid
MMIYSTELAKLAEIPRAMWEPLVIMAGAYAPHLGEELWEKLGHKESVSLSQWSSFDPALTVFDEVTVVVQVGGKIREKFTAAAGTAKEELEKTALALPGTQKWLEGQTIAKIITVPDKLVNIVLQKNN

SEQ ID NO: 21233 - DNA, 855 bp, Unknown
  Obtained from environmental sample
  misc_feature (1)..(855): n is a, c, g, or t
atggaaacttttatcctgccgaaggactttgccaatgttaaaagatggggtttcgatcatgtgcgagtcccgattgactcgtacctgttttttaccgaagatgacgctccgattgaaaacaggcttgcatatattgaccgcgccgtagagtacgctctgcccgccggcctcaggctgatattggatctccacgagtgtccggggcacgatttttcagaagccgcgaaaacccccgttcagaaacttttttcagacgacgacacctatataaagaagaccgaaaaaatctgggcctgccttgccgagcgttattcgcagaaagactacgtcctttttgagacgcttaacgaacctgtcgcccccaacgcggaaatctggaacaatgtcaaggacaggctctgccgcgaaatacgcctccacgctccctggtcgacgattatcaccggttccaatatgtggaactggccgagtacgtttgacagcctcacgccctttgacgatgacaacatgatctacagcgtgcattattatgaaccgctgctattcacgcaccagaacgcgccatggatcggtaatcctgaaatcaagacggcaaggccgtatccaggcgattacggtcccggttttatccgcaaatacggcatgacgctgtcagccggcgtctgggacagggagcggcttgccagggaattcgagcccgttaacgcattcaggaaaaagtacaatgcgcgcattatctgtaacgagttcggcgtttacacgcccgtcgagctttcatcgcagctgcgctggtatgatgatctgctctncatactcatggagatggggatcggtttttcgtactggaaactataa

SEQ ID NO: 21234 - protein, 284 aa, Unknown
  Obtained from environmental sample
  DOMAIN (1)...(284): Cellulase (glycosyl hydrolase family 5)
  misc_feature (1)..(284): Xaa is any amino acid
METFILPKDFANVKRWGFDHVRVPIDSYLFFTEDDAPIENRLAYIDRAVEYALPAGLRLILDLHECPGHDFSEAAKTPVQKLFSDDDTYIKKTEKIWACLAERYSQKDYVLFETLNEPVAPNAEIWNNVKDRLCREIRLHAPWSTIITGSNMWNWPSTFDSLTPFDDDNMIYSVHYYEPLLFTHQNAPWIGNPEIKTARPYPGDYGPGFIRKYGMTLSAGVWDRERLAREFEPVNAFRKKYNARIICNEFGVYTPVELSSQLRWYDDLLXILMEMGIGFSYWKL

SEQ ID NO: 21235 - DNA, 696 bp, Unknown
  Obtained from environmental sample
  misc_feature (1)..(696): n is a, c, g, or t
ttgttcgggcatgtagaaagaggagtgataaagaaccttggggtaacggcgtcttacatcagaggaggcagtcaggtaggcggtcttgtgggttattttcataatggcaagataatcaactgccattcaaatgctttggtgataggagggctcgaggtcggtgggttggcaggatatatttcagactctgacagcaggattgtcagcagctattcaaccggcactgtgacaggaaggatgtggactggcgggctggtaggacaaggcagtggcgagacaatcagcagctattccagtgctacggtaacaggaaaagaatatgtgggcgggttgattggaggttgtggcaatataatcagcagttattccagcggtacggtaacaggtgattcccgtgtgggaggtcttgttggagatatccttttttatcaaataaccaacagctattccataggggccgtgacaggcagaagcaaagtcggcggtctggttggagctatcgaccgtggtcaaataaccaacagctattacagcaaggaaacgagcaaccaaaacgacaaaggcaagggcgaaggcaaaacaatggcggagatgaaaaaaagggaaacttttgaaggctgggattttgacaggacttggggaatggatagcgcggtgaatggggggtacccgtatttgcgtagctttaaacaatag

SEQ ID NO: 21236 - protein, 231 aa, Unknown
  Obtained from environmental sample
  DOMAIN (49)...(77): The GLUG motif
  misc_feature (1)..(231): Xaa is any amino acid
MFGHVERGVIKNLGVTASYIRGGSQVGGLVGYFHNGKIINCHSNALVIGGLEVGGLAGYISDSDSRIVSSYSTGTVTGRMWTGGLVGQGSGETISSYSSATVTGKEYVGGLIGGCGNIISSYSSGTVTGDSRVGGLVGDILFYQITNSYSIGAVTGRSKVGGLVGAIDRGQITNSYYSKETSNQNDKGKGEGKTMAEMKKRETFEGWDFDRTWGMDSAVNGGYPYLRSFKQ

SEQ ID NO: 21237 - DNA, 744 bp, Unknown
  Obtained from environmental sample
  misc_feature (1)..(744): n is a, c, g, or t
atgcggggcgggacgctgctggtgagcagggctgttaattggtttcctcacttcaaagaacgctttgaagcgttggggtttcccgatgttcatgttaccgcagttgaaaaggacggattgaatatgttggttaacgaactaaagccggagtatgtgcttatcgggagtaacttttatgattgcgggacgccgtacatgatcgggcagatgttaagcgtgttcccaaaattgaatatcgccgtaataaatacaagccctttccctgacgctgttgcggtatggtttatttttcacggaataaaattttatgtgaaacttcttgacggcaaagaggaatttcatcatgggcttcaatgttttcttgaggggaaaagatacattgcgcctgacgtgcaaaaaattcttgacggacttacagaatggattgacgtaccgctgaaagcgacaagacggcagaaagaaattttattgatgttgtgctgcggtttctctatacagcggatacaggacaggcttcatataagcaaagggactgttgaaaaccatattagggaactgatgaagatttttaattctcgcggcagggaagaattgataaagacggttaatagtcttgatattttcacaaagaacgaattgtgtttttacgacacaggtaattacagttttgtatttccggggtgggtgaaaacacaacagcgtataaacaaaatagcaaataacaggaggggttatgattattaa

SEQ ID NO: 21238 - protein, 247 aa, Unknown
  Obtained from environmental sample
  DOMAIN (143)...(202): Bacterial regulatory proteins, luxR family
  misc_feature (1)..(247): Xaa is any amino acid
MRGGTLLVSRAVNWFPHFKERFEALGFPDVHVTAVEKDGLNMLVNELKPEYVLIGSNFYDCGTPYMIGQMLSVFPKLNIAVINTSPFPDAVAVWFIFHGIKFYVKLLDGKEEFHHGLQCFLEGKRYIAPDVQKILDGLTEWIDVPLKATRRQKEILLMLCCGFSIQRIQDRLHISKGTVENHIRELMKIFNSRGREELIKTVNSLDIFTKNELCFYDTGNYSFVFPGWVKTQQRINKIANNRRGYDY

SEQ ID NO: 21239 - DNA, 816 bp, Unknown
  Obtained from environmental sample
  misc_feature (1)..(816): n is a, c, g, or t
atgcctcccctccccttccatccattgattaacgcctggttttctgaaacctacgcgaagcccacggcagtacaagagcaagcctggccgctaatctctgcgggagaaaacgtccttgccatcgcgcccacgggaagcggcaaaaccctgacaggctttctttcggcaatttcgcgctttgccgaaggcacgtattcggctggcaaactgtcggtgctatacgtctcgcccctgaaagctttaaacgaagacattaagcgaaatctgctcctgccacttgaagggatacagaagcgcttcgaaaaggcaggagaggcgtttccggccattagagtagagacccgttcgggagacacgccccaggccgagcgcagacgttttctttccctgccgccttccatcctggccctgacgcctgagagccttggcatcattcttcttaacccaagggggcgacaggtgctttccacagtgcgctgcgtgatcatggacgagatacacgccgccctgggcagcaagcggggctgttatctttcgtgccagatcgaacgcctctcgctggtcgccggcaatttccagcgcattgccctttcggccacagtaaagccgcccgaagcggcggcgaatctggccggtggtctgacggccggcaaaaaaattcacattatcgcaccggaagaaaaaaaagaaattcaatttaaagtgttatatgaatcggactatcccgaaattgaaggaaagacatattcaggcgaaagcggcgtagaacgctnggcaggcgtatacggaactcaaaagttatttggcccgcgataa

SEQ ID NO: 21240 - protein, 271 aa, Unknown
  Obtained from environmental sample
  DOMAIN (22)...(207): DEAD/DEAH box helicase
  misc_feature (1)..(271): Xaa is any amino acid
MPPLPFHPLINAWFSETYAKPTAVQEQAWPLISAGENVLAIAPTGSGKTLTGFLSAISRFAEGTYSAGKLSVLYVSPLKALNEDIKRNLLLPLEGIQKRFEKAGEAFPAIRVETRSGDTPQAERRRFLSLPPSILALTPESLGIILLNPRGRQVLSTVRCVIMDEIHAALGSKRGCYLSCQIERLSLVAGNFQRIALSATVKPPEAAANLAGGLTAGKKIHIIAPEEKKEIQFKVLYESDYPEIEGKTYSGESGVERXAGVYGTQKLFGPR

SEQ ID NO: 21241 - DNA, 468 bp, Unknown
  Obtained from environmental sample
  misc_feature (1)..(468): n is a, c, g, or t
ttgctgcccagggcggcgtgtatctcgtccatgatcacgcagcgcactgtggaaagcacctgtcgcccccttgggttaagaagaatgatgccaaggctctcaggcgtcagggccaggatggaaggcggcagggaaagaaaacgtctgcgctcggcctggggcgtgtctcccgaacgggtctctactctaatggccggaaacgcctctcctgccttttcgaagcgcttctgtatcccttcaagtggcaggagcagatttcgcttaatgtcttcgtttaaagctttcaggggcgagacgtatagcaccgacagtttgccagccgaatacgtgccttcggcaaagcgcgaaattgccgaaagaaagcctgtcagggttttgccgcttcccgtgggcgcgatggcaaggacgttttctcccgcagagattagcggccaggcttgctcttgtactgccgtgggcttcgcgtag

SEQ ID NO: 21242 - protein, 155 aa, Unknown
  Obtained from environmental sample
  misc_feature (1)..(155): Xaa is any amino acid
MLPRAACISSMITQRTVESTCRPLGLRRMMPRLSGVRARMEGGRERKRLRSAWGVSPERVSTLMAGNASPAFSKRFCIPSSGRSRFRLMSSFKAFRGETYSTDSLPAEYVPSAKREIAERKPVRVLPLPVGAMARTFSPAEISGQACSCTAVGFA

SEQ ID NO: 21243 - DNA, 402 bp, Unknown
  Obtained from environmental sample
  misc_feature (1)..(402): n is a, c, g, or t
ttgacaaaaaacgctgtatataaccctaatcctaaagtttataaagaagacatttacctggtgctgacaaaggtaacaaatgcttatttttcttttgctctggagaatagggctttttttaaaatcactttggcaaacatgttcatgcccgcttcgtcagatgtctttaaatttgttgaaaaataccattttgcacaatttgacattttagaaagaatgtttggaaatatggccaaatcgcatggcaacctaaagggtaaaagcagaacgcttgcatggtcttttgtcggtactataaattcgaatatcaacctttatttcagcaaaatttcaggtcattcgttgaatgacaagacagtacatgaactggtacatcaatttatgcatggaatatatgcataa

SEQ ID NO: 21244 - protein, 133 aa, Unknown
  Obtained from environmental sample
  misc_feature (1)..(133): Xaa is any amino acid
MTKNAVYNPNPKVYKEDIYLVLTKVTNAYFSFALENRAFFKITLANMFMPASSDVFKFVEKYHFAQFDILERMFGNMAKSHGNLKGKSRTLAWSFVGTINSNINLYFSKISGHSLNDKTVHELVHQFMHGIYA

SEQ ID NO: 21245 - DNA, 525 bp, Unknown
  Obtained from environmental sample
  misc_feature (1)..(525): n is a, c, g, or t
atgaaccgtgaagaaagaataaaagatttaatatccaaaatgacccccgaagagaaagtctcccaactaagccacagaagcgaagcaatcccgcgtcttgatatacccgaatataactggtggaacgaatgcctgcacggagtcgccagagcaggcgtcgccacggtttttccccaggccatcgcgcttgcggcaacctttgacgacgaatttgtcaaacaggttatgaccgccgtttccgatgaagcgcgcgcaaaaaataatgaagctgtaaaacaaaataaccggggccagtacaatgggcttactttctggacgccgaatatcaatatcttccgcgatccgcgctgggggcgggggcaggaaacttacggcgaagatccctatcttacttcccgcatgggaactgcggtagtacagggcttgcagggcgatgatcccgaaaatataaaacttgccgcctgcgcaaaacattacgccgtccactcgggcccgaaaaagatcgtcatacctcggccgatctga

SEQ ID NO: 21246 - protein, 174 aa, Unknown
  Obtained from environmental sample
  DOMAIN (27)...(171): Glycosyl hydrolase family 3 N terminal domain
  misc_feature (1)..(174): Xaa is any amino acid
MNREERIKDLISKMTPEEKVSQLSHRSEAIPRLDIPEYNWWNECLHGVARAGVATVFPQAIALAATFDDEFVKQVMTAVSDEARAKNNEAVKQNNRGQYNGLTFWTPNINIFRDPRWGRGQETYGEDPYLTSRMGTAVVQGLQGDDPENIKLAACAKHYAVHSGPKKIVIPRPI

SEQ ID NO: 21247 - DNA, 504 bp, Unknown
  Obtained from environmental sample
  misc_feature (1)..(504): n is a, c, g, or t
ttgcagtatagtcgtcccggccgtcgtggacggcaagacggaggattggcttgtgatgttcaagaacgagacgcacaaccatcccaccgagatagagccgtcgggcggcgcggcgacttgtttgggcggcgcgatccgcgacccgctttcggggcgctcctacgtctatcaggctatgcgggttaccggggccggagacccccgcgccgccgtcggcgggacgttgccgggcaagctgcctcagcggaagatcacgacgctcgccgcgcaagggtacagctcctacggcaaccagatcggcgtggccacgggtatggtcgccgaggtgtaccacgagggttacgtcgccaagcgcatggagataggcgcggtggtgggcgcggttcccaaatcgcacgtagcgcgccgcgaacccgaagccggcgacgtcgtcgtgcttctcggcggccgtaccgggcgcgacgggtgcggcggggccacggggtcgtccaaggagcatactga

SEQ ID NO: 21248 - protein, 167 aa, Unknown
  Obtained from environmental sample
  misc_feature (1)..(167): Xaa is any amino acid
MQYSRPGRRGRQDGGLACDVQERDAQPSHRDRAVGRRGDLFGRRDPRPAFGALLRLSGYAGYRGRRPPRRRRRDVAGQAASAEDHDARRARVQLLRQPDRRGHGYGRRGVPRGLRRQAHGDRRGGGRGSQIARSAPRTRSRRRRRASRRPYRARRVRRGHGVVQGAY

SEQ ID NO: 21249 - DNA, 561 bp, Unknown
  Obtained from environmental sample
  misc_feature (1)..(561): n is a, c, g, or t
gtgcttttaagcctgaaagccgccggtatttttgggggacaaaaggccgatgtcctgagtatcatcgcggttattctatatgcggtgaccatgatcgggatgttcntgatatcaaccctgtatcacgcgattcagcatcagggcgccaaacgtgtgttgcgccggatggatcattccgtgatattcatttttatagccggtacttattcgccaatttgtctgagcggccttggaggagcctggggctggacgattttttcgcttgaatggtcgttggccatgctcggcataattctcaatgtccttggctttaaggccctcaagaaaatagaaatagccgcttatataatgatgggctgggcaatcgttgtgggctttgttccgctagtgcgatccgtgccggttagaagcattgtcctgcttcttgccggaggggccgcgtatacgtttggaaccctctggtatcgcagaaaagacctcaagtttacgcatgtcgtctggcatgtctttgtattggcggggactatatgccactggtttgcggtatggtatctcttttag

SEQ ID NO: 21250 - protein, 186 aa, Unknown
  Obtained from environmental sample
  DOMAIN (6)...(179): Haemolysin-III related
  misc_feature (1)..(186): Xaa is any amino acid
MLLSLKAAGIFGGQKADVLSIIAVILYAVTMIGMFXISTLYHAIQHQGAKRVLRRMDHSVIFIFIAGTYSPICLSGLGGAWGWTIFSLEWSLAMLGIILNVLGFKALKKIEIAAYIMMGWAIVVGFVPLVRSVPVRSIVLLLAGGAAYTFGTLWYRRKDLKFTHVVWHVFVLAGTICHWFAVWYLF

SEQ ID NO: 21251 - DNA, 591 bp, Unknown
  Obtained from environmental sample
  misc_feature (1)..(591): n is a, c, g, or t
atgcaattaaagaagagtaatcaaaaatatacagataaaataaaaatattaccatggataggcgaaaactattttaatgaaaagcaaaagatattgattcttggaaagtcaacatattataaagatgccacatcaaaaaaagattatttgaatgatttaattaaaagtatatgtaaaggtgaaaggcggagaggatcggtatatctgataaaaacggaaaatctccttaaaaataaaaaggagacttcggaaaaattttggaacagaattgctttctataactatgctcaggaaataacggacgtgtcaaaacaaaaatcacctaaagactatttggaatatgacaaagaggcatttattaaaatattaaagaaattaatgcctgacaaagtgattgttatggggcatgagttatttaaaaatttgcctganaaatttgaaaaggaaaaatcaatattaaaaaacggcaaggaattaaaaatagccgattatttcataataaagaaggatcatcaaaaaaatattatttttttaggggtatggcatccctcaaggaaggatttaaaaatgaagattggaggaaattgttaa

SEQ ID NO: 21252 - protein, 196 aa, Unknown
  Obtained from environmental sample
  misc_feature (1)..(196): Xaa is any amino acid
MQLKKSNQKYTDKIKILPWIGENYFNEKQKILILGKSTYYKDATSKKDYLNDLIKSICKGERRRGSVYLIKTENLLKNKKETSEKFWNRIAFYNYAQEITDVSKQKSPKDYLEYDKEAFIKILKKLMPDKVIVMGHELFKNLPXKFEKEKSILKNGKELKIADYFIIKKDHQKNIIFLGVWHPSRKDLKMKIGGNC

SEQ ID NO: 21253 - DNA, 630 bp, Unknown
  Obtained from environmental sample
  misc_feature (1)..(630): n is a, c, g, or t
ttgagaacctctttccaccttgacgcgaaattgcgcgtacagatgagggcggaactttccgacctgcacctgcgccttaacgcgacaatgatctatgtaacgcacgaccaggttgaagctatgaccatggcgaacaagattgttgtaatgaaagacggaaaaatccagcagattggctctcctttattcctctataactatccgattaacaaattcgtagccggatttatcggttctcctccgatgaacttcctcaatgtaaaggtaaaggaagacggcagttcaatcgttttggacgaaggttcatttaagattaaagccgatccgtctcatattgagcatcttagaaaatatgtaggaagagaagtattttttggcattcgcccggaagacatgacttatgtggacaaagaaggcagcaacagcatgaagctgaaagtaacggtagttgagccgttgggcgccgacatccacttatggcttacgaccgagacccagccgcttgtagcccgcaccgaacctaaccacgtcttcaaagtaggggacacagcggtattcacccccaggatggaaaaagcccgttatttcgacaaagacaccgaactggcaattatcccgtctccggagtga

SEQ ID NO: 21254 - protein, 209 aa, Unknown
  Obtained from environmental sample
  DOMAIN (137)...(195): TOBE domain
  misc_feature (1)..(209): Xaa is any amino acid
MRTSFHLDAKLRVQMRAELSDLHLRLNATMIYVTHDQVEAMTMANKIVVMKDGKIQQIGSPLFLYNYPINKFVAGFIGSPPMNFLNVKVKEDGSSIVLDEGSFKIKADPSHIEHLRKYVGREVFFGIRPEDMTYVDKEGSNSMKLKVTVVEPLGADIHLWLTTETQPLVARTEPNHVFKVGDTAVFTPRMEKARYFDKDTELAIIPSPE

SEQ ID NO: 21255 - DNA, 765 bp, Unknown
  Obtained from environmental sample
  misc_feature (1)..(765): n is a, c, g, or t
atgcccggtcacatgatgcagtataaagacggtgtgtaccagttcaccggacttcttgccgatagggaacctcgttctcctcaggaactttttgaagaacagcttgatagatgccgtgtggattattttgatttctaccttttgcataacctgtgtgaaacggcctgggatttctatactaacgaagaaatcggtgtagtggattatttattgaaacaaaaacaagcggggcgtatccgtcatcttggcttatctgcccacggcagagccgatacaattgataaatttctatccaggtatgattgctttgagtttgttcagattcaacttaattacctggattggactttacaagatgcggaaaaaaaatatgaggttattacaaaacacggcctgtcggttattacgatggagtcatgccgcggagggcggctcgcatcccttaaccaggaagcggatgccatgcttaagaccgtgcggccaaacgattcaatagtttcctgggcgtttcgctttctgcaatctcttccaaatgtttccgttatattaagcggtatgactactcttgagcagctaaaggaaaacattggactattctccagagaagacccgacaacagatcaggaaaaagaactactacaacaagctgtcaagacaatggtagatatggttccgtgtactgcctgcgcttattgtgccgaagcctgtccacagaaactggatatacccaaacttatctcgatgtataatgaaacggtgttttaa

SEQ ID NO: 21256 - protein, 254 aa, Unknown
  Obtained from environmental sample
  misc_feature (1)..(254): Xaa is any amino acid
MPGHMMQYKDGVYQFTGLLADREPRSPQELFEEQLDRCRVDYFDFYLLHNLCETAWDFYTNEEIGVVDYLLKQKQAGRIRHLGLSAHGRADTIDKFLSRYDCFEFVQIQLNYLDWTLQDAEKKYEVITKHGLSVITMESCRGGRLASLNQEADAMLKTVRPNDSIVSWAFRFLQSLPNVSVILSGMTTLEQLKENIGLFSREDPTTDQEKELLQQAVKTMVDMVPCTACAYCAEACPQKLDIPKLISMYNETVF

SEQ ID NO: 21257 - DNA, 657 bp, Unknown
  Obtained from environmental sample
  misc_feature (1)..(657): n is a, c, g, or t
atgcccgaaaccatgagcgtagaacggcgcaatctgttaagggcacttggcgcggaaatagtgcttactccgggcaaagacggaatgaaaggcgcgatacggaaagcagaggagctttcttcccagtttgaaaaagcgtttatcccccaacagtttgacaatcccgcgaacccggaaatacataaaaaaaccacagccgaagaaatatggcgcgataccgacggacaaattgcggcgtttatttcgggtgtgggaacgggcgggacaataaccggcgttggtgagtttttgaaagaaaaaaacaaagacataaaagtaatcgccgttgaaccttatgattcagcggttttatcgggcaatccgcccgctccccataaaatacagggtattggcgcgggctttattccctctgttttgaataccgaaattatcgacgagatatacaaggtaaaaaacgaggaagcgtttgaaacttcccagcgtctcgcaaaaacagaaggcttgcttgtaggcatatcatcgggcgcggcggcatttgcgggtacgcagatagcaaagcgccccgaatacgaaggaaaaattgtcgtgactgtcctgcccgatacaggcgagagatacctttccaccgcgttatacgacaaccttgaaagaaaatga

SEQ ID NO: 21258 - protein, 218 aa, Unknown
  Obtained from environmental sample
  DOMAIN (1)...(202): Pyridoxal-phosphate dependent enzyme
  misc_feature (1)..(218): Xaa is any amino acid
MPETMSVERRNLLRALGAEIVLTPGKDGMKGAIRKAEELSSQFEKAFIPQQFDNPANPEIHKKTTAEEIWRDTDGQIAAFISGVGTGGTITGVGEFLKEKNKDIKVIAVEPYDSAVLSGNPPAPHKIQGIGAGFIPSVLNTEIIDEIYKVKNEEAFETSQRLAKTEGLLVGISSGAAAFAGTQIAKRPEYEGKIVVTVLPDTGERYLSTALYDNLERK

SEQ ID NO: 21259 - DNA, 423 bp, Unknown
  Obtained from environmental sample
  misc_feature (1)..(423): n is a, c, g, or t
ttgaacaaggctctcctgaagcagtccatacgaaacgcctctgaaatcagcttctcccggtccggcggccccggcggacagaatgttaacaaacttaatacaaaggtgacgctgcgccttcgcctgactgacattgccgggctttcagacgcggaactggagagggtgagggggctgctggcaaaccgcgtaaccgcggcggacgaaattgttataggctctgacgaggaacgctcgcagcgtaccaatctggaaagggcttatttccgtattgaagcgcttataaccgaggcggcccgcctgcccaaacaccgctatcctacaaagccgtcaaaggcggcacgcgagcaaaggctccatgtaaaacaactgcaaagccgtaaaaaagtgtcgcggagttcacggcccgctccggaagattaa

SEQ ID NO: 21260 - protein, 140 aa, Unknown
  Obtained from environmental sample
  misc_feature (1)..(140): Xaa is any amino acid
MNKALLKQSIRNASEISFSRSGGPGGQNVNKLNTKVTLRLRLTDIAGLSDAELERVRGLLANRVTAADEIVIGSDEERSQRTNLERAYFRIEALITEAARLPKHRYPTKPSKAAREQRLHVKQLQSRKKVSRSSRPAPED

SEQ ID NO: 21261 - DNA, 312 bp, Unknown
  Obtained from environmental sample
  misc_feature (1)..(312): n is a, c, g, or t
atgggttttgtaatgatctacgatgggaagttatgtttttcaacgaacaataaaaaagacatgttcaaacagatgaaagccaacccaaaaattgaaatttgcgccagtactcaggatgggaaatggctcaggataagcggcagtgtggccttcaattccggcagggccgttaaggaaaaggcgctggaaattatgcccgttttgaaaaatatgtactccgccgatgacggcatttttgagattttccattttgaaaacgcccgcgcggttttcagtgacatgcagggcgggaagaaagaagtaaaaatataa

SEQ ID NO: 21262 - protein, 103 aa, Unknown
  Obtained from environmental sample
  misc_feature (1)..(103): Xaa is any amino acid
MGFVMIYDGKLCFSTNNKKDMFKQMKANPKIEICASTQDGKWLRISGSVAFNSGRAVKEKALEIMPVLKNMYSADDGIFEIFHFENARAVFSDMQGGKKEVKI

SEQ ID NO: 21263 - DNA, 609 bp, Unknown
  Obtained from environmental sample
  misc_feature (1)..(609): n is a, c, g, or t
gtgcttgcggaagcggtgctgaccataggcgggccgcagttgcgcaacatcggcactataggcgggaatgtctgcaacggggttacgtcagcggacagcgcttcaaccctgctggcctatgatgtggtgatggaataccttggtcccaatggcctgcggctggttcccatttccgaacattataaaggcgccggcaaaaccgccctggctcatgacgagattctgcaggctattctcgttccaaaggaaagttatgaaaattgttttggcaattatattaaatacgccatgagggaagccctggacatcgcaaccctgggatgttcggcaaatgtacggctttcaaaagatcgcaaaaccattgacaggcttcggctggcatacggcgtcgcagggcccgttcccatgcgtgttcccggcgcggaacaggccgcgtccggaaaacctgcaaacgtcgaaaccgcagcctcaattgccaaactggtgttaaacgacattaacccgcggtcaagctggcgtgccagcaaggaatttagattgcatctggcggaagagcttgccaaacgggcgattaccgaatcgctgaaacgcgcgggggtatcgttatga

SEQ ID NO: 21264 - protein, 202 aa, Unknown
  Obtained from environmental sample
  DOMAIN (1)...(83): FAD binding domain in molybdopterin dehydrogenase
  misc_feature (1)..(202): Xaa is any amino acid
MLAEAVLTIGGPQLRNIGTIGGNVCNGVTSADSASTLLAYDVVMEYLGPNGLRLVPISEHYKGAGKTALAHDEILQAILVPKESYENCFGNYIKYAMREALDIATLGCSANVRLSKDRKTIDRLRLAYGVAGPVPMRVPGAEQAASGKPANVETAASIAKLVLNDINPRSSWRASKEFRLHLAEELAKRAITESLKRAGVSL

SEQ ID NO: 21265 - DNA, 858 bp, Unknown
  Obtained from environmental sample
  misc_feature (1)..(858): n is a, c, g, or t
gtgatcgcggatctctgtcataatgaaacgttgtttcgccgtatagcgctcagcgccttatactttgtgattgccgccggattgtgtatggcgcagtaccttcctatcttcgaagcgagcggacacacggttcgtagcaagttcacgataaccgacgcgagcgagggttcgttgcagttcgtacagttgctcaccgcgttgcttcccaaggtcttcggcgcctataccggtagcgagggtgttcccgccttctggcttcaggacgctttcaagtacggatactacaattattgggagtcgtgtttttactttggggtgtcgacgcttatactcgccgttacgctcttccgcaaaatcaaaacggatcgtactttgatgttctacgccgcgtggatactattgagttttttggttgcgctaggcggtaattttttcttttacaagttgcttttttcgcttgggataccgggtttcaactcgttccgagctacgccgaggatactgtttatatggggatttttatttccggtgatggccgccgcggcgcttgacggtttgaatgacctaaagtcgaggaaattccggatagtgatgctctcgttttgcgccgccgccgcgattttggggttaattaccgctgccggaggcttggcgtcggtttttccgcttttgaacgtggctgacggcagggcgcagtacgcgtcgcggcagggtattattttgttcgtcaacgcgctgctcttcggggtggtgttgatactgtttttcagaaatatagtaaacgagaagcggacgaaaatttttatagtattgtgcgtttcaatagatatgctcgtcttcgccgccgtcaacacataa

SEQ ID NO: 21266 - protein, 285 aa, Unknown
  Obtained from environmental sample
  misc_feature (1)..(285): Xaa is any amino acid
MIADLCHNETLFRRIALSALYFVIAAGLCMAQYLPIFEASGHTVRSKFTITDASEGSLQFVQLLTALLPKVFGAYTGSEGVPAFWLQDAFKYGYYNYWESCFYFGVSTLILAVTLFRKIKTDRTLMFYAAWILLSFLVALGGNFFFYKLLFSLGIPGFNSFRATPRILFIWGFLFPVMAAAALDGLNDLKSRKFRIVMLSFCAAAAILGLITAAGGLASVFPLLNVADGRAQYASRQGIILFVNALLFGVVLILFFRNIVNEKRTKIFIVLCVSIDMLVFAAVNT

SEQ ID NO: 21267 - DNA, 582 bp, Unknown
  Obtained from environmental sample
  misc_feature (1)..(582): n is a, c, g, or t
ttgctttggatgataatcggggctcagcttggcattgacaagatgggcattgaatttgattacaacgcttttgcggatggattgagagcgacagtagagggcgaacaaaaaaagatcagcgatcaagaagcgatggaaataatcgaagccgccttgtacaatgctgaggaaaaacaatcttccggcaacaaagcggcggaagacgaatttctcgcgactaacggcaagcggcaggaagtaaagactacggcaagcggtcttcaatacgaaattattcaaaacacggaaggcgaaaaacccaaaaaaaattccgttgtcagggtaaattataccgggacttttttagacgggcgtccttttgacagctcttcggaagaaggcggagcgtatattccgctggaaaatgttatacccggttggacggaaggcttaatgttgatgagccgcggcagtgtataccgtttgtacataccttcaaatctggcttatggcaaggacggcattcagggcgttattccggcatattcaactttaatttttatagtcgaattaatagacattattgaagattctgatgaatag

SEQ ID NO: 21268 - protein, 193 aa, Unknown
  Obtained from environmental sample
  DOMAIN (6)...(91): Domain amino terminal to FKBP-type peptidyl-prolyl isomerase
  misc_feature (1)..(193): Xaa is any amino acid
MLWMIIGAQLGIDKMGIEFDYNAFADGLRATVEGEQKKISDQEAMEIIEAALYNAEEKQSSGNKAAEDEFLATNGKRQEVKTTASGLQYEIIQNTEGEKPKKNSVVRVNYTGTFLDGRPFDSSSEEGGAYIPLENVIPGWTEGLMLMSRGSVYRLYIPSNLAYGKDGIQGVIPAYSTLIFIVELIDIIEDSDE

SEQ ID NO: 21269 - DNA, 315 bp, Unknown
  Obtained from environmental sample
  misc_feature (1)..(315): n is a, c, g, or t
ttgatagaaaacggaataaagtattcgccttcaaaatcaaaaatttgggtgagcgcgtttacagaaaatgaagaactgttatttgaagtgcgggataaagggatagggattccccttgaacatcatgaacggatatttgaaagattttacagagtagataaagcgagaggtcgttttgcgggaggcaccggacttgggctttccattgtccggcatattgctctgcttcacaagggaagagccgaaatggaaagccgcgtcggtgaaggatcaacctttaggattagaatccctattcatcagaatcttcaataa

SEQ ID NO: 21270 - protein, 104 aa, Unknown
  Obtained from environmental sample
  DOMAIN (1)...(100): Histidine kinase-, DNA gyrase B-, and HSP90-like ATPase
  misc_feature (1)..(104): Xaa is any amino acid
MIENGIKYSPSKSKIWVSAFTENEELLFEVRDKGIGIPLEHHERIFERFYRVDKARGRFAGGTGLGLSIVRHIALLHKGRAEMESRVGEGSTFRIRIPIHQNLQ

SEQ ID NO: 21271 - DNA, 822 bp, Unknown
  Obtained from environmental sample
  misc_feature (1)..(822): n is a, c, g, or t
atggatcagatcggccgaggagaccgtatgcaggtaaagaagaaagccgcgaaaaagacctataagtcgttggccaagaaaaagaccgttccggaactgaaaatggttacgatggacgaagtgaaagccattgtagccgaagcatccaagataatggccgaagctcaagccaaaacagaggcatcaattgatagactatccaacgcccacgccaaaacagaggcctcgattgacaggctatccgacgaaaaccggttgttagccgctgaaaatcggaaaacctcagaggcgattcggcaactgcatgacgaagtcagtgaaacctccgccaaagtcagtgaaacctcggaggccgtccggcaactgaacgacacgctcggcgggatgggcggacacctcggcgaagtgatagagtttatcgtcatacccaagatacgccccgcgataaacgctttgggggatcactcgtttaaagaaatcacggcaaggaaaatcatcgagaccgttatcaacgatagaaagagaaaactaaccgaggtagacgtgctgctgtacggcgacaccgaggctatggccgttgagataaagacctgtctacagacaagcgatgtcgataaacatttggatcgtatgcaaaaactgcgcgattacgaagcggacgccgaggtcaaaggcaagacgcttttcggcgcggtggtaggcgcaatcgtacacgagcctatcagagcctacgccctgaaaaagggcctatacgtcatagaaatccgcgaggaagaggataaactcgacatagacaaacccgacacctgccggacgtggtaa

SEQ ID NO: 21272 - protein, 273 aa, Unknown
  Obtained from environmental sample
  misc_feature (1)..(273): Xaa is any amino acid
MDQIGRGDRMQVKKKAAKKTYKSLAKKKTVPELKMVTMDEVKAIVAEASKIMAEAQAKTEASIDRLSNAHAKTEASIDRLSDENRLLAAENRKTSEAIRQLHDEVSETSAKVSETSEAVRQLNDTLGGMGGHLGEVIEFIVIPKIRPAINALGDHSFKEITARKIIETVINDRKRKLTEVDVLLYGDTEAMAVEIKTCLQTSDVDKHLDRMQKLRDYEADAEVKGKTLFGAVVGAIVHEPIRAYALKKGLYVIEIREEEDKLDIDKPDTCRTW

SEQ ID NO: 21273 - DNA, 438 bp, Unknown
  Obtained from environmental sample
  misc_feature (1)..(438): n is a, c, g, or t
atggaatatattcttgatctcgataaatcttttttcagcctttccgcccttgacggcaaagatttaatattcgccgatccaatgaacgccacaggcggaagccttgttacagtattaaaatatcttttaaaaataggagtaaaaccgcgatcaattattttttttaacgttatagcggcgttaaagggcgcgcttagagttgtgagggcgcttgataactgcgacgtctatactttatggatggacggagtgttaaacaataaagcgtatattatgccgggtctcggcgacgccggagacaggataaacggacgggacgcggaggcgaatccaagaaatattatccagcttctctccgattacggagcgggcatggcaaacctttaccgctcgcaactgcgcgagattgaaaatacggttttaaacaggtcaaaatga

SEQ ID NO: 21274 - protein, 145 aa, Unknown
  Obtained from environmental sample
  misc_feature (1)..(145): Xaa is any amino acid
MEYILDLDKSFFSLSALDGKDLIFADPMNATGGSLVTVLKYLLKIGVKPRSIIFFNVIAALKGALRVVRALDNCDVYTLWMDGVLNNKAYIMPGLGDAGDRINGRDAEANPRNIIQLLSDYGAGMANLYRSQLREIENTVLNRSK

SEQ ID NO: 21275 - DNA, 690 bp, Unknown
  Obtained from environmental sample
  misc_feature (1)..(690): n is a, c, g, or t
atgggcgaactgcatctggatgttttggttacccgtatactcaaggagtacaacctcggcgcaaaggtaggaaagccccaggtcacctaccgcgagtcgataagcgctgccaccgaacggaacgagaacttctcccgcgtgatcgccggcaaggaaaacgccgcgggcttaaccctgctcgttgaaccggcgaaacgcggaacggggaacaggtattcctgcgcggtcaaaagcggcgaaatacccgaagaaattttcagcgcggtggaacgcggcattaccggcgcgttttcttcaggaatcgttatgggctacccctgcattgatattacggcgaccgtcactaacattagctattcggaattgaacggcacggaattcgcctttgaagcctgcgccagcatggcctttgacgaagcctgccgcgccgcgtctcccacactgctggaaccgatcatggctgttgaccttatcagcccccatgaatttgtcggcgaagtgatgggccttgtcacccagcgcggcggccagattttcagcatggacgcaagggccgacattgacgaaataaaagcccaggcgcccatggcgcagatgttcggctttatgacctctcttcgcagcgtaagccagggacgggcaagtttcagtatggaattctcgcattttgagaagaaaagcggaaaataa

SEQ ID NO: 21276 - protein, 229 aa, Unknown
  Obtained from environmental sample
  DOMAIN (26)...(145): Elongation factor G, domain IV
  misc_feature (1)..(229): Xaa is any amino acid
MGELHLDVLVTRILKEYNLGAKVGKPQVTYRESISAATERNENFSRVIAGKENAAGLTLLVEPAKRGTGNRYSCAVKSGEIPEEIFSAVERGITGAFSSGIVMGYPCIDITATVTNISYSELNGTEFAFEACASMAFDEACRAASPTLLEPIMAVDLISPHEFVGEVMGLVTQRGGQIFSMDARADIDEIKAQAPMAQMFGFMTSLRSVSQGRASFSMEFSHFEKKSGK

SEQ ID NO: 21277 - DNA, 453 bp, Unknown
  Obtained from environmental sample
  misc_feature (1)..(453): n is a, c, g, or t
atgtttcttgaattcttagatttcttatttaattatttttccccgttccgcgtattctcgtatctgacgttcagaggcgcatttgccgcccttaccacccttttaatttgctttatcttcggcggaaaaataattgaacttctgcgaaggttaaaaataggccagtccatccgcgaagacggccctcagacccatcttgccaaatcgggaacgccgactatggggggaacgtttattattctttccgtcgtagtagccatgttgttctggggcaatttgcacaataaagccatctggataacaatgggggcgttcctggcgtttggagccgtgggctttgccgacgattatttaaaagttaggcgacataattcacaggggcttaaggcatgggtaaacttgcggggcaattttaatcgcaattgccatcgtattataactcggccgatctga

SEQ ID NO: 21278 - protein, 150 aa, Unknown
  Obtained from environmental sample
  misc_feature (1)..(150): Xaa is any amino acid
MFLEFLDFLFNYFSPFRVFSYLTFRGAFAALTTLLICFIFGGKIIELLRRLKIGQSIREDGPQTHLAKSGTPTMGGTFIILSVVVAMLFWGNLHNKAIWITMGAFLAFGAVGFADDYLKVRRHNSQGLKAWVNLRGNFNRNCHRIITRPI

SEQ ID NO: 21279 - DNA, 849 bp, Unknown
  Obtained from environmental sample
  misc_feature (1)..(849): n is a, c, g, or t
gtgcagatgaggaggagcgcaaccgccgatctgctgccatgccttgatataatcaccaaagatcatgtcgacccgcggtactgctccatggtcagcgatgacattgacatgctccacatttttgagaaagggcatcttgaccataaagtacgtatggcggtagccaacggagtagaccccgtagtcgccatacagatgataacgattaaccccgccgaaagcctcaaggtggacggaatccgcggcagcataagtccgggcaagactgcggatatagtaatgctttccagcctggagcagtgtacggtcgagagcgttatagccaagggcaagatagtggtggatcagagaaagacggtttttagcaagccttcttttagatacgcggcctgtatgctgaacactgtccatctttcaaaaccgcttgccgcggctgatatggtgattcccgcttccggggcttcaaaggcgaaggttcatctgatcggtgccaaaggcaccaccttgttaactgaccggctggaagccgaactgccggtgctgaacggcgtcatagcggcggatacaaaacgcgatatactgcatatcgcctgcgtggagcgttatgggaaaaacggcggcatcggacgctctttcatcacgggcttcggcctgaaaagcggggccatcgccacctcggtggggcatgaccaccacaatatcacggtagtgggttccgacgccaatgacatggccttagcggtcaaccgcatagcggcattgaatggaggcctggtgctggcggaaggcggaaaagttatatacgaactgcccctgcctgtctgcgggcttttatgccatatggattaa

SEQ ID NO: 21280 - protein, 282 aa, Unknown
  Obtained from environmental sample
  misc_feature (1)..(282): Xaa is any amino acid
MQMRRSATADLLPCLDIITKDHVDPRYCSMVSDDIDMLHIFEKGHLDHKVRMAVANGVDPVVAIQMITINPAESLKVDGIRGSISPGKTADIVMLSSLEQCTVESVIAKGKIVVDQRKTVFSKPSFRYAACMLNTVHLSKPLAAADMVIPASGASKAKVHLIGAKGTTLLTDRLEAELPVLNGVIAADTKRDILHIACVERYGKNGGIGRSFITGFGLKSGAIATSVGHDHHNITVVGSDANDMALAVNRIAALNGGLVLAEGGKVIYELPLPVCGLLCHMD

SEQ ID NO: 21281 - DNA, 954 bp, Unknown
  Obtained from environmental sample
  misc_feature (1)..(954): n is a, c, g, or t
ttgggtgatgaggcggggacgtactcttttgcgccggggagcggcgtcggcggtttccagtggcgcgtgaagcggttctacgtaaccacgccgccaaaatacagcccgcccaattgggagcgcggacgggggagcgtctcgcttaacaaggggttgcacgaaatagagataatgccgaccggtgtgaagggggcggcggagttttcgttcggatccggcgggagtaaggcggaacctaacgcagggcttagccctcgcgccacgcttggaccgtttgacctcaaaaagaaccgcaattaccgtttttatttcaacaccgtaccgtcggagctggcttccataattgtggataaatacccgccgcccgtaaaggagagcgtcgcggacgtgtacctgaccggcgccgccgccgacaaggcggatttggcttccgcgaagacgacggagcttgccatgggcgccactcgctacgtgactctcgggaagcgcgggtcggcggagtacgggttcaggataaaggaggcgggcatctacagggtggagacgacaggccgcctgaatacgaagataactctgcgcgaccggttcggcgggctgagcaagtcgcaatccagcaacggcgtgggccgcaacgccttggcggtggagttctttctgcccggagactatctggcgatagccgaaacggtgggcgagtcggcggggaggatgggtatctcgttgagcaagggggagttgcgtaaaggcggcgcgcttcaggacggcgttgacaagcgtgcggcggtgagggcgaacagcgccgtcgtctatgattttaaggcgaacaggcgggcgcgttatcgtttcgagtcgttcggagcggcgggcggtcaggagatgaggcttgaggatccggacgggtggccgcttataccccacggntcgggaagcgccgcaggagctggtattggataa

SEQ ID NO: 21282 - protein, 317 aa, Unknown
  Obtained from environmental sample
  misc_feature (1)..(317): Xaa is any amino acid
MGDEAGTYSFAPGSGVGGFQWRVKRFYVTTPPKYSPPNWERGRGSVSLNKGLHEIEIMPTGVKGAAEFSFGSGGSKAEPNAGLSPRATLGPFDLKKNRNYRFYFNTVPSELASIIVDKYPPPVKESVADVYLTGAAADKADLASAKTTELAMGATRYVTLGKRGSAEYGFRIKEAGIYRVETTGRLNTKITLRDRFGGLSKSQSSNGVGRNALAVEFFLPGDYLAIAETVGESAGRMGISLSKGELRKGGALQDGVDKRAAVRANSAVVYDFKANRRARYRFESFGAAGGQEMRLEDPDGWPLIPHGSGSAAGAGIG

SEQ ID NO: 21283 - DNA, 852 bp, Unknown
  Obtained from environmental sample
  misc_feature (1)..(852): n is a, c, g, or t
ttgtcatctatgctccaagcggtggaattgatccgcagtagggacttaggcggttctgaatttggcagaacaatggccggtatcaatacgatactgataaaattgatttatcccgattcgcttgcgaagctccccgtcgtcgatcttccgcagacatcaaattatgcccgtattatcagggaggccgagaaaggcgtttatgtccagccagctcaaacctcgaccgatttttttgagcatattctgccttttttggctgtgaatgatcaaacggaaccgggagtttttacgagtattctaaatgatcttgagaaggcgcaaacgctaaaacccaattccgttctgccgcttctgtttcaagggtttatttacgagcgtacgcgacggtttaatcaagctgaacaatctttcaggcaggtctatcaaatttccaatgaatgttaccccgcaaggattggcattgcacgtataagaagaatttccggctctccgcaggaagcgatagatattttatctgaccttattatccgttatccggacagcattcaaattaaaagggaacgcgctatcagttattacagaaacaatgagctgtcgcgggcgctgtccgccgtggacgagattctgcagtcggagccaagggacggagaaatccttttgattaaagcctcgattcttcttgagcagggacagtattcgcagtcaaacacttcattggacagttacgcatccattaacccaaacaacaggacatatctctttttacgcgcccgtgtacaggccgaaggaaaccgcaaccgcgattcggcgttaaactatctccgctcgatttacgtcttccctcggcgataa

SEQ ID NO: 21284 - protein, 283 aa, Unknown
  Obtained from environmental sample
  misc_feature (1)..(283): Xaa is any amino acid
MSSMLQAVELIRSRDLGGSEFGRTMAGINTILIKLIYPDSLAKLPVVDLPQTSNYARIIREAEKGVYVQPAQTSTDFFEHILPFLAVNDQTEPGVFTSILNDLEKAQTLKPNSVLPLLFQGFIYERTRRFNQAEQSFRQVYQISNECYPARIGIARIRRISGSPQEAIDILSDLIIRYPDSIQIKRERAISYYRNNELSRALSAVDEILQSEPRDGEILLIKASILLEQGQYSQSNTSLDSYASINPNNRTYLFLRARVQAEGNRNRDSALNYLRSIYVFPRR

SEQ ID NO: 21285 - DNA, 744 bp, Unknown
  Obtained from environmental sample
  misc_feature (1)..(744): n is a, c, g, or t
atggatgaacggcgcgattttgagaaatcaacaatagccgccctgcaaaaacttgaagaaaattacctgacgcttggcagttgggaactcgcgcttgcggcatataacaccggtcttaatggaattaacaaaattgtaaaaagaacgggcagaaatgattactgggaacttgttaataaaggcgatttaaaaaaggaaacgttgcactatgtgcccaaattaatcgccgcaaactatattatttcacagccaagaaaatacggcattaacgtctggcatgaaaaagtcgattggacggccatcccgcttaaacgccagatttccattgatattctcgcgaatgaaacaggcgtttccaaagaactgttacgcggccttaacgcggaattgcttcatggaataagccccacggacggcgactaccgcttaaaaattcccaccgcctatcttgaaaaaattacggacgcgcttgaaagtgacgatttacaactgatccgttaccaataccatgtagtccgccaaggtgacacaatatggtcaatgtcaagatattacggcacttccgtccacattatcgaacaacataacccgggtattaccacccgtttattaaaaattggggaaacaatcattattccgtcatttggaaacacgcccaaaccccaaaacatgccccctgttcaaaatacgcccataacaataccttcaaactttaaaggaacctatgtggtgcaaaaagngtga

SEQ ID NO: 21286 - protein, 247 aa, Unknown
  Obtained from environmental sample
  DOMAIN (170)...(213): LysM domain
  misc_feature (1)..(247): Xaa is any amino acid
MDERRDFEKSTIAALQKLEENYLTLGSWELALAAYNTGLNGINKIVKRTGRNDYWELVNKGDLKKETLHYVPKLIAANYIISQPRKYGINVWHEKVDWTAIPLKRQISIDILANETGVSKELLRGLNAELLHGISPTDGDYRLKIPTAYLEKITDALESDDLQLIRYQYHVVRQGDTIWSMSRYYGTSVHIIEQHNPGITTRLLKIGETIIIPSFGNTPKPQNMPPVQNTPITIPSNFKGTYVVQKX

SEQ ID NO: 21287 - DNA, 486 bp, Unknown
  Obtained from environmental sample
  misc_feature (1)..(486): n is a, c, g, or t
ttgcccgtaacaagcaaaacctttttgcgcgacggcagaaccggggaaccgtttataaatccgattttctgcggagtaatttacttcttaaaattgcaccatcttgtagacgataaaatgcacgcgcgctcgaccggtccttactcgcttgttacccagcagccgctgggcggcaaggcgcagttcggcggacagcgtcttggcgaaatggaagtttgggcgctggaagcgtacggcgcggcaaatacattgcaggaacttttgacaatcaagtcggacgatatgacagggcgcggaaaaatttacgaggcaatcgtaaaaggcgagccttccacgaccgcgggcattcccgaatcgttcaacgtgcttgttcaggaattgcgcggcctagcgctggatctttcgatctttgacaatagaggaaaacaaataccgctcaccgaaaaagatgaggaattaataaccaagtccggaagtaatttttaa

SEQ ID NO: 21288 - protein, 161 aa, Unknown
  Obtained from environmental sample
  DOMAIN (63)...(139): RNA polymerase Rpb2, domain 7
  misc_feature (1)..(161): Xaa is any amino acid
MPVTSKTFLRDGRTGEPFINPIFCGVIYFLKLHHLVDDKMHARSTGPYSLVTQQPLGGKAQFGGQRLGEMEVWALEAYGAANTLQELLTIKSDDMTGRGKIYEAIVKGEPSTTAGIPESFNVLVQELRGLALDLSIFDNRGKQIPLTEKDEELITKSGSNF

SEQ ID NO: 21289 - DNA, 360 bp, Unknown
  Obtained from environmental sample
  misc_feature (1)..(360): n is a, c, g, or t
atgcgggatattcaagattttgattcgataatgatacggttggcctcgccggaaatgatccggtcgtggtcttatggcgaagtaaaaaagccggagacaattaattaccggactttgcgtccggaaaaagaagggcttttctgcgaaaggatattcggcactaccaaagagtgggaatgttactgcggaaagtttaaatcgatacggtacaagggagtaatctgcgaccgctgcggcgttgaagttacccactttaaagttcgccgcgaaagaatgggccatattgaattggctgctcctgtttcgcacatctggtactaccgctcggtcccagccgcatgggactccttctggacttga

SEQ ID NO: 21290 - protein, 119 aa, Unknown
  Obtained from environmental sample
  DOMAIN (4)...(119): RNA polymerase Rpb1, domain 1
  misc_feature (1)..(119): Xaa is any amino acid
MRDIQDFDSIMIRLASPEMIRSWSYGEVKKPETINYRTLRPEKEGLFCERIFGTTKEWECYCGKFKSIRYKGVICDRCGVEVTHFKVRRERMGHIELAAPVSHIWYYRSVPAAWDSFWT

SEQ ID NO: 21291 - DNA, 825 bp, Unknown
  Obtained from environmental sample
  misc_feature (1)..(825): n is a, c, g, or t
atgatggccgactatattaaaggcttcgtctacgtcgcgatgggcataaccgccctttcgctcttcggcatactcggctacattctcgtcaacggcgttatggcgttcaaatggtcgctcatattcggcgagtactcgtcgagcaatccggccatcgggttttcggtgtttaccacctgcgtgatgatcgttttgacgcttctcatcgccgcgccgctctcgatcttttgcgctgtctatcttaccgagtacgcgaagcgcaataacaggctcgtcacttggattcggcttgccaccgagacgctcgccgggataccctccattgttttcgggcttttcggggcgatattctttgggacggtgatgcgtttggggtactctatacttaccggttgcttgacggttgcgataatgcttttgccggttattatccgtcagaccgaggaggctataaagtctgtgccggacatgtatcgtgagggtagttatgggcttggggcgtctaagttgcggacggtttttcgtatagttttgccgtcggcgatgccggggattctttcggcggtgattttgagcatgggaaggattatcggcgagacggcggcgctgatattcacgctgggttccgtcgcgcagtttccgagcagtttgcttgacagcagccgctcgcttgcggtgcacatgtacatatcgacacgtgacggcgggtcggcggggcgcgaggtggcgttcttcaccggcgcggtgctgatcgcggtcatattgcttatgaacataggcgcatcctatttgggtggaaaggtaggtaaggattttgaaaattaa

SEQ ID NO: 21292 - protein, 274 aa, Unknown
  Obtained from environmental sample
  DOMAIN (56)...(270): Binding-protein-dependent transport system inner membrane component
  misc_feature (1)..(274): Xaa is any amino acid
MMADYIKGFVYVAMGITALSLFGILGYILVNGVMAFKWSLIFGEYSSSNPAIGFSVFTTCVMIVLTLLIAAPLSIFCAVYLTEYAKRNNRLVTWIRLATETLAGIPSIVFGLFGAIFFGTVMRLGYSILTGCLTVAIMLLPVIIRQTEEAIKSVPDMYREGSYGLGASKLRTVFRIVLPSAMPGILSAVILSMGRIIGETAALIFTLGSVAQFPSSLLDSSRSLAVHMYISTRDGGSAGREVAFFTGAVLIAVILLMNIGASYLGGKVGKDFEN

SEQ ID NO: 21293 - DNA, 429 bp, Unknown
  Obtained from environmental sample
  misc_feature (1)..(429): n is a, c, g, or t
ttgatcgcgagaaaagataagggttccattgacaagataaaacattccacggaaaacgtgctcaacaagtttgaagccattgactcaagcgtcaggacagtcgcgcagcaggaagaaaacatacgaaacgcgatggaagaacagggaacggggagcaagcagatacttgaaggcatcggcagattgaacgaaataaccaggcaggtaaaggacggctccaatgaaatgcacgagggcgcgaaggaagttatccgtgaaagcgaaaaccttgaaaaagccacgcaggaaatttcatcaggcatgaacgaaatggcggccggagcggataatatcaactcggcggtaaaccatgtcaacgagataagcggcagaaaccgggaagccattgatgtcgtaataaaggaagtttcgcaatttaaggcagagtaa

SEQ ID NO: 21294 - protein, 142 aa, Unknown
  Obtained from environmental sample
  misc_feature (1)..(142): Xaa is any amino acid
MIARKDKGSIDKIKHSTENVLNKFEAIDSSVRTVAQQEENIRNAMEEQGTGSKQILEGIGRLNEITRQVKDGSNEMHEGAKEVIRESENLEKATQEISSGMNEMAAGADNINSAVNHVNEISGRNREAIDVVIKEVSQFKAE

SEQ ID NO: 21295 - DNA, 957 bp, Unknown
  Obtained from environmental sample
  misc_feature (1)..(957): n is a, c, g, or t
atggcttcaggcgaagccgtcccatttgcaaaaaccggcggactcgccgacatggtttccgccctttcgctttcgctgcaaaagcagggaaacgaagtccgcattgttatcccaaggtactacagcataaataaagacgaactgaaactgaaagccctggaaggcncaatgggggttcccattggcggctgggaagaatggtgcggagtctacgaaggaacgctccctggaagcggcaagaaaaatcccgtccctgtttattttatcgaccacgaaaatttttttggcagggacggcatttacggtacacaatcggaacctgattttctggataaccccaggcgctttacttttttctgccgctccgtttttcagctatgcagaaaaatcggctggtatccggatgttcttcattcacatgactggccctgcgcgctggttccggtgtttttaaaattcggggaaaggaacggggctttttcaaaaaccgtttctgcccttaccattcataaccttggctatcagggaatttacggcaaggacaatttttacgccaccggacttggctgggataccttctacaacgcgggctttgaggattggaacatgatgaacctccttaaagccggcatctgctcggcggacaccattaatactgtttccaaaaactacgcggaagaaacaaaaactcaaggctacggattcagactggacagcatactccgaggccgcggctccgattaccggggcatactaaacggcattgacaataaaatctggaatccggaaaaggacccgtatattccggttccgtacagcgcaaaaaatatggagggcaaggcaaaggcaaaggagctcttgcagcaggagtacggcctgcccccttcgccggatacaccggtgattggcctcatatcgcggcttactttcaaaagggcgggagctcggccgatctga

SEQ ID NO: 21296 - protein, 318 aa, Unknown
  Obtained from environmental sample
  DOMAIN (1)...(243): Starch synthase catalytic domain
  misc_feature (1)..(318): Xaa is any amino acid
MASGEAVPFAKTGGLADMVSALSLSLQKQGNEVRIVIPRYYSINKDELKLKALEGXMGVPIGGWEEWCGVYEGTLPGSGKKNPVPVYFIDHENFFGRDGIYGTQSEPDFLDNPRRFTFFCRSVFQLCRKIGWYPDVLHSHDWPCALVPVFLKFGERNGAFSKTVSALTIHNLGYQGIYGKDNFYATGLGWDTFYNAGFEDWNMMNLLKAGICSADTINTVSKNYAEETKTQGYGFRLDSILRGRGSDYRGILNGIDNKIWNPEKDPYIPVPYSAKNMEGKAKAKELLQQEYGLPPSPDTPVIGLISRLTFKRAGARPI

SEQ ID NO: 21297 - DNA, 639 bp, Unknown
  Obtained from environmental sample
  misc_feature (1)..(639): n is a, c, g, or t
atgaataaccttatcgctcatctttttctcctatccaaccagcgccaggtgcataatcttttcctgagtcgcttcttcttttgccaatacgccttttattttcccttcgttcattacataaatacgatccgccatacccagcgcttcaggaagttccgaactaaccatgatgacgcttttgccggcggctataatgttgttcagaatcccgtatatttctgtcttggcaccgacatcaattcccctggtcggctcgtcaacaataaaaatatcaggatttgccaacaaagtcttgcttaccacaaccttctgctggtttccgcccgaaagattccgtacaatctgccttatcgagggcatcctgatattgagttctttccggtagcgctccgcctcttttatttctttctggctatccataaccccaaaccgcgaaagcttatccaggcttgcatgggcaatatttgtttttacatcctgaatcaaaaccaggcccaagcctttgcggtcttcggaaatataacccaggccggaaccgattgctgcgcgggggcttttgaacgtgtatgtttttccgtttattcgcaattcaccctcgcagcggtagccgtaggacctgccgaaaatactcatcattag

SEQ ID NO: 21298 - protein, 212 aa, Unknown
  Obtained from environmental sample
  misc_feature (1)..(212): Xaa is any amino acid
MNNLIAHLFLLSNQRQVHNLFLSRFFFCQYAFYFPFVHYINTIRHTQRFRKFRTNHDDAFAGGYNVVQNPVYFCLGTDINSPGRLVNNKNIRICQQSLAYHNLLLVSARKIPYNLPYRGHPDIEFFPVALRLFYFFLAIHNPKPRKLIQACMGNICFYILNQNQAQAFAVFGNITQAGTDCCAGAFERVCFSVYSQFTLAAVAVGPAENTHH

SEQ ID NO: 21299 - DNA, 741 bp, Unknown
  Obtained from environmental sample
  misc_feature (1)..(741): n is a, c, g, or t
atggaagtcaagactgggacggtttatcaccctgattatcatgatatcaaaatagtagataacgtttcattctacctgcgcaaaggtgagattttggccttctgcggccctatgggagccggacgtacggagctaatgatgagtattttcggcaggtcctacggctaccgctgcgagggtgaattgcgaataaacggaaaaacatacacgttcaaaagcccccgcgcagcaatcggttccggcctgggttatatttccgaagaccgcaaaggcttgggcctggttttgattcaggatgtaaaaacaaatattgcccatgcaagcctggataagctttcgcggtttggggttatggatagccagaaagaaataaaagaggcggagcgctaccggaaagaactcaatatcaggatgccctcgataaggcagattgtacggaatctttcgggcggaaaccagcagaaggttgtggtaagcaagactttgttggcaaatcctgatatttttattgttgacgagccgaccaggggaattgatgtcggtgccaagacagaaatatacgggattctgaacaacattatagccgccggcaaaagcgtcatcatggttagttcggaacttcctgaagcgctgggtatggcggatcgtatttatgtaatgaacgaagggaaaataaaaggcgtattggcaaaagaagaagcgactcaggaaaagattatgcacctggcgctggttggatag

SEQ ID NO: 21300 - protein, 246 aa, Unknown
  Obtained from environmental sample
  DOMAIN (29)...(223): ABC transporter
  misc_feature (1)..(246): Xaa is any amino acid
MEVKTGTVYHPDYHDIKIVDNVSFYLRKGEILAFCGPMGAGRTELMMSIFGRSYGYRCEGELRINGKTYTFKSPRAAIGSGLGYISEDRKGLGLVLIQDVKTNIAHASLDKLSRFGVMDSQKEIKEAERYRKELNIRMPSIRQIVRNLSGGNQQKVVVSKTLLANPDIFIVDEPTRGIDVGAKTEIYGILNNIIAAGKSVIMVSSELPEALGMADRIYVMNEGKIKGVLAKEEATQEKIMHLALVG

SEQ ID NO: 21301 - DNA, 303 bp, Unknown
  Obtained from environmental sample
  misc_feature (1)..(303): n is a, c, g, or t
atggaattattggatttcataatcagaatcgcggcatcggcattatttggcttttttatagggtttgaaaggcaactgacaggccatcccgcgggaatccgtactaacgtgcttgtaagtttaggttcgtgtgtatttgtcatattttcctttattattgacacgcccgatcagacaagaatagcggggcaaatcgtaaccggcttaggattcttgtgcagcggtataatttttaaggacggcgtgnaatgtccgcggctaaatacggcggctacaatatgggtacggctcgtgccaatctga

SEQ ID NO: 21302 - protein, 100 aa, Unknown
  Obtained from environmental sample
  DOMAIN (10)...(99): MgtC family
  misc_feature (1)..(100): Xaa is any amino acid
MELLDFIIRIAASALFGFFIGFERQLTGHPAGIRTNVLVSLGSCVFVIFSFIIDTPDQTRIAGQIVTGLGFLCSGIIFKDGVXCPRLNTAATIWVRLVPI

SEQ ID NO: 21303 - DNA, 546 bp, Unknown
  Obtained from environmental sample
  misc_feature (1)..(546): n is a, c, g, or t
ttgaataaatatantaatcagggattgcgtttagtcgaaattccaaaagaaaaatcagaagaattgcctcaattaataaattgcataaaaaacaaacgccttaaatatatagtttttatggatgatttatcgtttgaaacgggcgatacgggttataaaaatttaaaggttattttagacggaagaattgaaaaacagcctgaaaatattttgttttacgcgacttcaaacaggttccatattatcaatgaaacatggaaagatcgggaaggcgatgaaattcatttaagggataccatgagcgagaaattgtcgttatctgaacgattcggaattcgcgtaaattttgttacggcaagtacaagcgatgattattttaagataattgaaggaattttatcgttggaaaatattcaatttacggaagagataaaacaggaagcgtcacactgggaaattttatataacgggcgttcaggcagaaccgccgcgcagttcgcaaaaaccataattgccttgaaaaacaaggaaaagccggggaattaa

SEQ ID NO: 21304 - protein, 181 aa, Unknown
  Obtained from environmental sample
  DOMAIN (74)...(167): Protein of unknown function (DUF815)
  misc_feature (1)..(181): Xaa is any amino acid
MNKYXNQGLRLVEIPKEKSEELPQLINCIKNKRLKYIVFMDDLSFETGDTGYKNLKVILDGRIEKQPENILFYATSNRFHIINETWKDREGDEIHLRDTMSEKLSLSERFGIRVNFVTASTSDDYFKIIEGILSLENIQFTEEIKQEASHWEILYNGRSGRTAAQFAKTIIALKNKEKPGN

SEQ ID NO: 21305 - DNA, 651 bp, Unknown
  Obtained from environmental sample
  misc_feature (1)..(651): n is a, c, g, or t
atgaaacacagaggcgtcatttttgatttggacgggacattgattgacacgcttggcgatattgccgcggccatgaacagggcgctggaaaagaacggctttccggccctggaaaccgcagcctatagggacaaggtgggatggggcatacgcaggctcgcccagttatgcgttaaggaaggccgcggaaacaatgacgaagccggcctggaagaagccgcggctctggccgccgcgcgggccgccgaggacgcgatccggttttacgccgaaacgccccttgtacatacaaagccctaccccggaataacggagctgctgtctgagctttcccgacggaaaataaagaccgcggtcctgaccaacaagccggaaaccgttacgcagattgtggtgaacggcctgtttccgcccggcgtttttaaggtaatcagaggggaaatattcggcaggccgcgcaagcccgatccggcctctgtctgggaaatgctggtcgaacttgacctctgccccgcggacattatctttgccggggattcggaggttgacatggagaccgcggtgtcatccggctgtttccccctgggcgtaagctggggctaccgctcgcgccaggcaatcgaaaaaggcgggggcgcgccggatcattga

SEQ ID NO: 21306 - protein, 216 aa, Unknown
  Obtained from environmental sample
  DOMAIN (3)...(200): haloacid dehalogenase-like hydrolase
  misc_feature (1)..(216): Xaa is any amino acid
MKHRGVIFDLDGTLIDTLGDIAAAMNRALEKNGFPALETAAYRDKVGWGIRRLAQLCVKEGRGNNDEAGLEEAAALAAARAAEDAIRFYAETPLVHTKPYPGITELLSELSRRKIKTAVLTNKPETVTQIVVNGLFPPGVFKVIRGEIFGRPRKPDPASVWEMLVELDLCPADIIFAGDSEVDMETAVSSGCFPLGVSWGYRSRQAIEKGGGAPDH

SEQ ID NO: 21307 - DNA, 888 bp, Unknown
  Obtained from environmental sample
  misc_feature (1)..(888): n is a, c, g, or t
ttgatggccgagatagaaatgcaggcaaaacgaattatcccctgccttgatgttgatgacggcagggtagtaaaggggattaaattcaagggcatccaggacgcaggagaccccagagaactggcgcaccgctacaacgaagacggcgcggacgagctgacttttctggacattggcgcttcctacaaaagcagagcgacattgctggacgtggtgcgtaaagtggccgccgaggtttttatccccctgtgcgtgggcggcggcatacgcgtcattgacgacatgcgcgacgcgatgaacgcgggagcggacaaagtttcggtttgtacttccgccctgagccgcccggaactgttacgcgaaatggcaaacgcctacggcagtcagtgtgtcgtgctttcgatagacgcaaaacgcgtcgcgggcgaaggggacttgcgctggcacgcctattcccacggcggcagaaccgacaccggcattgacgctatcgaatgggcaattcgcgcggtagaactgggcgcaggcgaaatcctgcttaactccattgatgcggacggaacctgcggcggctacgatctggaactgacccgccgaatcctgaacgccgtgccggttccggtaatcgcgtccggcggcgcgggaacactcgatcagatagcggaagttttactcagcaccgcatcggcggaagcgccgcagaatattacgcctgacgaagcgcctggcgcggacgcggcgctggtagcgtctcttttgcattttggaaagactagtattcaagaaattaagaaaacgcgcaaacaaagggtgtgtgtgtcagataacccgagtaattcacaccaagaacacggaggaaagagagggacaccnaagagggaaagataa

SEQ ID NO: 21308 - protein, 295 aa, Unknown
  Obtained from environmental sample
  DOMAIN (11)...(259): Histidine biosynthesis protein
  misc_feature (1)..(295): Xaa is any amino acid
MMAEIEMQAKRIIPCLDVDDGRVVKGIKFKGIQDAGDPRELAHRYNEDGADELTFLDIGASYKSRATLLDVVRKVAAEVFIPLCVGGGIRVIDDMRDAMNAGADKVSVCTSALSRPELLREMANAYGSQCVVLSIDAKRVAGEGDLRWHAYSHGGRTDTGIDAIEWAIRAVELGAGEILLNSIDADGTCGGYDLELTRRILNAVPVPVIASGGAGTLDQIAEVLLSTASAEAPQNITPDEAPGADAALVASLLHFGKTSIQEIKKTRKQRVCVSDNPSNSHQEHGGKRGTPKRER

SEQ ID NO: 21309 - DNA, 876 bp, Unknown
  Obtained from environmental sample
  misc_feature (1)..(876): n is a, c, g, or t
ttgatacttcatacgaaaggaaattttgacaaattgtctttgaaatatcccgttgtattggttcatgggattgccatgcgtgatcgtgatgttgccaccgccccatggggcagaattccgcgtatattgagggagaacggggttgaaatatattttggaaatacggacgcatggggtactattgaatcaaacgcggaaatgttaaaaacaaccgttgataaaatattgaaagaaacaggaaaagaaaaggttaatataatagcccattccaaaggcggtctggattcccgttatatgatatggaaatataactatggggcaaaagtagcaagcctgactacaatatcaacgccgcatcatggcgcggttcttgcggatatgattctaaatttaaaggctcttcataccaaagccgcacaaaaaagtctggaggatttggaaaaattgtataacgatatatatcctgatatctatactgcaggctatgatttaacaacggcaaatgtgaaggaatttaacaaaatggtaacaatggatgacagagtatactatcaaagtatttattcagtaatgaacaatgccatggaagatctgctttttaccgccagccataattatattaaaaaagaaataggagaaaacgacggtctggtaagcgaatattccgcaagatggggaaataatattaccaaagtagaaggcggaatatcccatagacaaattattgattatatggggaaagacttgcttgatatgaaaattcccaatatctatntgagaatagtaaatgatttaggacagaaagggttttatgaaatgagcatggtgtttattctcaaaaatcgcagtgtaaaaataaatatccttattaaataa

SEQ ID NO: 21310 - protein, 291 aa, Unknown
  Obtained from environmental sample
  DOMAIN (11)...(198): PGAP1-like protein
  misc_feature (1)..(291): Xaa is any amino acid
MILHTKGNFDKLSLKYPVVLVHGIAMRDRDVATAPWGRIPRILRENGVEIYFGNTDAWGTIESNAEMLKTTVDKILKETGKEKVNIIAHSKGGLDSRYMIWKYNYGAKVASLTTISTPHHGAVLADMILNLKALHTKAAQKSLEDLEKLYNDIYPDIYTAGYDLTTANVKEFNKMVTMDDRVYYQSIYSVMNNAMEDLLFTASHNYIKKEIGENDGLVSEYSARWGNNITKVEGGISHRQIIDYMGKDLLDMKIPNIYXRIVNDLGQKGFYEMSMVFILKNRSVKINILIK

SEQ ID NO: 21311 - DNA, 333 bp, Unknown
  Obtained from environmental sample
  misc_feature (1)..(333): n is a, c, g, or t
atgcagcctgaggtgaaaacgccggctgccgaaaaacaggaaaaacttccgccggaagaaatattgaaaaaagcgcaggatgcctttaaagagggaaatgccgccgcggcaatagcgttacttgatcaatatactgaatattatcccggtggcggcgatgaattatattggctgtacggtcagttttacgaagccaatactccgtcgcgtaacattctgctttcgcttgataactaccgccgccttgtaaatgaatatcctcaaagcaggtattacagcgacgcgcgccgcagaatttcgtatttggaaaggttttatatcaatatacaatag

SEQ ID NO: 21312 - protein, 110 aa, Unknown
  Obtained from environmental sample
  misc_feature (1)..(110): Xaa is any amino acid
MQPEVKTPAAEKQEKLPPEEILKKAQDAFKEGNAAAAIALLDQYTEYYPGGGDELYWLYGQFYEANTPSRNILLSLDNYRRLVNEYPQSRYYSDARRRISYLERFYINIQ

SEQ ID NO: 21313 - DNA, 588 bp, Unknown
  Obtained from environmental sample
  misc_feature (1)..(588): n is a, c, g, or t
atgaactattccaacctgccggtgtttattgccggggcgtttctcctgggcctctcggttttctgttccggctgttacaccctaaagcaggggactaccatgctgggctatcttggccgggctgttccgcttgaagagcttaacgccggggacggcgctgacgaagatgaccgccggtttgttcaaagggtggataatatacgtcgcttcgcgattgaggagctgggcttaaagaaaagcaaaaactatacccgctatgttgagcttgatagggattaccttgcggcagtggtctccgcttccgccaaagattcgtttaagcgctacgaatggtggtttccaattgtgggcaaggttccctacaaaggctttttcaatgtcgaggacgccaggaaagaacggacaaaactggagaaaaaagacctggacgtgtggattcggggcgtggacgctttcagtaccttgggctggttccgggatcccctttactcttacatgaagaattactccgaccgntctttggccgacctcatcatccatgagctgctccacgccacggtgtacctaaagggccagtccccagtttaa

SEQ ID NO: 21314 - protein, 195 aa, Unknown
  Obtained from environmental sample
  SIGNAL (1)...(29)
  misc_feature (1)..(195): Xaa is any amino acid
MNYSNLPVFIAGAFLLGLSVFCSGCYTLKQGTTMLGYLGRAVPLEELNAGDGADEDDRRFVQRVDNIRRFAIEELGLKKSKNYTRYVELDRDYLAAVVSASAKDSFKRYEWWFPIVGKVPYKGFFNVEDARKERTKLEKKDLDVWIRGVDAFSTLGWFRDPLYSYMKNYSDRSLADLIIHELLHATVYLKGQSPV

SEQ ID NO: 21315 - DNA, 756 bp, Unknown
  Obtained from environmental sample
  misc_feature (1)..(756): n is a, c, g, or t
atgtatcagatcggccgagaggcagtacgcaaagctccggttccgtccttacggtgggagccacanccggttccccacgcagaactgcttaacctgatcaaagatgatctggcggagcagggaattaacctgaaagtggtggaatttaccgactatgttcagcccaattctgctttgatttcaggggacctggacgctaactttttccagcatattccctatctggaatccaatgcggaatggtcgtcaaaactgctttccgccttcggggtgcatgtggaacctttcgggttatactcgacaaagcacaaaaccatcaacgacctgcccaacggagctaccattaccatacccaacgatccgtccaacgggggccgggccctgcttctgctacagtcaaaagggcttatcacccttagggccggggttggcctggaggcaactccccacgacattaccggcaacccgaaaaacctccgctttcaggaacttgaggccgcccagcttccccgctccctattggacgtggacgccgccgccatcaacggcaactatgccctcgaagccggctttaacccagtgagagactcccttatcattgagggcgcggattcaccttatgtaaacatagtggttatacagaagggcaaagaaaacgatccccgcatcgttgcccttaaaaacgccctccttagccagaaggtaaaaaatttcatcgcaagccattacgatggcggcgttgtagcggttttttaa

SEQ ID NO: 21316 - protein, 251 aa, Unknown
  Obtained from environmental sample
  DOMAIN (23)...(251): NLPA lipoprotein
  misc_feature (1)..(251): Xaa is any amino acid
MYQIGREAVRKAPVPSLRWEPXPVPHAELLNLIKDDLAEQGINLKVVEFTDYVQPNSALISGDLDANFFQHIPYLESNAEWSSKLLSAFGVHVEPFGLYSTKHKTINDLPNGATITIPNDPSNGGRALLLLQSKGLITLRAGVGLEATPHDITGNPKNLRFQELEAAQLPRSLLDVDAAAINGNYALEAGFNPVRDSLIIEGADSPYVNIVVIQKGKENDPRIVALKNALLSQKVKNFIASHYDGGVVAVF

SEQ ID NO: 21317 - DNA, 762 bp, Unknown
  Obtained from environmental sample
  misc_feature (1)..(762): n is a, c, g, or t
gtgaaactgccgcccctgccagtccgcccgccggtattgtgcgcgggctgtccccaccgcgcttctttctttgcggttaaggaagccgcaaaaggcagaaaggctgtttttaccggggacatcggctgttatacgctgggcaatgccatgccgctcgatatggtagacacctgtttgtgcatgggcgcgggcattaccgtagcgcagggccttaagcgcgttgagcctgacgctgttcatttcgcctttatcggggattcaactttttttcacgcgggaattaccggagtaataaacgccgtgtacaaccagaccgacattatcgtcgttgtgctggacaactcgacaacggcaatgacgggaaaccagccgcatccgggcaccggcgttacaatgatgaaaacccaaacgggaaaaatggatattgaaaaaatcgcaaaggcttttaatgtttccggcgtagtaagggtaaacccctttgatcagaaagcggctaaagacgctgttcgctctttaatggaacaaaaaggagtccgcgtaattttgtttgaagcgccctgcgttgttgtttcaaagcccgcgggaagatcgctggtaaacgccggcaagtgtacaggctgtcagctttgcataaaaaaattgggctgccccgctctcggctttgagaacaacaaagcgcttgtcaattccggcctttgtacgggctgcggcctgtgcgcttctgtatgcggagcaaatgcnattcaagcgggtgaaaaatga

SEQ ID NO: 21318 - protein, 253 aa, Unknown
  Obtained from environmental sample
  DOMAIN (226)...(249): 4Fe-4S binding domain
  misc_feature (1)..(253): Xaa is any amino acid
MKLPPLPVRPPVLCAGCPHRASFFAVKEAAKGRKAVFTGDIGCYTLGNAMPLDMVDTCLCMGAGITVAQGLKRVEPDAVHFAFIGDSTFFHAGITGVINAVYNQTDIIVVVLDNSTTAMTGNQPHPGTGVTMMKTQTGKMDIEKIAKAFNVSGVVRVNPFDQKAAKDAVRSLMEQKGVRVILFEAPCVVVSKPAGRSLVNAGKCTGCQLCIKKLGCPALGFENNKALVNSGLCTGCGLCASVCGANAIQAGEK

SEQ ID NO: 21319 - DNA, 750 bp, Unknown
  Obtained from environmental sample
  misc_feature (1)..(750): n is a, c, g, or t
atgttcaaacgctgttatgaaaccgcgggcatcaccaacaaggatcgtattcacataacgccgggatacgggctttggacggcgggcataggctttcaggcgggcgccgaactgcttggcgccctcgctattccgatggggccgggcaacacggacaaacagattaaaatgatgattgatatgcaatcgacggttatttgcgcgacgtcttcctacgcgctgctgttagctgaggagattgaaaagcgcggcgtcaaaagtaagatttgcttaagaaaaggcgttatcggctccgagcgatggggcgaaaaaatgcgcaaacgtatcgccaacgaactgggagttgagttatacgacatttacggtttaactgaaatttacggtcccggtatcggtattaactgccaaaaacaggacgccatgcatatgtggacggattatttttattacgagattatcgatccaaaaacaggcgaggttttaccggaaggcaaaacaggcgaaattgtcataacaacgctgtgcaaggaaggcgcccccctcatccgctacaggacgcatgacctgacaaaagcgattcacggcaagtgtgaatgcgggcttgagtatccgagaatcggcacgatcatcgggcgaagcgatgatatggtcaaggttcgcggcgccattatttacccaagccgcgttgacgagcttcttgccgccgtcgacggggtaagcagcgaatatcagatcctcgtgccgatctga

SEQ ID NO: 21320 - protein, 249 aa, Unknown
  Obtained from environmental sample
  misc_feature (1)..(249): Xaa is any amino acid
MFKRCYETAGITNKDRIHITPGYGLWTAGIGFQAGAELLGALAIPMGPGNTDKQIKMMIDMQSTVICATSSYALLLAEEIEKRGVKSKICLRKGVIGSERWGEKMRKRIANELGVELYDIYGLTEIYGPGIGINCQKQDAMHMWTDYFYYEIIDPKTGEVLPEGKTGEIVITTLCKEGAPLIRYRTHDLTKAIHGKCECGLEYPRIGTIIGRSDDMVKVRGAIIYPSRVDELLAAVDGVSSEYQILVPI

SEQ ID NO: 21321 - DNA, 555 bp, Unknown
  Obtained from environmental sample
  misc_feature (1)..(555): n is a, c, g, or t
atggatagccgccaacgctttccgccgtggctgaagcggaagctggcctacgaggggcgccacggcgaagtggcggacctgatcgcggattgtaacctgcacaccgtttgcgccgaggcgaagtgtcccaaccgcggcgagtgcttcagcaaaggcagcgcggcgtttctgattttaggcccggtgtgtacgcgtgactgcgcattctgcggtgtggcgtccgggacgcctagccctgttgatattaacgagggcgagcgtcttgccgaggcggccgccgggatggggcttaggcacgtggtggtaacgtcggtaacgagggacgacctgcccgacggcggggcggcggcgtttgcggacacggtggcgcgtatacgcggtaaggttcccgaagcgacggtagaggtgctgatacccgatttccttggatcgatcgattcgctgaaaacggtgttggacagccttcccgacgtgctgaaccacaatatggagaccgtttcgcgcctctacccgcaaatccgtccggaagcggggtatgacaggtcgctgaactga

SEQ ID NO: 21322 - protein, 184 aa, Unknown
  Obtained from environmental sample
  misc_feature (1)..(184): Xaa is any amino acid
MDSRQRFPPWLKRKLAYEGRHGEVADLIADCNLHTVCAEAKCPNRGECFSKGSAAFLILGPVCTRDCAFCGVASGTPSPVDINEGERLAEAAAGMGLRHVVVTSVTRDDLPDGGAAAFADTVARIRGKVPEATVEVLIPDFLGSIDSLKTVLDSLPDVLNHNMETVSRLYPQIRPEAGYDRSLN

SEQ ID NO: 21323 - DNA, 702 bp, Unknown
  Obtained from environmental sample
  misc_feature (1)..(702): n is a, c, g, or t
atgataacacatttaagaattaccatgaaacaaagtgactggaaaagtgtcttgcggcttgaaagaaacaaaaatggcaaggattttgtttgtggcgatattcatgggtgtttctcgtacctcgaagaacggttaacagagataggtttttgtaagaatagcgacaggttgttctgtgttggggatttaattgatcgggggcctgaatcaagaatggctgttgattatatagagatgccctggttttattctgtattaggaaaccatgaagaaatgtttgttatggcaattgccgctactgatgcatatgatagttatctatacaagtatgaccatattgaaaatggtggaggttgggtctataaagaaaaattagcctataaaaaaagattatatcaggcagttgacaaacttccattgattattcaggtgggcgatgtgataatcgtccatgcaaccctgccaatagttcaaagcttaaaagatattgaaattgctcctagaaaatatatcgaaactgttttatgggaacgagaaaatattctaccagtggctattcctggtatttcaaaagtttatgttggacatacagttgtaacgaaacctactgtctatgggataacaacaaatattgacaccggagcgttcttaaaatactcgaacaggggaatgaaaggaaagctcacaattgtagagatttga

SEQ ID NO: 21324 - protein, 233 aa, Unknown
  Obtained from environmental sample
  DOMAIN (26)...(200): Calcineurin-like phosphoesterase
  misc_feature (1)..(233): Xaa is any amino acid
MITHLRITMKQSDWKSVLRLERNKNGKDFVCGDIHGCFSYLEERLTEIGFCKNSDRLFCVGDLIDRGPESRMAVDYIEMPWFYSVLGNHEEMFVMAIAATDAYDSYLYKYDHIENGGGWVYKEKLAYKKRLYQAVDKLPLIIQVGDVIIVHATLPIVQSLKDIEIAPRKYIETVLWERENILPVAIPGISKVYVGHTVVTKPTVYGITTNIDTGAFLKYSNRGMKGKLTIVEI

SEQ ID NO: 21325 - DNA, 357 bp, Unknown
  Obtained from environmental sample
  misc_feature (1)..(357): n is a, c, g, or t
ttgcaaggacaaggagttactttttccggttttttaaacgatgatgaaaaatggaagctccttgcgcaaagcgctcttttggtacagccttccctgtatgaaggcttcggctaccctcctctagaagctatgctctgtggaactcaagcccttatttcagatataggcgtttttaaggaaatttactcagactttcccgttgttttctttcgtgccgcagacagccgcgacttacatgataaattacttgaaattttatccggtaaaaatcaacaatcaatatatcttaacgatacgctaaaaaataaatatacttttgaaaaaactttttcaaatatttttatggaattgaaatga

SEQ ID NO: 21326 - protein, 118 aa, Unknown
  Obtained from environmental sample
  misc_feature (1)..(118): Xaa is any amino acid
MQGQGVTFSGFLNDDEKWKLLAQSALLVQPSLYEGFGYPPLEAMLCGTQALISDIGVFKEIYSDFPVVFFRAADSRDLHDKLLEILSGKNQQSIYLNDTLKNKYTFEKTFSNIFMELK

SEQ ID NO: 21327 - DNA, 717 bp, Unknown
  Obtained from environmental sample
  misc_feature (1)..(717): n is a, c, g, or t
ttggacgctttacggatcagaggcaaggaagacgggaaaagctgcatgaaaagcgtttatatagccctagcggttgattttgaagggaaaaaggaagttttggggctatggatagcggaaagcgaaggggcaaagttttggatgggggtgttggccgaactgaaaaaccgaggcgttcaagacatcctcatcgcctgcatggacgggcttaccggttttcccgaggcggtacgttccgtttaccctaatacccgcgtccaattgtgcattgtccacatggtgcgtaattcgacaaagtttgtttcgtataaagacttgaaaaaagtatgcgccgatttaaaaacaatatattcagctaacaatgaggaagccggacatgacgcgttggaagattttgggaagaaatggaatgataaatatccaatgatctaccagtcgtggcaaaggcattgggaagacctcagcgaatttttcaaataccctcctgaaatccgccgcgcaatttatacgactaacgctgttgaatcgttgaactatcaattgagaaaagtaacgaaaaacagatcgacattttccactgatgacgctatactaaagatactttatctggctatccgtaacgccagtaaaaagtggactatgccgataagggaatgggggcaggctctcaaccagtttgccattgagtttggaaaagaacgggttccgttcttatga

SEQ ID NO: 21328 - protein, 238 aa, Unknown
  Obtained from environmental sample
  DOMAIN (2)...(215): Transposase, Mutator family
  misc_feature (1)..(238): Xaa is any amino acid
MDALRIRGKEDGKSCMKSVYIALAVDFEGKKEVLGLWIAESEGAKFWMGVLAELKNRGVQDILIACMDGLTGFPEAVRSVYPNTRVQLCIVHMVRNSTKFVSYKDLKKVCADLKTIYSANNEEAGHDALEDFGKKWNDKYPMIYQSWQRHWEDLSEFFKYPPEIRRAIYTTNAVESLNYQLRKVTKNRSTFSTDDAILKILYLAIRNASKKWTMPIREWGQALNQFAIEFGKERVPFL

SEQ ID NO: 21329 - DNA, 327 bp, Unknown
  Obtained from environmental sample
  misc_feature (1)..(327): n is a, c, g, or t
atggggcagatgagcgcccaggcaaaaatatttaccgacaggctttacgcgtgtacttccccccagttttcacctcattataaagagaatgccaggaaaaagaaaatggttcttgtatttacacagggcaatcccgataccgctttattccaaacgtattttgattatacgaaaaatatgtttcaggttcttgaatttgacgttaaaggcgtacaggtcattgccggtatgcgaaccaaacgggcgcatgaaagaaatgatctgctaactgcaatgaatgatattggctcatcgctggttttggaatcggtacagaaggtaccctaa

SEQ ID NO: 21330 - protein, 108 aa, Unknown
  Obtained from environmental sample
  misc_feature (1)..(108): Xaa is any amino acid
MGQMSAQAKIFTDRLYACTSPQFSPHYKENARKKKMVLVFTQGNPDTALFQTYFDYTKNMFQVLEFDVKGVQVIAGMRTKRAHERNDLLTAMNDIGSSLVLESVQKVP

SEQ ID NO: 21331 - DNA, 399 bp, Unknown
  Obtained from environmental sample
  misc_feature (1)..(399): n is a, c, g, or t
ttgcggtttgtttgtcaaggttgcttgaaaaccttcgcccttccatccgccctttgttttgttaaagacccccttgggtattttagggcgaatttcgttgcccccccctttttaacccccccgggcaaaacgtttttccccaaaaaaaatttttttttggccttttggggggggggcccccccccccccccccaacaaaaaaaattccccccccccccccaaaaaaaattttttaaaaggggggggccccccccccccctttttccccccggggggttttttttttggggggggggggggcgccccccccttgtggtggaaaaaaaaaaaaaaagaaggccccccccccttttttttgggggggggggggccccccccccctattttttttttttttaa

SEQ ID NO: 21332 - protein, 132 aa, Unknown
  Obtained from environmental sample
  misc_feature (1)..(132): Xaa is any amino acid
MRFVCQGCLKTFALPSALCFVKDPLGYFRANFVAPPFLTPPGKTFFPKKNFFLAFWGGGPPPPPQQKKFPPPPQKKFFKRGGPPPPLFPPGGFFFWGGGGRPPLVVEKKKKRRPPPLFFGGGGAPPPYFFFF

SEQ ID NO: 21333 - DNA, 396 bp, Unknown
  Obtained from environmental sample
  misc_feature (1)..(396): n is a, c, g, or t
ttgaaaaaaaaccctttattatttttttttggggggggggggggccccccccncccgcggcgccccccaaataaaaaaaagaatttttttttttccacacccccccctttaaaaaaaaaaaaaatagggggggggggcccccccccccccaaaaaaaaggggggggggccttctttttttttttttttccaccacaaggggggggcgccccccccccccccaaaaaaaaaaccccccggggggaaaaagggggggggggggccccccccttttaaaaaattttttttggggggggggggggaattttttttgttgggggggggggggggggccccccccccaaaaggccaaaaaaaaattttttttggggaaaaacgttttgcccgggggggttaa

SEQ ID NO: 21334 - protein, 131 aa, Unknown
  Obtained from environmental sample
  misc_feature (1)..(131): Xaa is any amino acid
MKKNPLLFFFGGGGGPPXPRRPPNKKKNFFFSTPPPLKKKKIGGGGPPPPKKKGGGPSFFFFFHHKGGAPPPPPKKKPPGGKKGGGGPPPFKKFFLGGGGEFFLLGGGGGAPPPKGQKKIFFGEKRFARGG

SEQ ID NO: 21335 - DNA, 747 bp, Unknown
  Obtained from environmental sample
  misc_feature (1)..(747): n is a, c, g, or t
atgatggcagaaaagcgatacaaaaaactaggcgaagtcctcctctcccagggtttaatcaccgaggagcagcttctgatcgccctgcgcgagtgccgccgcaacggcctcagcctaggctccaccctagtccaaatgcgcttcatctccaacgacgacctgacggccgtgctgggcgagcagatccacctgcagcagcgcaagcgcataggcgagatacttgtagagcagggcttcatcacacccgaccaactggaaaagggtcttgccgagcagaagaacaccaaaatgctcctgggcaagtgcctggtcaaactgggcttcataagcgagcccaagctcatcgacgtactgagcgcgcagttggacatacagcacgtggtattgcagcagttcaacttctccgccgacctggtcaagtgcattcccgaggacatggcgcgccgctacaaggttatcccgctcttcgagcgcaacggcgtgctgaccgtggcgatggtcgatccgacaaacctgcgcgtcatagaccacctgaagttcaagacaggccgcgagatcgacccggtgctggccaccgagaagagcatcatgacggccatagagaagaactacgcctccgccagcgaggagatgagccagttgctcagccacgtggcttcctcggcctccgcccaggatctcgaggtagtcaagtcgcangaggataacgaatcgtcgctgaccgacgaggaggcgcgcangtcgtga

SEQ ID NO: 21336 - protein, 248 aa, Unknown
  Obtained from environmental sample
  DOMAIN (103)...(210): GSPII_E N-terminal domain
  misc_feature (1)..(248): Xaa is any amino acid
MMAEKRYKKLGEVLLSQGLITEEQLLIALRECRRNGLSLGSTLVQMRFISNDDLTAVLGEQIHLQQRKRIGEILVEQGFITPDQLEKGLAEQKNTKMLLGKCLVKLGFISEPKLIDVLSAQLDIQHVVLQQFNFSADLVKCIPEDMARRYKVIPLFERNGVLTVAMVDPTNLRVIDHLKFKTGREIDPVLATEKSIMTAIEKNYASASEEMSQLLSHVASSASAQDLEVVKSXEDNESSLTDEEARXS

SEQ ID NO: 21337 - DNA, 615 bp, Unknown
  Obtained from environmental sample
  misc_feature (1)..(615): n is a, c, g, or t
gtgccgccgcaacggcctcagcctaggctccaccctagtccaaatgcgcttcatctccaacgacgacctgacggccgtgctgggcgagcagatccacctgcagcagcgcaagcgcataggcgagatacttgtagagcagggcttcatcacacccgaccaactggaaaagggtcttgccgagcagaagaacaccaaaatgctcctgggcaagtgcctggtcaaactgggcttcataagcgagcccaagctcatcgacgtactgagcgcgcagttggacatacagcacgtggtattgcagcagttcaacttctccgccgacctggtcaagtgcattcccgaggacatggcgcgccgctacaaggttatcccgctcttcgagcgcaacggcgtgctgaccgtggcgatggtcgatccgacaaacctgcgcgtcatagaccacctgaagttcaagacaggccgcgagatcgacccggtgctggccaccgagaagagcatcatgacggccatagagaagaactacgcctccgccagcgaggagatgagccagttgctcagccacgtggcttcctcggcctccgcccaggatctcgaggtagtcaagtcgcangaggataa

SEQ ID NO: 21338 - protein, 204 aa, Unknown
  Obtained from environmental sample
  misc_feature (1)..(204): Xaa is any amino acid
MPPQRPQPRLHPSPNALHLQRRPDGRAGRADPPAAAQAHRRDTCRAGLHHTRPTGKGSCRAEEHQNAPGQVPGQTGLHKRAQAHRRTERAVGHTARGIAAVQLLRRPGQVHSRGHGAPLQGYPALRAQRRADRGDGRSDKPARHRPPEVQDRPRDRPGAGHREEHHDGHREELRLRQRGDEPVAQPRGFLGLRPGSRGSQVAXG

SEQ ID NO: 21339 - DNA, 849 bp, Unknown
  Obtained from environmental sample
  misc_feature (1)..(849): n is a, c, g, or t
gtggatgaaaaacaccagaaactcacgatacacatagacgacgccattcccaagatactgattgccgatgatcagcggcttatgcaggtaattaccaaccttntgggaaacgctgtcaagttcacgccggaagagggttccatcagccttgacgcaagatttgccggagaagaaaccggcctttgtaccattgagatttctgtaagcgacacggggatcggtatcagtcgtgaacagcaggaacatttgttctattcttttcaacaggcggagatcaccacatcgcgccggtttggaggcaccggcctgggtctggccatctccaaaagtattgttgaaatgatgggcgggaaaatttggttaaaatccgaacctggaaaaggttctgtttttacctttacggtacaggcgaaaaaacgcggccaggcggacggccttatgaagaactctcccggggctgaaaatacggcgaaggaagaagaacaggactttaccggactttttgccgggcggcgcatacttctggttgaagacatggagataaaccgcgagatagtgctggcgctgcttgagcctacgctgctggagatagactgcgctgaaaacgggacacaggccgtgcataagttcagagaagcgccggaaaagtacgatttgattttcatggacgtccagatgcccgaaatggacggctatgaggcaacacagcgtattcgaactatggacataccaaaagcgaaaagtattcctataatcgcgatgacagccaacgtgtttcgggaagatgtggaaaagtgtatagatgccggcatgaacgaccatgtagggaagccgttanaatttgaatga

SEQ ID NO: 21340 - protein, 282 aa, Unknown
  Obtained from environmental sample
  DOMAIN (171)...(280): Response regulator receiver domain
  misc_feature (1)..(282): Xaa is any amino acid
MDEKHQKLTIHIDDAIPKILIADDQRLMQVITNLXGNAVKFTPEEGSISLDARFAGEETGLCTIEISVSDTGIGISREQQEHLFYSFQQAEITTSRRFGGTGLGLAISKSIVEMMGGKIWLKSEPGKGSVFTFTVQAKKRGQADGLMKNSPGAENTAKEEEQDFTGLFAGRRILLVEDMEINREIVLALLEPTLLEIDCAENGTQAVHKFREAPEKYDLIFMDVQMPEMDGYEATQRIRTMDIPKAKSIPIIAMTANVFREDVEKCIDAGMNDHVGKPLXFE

SEQ ID NO: 21341 - DNA, 609 bp, Unknown
  Obtained from environmental sample
  misc_feature (1)..(609): n is a, c, g, or t
atgattcgcaccgttcagcagatcccgtttataaaccagttccgtatcgaaaaagtcccgttgttaggcgacattccgttaatcggggatttgtttttcaaaaatgcgtatatcaccacatttatcggttttattatccttggactttcagccgctgttctttacaaaactcgattcgggcttcgtctgcgctcctgcggagagcatccgcaatccgcagactcagccggaattaacgtgtataatatgcgctatgcaggtgttatgatttcaggagcgcttgccggtcttggaggacttgtttttattatcccgacatctacgcagtttaacgcggaagtttccggttacggctttttggcgctggcggttttaatcttcggtcaatggaaacccggccgtattctttccgccgctttctttttcggattgatgaaagcaatatcttccgcctcctcaggcatacatttcctgagcgcaatttccgttccgagcgtaatctacaaaataattccatacataaccacgcttgtagttttagcgtttagttcaaaaacctcgcaggctcccagagctgaggggattccgtatgataaggggcgcagataa

SEQ ID NO: 21342 - protein, 202 aa, Unknown
  Obtained from environmental sample
  misc_feature (1)..(202): Xaa is any amino acid
MIRTVQQIPFINQFRIEKVPLLGDIPLIGDLFFKNAYITTFIGFIILGLSAAVLYKTRFGLRLRSCGEHPQSADSAGINVYNMRYAGVMISGALAGLGGLVFIIPTSTQFNAEVSGYGFLALAVLIFGQWKPGRILSAAFFFGLMKAISSASSGIHFLSAISVPSVIYKIIPYITTLVVLAFSSKTSQAPRAEGIPYDKGRR

SEQ ID NO: 21343 - DNA, 579 bp, Unknown
  Obtained from environmental sample
  misc_feature (1)..(579): n is a, c, g, or t
atgccatacgtactgcgccccgaaaatataaatcccgaagctccgggaattggttttaaaatttttagggcaggatcaataccggggcagcacagcgataactccggtgaaaaaatagctgtggctgtccttataggccaaaacggatttagcagactgcacgcaaacagtcccttctccgcccttcctcctttgcttgaaatattaaaaaaacaaacaccctatattattattgattttcacgcccaggcaactgctgaaaaaaaaactcttttttattccgcagacggtttttgttcagcggtaataggttcgcacacaagggttcaaactaccgatgaaaccattttaaacggaggaacagccgttataagcgatgcgggcagaacgggcagttttcaatctgtcggcggctgtgagacagcttcccgtattaaagaataccttaccggcatccccgagtggacaaaagacgcatgggaagcgcctgaattacaaggcgtttacctgaagctggacaggaacggcaaggccgtttcaattgaacgaatacgcgttcccgttcaaccgccggattaa

SEQ ID NO: 21344 - protein, 192 aa, Unknown
  Obtained from environmental sample
  misc_feature (1)..(192): Xaa is any amino acid
MPYVLRPENINPEAPGIGFKIFRAGSIPGQHSDNSGEKIAVAVLIGQNGFSRLHANSPFSALPPLLEILKKQTPYIIIDFHAQATAEKKTLFYSADGFCSAVIGSHTRVQTTDETILNGGTAVISDAGRTGSFQSVGGCETASRIKEYLTGIPEWTKDAWEAPELQGVYLKLDRNGKAVSIERIRVPVQPPD

SEQ ID NO: 21345 - DNA, 324 bp, Unknown
  Obtained from environmental sample
  misc_feature (1)..(324): n is a, c, g, or t
atgctgggagcgggcaaaaacgcgaaaaaagtaattgtaagcgccgaagacggagtaaatgccctaagcggacgtatagttgaatatctttttgaacctgaaaagtatgacgtaatattcgcgtgcggtccgtttgaaatgttaaaggctttaatgaaaagatgcaaaaaaagaaatatcccgtgttttgtttcaatggaaagccgtatggcttgcggcgcgggcgtttgccttggatgtacaatccgcacggtaaaaggcaaccgccgatgctgtgcggacggccccattttttcatcggaggatttaatcatcaatgagtga

SEQ ID NO: 21346 - protein, 107 aa, Unknown
  Obtained from environmental sample
  misc_feature (1)..(107): Xaa is any amino acid
MLGAGKNAKKVIVSAEDGVNALSGRIVEYLFEPEKYDVIFACGPFEMLKALMKRCKKRNIPCFVSMESRMACGAGVCLGCTIRTVKGNRRCCADGPIFSSEDLIINE

SEQ ID NO: 21347 - DNA, 549 bp, Unknown
  Obtained from environmental sample
  misc_feature (1)..(549): n is a, c, g, or t
gtggtaatcaatacgcctgctgtagatttactttttgacgctgtcgcatccaaaggacacgtctgcgtagggctagacacttcgcctgattatgtcccgcagacggaacggcaaaaagcccctaacgcggcgcaggctgttcttgcctataataccgcgttaattgacgctacttttgacgttgcagcctgctataaggttcagattgcttattatgaggaaatgggaatagaaggacttaccgcatattccaaaacacttgagtatatccgtaaaaagggaggtcttgttatagccgacatcaagcgcggcgacatcgcggataccgcccgttgttacgcgaacgcacacttaacaggcgaatttaaagcgaattttgtaacgcttagtccctatatgggaatggattcggttgaaccgtggctttccgaagcgcaaaacacaggcggcggcgcgtttgttcttatgaggacaagcaaccggggaatgaggactttcaatatttggaaacttcggacggaaaaaaactttcaacaaggtaggagataa

SEQ ID NO: 21348 - protein, 182 aa, Unknown
  Obtained from environmental sample
  DOMAIN (19)...(182): Orotidine 5'-phosphate decarboxylase / HUMPS family
  misc_feature (1)..(182): Xaa is any amino acid
MVINTPAVDLLFDAVASKGHVCVGLDTSPDYVPQTERQKAPNAAQAVLAYNTALIDATFDVAACYKVQIAYYEEMGIEGLTAYSKTLEYIRKKGGLVIADIKRGDIADTARCYANAHLTGEFKANFVTLSPYMGMDSVEPWLSEAQNTGGGAFVLMRTSNRGMRTFNIWKLRTEKNFQQGRR

SEQ ID NO: 21349 - DNA, 516 bp, Unknown
  Obtained from environmental sample
  misc_feature (1)..(516): n is a, c, g, or t
atggatacaagcacaatttgcgtacacggttgcaaaaagaaatttgacacaacagggtcggttgccactccgatatttgcatccgctacattcgctcatccaggtgttgggcaaagcacaggttttgattactctcgctcgctcaatccaaccaacgtgcatttagaagataccgttgccgcacttgaaggaggcaccgaagctattgcgttttcttctggcatggcggctgtttcaacactcatggaactattttccccagacgaccatatcattacctcagacgatctttatggcggtacctttcgcctttttgagaaagtgtcacaaaagaacggcgtaaaattttcttatgctgccactctaaaagatatggaaaaagaaataactaaatccacaaaagccatattcatagaaacgccatccaacccgatgatgcacgtaatagacatcgctacggttgcaaccattgctaaaaaacataatttgctctttattgttgacaacacattttaa

SEQ ID NO: 21350 - protein, 171 aa, Unknown
  Obtained from environmental sample
  DOMAIN (4)...(171): Cys/Met metabolism PLP-dependent enzyme
  misc_feature (1)..(171): Xaa is any amino acid
MDTSTICVHGCKKKFDTTGSVATPIFASATFAHPGVGQSTGFDYSRSLNPTNVHLEDTVAALEGGTEAIAFSSGMAAVSTLMELFSPDDHIITSDDLYGGTFRLFEKVSQKNGVKFSYAATLKDMEKEITKSTKAIFIETPSNPMMHVIDIATVATIAKKHNLLFIVDNTF

SEQ ID NO: 21351 - DNA, 378 bp, Unknown
  Obtained from environmental sample
  misc_feature (1)..(378): n is a, c, g, or t
gtggctggagacgaagccttgcgccatactgttaagataatctgctcaaggctcagaaaaaacgattttatggnaaggtatggcggcgaagaatttgtccttttcttttactatgccaacaaagaaacagggttgaaaatactggataggcttcgcatattcttatctgaatcgcctgttcatttggaaaaatgtcttgtagaaattcatgcgagttttggccttgtggaagttgacgttggaaaagcggcagaaaaaggttatatacagaaattgatacacgatgcagacacagccctttattccgccaaattatcaggacgaaacaaggtgatagtttttggacaagaaacaaattttgtaacttatgaaatttag

SEQ ID NO: 21352 - protein, 125 aa, Unknown
  Obtained from environmental sample
  DOMAIN (2)...(110): GGDEF domain
  misc_feature (1)..(125): Xaa is any amino acid
MAGDEALRHTVKIICSRLRKNDFMXRYGGEEFVLFFYYANKETGLKILDRLRIFLSESPVHLEKCLVEIHASFGLVEVDVGKAAEKGYIQKLIHDADTALYSAKLSGRNKVIVFGQETNFVTYEI

SEQ ID NO: 21353 - DNA, 888 bp, Unknown
  Obtained from environmental sample
  misc_feature (1)..(888): n is a, c, g, or t
ttgacgacagcgaagaggcgaggcttccgaacaatttgtattgttttctgcgcaatggggataaaaaacgacgtagccagattctttcttgatgattttgagcaatcgggagttctttcaagggtgntcgtgttcctttcgctcgcggactctccctcgcttgaaaggcttatcgccccgcgctgcgctcttaccgccgccgaatatctcgcttatgaaaaaaatatgcacgtcctngtcgtcatgaccgacatgacaaattactgcgaagcgttacgcgaagtttcctcaatacgcggggaagtgcctagcagaaaagggtatcctggctatctttactccgaccttgcctcgctttacgaaagggcgggaaaaattaaaggagcgaccggttccattacgcagataccgattctttccatgcccaacgatgatatcagccatccgatacctgacttgtcgggttacataacggagggacagattgttcttgaccgagagcttttccagcgcggcatttacccgccggtcgccgggcttccaagcctttcccgtttgatgaaggacggaatagggccgggcatgacaagggaagaccacaaagacgtttcgagccagctttttgccgcttacgcaagggttaaacaggtacgaaacctcgcctcaattatcggggaggaagaactttcagcggacgataaaaggtatttaaaattcggagaaaagtttgagcagattttcctgatacagggagaatatgataaccgcgacataggccgcactttggatctcggctggaaagtgcttgcggaccttccgagagaggaattattgcgcgttaaagaagaatttatagaaaaatatttagagccggcggcaaggatgtga

SEQ ID NO: 21354 - protein, 295 aa, Unknown
  Obtained from environmental sample
  DOMAIN (201)...(290): ATP synthase alpha/beta chain, C terminal domain
  misc_feature (1)..(295): Xaa is any amino acid
MTTAKRRGFRTICIVFCAMGIKNDVARFFLDDFEQSGVLSRVXVFLSLADSPSLERLIAPRCALTAAEYLAYEKNMHVLVVMTDMTNYCEALREVSSIRGEVPSRKGYPGYLYSDLASLYERAGKIKGATGSITQIPILSMPNDDISHPIPDLSGYITEGQIVLDRELFQRGIYPPVAGLPSLSRLMKDGIGPGMTREDHKDVSSQLFAAYARVKQVRNLASIIGEEELSADDKRYLKFGEKFEQIFLIQGEYDNRDIGRTLDLGWKVLADLPREELLRVKEEFIEKYLEPAARM

SEQ ID NO: 21355 - DNA, 828 bp, Unknown
  Obtained from environmental sample
  misc_feature (1)..(828): n is a, c, g, or t
ttggaagaagatcattacggacttaaagatgtaaaattgcgaattgttgaatatttagcggtgcgaaaactgcgtaaagatacaaaaggctctattgtctgccttgtaggtccgcccggagtgggaaaaacttctgttggtaaatcaatcgcgagggcgcttggcaagcagttcttccgcttttctgtgggcggaatgagggacgaggctgaaattaagggacacagacgcacatatatcggagctatgccggggaaaattattcagggactgaaaattgttaaaaccaaagaccctgtttttatgatagatgaaatcgataaaatgggcgcgagttttcagggcgatcccgcaagcgctcttttggaagtgcttgatcccgaacaaaataattcttttagagaccattaccttgatttgccatttgatatttccaatgtgttttttatcgttacggcgaatacattggatacaattcccgttccgttaatggatcgtatggaaattattcagcttcccggttatatcgatactgaaaaactggaaatcgctaaccgttatcttctgccgaagagtcttgaaaaaaacggtcttaaaaagaatcaagttaaatacacaaaagacagcctattgcacatagcaaactgttacgcgcgggaggcgggcgttcgcaactttgaaaaanatctcgacaagatacaccgcanactcgctaaacagattgtagacgcgcagganaagaacgaagaaaacgctctgcgttttacattgataaaaactgatagaaaaacatttaggcaaccctattttcccgtgagacgacattaa

SEQ ID NO: 21356 - protein, 275 aa, Unknown
  Obtained from environmental sample
  DOMAIN (33)...(169): ATPase family associated with various cellular activities (AAA)
  misc_feature (1)..(275): Xaa is any amino acid
MEEDHYGLKDVKLRIVEYLAVRKLRKDTKGSIVCLVGPPGVGKTSVGKSIARALGKQFFRFSVGGMRDEAEIKGHRRTYIGAMPGKIIQGLKIVKTKDPVFMIDEIDKMGASFQGDPASALLEVLDPEQNNSFRDHYLDLPFDISNVFFIVTANTLDTIPVPLMDRMEIIQLPGYIDTEKLEIANRYLLPKSLEKNGLKKNQVKYTKDSLLHIANCYAREAGVRNFEKXLDKIHRXLAKQIVDAQXKNEENALRFTLIKTDRKTFRQPYFPVRRH

SEQ ID NO: 21357 - DNA, 711 bp, Unknown
  Obtained from environmental sample
  misc_feature (1)..(711): n is a, c, g, or t
gtggacgcgataaagtatatgctcggcggacgcttccgcgcttctttccgtccgttgaatgacgcaatcatagcgaacagaattcttggaatagctggaattgtcggttgtaataatactaaacagaagactgatgattatacaaatacgctcacactcgaactaattaaacgaaatatactagtgcttcaaaccggctgttcggctataggaagcgcaaaggccgggttgttgaaaccggaagtcgcgttggagcaggcgggctcagggcttagggaagtttgcgaagccgtgggcataccgcctattctgcacatgggaagttgcgtagacaactcaaggattcttgaggcggcgactgaaattgtttttgagggtggtcttggtgatgatattgcgactcttcccgccgtaggcgtagcgcctgagtggatgagcgagaaggctgtagcaatcggttgctactttgtggcaagcggagttgacataatactgggaaatccattttatgtttcaggatcgcaggccgtcagcgattacctccacaacaaggttagggatgaatatggggcgagttttcatcttattgaagacccgataaaggcggctgatcgtattgtagaactgatcaatcaggcgagagacgctcttggaattaacaaaaaggctgagcgtaaactcttcgatatgaaagacaggagggcgttgtaa

SEQ ID NO: 21358 - protein, 236 aa, Unknown
  Obtained from environmental sample
  misc_feature (1)..(236): Xaa is any amino acid
MDAIKYMLGGRFRASFRPLNDAIIANRILGIAGIVGCNNTKQKTDDYTNTLTLELIKRNILVLQTGCSAIGSAKAGLLKPEVALEQAGSGLREVCEAVGIPPILHMGSCVDNSRILEAATEIVFEGGLGDDIATLPAVGVAPEWMSEKAVAIGCYFVASGVDIILGNPFYVSGSQAVSDYLHNKVRDEYGASFHLIEDPIKAADRIVELINQARDALGINKKAERKLFDMKDRRAL

SEQ ID NO: 21359 - DNA, 507 bp, Unknown
  Obtained from environmental sample
  misc_feature (1)..(507): n is a, c, g, or t
atgaaaaaacaaggttttaatccgtatctgccttcatgggagtatattcccgatggagaaccgtatttatttaacggcagagtttatatttacggttcgcatgataaattcaatggtcctgtttattgcccgaacgactatgtgtgctggtccgcgccccaggacgatttaagcgactggcggtatgagggagtgatatatcctaaaaccaacgatccctttaataaagacggaaggatgtgcctttacgcgccggatgtaacgctcggacctgacggccggtattatttgttttatgtacttgataaggtaaatgtcgtgtccgtagcggtttgtaagtctcccgcaggaaaatttaaattccacggctatgtacattatcctgnnacgaacaggcttggcgagcggaaaggagaccaggctcagtttgatccgggcgttttgacagagggtgaaaaaacatatctttttacgggtttttgcggacctgacgataagacaagatag

SEQ ID NO: 21360 - protein, 168 aa, Unknown
  Obtained from environmental sample
  misc_feature (1)..(168): Xaa is any amino acid
MKKQGFNPYLPSWEYIPDGEPYLFNGRVYIYGSHDKFNGPVYCPNDYVCWSAPQDDLSDWRYEGVIYPKTNDPFNKDGRMCLYAPDVTLGPDGRYYLFYVLDKVNVVSVAVCKSPAGKFKFHGYVHYPXTNRLGERKGDQAQFDPGVLTEGEKTYLFTGFCGPDDKTR

SEQ ID NO: 21361 - DNA, 627 bp, Unknown
  Obtained from environmental sample
  misc_feature (1)..(627): n is a, c, g, or t
ttgatggccgagaatataaccgcagaagcataccttgggatggtatcggaaaattacgcaagtatcagagattatgaggcttccatcactatccgttccggaaacaacgatatgacaggaaacgtaagctacctgtcgccgtgcttcatgcgtatagattttagcaaacccgcggaacaagttattgtgtttaacggcgatgtgttgattatctatctgcctgaatacagagccgttttaaatcaggatattaaaagaaaaccgggagcttcgggagccggagtggcaagcgcgcagggactttcgcttttaaggcgcaattatgtatcgtcatttgttacaggacccaaccccgaaccgttggacggcacgtcgggagaaagagttataaaactgcgccttacaagacgttccgtttcggaaggttttagagaaatcattttaagcataaatccaactacaaaattaatccgccgagtcgaaggacgaacaatcggcgaaggcgaattgcgttttgattttatgaacatcagaacaaacgtaggtattcctgaggcgcgttttgcatacgacactccgccttcggcaaatatgtacaacaatttcttgtttagagacacaaattag

SEQ ID NO: 21362 - protein, 208 aa, Unknown
  Obtained from environmental sample
  DOMAIN (20)...(191): Outer membrane lipoprotein carrier protein LolA
  misc_feature (1)..(208): Xaa is any amino acid
MMAENITAEAYLGMVSENYASIRDYEASITIRSGNNDMTGNVSYLSPCFMRIDFSKPAEQVIVFNGDVLIIYLPEYRAVLNQDIKRKPGASGAGVASAQGLSLLRRNYVSSFVTGPNPEPLDGTSGERVIKLRLTRRSVSEGFREIILSINPTTKLIRRVEGRTIGEGELRFDFMNIRTNVGIPEARFAYDTPPSANMYNNFLFRDTN

SEQ ID NO: 21363 - DNA, 690 bp, Unknown
  Obtained from environmental sample
  misc_feature (1)..(690): n is a, c, g, or t
ttgacagcgccggaattagggagacggggggacaccgttgagagactcggaatggaccgaacgaggtcggcggtcgcggaggcccacgcggttctgtgggtaacgtcggcgtcggaggtttttggggtggatgaacaaaaggaaatattgggagcggcagggatttgcggagagggcgataacaacgcgcaaggggattcgcaaaaggtgcaacatgttgatatttatgatgattacggtaaaaaccgaggaaaagacgggcttgtggttattatcaacaagatagacgtgtatgaatcgttggcgaaggatgtggcaataccgtcgtctaagttgaaatcgtatttgacggaaaaaaggctattttgcgaagagtacgggctgaaatatgtggagacaagcataacccaaaagctaaaccaaatgcaattgtttgaagcgatcagcgcaacggtaaaaggagtgatgaaagacgtcccaaccccggcaataataatcaacgagcgccaccgaggcatagtggaggcggtgatcggggatttgcgggagtgtttggataacttcgaccgagaagaagtagcggcgcacggtttaaggtcggcgctggaccgcctatcagagttttcgggccatgttggcagcgacgaggtcttgaacgggatttttgagaggttttgtattggaaagtag

SEQ ID NO: 21364 - protein, 229 aa, Unknown
  Obtained from environmental sample
  misc_feature (1)..(229): Xaa is any amino acid
MTAPELGRRGDTVERLGMDRTRSAVAEAHAVLWVTSASEVFGVDEQKEILGAAGICGEGDNNAQGDSQKVQHVDIYDDYGKNRGKDGLVVIINKIDVYESLAKDVAIPSSKLKSYLTEKRLFCEEYGLKYVETSITQKLNQMQLFEAISATVKGVMKDVPTPAIIINERHRGIVEAVIGDLRECLDNFDREEVAAHGLRSALDRLSEFSGHVGSDEVLNGIFERFCIGK

SEQ ID NO: 21365 - DNA, 576 bp, Unknown
  Obtained from environmental sample
  misc_feature (1)..(576): n is a, c, g, or t
gtggatatgccaagtgtaatcataaccggcgcggacaggggattggggctttcactgtgcaaagaattcctgaaacgtgaatggacagtttttgccggtaagtatttggatgactattccctgcttgaagataccgctaaaaagaatcccaatctgcatattgtcaaattggacgttggctgtacggacagcatagccgcagtaaaagacagcctgctaaaaataacggattcacttgatatgttaatctccaacgcggcgttaatgggtgatgtaaagtgcaatctgtatgaatccccaatggagcttgaatcggtgtggaactcgtttagagttaacgccttgggtcctatttgccttgtggaaaatcttttaccgcttttggatcgaggtaaaatgaaacggctctgctttgtatcgagtgaggtgtcatgcattacgctgatgaagaatcggggcgacagcccgtacccgtatcccatgagtaaggcatccctcaatatgggcgtgcgcatactgcataaccagctgtattctcagggttacaccttccgcctcttccatcccggtggatga

SEQ ID NO: 21366 - protein, 191 aa, Unknown
  Obtained from environmental sample
  DOMAIN (4)...(178): short chain dehydrogenase
  misc_feature (1)..(191): Xaa is any amino acid
MDMPSVIITGADRGLGLSLCKEFLKREWTVFAGKYLDDYSLLEDTAKKNPNLHIVKLDVGCTDSIAAVKDSLLKITDSLDMLISNAALMGDVKCNLYESPMELESVWNSFRVNALGPICLVENLLPLLDRGKMKRLCFVSSEVSCITLMKNRGDSPYPYPMSKASLNMGVRILHNQLYSQGYTFRLFHPGG

SEQ ID NO: 21367 - DNA, 429 bp, Unknown
  Obtained from environmental sample
  misc_feature (1)..(429): n is a, c, g, or t
ttggaaggagtgacaatcagtacgctgcgtttaagcccctcagaaccaagatcgtattctataaaatcgttcacttcacgcccgcgctcccctattagggcgactacgtttacatctgcggacgtgttacgcgcaatcattccaagaagggtggattttccaacgcctgaaccggaaaatatgccgagcctttgccccttgcccaccgcaagaagaccgtcaatggcgcggactccagttgttatgcgctctgtgatacgtcttctttttagcggatcaggggcgcttgcaagcgcgggatacgaacaaacggaagaaatttcgcccttgttgtctaaagggtttccaagagcgtcaataacgcgccctaaaagtttatggagacaggcacttcaagacgactgccaagcgcaatctcggccgatctga

SEQ ID NO: 21368 - protein, 142 aa, Unknown
  Obtained from environmental sample
  misc_feature (1)..(142): Xaa is any amino acid
MEGVTISTLRLSPSEPRSYSIKSFTSRPRSPIRATTFTSADVLRAIIPRRVDFPTPEPENMPSLCPLPTARRPSMARTPVVMRSVIRLLFSGSGALASAGYEQTEEISPLLSKGFPRASITRPKSLWRQALQDDCQAQSRPI

SEQ ID NO: 21369 - DNA, 735 bp, Unknown
  Obtained from environmental sample
  misc_feature (1)..(735): n is a, c, g, or t
gtgggcaaggggcaaaggctcggcatattttccggttcaggcgttggaaaatccacccttcttggaatgattgcgcgtaacacgtccgcagatgtaaacgtagtcgccctaataggggagcgcgggcgtgaagtgaacgattttatagaatacgatcttggttctgaggggcttaaacgcagcgtactgattgtcactccttccaattctcccccccttgcccgtcttcgcggggcttatgtggcgaccgccgtcgcggaatatttccgcgatcagggaaatgacgttatgcttttatttgactccgttacgcgctttgcccgcgccatgagggaaataggtcttgccgcaggtgagcctcccgcacaaaggggttttcctcccagcatgtttgattccatgccaaaactccttgaaaggtcgggtacttcagacaaggggagcataaccggtttttatacagtccttgtagacggcgatgatatggatgagcctgtagcggatacggtgcgcggtattttggacggacatatcgttctttcaagggagcttgcccatgcttatcattatcccgctattgacatattacccagcatttcccgtctctctcccnaagtatcaggaactgaaagcaggagggcggccggcattatccgcaaaacatggcggcttacgcggcggctgaagacctatccatgtaggcgcgtatcatcaggggtccaaccccgagaatga

SEQ ID NO: 21370 - protein, 244 aa, Unknown
  Obtained from environmental sample
  DOMAIN (1)...(200): ATP synthase alpha/beta family, nucleotide-binding domain
  misc_feature (1)..(244): Xaa is any amino acid
MGKGQRLGIFSGSGVGKSTLLGMIARNTSADVNVVALIGERGREVNDFIEYDLGSEGLKRSVLIVTPSNSPPLARLRGAYVATAVAEYFRDQGNDVMLLFDSVTRFARAMREIGLAAGEPPAQRGFPPSMFDSMPKLLERSGTSDKGSITGFYTVLVDGDDMDEPVADTVRGILDGHIVLSRELAHAYHYPAIDILPSISRLSPXVSGTESRRAAGIIRKTWRLTRRLKTYPCRRVSSGVQPRE

SEQ ID NO: 21371 - DNA, 900 bp, Unknown
  Obtained from environmental sample
  misc_feature (1)..(900): n is a, c, g, or t
atggttcataccaacggaattgtccttgttcagggcagaatcggtcgtcagtttgatcttgcgctgaaccttgaaaccggttactcggatgtagtctggagcgatacccgaaacaagctggaattcctcaacaacgatcacaacggaagtcttggagcacttgttgaccttcgcgactatactatcaacacggaaattcaggcactggacaatatgactatgaatttcgtcggtcttgtgaacgaagtccacgaaaaagcttacggcattaacggggaaacagggctgaaattttttaacgagcacccttttgttaccaatgtgaacggcagttacgacaggaacggagacggggatgacgattcctcctatattttcagggtttcaggcacaaatatccttgagaatcgcgcacaagtcggccttgaaggtgtcattaccctttccgcttttgggggcgacaggagaatcccgtactaccccacggataccgtggcggacatcattaccaggatcaacaactcgggcgcggaagttaccgcccgcctaaaccgcgacggttatctgaccatgaaggcgaccccttcggacgactggcaaaatcccgattttgtgatccgccatatcgaagattcaggccgcttcctggaagggtacgcgggcttattgagggcttccggcccggacggcgcttatgactgggcaaggccggacgccgtggccgcattgcgtggcggccctacagactgggaagtcgcgcctatcgcgcacccttctggctggattgaaattaattccgcattgattcgagacccaatgtcggtggctgctggttttgcnaaaacggacgccccggcaatccangcaacggagaaggcgcgatggctatcgcgtccataa

SEQ ID NO: 21372 - protein, 299 aa, Unknown
  Obtained from environmental sample
  DOMAIN (145)...(195): Flagellin hook IN motif
  misc_feature (1)..(299): Xaa is any amino acid
MVHTNGIVLVQGRIGRQFDLALNLETGYSDVVWSDTRNKLEFLNNDHNGSLGALVDLRDYTINTEIQALDNMTMNFVGLVNEVHEKAYGINGETGLKFFNEHPFVTNVNGSYDRNGDGDDDSSYIFRVSGTNILENRAQVGLEGVITLSAFGGDRRIPYYPTDTVADIITRINNSGAEVTARLNRDGYLTMKATPSDDWQNPDFVIRHIEDSGRFLEGYAGLLRASGPDGAYDWARPDAVAALRGGPTDWEVAPIAHPSGWIEINSALIRDPMSVAAGFAKTDAPAIXATEKARWLSRP

SEQ ID NO: 21373 - DNA, 1005 bp, Unknown
  Obtained from environmental sample
  misc_feature (1)..(1005): n is a, c, g, or t
ttgnnnnggattatggcgagagagggagcggccattacccgccagcattatagcgaattgcacgaaggaaagccttttccccgcatgatatggcccagcaactacaaccgttacgctgcggcgaccatgttcagccttttttttggcgggaaagcttttgctccggatatccaaatagagggcaaaaatgtccaggactggctgcaggggcattacatagccgctttccgccactgttaccgcaggcttaaaagctgttccgccattgcgggatggggcgtgttaaatgagccgcacaacggtttcattggcctcaaagacctggggaagaacaataataacatgatgccgatagggcccaggccaagcccctgggatactatacgcgccgcttccggataccctgttagcgtgccggtatactcaaccgggacctttggcatgtacagcgtgagtcgtgaaattttcaatccaggagccgtttccctgtttaaggaaggattcgtatgcccctggaaacaggccggggtttggactgatgaagacggcatcgcgccagtaggcgcgccgccagtaggcgcgccgcgccttttgcgtaaagaccacttcttaatgtatgagaaaaggcagttgaactttatggaggatttccataagccttttgtcctgaattatattgaagcgatgaaagaagctgacgagaaaaccatcttctttctggaaggaatgccttccggcttaagcgcgccgtcgcatccggggtggggcaaggatgatccgcaaaatgttgtaaacgctttccactggtacgacggctttgccctgtttaccaagcacttcagccggtggtttactataaacccggtaaaagcgtcttttatcttcngcaggaaaagaatgcttgccctatactgcgaatgtctggcaaaagggtcagatggtccgccgaacacatgggcgggaatcccacgcttctggggggaatcgggctggctttcgacataa

SEQ ID NO: 21374 - protein, 334 aa, Unknown
  Obtained from environmental sample
  misc_feature (1)..(334): Xaa is any amino acid
MXXIMAREGAAITRQHYSELHEGKPFPRMIWPSNYNRYAAATMFSLFFGGKAFAPDIQIEGKNVQDWLQGHYIAAFRHCYRRLKSCSAIAGWGVLNEPHNGFIGLKDLGKNNNNMMPIGPRPSPWDTIRAASGYPVSVPVYSTGTFGMYSVSREIFNPGAVSLFKEGFVCPWKQAGVWTDEDGIAPVGAPPVGAPRLLRKDHFLMYEKRQLNFMEDFHKPFVLNYIEAMKEADEKTIFFLEGMPSGLSAPSHPGWGKDDPQNVVNAFHWYDGFALFTKHFSRWFTINPVKASFIFXRKRMLALYCECLAKGSDGPPNTWAGIPRFWGESGWLST

SEQ ID NO: 21375 - DNA, 603 bp, Unknown
  Obtained from environmental sample
  misc_feature (1)..(603): n is a, c, g, or t
atggttatgcagggacggatacacgtttacgagggctataccgccgagagggcggcgtatcccgtcagggtggcgaaactgctcggggcgcgtaccttgattgcgactaacgccgcgggcggcgtaaatttagagtataaggccggcgacattgtcgccctgaacgattttataaaactcagcttccccaacccgcttataggaaaaaatattcccgaattcggcccccggtttccggacatgacatacgtgttcgacagggattatttaaaactgataaagaaaatcgccggggaacagggtttttccatgagagagggcgtttacttttacactaccggcccgcagtatgagacccccgcggaaatacgggcgttccgcctgctgggcgccgacctggtgggaatgtccaccgtgcccgagtgcgtctgcgccgcccatgccggcatgagaatactcggcatatcgctggttaccaacatggcggcgggcgtgctggacaagcccctgtctgaaacggaagttattgaggcggccaacgcggcgcaggaccgttttacccgcctgctgctggcttttttacagagcagcgacgcccggtaa

SEQ ID NO: 21376 - protein, 200 aa, Unknown
  Obtained from environmental sample
  DOMAIN (1)...(199): Phosphorylase family 2
  misc_feature (1)..(200): Xaa is any amino acid
MVMQGRIHVYEGYTAERAAYPVRVAKLLGARTLIATNAAGGVNLEYKAGDIVALNDFIKLSFPNPLIGKNIPEFGPRFPDMTYVFDRDYLKLIKKIAGEQGFSMREGVYFYTTGPQYETPAEIRAFRLLGADLVGMSTVPECVCAAHAGMRILGISLVTNMAAGVLDKPLSETEVIEAANAAQDRFTRLLLAFLQSSDAR

SEQ ID NO: 21377 - DNA, 840 bp, Unknown
  Obtained from environmental sample
  misc_feature (1)..(840): n is a, c, g, or t
atgttcgcgaagctcaaagcgggcggcagcggctacgacattgttttcccgtcggcggattatgtttcgatcatgattcagcagaatatgcttgaaaaaatcgacaaaacaaaaatccccaatctaaaaaacgtggacccggccgttttaaggcaggcggactatgatccggacatgaactattcggttccgtattatttcggagcggcaggcgttgccgttaacaccaactttgtaaaagactttaagcaaagctggtcaatcttcgcgagggaagatttaaaagggcgcatgacaatgctggatgacatgagggaagtaatgggcgacgcccttgcgtaccttggctattcggtaaacactacagacccggctaaggtggaagaagcaagaaggcttatcaacaattcatggaagcccaaccttgttaaattcgacgccgaagcgttcggaaaaggctatgccaacggggacttttgggtggtgcagggttatcccgaagtagtattcgaggaaatcgcggataacgaacagcttatggctaatacggtattctttattccttccgagggggggccggcgtacattgacagcatgtgtatcttaaaaggctcaaagaatattgacgttgcgcacaattttatagactttatccacagacctgaaatttacgccgaattcgccgacatcttcggatttccggcgaccgcgaacatccccgcgcgcaaatttaaaaccggaaattcatggtacacggaaacggaacttgagaatgtagaagtcaaaaaagatatcggagacaaattggagctctataacgacgcttggttaattcgataa

SEQ ID NO: 21378 - protein, 279 aa, Unknown
  Obtained from environmental sample
  misc_feature (1)..(279): Xaa is any amino acid
MFAKLKAGGSGYDIVFPSADYVSIMIQQNMLEKIDKTKIPNLKNVDPAVLRQADYDPDMNYSVPYYFGAAGVAVNTNFVKDFKQSWSIFAREDLKGRMTMLDDMREVMGDALAYLGYSVNTTDPAKVEEARRLINNSWKPNLVKFDAEAFGKGYANGDFWVVQGYPEVVFEEIADNEQLMANTVFFIPSEGGPAYIDSMCILKGSKNIDVAHNFIDFIHRPEIYAEFADIFGFPATANIPARKFKTGNSWYTETELENVEVKKDIGDKLELYNDAWLIR

SEQ ID NO: 21379 - DNA, 615 bp, Unknown
  Obtained from environmental sample
  misc_feature (1)..(615): n is a, c, g, or t
gtgcatcacattgacatgctttgttggatgcttggactgccaaagaaagtcaacgccgttatcagcaacgcagcccacgacaacgccgaggtggaggacatttctgtcgcagttcttcagtacgatggcgggctttgctcgaagggagcgctggcacaggtaacaagctccgttatccaccacggcgaagagcagcagcttgttttccagggagagaaagcccgcgtttcggcgccgtggagagtttccgccaatatcagccaacccaacggttttcctgtcttcaaacaccaaaatgaagaattaatatcaaaactaaataatttttacgaggcactgccaaaacttacccatactttacatgcggggcaaattgacgacgtgttgaccgcgcttgaaaccggatgcaagccgatgattgacggcgaagacggcaggcgcacactggagcttatctccgccatttacaaagccggcacggaacaacgcgcagtagaactgccaatgaagaaagacgatcccttttacactgttaaaggcattatggaacgagtgccgcatttctacgaaaaaaccgtctctgtaaacgatcagggcggacaaattacattttag

SEQ ID NO: 21380 - protein, 204 aa, Unknown
  Obtained from environmental sample
  misc_feature (1)..(204): Xaa is any amino acid
MHHIDMLCWMLGLPKKVNAVISNAAHDNAEVEDISVAVLQYDGGLCSKGALAQVTSSVIHHGEEQQLVFQGEKARVSAPWRVSANISQPNGFPVFKHQNEELISKLNNFYEALPKLTHTLHAGQIDDVLTALETGCKPMIDGEDGRRTLELISAIYKAGTEQRAVELPMKKDDPFYTVKGIMERVPHFYEKTVSVNDQGGQITF

SEQ ID NO: 21381 - DNA, 639 bp, Unknown
  Obtained from environmental sample
  misc_feature (1)..(639): n is a, c, g, or t
atgaccaatctatacggatatgatatggaagaggcgccccgtttggggcgtcaggcaagaatagccggcatagacgaggccggacgcggcccatgggccgggccggtggtcgccgccgtagtcatattgaacatggatcgcccgatagacggggtgaacgactcgaagaagctgacggccgccaagcgtgacaaactgttcgagtcgataaccgataccgctgaagcntacggcgtcggcgtcgccgatcaaggggagattgatgagatcaacatccttcaggcgaccttttcggcgatgaggcgggcgcttgagggcgtggacgggcggtacgacctgcttttggtcgacggcaaccgatacataaccggcgtcccccgcgagcgccaaaaaacgatagtcggcggcgacgcgctgagcgcctccatagccgccgcatccatagtcgccaaggtcacgagggataggatgatggacgggtaccacgagcggtatccccaatacgatttcgcgaaacacaagggatacggcacaaagcgccacgtggagatgattgagcggcacgggctttgcgagatacacaggaagagtttttgcaaaaagatcgccgccgcgcaaacggagctgttcgggggatga

SEQ ID NO: 21382 - protein, 212 aa, Unknown
  Obtained from environmental sample
  DOMAIN (22)...(201): Ribonuclease HII
  misc_feature (1)..(212): Xaa is any amino acid
MTNLYGYDMEEAPRLGRQARIAGIDEAGRGPWAGPVVAAVVILNMDRPIDGVNDSKKLTAAKRDKLFESITDTAEAYGVGVADQGEIDEINILQATFSAMRRALEGVDGRYDLLLVDGNRYITGVPRERQKTIVGGDALSASIAAASIVAKVTRDRMMDGYHERYPQYDFAKHKGYGTKRHVEMIERHGLCEIHRKSFCKKIAAAQTELFGG

SEQ ID NO: 21383 - DNA, 717 bp, Unknown
  Obtained from environmental sample
  misc_feature (1)..(717): n is a, c, g, or t
ttgaatgaaatttttattgagggtatagaatgtattaaaaaggcgatagaatcaaaaattgaaattaccagaataattattaagaatataaataacctgtcagaatggggcaagaatataataaaacaaaataaggatgcaaaaattattgaaatgtccgataaattatataatgaattatgtgataaaattaacccttccgagatgttgataacggcgaaaattaaacagaatacgcttaatgacattaaaaataaaaatccgtttattattgtttttgacaggccgactgattatggaaatttaggttctatgatacgttcagcaaacgcttttaatgcggacggattatttattatcgggcatggagttgacacatatgagtcaaaagtaatcagggcaagcatgggaagcatatttttcacaaaaataattactattggatcaatggaaaaactatcagagtttattaaatctcaaaagataaagaataacatggaaataataggcaccgattccacgggaaccgtattattaaatgattataaaataaaaaggcctgtaatggtaataataggaaatgaagcaaaaggcatgagcgtaaagttaaaggaaatatgcgataaaattatcagaataccgatggaagggaatgtaaattctttaaacctgtcgtgcgcggcgtcaataataatgtgggaaatatataaaagataa

SEQ ID NO: 21384 - protein, 238 aa, Unknown
  Obtained from environmental sample
  DOMAIN (88)...(233): SpoU rRNA Methylase family
  misc_feature (1)..(238): Xaa is any amino acid
MNEIFIEGIECIKKAIESKIEITRIIIKNINNLSEWGKNIIKQNKDAKIIEMSDKLYNELCDKINPSEMLITAKIKQNTLNDIKNKNPFIIVFDRPTDYGNLGSMIRSANAFNADGLFIIGHGVDTYESKVIRASMGSIFFTKIITIGSMEKLSEFIKSQKIKNNMEIIGTDSTGTVLLNDYKIKRPVMVIIGNEAKGMSVKLKEICDKIIRIPMEGNVNSLNLSCAASIIMWEIYKR

SEQ ID NO: 21385 - DNA, 552 bp, Unknown
  Obtained from environmental sample
  misc_feature (1)..(552): n is a, c, g, or t
atggctaaaactactcccaccgtcctgatcgtcgacgacgttgatatcaatgtcatgatgcttcaggaaatattgaaagatgactatgatataatcacggcgggcaacggcaaagaagcgcttgacctcctccgtaccgcggttatcctgcccaaactcatcctgctggacgttatgatgccggtaatggacggacgccagatgtttgaggtcatgaaggaagacagcacgtttaagaggattcccgttatcttcatcacggcggaaaacgattcggaaagcgagcttctggcggccggggccgtggactttatcaacaaaccattcctgccggatattgtccggctcagggtccgaaaccaaatcgaactgaagaactacagcgacagccttgaggaaatggtcgcggaaaaaacagccgaggcgaccaagaccatggaaaacgccctgcagggcctggccaacattattgagcacagggacctggaatccggcgaacatgtcaaacgtacccagttgtacgtgcagtcgctctgcaattacctgatataa

SEQ ID NO: 21386 - protein, 183 aa, Unknown
  Obtained from environmental sample
  DOMAIN (6)...(119): Response regulator receiver domain
  misc_feature (1)..(183): Xaa is any amino acid
MAKTTPTVLIVDDVDINVMMLQEILKDDYDIITAGNGKEALDLLRTAVILPKLILLDVMMPVMDGRQMFEVMKEDSTFKRIPVIFITAENDSESELLAAGAVDFINKPFLPDIVRLRVRNQIELKNYSDSLEEMVAEKTAEATKTMENALQGLANIIEHRDLESGEHVKRTQLYVQSLCNYLI

SEQ ID NO: 21387 - DNA, 852 bp, Unknown
  Obtained from environmental sample
  misc_feature (1)..(852): n is a, c, g, or t
gtgacagccctgcgaaaagacggtcacactgtaggcttcatgggtgacggcatcaatgacgccgcggccatgcgggccgccgatgttggcatttccgttgacaccgcggtagacatcgccaaggaatcggccaacatcatccttttggaaaaagacctgatggtgctggaagaaggcgttattgaaggaagaaaaatctacgcaaacatcattaaatacattaagatgacagccagttccaacttcggcaacatgttctcggtgcttgcggcttcggccttccttcctttcctccctatgatgccgctgcaaattcttatattaaacctgatatacgacatctcctgcatcgcgatcccatgggacaacgtggatttggatttcctgcgtaagccccgcaaatgggacgcttcgtctataagccgcttcatgatctggatagggcctacgagttccgtgtttgatataacaacgtaccttttgatgttcttcgttatttgtccccgctttgtaggcagcccctggggggcggacttgagcccggagaatcaggtgttgtttataagcctcttccataccggctggtttgtggaatccctctggtcgcagacattggttattcacatgatacgcactccgaagataccctttattcagagcagggcttcggcgcaggtcgccctgtttactactctgggaatagccacaggaaccatcataccttataccttctttgcggaacatttgaaaatgaccagccttccgtcttattatttcgcttatctggccgggataatcctggcttacatgctcttggctacattgatgaaaaaggtttttgtgtggaaatag

SEQ ID NO: 21388 - protein, 283 aa, Unknown
  Obtained from environmental sample
  misc_feature (1)..(283): Xaa is any amino acid
MTALRKDGHTVGFMGDGINDAAAMRAADVGISVDTAVDIAKESANIILLEKDLMVLEEGVIEGRKIYANIIKYIKMTASSNFGNMFSVLAASAFLPFLPMMPLQILILNLIYDISCIAIPWDNVDLDFLRKPRKWDASSISRFMIWIGPTSSVFDITTYLLMFFVICPRFVGSPWGADLSPENQVLFISLFHTGWFVESLWSQTLVIHMIRTPKIPFIQSRASAQVALFTTLGIATGTIIPYTFFAEHLKMTSLPSYYFAYLAGIILAYMLLATLMKKVFVWK

SEQ ID NO: 21389 - DNA, 465 bp, Unknown
  Obtained from environmental sample
  misc_feature (1)..(465): n is a, c, g, or t
ttggccaatgatgaaagcgctttcttgggattcaaaggcggaagcatgggagaaatgccgatatttttaattctggcttcatgttttttcttactcataacaaaaacaattgattggcgcacgcctgtttttatggttggcaccggatttatcgccgccctcgcgttctggcaggatattaacttcgccctgttcagcgtagttacaggcggtcttcttttcggcgcggtttttatggttaccgattatgttacaagccctgtaaccaacaagggaaaaataattttcgggattggcgccggtattatcgccatgctgatccgcaggtttggaatttaccctgaaggcgtatgtttctcgatattgatgatgaacgcaatcacgcctttcctgaacaagcttctgcccaaaaaatacggtcggactttagtccgcaatgtacaaaagaaggaggcggctaaatga

SEQ ID NO: 21390 - protein, 154 aa, Unknown
  Obtained from environmental sample
  DOMAIN (1)...(142): NQR2, RnfD, RnfE family
  misc_feature (1)..(154): Xaa is any amino acid
MANDESAFLGFKGGSMGEMPIFLILASCFFLLITKTIDWRTPVFMVGTGFIAALAFWQDINFALFSVVTGGLLFGAVFMVTDYVTSPVTNKGKIIFGIGAGIIAMLIRRFGIYPEGVCFSILMMNAITPFLNKLLPKKYGRTLVRNVQKKEAAK

SEQ ID NO: 21391 - DNA, 894 bp, Unknown
  Obtained from environmental sample
  misc_feature (1)..(894): n is a, c, g, or t
ttgaagcggagttttgcaacagcgcttttggaaaaacattttagaacacaaaacgaactttccaacctaagcatctccgcaagcggtgccctgctcttttatcttttggagcaaaaaaaatcgggacttagccacataataaaaatagagtcaatcccttggagcgattatatggctcttgacccagccacccaacgcaaccttgaacttactgctccgcttcaccccgaagactcaaactcaacgcttctctccgttatggatttcacaaaaaccgctatgggtggtcgtactttgagggaatggatttcgcatccgctaatttcaatggagcatattttaggcaggctttcttgcgtggaagaattggttgataatccaatgtccatagacgaaataggagaggctctgaaaccaattcccgatatggaacgtgcaatgggtcgcgttggcagttcaagggcaaatgctcgtgatgtgcagagcctggggaaatcgcttttgcaggcggagcaaattgcaagaatgttgaaaaaattgaaaggcaaaaagtttagcgaaatagcgagcaaattggagcttgcaaaaggcaaagggcaagagatttgcgccttgctaaaagacgaactccccttgacaataaaagagggaaatttgataagagagggagcaagcgacgaaattgaggattttagacaggagataaaaagcaaaaaaaattggcttgccaatttagaatcaaaagaaaaagagaggctcggaattcccnntcctaaaagtggctacaacaaaagtttttggctactacatagaaataacatccacccactcccacaaaaaaattccaccgaatatatccgcaagcaaacgctttccaaggcgaacgctacataa

SEQ ID NO: 21392 - protein, 297 aa, Unknown
  Obtained from environmental sample
  DOMAIN (55)...(245): MutS domain III
  misc_feature (1)..(297): Xaa is any amino acid
MKRSFATALLEKHFRTQNELSNLSISASGALLFYLLEQKKSGLSHIIKIESIPWSDYMALDPATQRNLELTAPLHPEDSNSTLLSVMDFTKTAMGGRTLREWISHPLISMEHILGRLSCVEELVDNPMSIDEIGEALKPIPDMERAMGRVGSSRANARDVQSLGKSLLQAEQIARMLKKLKGKKFSEIASKLELAKGKGQEICALLKDELPLTIKEGNLIREGASDEIEDFRQEIKSKKNWLANLESKEKERLGIPXPKSGYNKSFWLLHRNNIHPLPQKNSTEYIRKQTLSKANAT

SEQ ID NO: 21393 - DNA, 750 bp, Unknown
  Obtained from environmental sample
  misc_feature (1)..(750): n is a, c, g, or t
atggaaaaacagtaccacgttgattttgacgaaagccacggcgcgttatacgcaatcctccccggcgatcccggcagggtggaaaaaatcgcctcgtttcttgaaaaaccgcgtttttatcatcaaaaccgcgaatacacaacatggttaggcgaattgtcgggagagaccgtgatggtaatatcgacgggcatgggagggccttccacggcgatagccatagaagagctttacaagacgggagtgcgcaattttatcaggatcggcacctgcggcggaatggctcttgacgtattgggaggggacattgttatcgcgacgggcgcgatccgcatggaagggacaacaaaggaatatgtgccggttgaattccccgccgtcgccaatcttgatattacgaacgcgcttgtagaagccgcgaaaaacttaaaacaaaaatggcacgcaggcattgtgcaatgtaaagattccttttacggccagcacgaccccgcccgcatgccgtccggctacgagttgcttgacaaatgggaagcgtggaaaaaagccggctgtcttgcctcggaaatggaaagttccacgcttttcatcgtaagccagatactgggcgcgcgcgccggctgcgtgctgaacgttgtctggaaccaggagcgcgaaaaagccggcatggaaaacccccactgccatgacacagaagccgcaatcaaaacagcagtggaagcggtgaggcttttgatacaaaaagaataa

SEQ ID NO: 21394 - protein, 249 aa, Unknown
  Obtained from environmental sample
  DOMAIN (16)...(242): Phosphorylase family
  misc_feature (1)..(249): Xaa is any amino acid
MEKQYHVDFDESHGALYAILPGDPGRVEKIASFLEKPRFYHQNREYTTWLGELSGETVMVISTGMGGPSTAIAIEELYKTGVRNFIRIGTCGGMALDVLGGDIVIATGAIRMEGTTKEYVPVEFPAVANLDITNALVEAAKNLKQKWHAGIVQCKDSFYGQHDPARMPSGYELLDKWEAWKKAGCLASEMESSTLFIVSQILGARAGCVLNVVWNQEREKAGMENPHCHDTEAAIKTAVEAVRLLIQKE

SEQ ID NO: 21395 - DNA, 681 bp, Unknown
  Obtained from environmental sample
  misc_feature (1)..(681): n is a, c, g, or t
atgctacccgaaagcaaaatccgcggctacctgccggggcgcttcagcttcaacacaaaaggcggacgctgcgaggcgtgcgagggcgacggcgaactgcggatagagatgcacttcctgcccgacgtctacgtcaagtgcgaaacctgcggcgggaaacgctacaacagagagacgctcgaagtgctctacaaggggaaatccatcgcggacgtattggaaatgacggtagacgaggcgctgatcttcttcgacaacctatcggcgatacggcaaaaactgcaagtgctgtcgcaggtgggcctcggctacatcaagctcggccaatccgcaacaacgctctccggaggcgaggcgcaacggatgaagttggcttcggaactctctaaaagggctacgggaaagaccttatatattttggacgaaccgaccacgggactgcactttgaggatataaggatgctgatgtcggtcatacaagaattggttgacaaagacaattcggtgatagtcatagagcataatttggacgtgataaaatgcgccgaccacataatagacctcggccccgacggcggcgacaggggcggcacgatagtggccgtagggacgccggaagagatggcaaagaatccggcgtcggtcaccgggaaatttttgaaaggatatttgaagcggtaa

SEQ ID NO: 21396 - protein, 226 aa, Unknown
  Obtained from environmental sample
  DOMAIN (31)...(192): ABC transporter
  misc_feature (1)..(226): Xaa is any amino acid
MLPESKIRGYLPGRFSFNTKGGRCEACEGDGELRIEMHFLPDVYVKCETCGGKRYNRETLEVLYKGKSIADVLEMTVDEALIFFDNLSAIRQKLQVLSQVGLGYIKLGQSATTLSGGEAQRMKLASELSKRATGKTLYILDEPTTGLHFEDIRMLMSVIQELVDKDNSVIVIEHNLDVIKCADHIIDLGPDGGDRGGTIVAVGTPEEMAKNPASVTGKFLKGYLKR

SEQ ID NO: 21397 - DNA, 312 bp, Unknown
  Obtained from environmental sample
  misc_feature (1)..(312): n is a, c, g, or t
gtgcgagggcgacggcgaactgcggatagagatgcacttcctgcccgacgtctacgtcaagtgcgaaacctgcggcgggaaacgctacaacagagagacgctcgaagtgctctacaaggggaaatccatcgcggacgtattggaaatgacggtagacgaggcgctgatcttcttcgacaacctatcggcgatacggcaaaaactgcaagtgctgtcgcaggtgggcctcggctacatcaagctcggccaatccgcaacaacgctctccggaggcgaggcgcaacggatgaagttggcttcggaactctctaa

SEQ ID NO: 21398 - protein, 103 aa, Unknown
  Obtained from environmental sample
  misc_feature (1)..(103): Xaa is any amino acid
MRGRRRTADRDALPARRLRQVRNLRRETLQQRDARSALQGEIHRGRIGNDGRRGADLLRQPIGDTAKTASAVAGGPRLHQARPIRNNALRRRGATDEVGFGTL

SEQ ID NO: 21399 - DNA, 774 bp, Unknown
  Obtained from environmental sample
  misc_feature (1)..(774): n is a, c, g, or t
atgggagaaagattcgtgggaaccgaaacaagtgaaatccggcagagaataagtcttctcagagtaccgattgatattgtcgcgccggagaatcttagcgccgtagtttatgaaattctaaaagaaaaaaaggagcataacattgtccttctttccttgtgggatttattgcgggctaggagaagcggcgaataccgcacatacgttacaagggcgtctttagttattcctatttccaagagcataatcggcggaataaaattccttacagggaaaaaagcgttccgttatatgccgttcgattttattgtcagtatgcttaccattttagaaaaccgtgagtttacctgctacctgctcggcggcagaagaaaaatccttcttaaaaccgaacaaaacatcaggcagacattcccccgccttcgcattgtagggcgtttccccggttacttcaaacgttacgaagaaggcacaattataaaagctattaaaaaatcatcgccgaccttattgctggctggaacgggtataaggggcagagaacgctggattgccagaaacaacgttgctcttggagaaggcatgaggctgtggtgcagcgacatttttgacgtattcgccgaaaggaaaaaacatccgtcccgcgccgcttttaattcaggaatggaatggttaggctactgtttccaaaacccctttagatttttcagaattttcccatacatcggctacaagttcgtgctattgtattacaaatttttcattaaagaataa

SEQ ID NO: 21400 - protein, 257 aa, Unknown
  Obtained from environmental sample
  DOMAIN (67)...(238): Glycosyl transferase WecB/TagA/CpsF family
  misc_feature (1)..(257): Xaa is any amino acid
MGERFVGTETSEIRQRISLLRVPIDIVAPENLSAVVYEILKEKKEHNIVLLSLWDLLRARRSGEYRTYVTRASLVIPISKSIIGGIKFLTGKKAFRYMPFDFIVSMLTILENREFTCYLLGGRRKILLKTEQNIRQTFPRLRIVGRFPGYFKRYEEGTIIKAIKKSSPTLLLAGTGIRGRERWIARNNVALGEGMRLWCSDIFDVFAERKKHPSRAAFNSGMEWLGYCFQNPFRFFRIFPYIGYKFVLLYYKFFIKE

SEQ ID NO: 21401 - DNA, 336 bp, Unknown
  Obtained from environmental sample
  misc_feature (1)..(336): n is a, c, g, or t
ttggaaaaagcgaaaacgggaaaaaaacagtgggacattatcgtgcttgatcctccaagcttttccaattcaaaaaagatgacagatgattttgatttacagcgtgatttaactgaattactcggtaaatgcctaaaactgcttgctccggcaggaaaactgtttttaagcgtaaatataaagcgttccgttcccgccgcatccgaacttaaagacagtttgagtcaatatgcgtcaaatttgcacataacagaattgggagaaaagttaattgacgaagattttaagggaagaaaaacgccgaaagcgtttctgttggataaacttgacaaatag

SEQ ID NO: 21402 - protein, 111 aa, Unknown
  Obtained from environmental sample
  misc_feature (1)..(111): Xaa is any amino acid
MEKAKTGKKQWDIIVLDPPSFSNSKKMTDDFDLQRDLTELLGKCLKLLAPAGKLFLSVNIKRSVPAASELKDSLSQYASNLHITELGEKLIDEDFKGRKTPKAFLLDKLDK

SEQ ID NO: 21403 - DNA, 492 bp, Unknown
  Obtained from environmental sample
  misc_feature (1)..(492): n is a, c, g, or t
atgacagattggacagttcttggtacgccgaatggaaaacaggcccgctacatcaagcaaattcaggacgcgaaaacagttgaggagctcgcggcaatcctgcacaacatggtggaaaaaataatcgtccagatagttttgtttcagggtattcctcacgcttccgccatgagaaaagcggagttttttatcaaagaaaactatacccgaaaaatcagccttcgtgaggttgcgaaaatagccggtctttcagcgccctatttcagcactattttcaaagaggaaatgggcgaaaatctttccaagtatattaacaggcagagggtagagaaggccagcaggatgcttttggatacagacctttccctgtcagaaatatccaacgcatgttgttttgacgatcaaagctggttctcaaaaatatttaaaagctttaccggcatcagccccagcaagtaccgcagccagggaggaaagattaatatagcctaa

SEQ ID NO: 21404 - protein, 163 aa, Unknown
  Obtained from environmental sample
  DOMAIN (59)...(105): Bacterial regulatory helix-turn-helix proteins, AraC family
  misc_feature (1)..(163): Xaa is any amino acid
MTDWTVLGTPNGKQARYIKQIQDAKTVEELAAILHNMVEKIIVQIVLFQGIPHASAMRKAEFFIKENYTRKISLREVAKIAGLSAPYFSTIFKEEMGENLSKYINRQRVEKASRMLLDTDLSLSEISNACCFDDQSWFSKIFKSFTGISPSKYRSQGGKINIA

SEQ ID NO: 21405 - DNA, 315 bp, Unknown
  Obtained from environmental sample
  misc_feature (1)..(315): n is a, c, g, or t
atgaaggtgacggacattgattcgggcgactggatcgccctgtacggagtggattttggcggtgcgggagcgcaaacgtttaattgtcgcgtaacgcctcctaaaagcggcagcggccgtgctgggagcgtaatccagatcaagctggacgggcttgacggcaaaccaatcggttatgtcaatgccgaacccggaaagccagatataacggtaaaactatcgcagaccgttaccggcgtacacgatctggtttttgttttctacggccagggctatgactttgagcagtggcaattcatattccccggcgcttag

SEQ ID NO: 21406 - protein, 104 aa, Unknown
  Obtained from environmental sample
  DOMAIN (2)...(101): Carbohydrate binding module (family 6)
  misc_feature (1)..(104): Xaa is any amino acid
MKVTDIDSGDWIALYGVDFGGAGAQTFNCRVTPPKSGSGRAGSVIQIKLDGLDGKPIGYVNAEPGKPDITVKLSQTVTGVHDLVFVFYGQGYDFEQWQFIFPGA

SEQ ID NO: 21407 - DNA, 330 bp, Unknown
  Obtained from environmental sample
  misc_feature (1)..(330): n is a, c, g, or t
atggatatgattaccattgataccctgagcatcacgccggaacttctcagcctgattgcggaaatcgacgaattcaaaggcgcgtggaaagccttgggaactcttgcgccggaacgtctttccgccttgcgtcgggtggcgaccattgaaagtataggatcttccacccgcatagagggaagcaggctttccgacagcgaggtggaaaagcntgttgaacctttccatacgctcttttgccacgcgcgacgagcaagaggtcgccgggtatgcggaaacccatggagcagattttccagtcctggaatacattccccgantcggccataa

SEQ ID NO: 21408 - protein, 109 aa, Unknown
  Obtained from environmental sample
  misc_feature (1)..(109): Xaa is any amino acid
MDMITIDTLSITPELLSLIAEIDEFKGAWKALGTLAPERLSALRRVATIESIGSSTRIEGSRLSDSEVEKXVEPFHTLFCHARRARGRRVCGNPWSRFSSPGIHSPXRP

SEQ ID NO: 21409 - DNA, 891 bp, Unknown
  Obtained from environmental sample
  misc_feature (1)..(891): n is a, c, g, or t
ttggtgaattcttgcntaattgattttaaagcggatatttacatacagggttcaaatgcaaaaatgctctccggtgagcttgcaacgtatttggcagggagatatgttgaatttcatatctatcccttttctttttccgaagcaaagcttgcagggctagattcttttgaggaatatgtaaagaagggaggaatgccgtttttataccaaaattcaatggattggcattcttccaaattgtatctgagtgatatttattcttctgttcttttgaaagatattgttgagagatataatgttagagatgttgatttacttaaaaggctcttgcaattttttatagcaaatatagggcactccttttctgccactagcgtactgaaatatttgaaaaatgaaaagcgaagcttgtctgctgagacaatatataattacattgactattgcaagaatgcctgtttgttgcacttgattcacagaaaagatatttcgggaaaaaaattgcttaaatttcaggaaaaaatttacattgcagaccacgggattagagaatctgtttatggaaataacatgaaagacattgagcaggttttggaaaacatagtgtatatggaattgctccgtagaggctatgacgtttgcgttgggaaaatagaggagtttgaaatagattttgtagcatcaaaaggagcgaagcaaatttacattcaagtttgctatttgctagcttcgccagaaacaacagaaagagaattttcgccattgcttaaaataaaagacaatttcccgaaattagttatatcaacagataaatttgatatgagcagggaaggcatagttcataagaatatagaggagtttttaagcctgcctaatttctttggttattag

SEQ ID NO: 21410 - protein, 296 aa, Unknown
  Obtained from environmental sample
  misc_feature (1)..(296): Xaa is any amino acid
MVNSCXIDFKADIYIQGSNAKMLSGELATYLAGRYVEFHIYPFSFSEAKLAGLDSFEEYVKKGGMPFLYQNSMDWHSSKLYLSDIYSSVLLKDIVERYNVRDVDLLKRLLQFFIANIGHSFSATSVLKYLKNEKRSLSAETIYNYIDYCKNACLLHLIHRKDISGKKLLKFQEKIYIADHGIRESVYGNNMKDIEQVLENIVYMELLRRGYDVCVGKIEEFEIDFVASKGAKQIYIQVCYLLASPETTEREFSPLLKIKDNFPKLVISTDKFDMSREGIVHKNIEEFLSLPNFFGY

SEQ ID NO: 21411 - DNA, 423 bp, Unknown
  Obtained from environmental sample
  misc_feature (1)..(423): n is a, c, g, or t
atgaccacatttaggcgcattgcccgagccgcggcatttttcgacgcaagttacatagttttaaacgaaaaagacacggaagcgcgccttacgacaagcgcctaccgtatcgccgaaggcggttttgaacacctaactgtgcggaaaatcacaaattcagccgcctttttaaaagatgcgtcaaaaaaactcttaacaatcggcactgatacaagggcaagacggcgtatcggtgacttgaacggcatcttaaaaaaccgccaaggcgtcgttttagtcttaggcaacgaagaaacaggcctgcccaaagaagtgaaagacaaatgctcctgtttgcttagaatcccgggaacaggaaatattgacagtttaaacgtgtcacaagccgcaactttattcctaaatgcgatttacaatttttaa

SEQ ID NO: 21412 - protein, 140 aa, Unknown
  Obtained from environmental sample
  DOMAIN (7)...(135): SpoU rRNA Methylase family
  misc_feature (1)..(140): Xaa is any amino acid
MTTFRRIARAAAFFDASYIVLNEKDTEARLTTSAYRIAEGGFEHLTVRKITNSAAFLKDASKKLLTIGTDTRARRRIGDLNGILKNRQGVVLVLGNEETGLPKEVKDKCSCLLRIPGTGNIDSLNVSQAATLFLNAIYNF

SEQ ID NO: 21413 - DNA, 720 bp, Unknown
  Obtained from environmental sample
  misc_feature (1)..(720): n is a, c, g, or t
ttgcggcgcgggacgcacgtcgacagtttattagagagctcaaaagaaccgcgtgtccgcaaaatcatacagccgcttataataggcgaagaggttgcggataggggcgacgacgactacatgttcacaaaggacttggggctaatcagggacgaccgtgaccgcatcgaaccggcaaaccctatctacgcggagctgatcttcagggcgctgacgcagaaagcgcaagagtcgataaaaaacgcgggagaaaaatacgctcccccgaaatacataaaagacggcaagatagacatggatatactgatgaacggttttcaggaatactggcgacaaaatagcgagatttggaggaaacgctacaaagaggatatctacgagtacgacgaagccgccgcccacttggtcatgcacgcgttcctgcagagggtggtaaacggcggagggcacgtcctccgcgaagcggcggccggtacgcagcgggtagacattgtcgtagaatactatggcaataaatatccggtcgaactgaaaatcctgcaaagcgaaagcagccgctctgagagtctgtcgcaaatacgcggctacatggacaaagtcggggcggacgacggatggctcgttatcttcgacaaggatccggggaagagttgggacgagaagatttttatgaaagaggagacggtagaggggaagcgggtgacggtggttgggtgctga

SEQ ID NO: 21414 - protein, 239 aa, Unknown
  Obtained from environmental sample
  misc_feature (1)..(239): Xaa is any amino acid
MRRGTHVDSLLESSKEPRVRKIIQPLIIGEEVADRGDDDYMFTKDLGLIRDDRDRIEPANPIYAELIFRALTQKAQESIKNAGEKYAPPKYIKDGKIDMDILMNGFQEYWRQNSEIWRKRYKEDIYEYDEAAAHLVMHAFLQRVVNGGGHVLREAAAGTQRVDIVVEYYGNKYPVELKILQSESSRSESLSQIRGYMDKVGADDGWLVIFDKDPGKSWDEKIFMKEETVEGKRVTVVGC

SEQ ID NO: 21415 - DNA, 312 bp, Unknown
  Obtained from environmental sample
  misc_feature (1)..(312): n is a, c, g, or t
ttgcgcctgcttaggaagggcgagcagtattatgtggcgagcgttaggggcgactcaatgactgaggccggcataagggatggagatatgctgcttatccgttgcgcggatgtgccaaaagacggcgctatacaagtagtccgttataaagacaaatctacgctcaagcggctgcacaaaactgagaaaggctgggatatgtattatgaagacggcagtggccgcgtgatttcaggagattccgccgattacgaagtgcaaggggaattcatagcggtattgccggtgaccgctaatttaaaggataaataa

SEQ ID NO: 21416 - protein, 103 aa, Unknown
  Obtained from environmental sample
  DOMAIN (14)...(80): Peptidase S24-like
  misc_feature (1)..(103): Xaa is any amino acid
MRLLRKGEQYYVASVRGDSMTEAGIRDGDMLLIRCADVPKDGAIQVVRYKDKSTLKRLHKTEKGWDMYYEDGSGRVISGDSADYEVQGEFIAVLPVTANLKDK

SEQ ID NO: 21417 - DNA, 966 bp, Unknown
  Obtained from environmental sample
  misc_feature (1)..(966): n is a, c, g, or t
ttgatggccgagaagtggaatattaagaccgtttatagcgaaggcgattcaagcaaggaatacgccaacaaagccggagagacggcaagcaccgctactgttcaagaagaagggatggggctttcccagcaatcagattcagacaaattaaaaaaagccgaggatttctatacaagttttattttcttcgtggaaaatatgtttgttaaagcgtcagtatccgacgacttggaagaaaaaaccgtatctgaaaaaataaaggaaattattgaatacataaaagaagaccgccgttttttaatgagggtaataaaaaatatcgagcctgcggaaggaaaaaattatcttgcaacacattcggtgcgctcaactataatcgcgataataatcggcacatatcttaaactgcccaactacaggctgatagagcttggagtcgcggcccttatgcacgaggcgggaatgttaaaattaccgtcaactatttatttaagtcagagagcccttaatcctcaggaacaaaaagccattcttacccatcctattctgggttacagcatgcttaaatcgcttgatttttcgcttcccgtatgcttgtccgcccttgaacaccatgagcgtgaaaacggaacgggctatccgcgaaaattgctcagtgaaaaaatcagcctgtattcaaagataatagccgtcgcctgctcctatgaggcgttaagctccaagagaccgcataaggaagccaaagacggctataccggaatgcttgaacttttaaagaacgaaggcaaacaatacgacgatacaatcgttaaggcgcttgtcctgtctttgtcgatttacccaatcggtctttatgtgcttttatcaaacgggaaaaaaggtcaggtagtggacgtaaacccgggaacaccccgtttccctatcgtgcaaatttttggagaaatttactcccgacggaaaaaataa

SEQ ID NO: 21418 - protein, 321 aa, Unknown
  Obtained from environmental sample
  DOMAIN (116)...(238): HD domain
  misc_feature (1)..(321): Xaa is any amino acid
MMAEKWNIKTVYSEGDSSKEYANKAGETASTATVQEEGMGLSQQSDSDKLKKAEDFYTSFIFFVENMFVKASVSDDLEEKTVSEKIKEIIEYIKEDRRFLMRVIKNIEPAEGKNYLATHSVRSTIIAIIIGTYLKLPNYRLIELGVAALMHEAGMLKLPSTIYLSQRALNPQEQKAILTHPILGYSMLKSLDFSLPVCLSALEHHERENGTGYPRKLLSEKISLYSKIIAVACSYEALSSKRPHKEAKDGYTGMLELLKNEGKQYDDTIVKALVLSLSIYPIGLYVLLSNGKKGQVVDVNPGTPRFPIVQIFGEIYSRRKK

SEQ ID NO: 21419 - DNA, 846 bp, Unknown
  Obtained from environmental sample
  misc_feature (1)..(846): n is a, c, g, or t
ttgcccgttgatataaacgcggaagacgaggcgggcattgtctatggctcttatccgctgggacggcttctcctttcgctggaacagaccgcccggaacaaactcaacgtggtggtgctggacgcgtgccgggacaaccctttcaaaaatcttccgggcggaagccgggggctttcccgcggtttcactaccgttgagcatccgccccaggatattttcgtcatgttttccacttctccgggcacaaccgccgcggacggcgacaacggacagaacagccctttcgccgaggcttttctcaagtacatggactccgacgagatccttccggtaatggccggccttgtaacccgtgaaaccatgcggctgacaggcggcaaacagcgcccctaccagaacggcagcatagtgagcgagctctactattcgctctcttcaagcgcaattgcgcccgcatctgcgccagcgcccgcgcgtgaactgccggcagggtctaacgcggcgtctctttccaccgctccttcgggtgtgccgcccgttgggaatccgccttctgtcgccgtgccttctccggctatggcggctatccccgccggaagtttttttatgggcagccccgtaatagagcttgatcgggatccgtttggggaaaccaggcaccgggtcagcatgagcgccttttacattgcctcaaaagaattgagtgtcggcgagttccgccgttttgtcgaagacacaggttatgttaccacagccgagaacgacggcggagcgcaagcctacgatgaggcaaaaaacgaatgggtttccgcgccggggcaaactggcgtatctcggccgatctga

SEQ ID NO: 21420 - protein, 281 aa, Unknown
  Obtained from environmental sample
  misc_feature (1)..(281): Xaa is any amino acid
MPVDINAEDEAGIVYGSYPLGRLLLSLEQTARNKLNVVVLDACRDNPFKNLPGGSRGLSRGFTTVEHPPQDIFVMFSTSPGTTAADGDNGQNSPFAEAFLKYMDSDEILPVMAGLVTRETMRLTGGKQRPYQNGSIVSELYYSLSSSAIAPASAPAPARELPAGSNAASLSTAPSGVPPVGNPPSVAVPSPAMAAIPAGSFFMGSPVIELDRDPFGETRHRVSMSAFYIASKELSVGEFRRFVEDTGYVTTAENDGGAQAYDEAKNEWVSAPGQTGVSRPI

SEQ ID NO: 21421 - DNA, 519 bp, Unknown
  Obtained from environmental sample
  misc_feature (1)..(519): n is a, c, g, or t
ttggctagttgggagtggctagtggggagtggttttgatgaaaatttggcgagagccgttcttaaaaaaagtttgtggcacggcagaatgcaaatgcttttcaaaaatgggaatttaaaagccattttagacggagcgcacaatccggcagcggcaaaagagcttgcaaaatgtttaagagaaaaaaacataaattcgctaccttgcattttcgcttctctaacagataaagatactttcaatgttcttaaagcattaaagccgcatatatccgtttgctatccggtgcaaattgaaaattcaagggcaagaagcgcggaagaactttgcgagatttgcaaaaagctgaaaataaaagcagaacctcttgcaggttccattaaaaattgcgttctaaaatcaaaaagtccggtgttgataacgggttcgctttatttggttgggatggctatttttgtgctgcgtggtgagtttggtgagttggcagagttcagggggttgaaagagacggcggattag

SEQ ID NO: 21422 - protein, 172 aa, Unknown
  Obtained from environmental sample
  DOMAIN (26)...(112): Mur ligase family, glutamate ligase domain
  misc_feature (1)..(172): Xaa is any amino acid
MASWEWLVGSGFDENLARAVLKKSLWHGRMQMLFKNGNLKAILDGAHNPAAAKELAKCLREKNINSLPCIFASLTDKDTFNVLKALKPHISVCYPVQIENSRARSAEELCEICKKLKIKAEPLAGSIKNCVLKSKSPVLITGSLYLVGMAIFVLRGEFGELAEFRGLKETAD

SEQ ID NO: 21423 - DNA, 573 bp, Unknown
  Obtained from environmental sample
  misc_feature (1)..(573): n is a, c, g, or t
atggcgctaggtaggatatttgtcttttcagcgccctcgggcgcgggcaagtccacgattttgagccacatcgcggagaccgtgccggatatcgtgtactccatctcggccaccacgcgcaaaccgcgcgccggcgaagtaaacggggtgcactacttctttatgaccgttgaggagttcgaggccaaggcggccgggaacgagttcgccgagtggcagcaggtgttcggcaactactacggcacgccgcgcgctttcatagacaccgtggtagcctccggtcggcacatcatcatggatatagacgttttcggaaagaagaagttcgacgccgcgtacccggaggctgtggggatacttatcgtcccgccttccatggaggcgcttgaaaagaggcttaggtcgcgcggcaccgacgacgaggcgacgatacggctgcgtctcgataaagccaacaccgagatgacggtcgcccgctccgagggcaagtacgaatacgagatcgtgaacaacgatcttaaaaccgcggaggccgaggcggcggcgctggtaaggaagattatcggcggatga

SEQ ID NO: 21424 - protein, 190 aa, Unknown
  Obtained from environmental sample
  DOMAIN (39)...(143): Guanylate kinase
  misc_feature (1)..(190): Xaa is any amino acid
MALGRIFVFSAPSGAGKSTILSHIAETVPDIVYSISATTRKPRAGEVNGVHYFFMTVEEFEAKAAGNEFAEWQQVFGNYYGTPRAFIDTVVASGRHIIMDIDVFGKKKFDAAYPEAVGILIVPPSMEALEKRLRSRGTDDEATIRLRLDKANTEMTVARSEGKYEYEIVNNDLKTAEAEAAALVRKIIGG

SEQ ID NO: 21425 - DNA, 852 bp, Unknown
  Obtained from environmental sample
  misc_feature (1)..(852): n is a, c, g, or t
atgggctttttggcaatggatgaggcattcgacgaatgggagggctgcaagaacaaatggtggcaggggcataacgtgtacccgccgaagcaccagggttatgccgaagatttcccccagtggcatgaagaagatcttgccgcaatggtactgcgggacaggaaccaccccagcatcataatgtggagcgtcggcaacgaaattgattaccccaacgatccgtatgtccaccccatattccaggagatgaccggcaacaacgacgcaaacaaaccggcggcggaaaggcagtacaacaggaacaagccgaatatggaacgcctggcaactatcgccgcgaatcttgtacgcattgtaaaaaaacacgatgccacaaggccggttacacttgccgccgcctttcctgaactgtcctcgcggctgggctttctcgatgccctcgatgtcgccggttacaattacaaggaacagttttacgaagaggaccacaagcgctttcccaaactgcccatcgtgggcagtgaaaacagccacagcgtcgccgcgtggaaagcggttacggacaacgaatacatcagcgggcagtttttgtggaccggcattgattacctgggcgaagcccacggctggccggtgcgctgttccggcgcggggatccttgacacggcgggaaatgaaaaaaccgcgtttttcaggcggcaggccctatggcttgaaaaaccggttctgtaccttgcaagccgcccgaaaccggcggccaccgatggcccgccatccaaagatggcggcgaaattcgccgtgngaattatcccgctgttgggattacctttccggtgaaagcgttgaagtag

SEQ ID NO: 21426 - protein, 283 aa, Unknown
  Obtained from environmental sample
  misc_feature (1)..(283): Xaa is any amino acid
MGFLAMDEAFDEWEGCKNKWWQGHNVYPPKHQGYAEDFPQWHEEDLAAMVLRDRNHPSIIMWSVGNEIDYPNDPYVHPIFQEMTGNNDANKPAAERQYNRNKPNMERLATIAANLVRIVKKHDATRPVTLAAAFPELSSRLGFLDALDVAGYNYKEQFYEEDHKRFPKLPIVGSENSHSVAAWKAVTDNEYISGQFLWTGIDYLGEAHGWPVRCSGAGILDTAGNEKTAFFRRQALWLEKPVLYLASRPKPAATDGPPSKDGGEIRRXNYPAVGITFPVKALK

SEQ ID NO: 21427 - DNA, 789 bp, Unknown
  Obtained from environmental sample
  misc_feature (1)..(789): n is a, c, g, or t
atgggaaattttaacgcaatggtctacccttttcttaaattgccggttaaaggagtcatctggtatcagggggaatcaaacgattccagtccaaatgattataaaaaactttttccgcttatgattgacgattggcgcaaaaaaaacaataacgaaaaattaccgtttatttttgtccaactgcctatttggaaagaagcgtcagataacaacgaagcgcacggctgggcgaaaatccgcgaagcgcaggcggacgcaatggctgtaccaaatacgggtatggcttgcgctctggaactcggcgaatggaatgacttgcaccccattaacaaaaaagacgtaggttaccgccttttccttgcggctgacaaaacgctgttcgccgctgacaatacttcgccgggaccaacagtatcacgctttgaacgtcagcaggataaaattaacatattttttaataattgcggcgcgggtttaaaagccgttaataaaccttcctcgcctaacataccctgccccgactgcgagaaaaatcccgacaccgcttacgtcagcgttatcggcgaaaacgctaatgttcgtttaccggcaaaaattgaaagcgcaaatacaatcagtattgatatatccggtataaaaaatccaaaaaggatattgtacgcatgggcggataatccgcgcgacagacagttgttccacagcgacggtttacccgctctgcctttcaaaatagaaataaataaggagtattcatgttccacccaaaaaaaaccaaggacaaatttttga

SEQ ID NO: 21428 - protein, 262 aa, Unknown
  Obtained from environmental sample
  DOMAIN (2)...(50): Domain of unknown function (DUF303)
  misc_feature (1)..(262): Xaa is any amino acid
MGNFNAMVYPFLKLPVKGVIWYQGESNDSSPNDYKKLFPLMIDDWRKKNNNEKLPFIFVQLPIWKEASDNNEAHGWAKIREAQADAMAVPNTGMACALELGEWNDLHPINKKDVGYRLFLAADKTLFAADNTSPGPTVSRFERQQDKINIFFNNCGAGLKAVNKPSSPNIPCPDCEKNPDTAYVSVIGENANVRLPAKIESANTISIDISGIKNPKRILYAWADNPRDRQLFHSDGLPALPFKIEINKEYSCSTQKKPRTNF

SEQ ID NO: 21429 - DNA, 384 bp, Unknown
  Obtained from environmental sample
  misc_feature (1)..(384): n is a, c, g, or t
atggaaaatttgatttttacggaaaaaccgcatgaaaaaagggcgattatcctatattatgaaaagcaagtgaaccagttaaacaaaaccataatagggaaacccgcacaatggcttatagatgccgccgcttctattgggctggacttttcaggacttacccatgaggtaacaaacagctttataacccatgtctttaagcagcatgggaacgaaaaaagcgaaagggcgcgcgggcagatcgccgttacgcaggccgacattacaaaaatacccggcatagtgaaagagcctgactgtgcgatcataggtataaaaagagacagtgaaacccttatagcctactcaaaaaaaatacgaaaacaacacggtcatttattatga

SEQ ID NO: 21430 - protein, 127 aa, Unknown
  Obtained from environmental sample
  misc_feature (1)..(127): Xaa is any amino acid
MENLIFTEKPHEKRAIILYYEKQVNQLNKTIIGKPAQWLIDAAASIGLDFSGLTHEVTNSFITHVFKQHGNEKSERARGQIAVTQADITKIPGIVKEPDCAIIGIKRDSETLIAYSKKIRKQHGHLL

SEQ ID NO: 21431 - DNA, 462 bp, Unknown
  Obtained from environmental sample
  misc_feature (1)..(462): n is a, c, g, or t
gtggatataaggcctgaggatctgcgcgtggacacctatcgttcaggcggcgcgggcggtcagcacgtgaacaagacggacagcgccgtccgttttacgcatctgcctacgggcatagtggtcgcctgccagaacgagcgcagtcagattaaaaaccgcgcgattgccatgagcatgctaaaagcgcggctttatgaatactacaggcaggagaaagaaaaggagaacgctaaattttcacaggagaagaaagatatttcctggggacaccagataaggtcttatgtgtttcagccttatacaatggtaaaagattacaggacaaaggttgagaagggaaatattcaggctgtgatggacggggatatagacccctttatcgaggagtaccttaggttttcatggcgttctggaaatgtgcagcctgtttatgacgacgacgatgaagaagatgatgaataa

SEQ ID NO: 21432 - protein, 153 aa, Unknown
  Obtained from environmental sample
  DOMAIN (2)...(107): Peptidyl-tRNA hydrolase domain
  misc_feature (1)..(153): Xaa is any amino acid
MDIRPEDLRVDTYRSGGAGGQHVNKTDSAVRFTHLPTGIVVACQNERSQIKNRAIAMSMLKARLYEYYRQEKEKENAKFSQEKKDISWGHQIRSYVFQPYTMVKDYRTKVEKGNIQAVMDGDIDPFIEEYLRFSWRSGNVQPVYDDDDEEDDE

SEQ ID NO: 21433 - DNA, 801 bp, Unknown
  Obtained from environmental sample
  misc_feature (1)..(801): n is a, c, g, or t
atgtgcgtccggagagcgccgcttttattgactggatgctcagttccgaaggacaagcaattgtttcaaaaagctggattacaattaagtagaacaacgaaacgcaaactcacagatattttctttaaatatctgttcagcgcggtagccctcttttccgtattggcattgggggctattttgctttttgtttttgcgcagggaacgatgccgttctttacatctacttcttccggtatccgtctggtcgcacagcgaattgatgaaattacagttaacggcatcacctatatcgatcattcaacttttattgatattccaaaaaataccgaacttatttcgattcgttttccgtatgaagactcgtctgcagacgaatcgtctgacgacggaattgaaacgcttgatattaaagtaaatgaaacagaaaaagacccgcaaaaaaaattgacattttcgcataacggcgaagttaaaataacataccccgaaagttatgtgtatactgtcagctggccagctgcttttgcagcccttgaaaaaagaattcatgtaattattcccgaaccgccgtatagtttcgggaaatttcttacaggccttgagtggcatccgagcagggacaaggtgttcggtatctttcccatgatagtgngaaccattgttgcgagtttaggcgcgatcattttgggcgtgccaatcgcccatgtatgcgctctttttatggcggaattcctcgggcagaaaacagcgtccgtcgtgcgctcaggcgttgagcttcttggcgggatccctctgtag

SEQ ID NO: 21434 - protein, 266 aa, Unknown
  Obtained from environmental sample
  misc_feature (1)..(266): Xaa is any amino acid
MCVRRAPLLLTGCSVPKDKQLFQKAGLQLSRTTKRKLTDIFFKYLFSAVALFSVLALGAILLFVFAQGTMPFFTSTSSGIRLVAQRIDEITVNGITYIDHSTFIDIPKNTELISIRFPYEDSSADESSDDGIETLDIKVNETEKDPQKKLTFSHNGEVKITYPESYVYTVSWPAAFAALEKRIHVIIPEPPYSFGKFLTGLEWHPSRDKVFGIFPMIVXTIVASLGAIILGVPIAHVCALFMAEFLGQKTASVVRSGVELLGGIPL

SEQ ID NO: 21435 - DNA, 693 bp, Unknown
  Obtained from environmental sample
  misc_feature (1)..(693): n is a, c, g, or t
atgagcggtaaaaaaatagaagtaaacagccttgatctttattatggtgattttaaggcattgtcaaatatcaatttttcgcttgcgaagcaggatgtggcggcgttaatcggcccctcaggctgcggaaaatccacgtttatccgcatattgaaccggatgaacgatttaataccttcatgccgcataacaggcgaagtttttctggacggcaaggatattttcggcgcgatggatgttacggaactgcgcagccgggttgggatggtattccaaaaaccaaatccctttaacatgagcgtgtttgataatgtcgcgtacgggaaacggatgcagggattaaaaaacaagggacgcatcgcggacattgtggagatttccctgcgaaaagcggccctttggaacgaggtgaaagacaggctgaaaaagcccgctcaggcgctttccggcggacagcagcaaaggctgtgtatagcaagaacaatagcgatggagccggaaattattttgatggacgagcctacaagcgctcttgatccaatcgcgacggggcgcattgaggaacttataggagaattaaaaaaagattatagtataataattgttacacacgccatgcatcaggcttcaagggtcagtaataaaacggccttttttctttgggcgagtaatcgagttactcggccaatctga

SEQ ID NO: 21436 - protein, 230 aa, Unknown
  Obtained from environmental sample
  DOMAIN (31)...(219): ABC transporter
  misc_feature (1)..(230): Xaa is any amino acid
MSGKKIEVNSLDLYYGDFKALSNINFSLAKQDVAALIGPSGCGKSTFIRILNRMNDLIPSCRITGEVFLDGKDIFGAMDVTELRSRVGMVFQKPNPFNMSVFDNVAYGKRMQGLKNKGRIADIVEISLRKAALWNEVKDRLKKPAQALSGGQQQRLCIARTIAMEPEIILMDEPTSALDPIATGRIEELIGELKKDYSIIIVTHAMHQASRVSNKTAFFLWASNRVTRPI

SEQ ID NO: 21437 - DNA, 798 bp, Unknown
  Obtained from environmental sample
  misc_feature (1)..(798): n is a, c, g, or t
atgaaaagaatttcaagcgaaatggctacaatggacatgcagtattatcttaaaagaaaagatgaggcgatttcaaatgtgcaaaacaagatcggctcaaacagcaggcttaaccagttaagcgacgatcctgtttccgcttcccatgccgtgcgttacgagtcgtttctggcgcggcttgaccgttttgagacaaatacaaagttcgcgatggaacattttaataacactcatgattatcttaacgaagtaaactccatattgcaaaggatacgtgaacttgcggtaaccggtgcgcacggcacctattccgaagatcagcataaaattatggcggtagaggtaaacgagcttctaaaagaacttgtcgccatttccaataagactggcccggatacaaagcaggcgtttgcgggcgataaggtctttactgaacctttccgcattgtagagggaagggtagacggaggcgaagagtcaatgatagtccgcgttgaataccgcggagcgggagcgactcgcagagcggagataaacgaccgtacttttgtagagcttgatataggaggggatgaggcattttgggctgaaagaatgaaaattttttcatcgacagacgctacagattaccgcgtacagcaggcaggcgctttttttgttgacggagttgaaatacaagtaactcccggagacacgttacccgccattgtagcgaagattaatgattcgtctgctcctgtaaaagcgtatatagatccggatacaagagggctgttcggaaggactcggccgatctga

SEQ ID NO: 21438 - protein, 265 aa, Unknown
  Obtained from environmental sample
  DOMAIN (217)...(264): Flagellin hook IN motif
  misc_feature (1)..(265): Xaa is any amino acid
MKRISSEMATMDMQYYLKRKDEAISNVQNKIGSNSRLNQLSDDPVSASHAVRYESFLARLDRFETNTKFAMEHFNNTHDYLNEVNSILQRIRELAVTGAHGTYSEDQHKIMAVEVNELLKELVAISNKTGPDTKQAFAGDKVFTEPFRIVEGRVDGGEESMIVRVEYRGAGATRRAEINDRTFVELDIGGDEAFWAERMKIFSSTDATDYRVQQAGAFFVDGVEIQVTPGDTLPAIVAKINDSSAPVKAYIDPDTRGLFGRTRPI

SEQ ID NO: 21439 - DNA, 909 bp, Unknown
  Obtained from environmental sample
  misc_feature (1)..(909): n is a, c, g, or t
atgctttatgtcccgtataatctgattaccggaaactatctctccatcacgggcggaattttcatttttgccgcaatctccatcattctgcttgcgcggctgtggagattttttgtcaggaagtatatgcctaacgcgaggtttgtgttttacctgctgtcgtttctgaccctgtttttcgcgagcggatggttttgtcctataaggtttacgaggttttattccattgtgtcggcggccggatttatgtttgtcgtagccggtctattgttgctttttgaatctgttgaacaagagaaacccgaccgctccaagttgtttttagcttgcacgtgtttcgctttggccgtggggtgtcgtccgcacctgctctttgtgtcgcttattgtcccggttattttgtggaagcacaaattatggaaatacctgccgcttatagcggttccatatatcgctaccgctattccgatgtgcgtatataactacgtccgcttcggatcaatctttgattttgggcttaattacaatatgaccaatcttaatgtggccgcgtacggtctgttaaatcctataggtaaaatcataaatacatttaccgcttttatgtcgtacctgcttaccttgaacaactattcattctttttcccttatgttgaatgtatcccgcagcatagacgttttatttgggcgattgtgcgcttctatgataggggttacggaatgataaatttcccgattgtattttgtctgtttttatttttcaaaagtatcgtagccaagggagagagacccaagacatttcttatctcttctatctttttatctatcgcaaccattttgatatttatcaattcatggacgataggattttccggaagatatacgactcgtgccgctcggccgatctga

SEQ ID NO: 21440 - protein, 302 aa, Unknown
  Obtained from environmental sample
  misc_feature (1)..(302): Xaa is any amino acid
MLYVPYNLITGNYLSITGGIFIFAAISIILLARLWRFFVRKYMPNARFVFYLLSFLTLFFASGWFCPIRFTRFYSIVSAAGFMFVVAGLLLLFESVEQEKPDRSKLFLACTCFALAVGCRPHLLFVSLIVPVILWKHKLWKYLPLIAVPYIATAIPMCVYNYVRFGSIFDFGLNYNMTNLNVAAYGLLNPIGKIINTFTAFMSYLLTLNNYSFFFPYVECIPQHRRFIWAIVRFYDRGYGMINFPIVFCLFLFFKSIVAKGERPKTFLISSIFLSIATILIFINSWTIGFSGRYTTRAARPI

SEQ ID NO: 21441 - DNA, 912 bp, Unknown
  Obtained from environmental sample
  misc_feature (1)..(912): n is a, c, g, or t
ttgnnnngggtttatcggcgagagttcgggctcaagagcatctctaacagggtgttgctgatgggagctttggcggaaggcgaaagtgagttctttggcattttggaaagcgacgacacaaaatatatgagaaatgctttggagaaattgggcaaaggagctaatgcacatttcccaaacaaaaaagcagagctatttctgggcaacgcaggaactgcaatgcgttccctgactgcggttttatgccttggagatggcgaatatgttttgcaaggcgatttgagaatgcatgagcgtcctataaaggatttggtggatgccctgcgttctttgggagcaaatatagagtatttagggcatgacggttacccgccgctaaagataaaagcaaatggattaaatggcggaattgttcacataaaaggtaatatatccagccagtttttatctgcgcttttaatagcagcaccgtattgcaaaaagcctttggagataattgtggacggcgagctgatatcaaaaccttatgtgtacatgacaatacgcttgatggataaatttggaataaaggttgagaataacgattataaaagttttaagatagaaaatggagtttataaagcccaaactctcaaaatagagggagacgcttcttctgcgagttatttttgggcagcagtggcaataacaaaaggggatgtgattattcacggcgttgaagaaaatagtttacaaggcgatgtgaaatttttggatgtgatanaagagatgggagaggagctaaccggcataaccgtggacgccacgctcttcccggacgcagcgatgactctctgccctcttgccctttacgcaaaaaggcaaaacaaaaatcactggcatagccagttggaaagtaaaggaaaccgatag

SEQ ID NO: 21442 - protein, 303 aa, Unknown
  Obtained from environmental sample
  DOMAIN (8)...(301): EPSP synthase (3-phosphoshikimate 1-carboxyvinyltransferase)
  misc_feature (1)..(303): Xaa is any amino acid
MXXVYRREFGLKSISNRVLLMGALAEGESEFFGILESDDTKYMRNALEKLGKGANAHFPNKKAELFLGNAGTAMRSLTAVLCLGDGEYVLQGDLRMHERPIKDLVDALRSLGANIEYLGHDGYPPLKIKANGLNGGIVHIKGNISSQFLSALLIAAPYCKKPLEIIVDGELISKPYVYMTIRLMDKFGIKVENNDYKSFKIENGVYKAQTLKIEGDASSASYFWAAVAITKGDVIIHGVEENSLQGDVKFLDVIXEMGEELTGITVDATLFPDAAMTLCPLALYAKRQNKNHWHSQLESKGNR

SEQ ID NO: 21443 - DNA, 333 bp, Unknown
  Obtained from environmental sample
  misc_feature (1)..(333): n is a, c, g, or t
atgccgcagtggatagccagagagtacctcgcccgccgcggaacagccaagttccgccccgaacagctggttccggccagatgccccctcctcggctacgccttcgccactatgcaggtcgaggggacgcacctacaacacgacttcctgcgggtagacgaacagcccgatgtgggccaagacggctacgacgccggggcgaagatactcaaaacgttcttcgacgaggaactgaagaagttcctggtgccggaactgaacgaggtcgggcggaagatcatcgagtgctgtttagacaacgggacggttaaggattatgaggcgctgttatga

SEQ ID NO: 21444 - protein, 110 aa, Unknown
  Obtained from environmental sample
  misc_feature (1)..(110): Xaa is any amino acid
MPQWIAREYLARRGTAKFRPEQLVPARCPLLGYAFATMQVEGTHLQHDFLRVDEQPDVGQDGYDAGAKILKTFFDEELKKFLVPELNEVGRKIIECCLDNGTVKDYEALL

SEQ ID NO: 21445 - DNA, 768 bp, Unknown
  Obtained from environmental sample
  misc_feature (1)..(768): n is a, c, g, or t
ttgacatcttccgacaaaacagccggaaaggtaagcaaggccgcggctgaattgtacggcatcaacgaaggagtgcttgtctcctccggcggcggcgacaatatgatgagcgcgataggcacgggaatagtgcgcgacggttatcttacgatgagcttaggcacttccgggactcttttcggtttttcaaaaaagccggtaattgatcctacgggaaacctcgccgccttctgttcatcttccggcggatggcttccgcttctttgcaccatgaactgcaccgtcgcgagcgaagagttccgcaaacttatggaattggacgtaaaggcgtttgacagggaagcggaaaaatcccccataggcgcggacggcgttgtaatactgcccttctttaacggagagaggactcccaacctgcccgaaggcagagcgagcgttaacggcataactgccgccaactttaagcgcgaaaatttagcgcgcgccgcgcttgagtccgccatcttcgggatgaggatagggcttgacggttttaaggcgctcggcttcaaaccgaaagaaatacggcttacgggcggcggggcgaaaagcccgctttggcagaatattgcggctaacgtgatgaacctgccgatacgcacccccacaagttcggaagccgcggcgatagggagcgcgattcaggcgctttggtgtctgcagaggaattcaaactgggccggaaagaagccactattgaggaattggcggacgagcatgttgcgttag

SEQ ID NO: 21446 - protein, 255 aa, Unknown
  Obtained from environmental sample
  DOMAIN (43)...(253): FGGY family of carbohydrate kinases, C-terminal domain
  misc_feature (1)..(255): Xaa is any amino acid
MTSSDKTAGKVSKAAAELYGINEGVLVSSGGGDNMMSAIGTGIVRDGYLTMSLGTSGTLFGFSKKPVIDPTGNLAAFCSSSGGWLPLLCTMNCTVASEEFRKLMELDVKAFDREAEKSPIGADGVVILPFFNGERTPNLPEGRASVNGITAANFKRENLARAALESAIFGMRIGLDGFKALGFKPKEIRLTGGGAKSPLWQNIAANVMNLPIRTPTSSEAAAIGSAIQALWCLQRNSNWAGKKPLLRNWRTSMLR

SEQ ID NO: 21447 - DNA, 786 bp, Unknown
  Obtained from environmental sample
  misc_feature (1)..(786): n is a, c, g, or t
gtgcttgcacccaacggcaaggtgatcttggcgccgtgctacgtgccccacatagggatttacaacccaattgcaaatacttatacgaacggcccggcgcacgggctgaaaatagagggagaagatcaagcattccaaggcggcgtgcttgcacccaacggcaaggtgatcttggcgccggccagctctcaatacatagggatctacgaccccgttgcaaatacttatgcgaacggcccggcgcacggtcagggaatttatgcattccaacaagccgtccttgcccccaacggcaagataattctagtaccttacagatcgccatacataggcatctacgaccccgttgcaaatacttatgcgaacggcccggcgcacggtcagggaaaagcagctttcgaaggcggcgtgcttgcccccaacggcaaggtgatcttggtgccgcgcggctctgtcaacatagggatctacgaccccgttgcaaatacttatgcgaacggcccggcggcgaacgggttcaatggcggcgtgcttgtacccaacggcaagataattctagtaccttacggctcgccatacataggcatctacgaccccgttgcaaatacttatgcgaacggcccggcgcacggtcagggaaaagcagctttcgaaggcggcgtgcttgcccccaacggcagggttatcctggttccgtccgactcggccaacatagggatcctgtcgctcccaggcatggaaaccagcctggagctttgcatgagcccgttcatcaacaagtactga

SEQ ID NO: 21448 - protein, 261 aa, Unknown
  Obtained from environmental sample
  misc_feature (1)..(261): Xaa is any amino acid
MLAPNGKVILAPCYVPHIGIYNPIANTYTNGPAHGLKIEGEDQAFQGGVLAPNGKVILAPASSQYIGIYDPVANTYANGPAHGQGIYAFQQAVLAPNGKIILVPYRSPYIGIYDPVANTYANGPAHGQGKAAFEGGVLAPNGKVILVPRGSVNIGIYDPVANTYANGPAANGFNGGVLVPNGKIILVPYGSPYIGIYDPVANTYANGPAHGQGKAAFEGGVLAPNGRVILVPSDSANIGILSLPGMETSLELCMSPFINKY

SEQ ID NO: 21449 - DNA, 366 bp, Unknown
  Obtained from environmental sample
  misc_feature (1)..(366): n is a, c, g, or t
atgacggcgcaggaagcatttaaagagttatacgacattgtagtaagattacgcggtcccggcggctgtccgtgggacattgagcaaacgccttcctcgcttagaggctcgttagttgaagaaacctacgaatgccttgaggctatcgatgaaaaagattcggctcacatagccgaagaacttggagatttatttttactcgcaaccatgattagctacatgcacgaacaggaaggaaaattttccgtagcggacgcgttattaaatacaagcaagaaattaattcgccgccacccgcatgttttcggcgaggtaaaagtaaaagacagcgccgaagttttaaacaactgggcggagaaaaagtaa

SEQ ID NO: 21450 - protein, 121 aa, Unknown
  Obtained from environmental sample
  DOMAIN (29)...(102): MazG nucleotide pyrophosphohydrolase domain
  misc_feature (1)..(121): Xaa is any amino acid
MTAQEAFKELYDIVVRLRGPGGCPWDIEQTPSSLRGSLVEETYECLEAIDEKDSAHIAEELGDLFLLATMISYMHEQEGKFSVADALLNTSKKLIRRHPHVFGEVKVKDSAEVLNNWAEKK

SEQ ID NO: 21451 - DNA, 603 bp, Unknown
  Obtained from environmental sample
  misc_feature (1)..(603): n is a, c, g, or t
ttggcaatcccggcgcgaaatattcacgtaacagacacaatgccggacgtatgcttgcgcaggcgcttccccttttatgactctctttcatggcaaaaaaaatacaaagggctgtacgcttcacatgatgaaaaacattttcttatgcccgaaacatatatgaatttatccggcgaatccgtgcaagccgccgccgcttttttcaaaattgaagtaaaggaaattatcgtaattcatgatgaattggaactgccgctgggcgttatttctttaaagtattcaggcgggcttggcggacacaacgggcttcgttccatgaaaaaaagttttaacagcgcggatttttggcgcataaggataggaataggtcgccccgattcaagactccccggcgagggtgggcatgaaggaagcggggagggcgtttacgattgggttttgtcggatttttcaaagaatgaacaagagacgcttatgcccgctctcgacgcgggcgcgaatcttttaatgaaaacttttgaaaatgatccagaaactttattaaaagaatgggcgaaaaagaaaataataatcaataaaccggaaggcggtgaacaaaaatga

SEQ ID NO: 21452 - protein, 200 aa, Unknown
  Obtained from environmental sample
  DOMAIN (19)...(185): Peptidyl-tRNA hydrolase
  misc_feature (1)..(200): Xaa is any amino acid
MAIPARNIHVTDTMPDVCLRRRFPFYDSLSWQKKYKGLYASHDEKHFLMPETYMNLSGESVQAAAAFFKIEVKEIIVIHDELELPLGVISLKYSGGLGGHNGLRSMKKSFNSADFWRIRIGIGRPDSRLPGEGGHEGSGEGVYDWVLSDFSKNEQETLMPALDAGANLLMKTFENDPETLLKEWAKKKIIINKPEGGEQK

SEQ ID NO: 21453 - DNA, 765 bp, Unknown
  Obtained from environmental sample
  misc_feature (1)..(765): n is a, c, g, or t
ttgagcgcagcaaaaacaattaaagcccagaatctgggcgacgggcttttcgcgcaaattacaaccaacaaaggggacatcattgtaaaacttgaataccaacgcacacctcttacggtttgtaattttgtcgctttggcggaaggtaaaatggctaccttgaaaggcaaacgtttttatgacggtttgatttttcatcgcgttatttcaaaggcaaacggagacgaacaggattttatgatacagggcggatgtccgcagggaaacggcaggggagggccgggttatgaattccccgatgaaatagttccggctttaaagcatgataaacccggagttttaagcatggcaaacgcgggtcccggtacaaacggcagccagttttttattactatcgttcctactcctcatttggacggcaaacatacggtttttggttatgtcattcaggggcagaatattgtaaacaggattaaacaaggcgacaagattcaaaaagttaccataatacgcaacggagcggacgcaaacgcgtttaaagccgatcaggaaaattttgataaattactggcgcaaaaaaaatccgcggaagagagtagactgcaaagtcaacgtcagagcgatatcgctaaaataaagaaagattttcccgctgccaaacaaacaaaatcaggcatttattacattatcgaanaagaaggaacgggcgagaaacccgcgcgcggcaagacggtaagggttcattatacgggtaaactgctttag

SEQ ID NO: 21454 - protein, 254 aa, Unknown
  Obtained from environmental sample
  DOMAIN (17)...(175): Cyclophilin type peptidyl-prolyl cis-trans isomerase/CLD
  misc_feature (1)..(254): Xaa is any amino acid
MSAAKTIKAQNLGDGLFAQITTNKGDIIVKLEYQRTPLTVCNFVALAEGKMATLKGKRFYDGLIFHRVISKANGDEQDFMIQGGCPQGNGRGGPGYEFPDEIVPALKHDKPGVLSMANAGPGTNGSQFFITIVPTPHLDGKHTVFGYVIQGQNIVNRIKQGDKIQKVTIIRNGADANAFKADQENFDKLLAQKKSAEESRLQSQRQSDIAKIKKDFPAAKQTKSGIYYIIEXEGTGEKPARGKTVRVHYTGKLL

SEQ ID NO: 21455 - DNA, 903 bp, Unknown
  Obtained from environmental sample
  misc_feature (1)..(903): n is a, c, g, or t
gtgtccgcaaaagacctggttcacatcgtagcgaggggcgagacagtttattccatctcacggcggtacagtgtgagccaggatgctctcatgcgccgcaacgatatttcagacccttcaaaattgtttgagggaatgaagctcgttattccctccgccgtagaaattccggccggcatggcggccggaatagccgccggcacggccgccggcacggccgccgcgcccgctaaatccgtatattttgagtatactgtactgccaaacgacacattgtacagcatcgcccgctcccagagcgtgctgtttaaggcgctttgcgacataaacaatttccccaataactataaggtcaaagccggggaaaaaataaaaataccgaaacccgcacccgcgccgatcatgatacagcccccggcgccggtcatcgcgcagcacccgatgcagcctattgcgcaaaacaacaaccctgcgccggcaacgccttcttgggcgtcgcttgaacggccgtcaaacgcgcggccggttccaaaaaacccgtcaatccgctggcctgtttccgcaaaggaaattttttatatgaacggcaacataggggtgcttgtttccggtgaagagtcggaatcggtcaaaagccttacaaaaggaaccgtcgtccacgccagcccctggcggggttatggcaatgtcgcgattattgagggagacggaggctacaggtatttatacggagcctgcaaaaccctctcggtcagaaaaggggacaacatcgagccgggaacagaattgggaaaattgggaatctatcccgcgtccggcaaaccggagctggttttttatgtatcacataacgggtcgccggttgatcccgtaaaacgcccagattataaggagaaaaaatga

SEQ ID NO: 21456 - protein, 300 aa, Unknown
  Obtained from environmental sample
  DOMAIN (195)...(290): Peptidase family M23
  misc_feature (1)..(300): Xaa is any amino acid
MSAKDLVHIVARGETVYSISRRYSVSQDALMRRNDISDPSKLFEGMKLVIPSAVEIPAGMAAGIAAGTAAGTAAAPAKSVYFEYTVLPNDTLYSIARSQSVLFKALCDINNFPNNYKVKAGEKIKIPKPAPAPIMIQPPAPVIAQHPMQPIAQNNNPAPATPSWASLERPSNARPVPKNPSIRWPVSAKEIFYMNGNIGVLVSGEESESVKSLTKGTVVHASPWRGYGNVAIIEGDGGYRYLYGACKTLSVRKGDNIEPGTELGKLGIYPASGKPELVFYVSHNGSPVDPVKRPDYKEKK

SEQ ID NO: 21457 - DNA, 798 bp, Unknown
  Obtained from environmental sample
  misc_feature (1)..(798): n is a, c, g, or t
ttgaaaacagcgttgatagcgctcataggaaaaaccatgctaacaatcaaaaacctttcggcgcgaatagaggacaaccaagttttgaaaggggttgacctagaagttaagccgggcgagatacacgccatcatgggcccaaatggttcgggcaaatccactctcggcaaggtgcttgcgggacatcctgcatttgaggtgacgggcggagaggcaattttccagggcaaaaacctgctagaaatgccagcggacgagagggcgcgggcggggatatttcttggcttccaaaatccaatcgaagtccctggcgtttcaaacagccaattcatgcgccttgcttacaacaaaaaggcagagggccaaggacaggacgaacttgaccccttggaatttgacgacttcattcaagaaaagctaaaactggtaaaaatggattctgcctttctaagccgcagcgtcaacgagggcttttctggcggcgagaggaagcgcaacgaaatactccagatgtgcgtcctcaacccaaaactggcgatcctagatgaattggactctggcctagacatagacgcacttagggtgctgggagaagcggtcatggcgctgtggcgcccagacaagtccatgatagtgataacgcacttcccaaggatattggagaccatacagccgcacagcatccatgtgctattcaatggcaggttcgtaaagcacggcggcaaggaactggctctagaactggagaccaagggctacgactggatacagcaagaaattggcgttggggcgcgttga

SEQ ID NO: 21458 - protein, 265 aa, Unknown
  Obtained from environmental sample
  DOMAIN (39)...(234): ABC transporter
  misc_feature (1)..(265): Xaa is any amino acid
MKTALIALIGKTMLTIKNLSARIEDNQVLKGVDLEVKPGEIHAIMGPNGSGKSTLGKVLAGHPAFEVTGGEAIFQGKNLLEMPADERARAGIFLGFQNPIEVPGVSNSQFMRLAYNKKAEGQGQDELDPLEFDDFIQEKLKLVKMDSAFLSRSVNEGFSGGERKRNEILQMCVLNPKLAILDELDSGLDIDALRVLGEAVMALWRPDKSMIVITHFPRILETIQPHSIHVLFNGRFVKHGGKELALELETKGYDWIQQEIGVGAR

SEQ ID NO: 21459 - DNA, 828 bp, Unknown
  Obtained from environmental sample
  misc_feature (1)..(828): n is a, c, g, or t
ttgaattgcaaatttatttgccaaggagagcttatgcgtctgttaattcacaagagttacgaaaacgtctgccgttggactacgggctatattatgaaaagaataagcgactntaagccaggccctgaaaagccttttgtgctggggcttccaactggagcaagccctttgggcgtgtacaaaaaacttatccccatctgtagcgagaaatggctttctttctccaatgtgattaccttcaacatggacgagtaccttgggcttcccgctgatcatcctcaaagttacaagcgctttatgaaggagaatttttttgacgcgattgatattaagggcgagaacacacacatccttgacggtatggcgcctgatccggaagcggaatgtcgcgcttacgaggaagcaataaaggccgtcggagggatcgagctttttctgggcgggaccggcaacaacgggcatatcgcgtttaacgagcctggttcttctttcagttccaggacaagggttgtaacgcttaccgatgatacccgcaaagccaacgcccgttttttcgataatgatcccgcgaaagtgccggaacgcgctcttaccgtaggcatcggaaccgtcatggatgccagggaggtgcttgtcattgtttcagggcgtcaaaaagcaaaagcgctccaggccgtcgttgaagggaatgtcagtgagcagtgccccctttcctgccttaaaacacatgagaaagcgattatcgtctgtgacgaagaagcggcggaagaattgaagttcggcacagtccggcattttcaggaaattgagaaggcagaaattaagtag

SEQ ID NO: 21460 - protein, 275 aa, Unknown
  Obtained from environmental sample
  DOMAIN (26)...(261): Glucosamine-6-phosphate isomerases/6-phosphogluconolactonase
  misc_feature (1)..(275): Xaa is any amino acid
MNCKFICQGELMRLLIHKSYENVCRWTTGYIMKRISDXKPGPEKPFVLGLPTGASPLGVYKKLIPICSEKWLSFSNVITFNMDEYLGLPADHPQSYKRFMKENFFDAIDIKGENTHILDGMAPDPEAECRAYEEAIKAVGGIELFLGGTGNNGHIAFNEPGSSFSSRTRVVTLTDDTRKANARFFDNDPAKVPERALTVGIGTVMDAREVLVIVSGRQKAKALQAVVEGNVSEQCPLSCLKTHEKAIIVCDEEAAEELKFGTVRHFQEIEKAEIK

SEQ ID NO: 21461 - DNA, 915 bp, Unknown
  Obtained from environmental sample
  misc_feature (1)..(915): n is a, c, g, or t
atgtttggggcaactatccttgtccccatccttacgggccttgatccggctgctgcgctttttacggcggggacagggactctcctctatatccttcttaccgaggcgaaggttccagcttttcttggttcctcatttgcttttattgcgccgcttatttccatttccggcgcttacggggtgccgtatgcgatgggcggcgcaattgccgccggggttttttactgtttggtgggccaaattataagatttgccggaacgggctggctggataaggccctgcctccggttgtgattggctccgttattgtagtaatcggccttaacctggctcccacggcgatggggatggccatgaatggcgccgacgggaattacagcctggtatccctttcaatcgccgcggttactctgttggttacggtgatagtaagcatcttctttaagggatttttcaacgcaattcccattcttatcggccttgtggtaggatacctttttgcccttataatgggttttatatttcccgcttacgccgttatcaatttccaggtagttgaagaggcgtcatggttcgggcttccctcattccagcttcccaaattccatatagttccggttcttacttttgttattgtgtctcttgccaccatctgcgagcatctgggggacacgcttgtaacaagcaaggttgtgggccaggatttttacaagaacccagggcttcacaggactttggccggagacgggcttgccaccgcctgggcggcgttgtggggcgggcctccgaacaccacctatggagaaaacattggcgtcatggccattaccagggtttttttccgtttgggtaaacggcggagccccagtaatcgcggtattgctttcgttcctcaagaaaattcggcgcactga

SEQ ID NO: 21462 - protein, 304 aa, Unknown
  Obtained from environmental sample
  DOMAIN (1)...(300): Permease family
  misc_feature (1)..(304): Xaa is any amino acid
MFGATILVPILTGLDPAAALFTAGTGTLLYILLTEAKVPAFLGSSFAFIAPLISISGAYGVPYAMGGAIAAGVFYCLVGQIIRFAGTGWLDKALPPVVIGSVIVVIGLNLAPTAMGMAMNGADGNYSLVSLSIAAVTLLVTVIVSIFFKGFFNAIPILIGLVVGYLFALIMGFIFPAYAVINFQVVEEASWFGLPSFQLPKFHIVPVLTFVIVSLATICEHLGDTLVTSKVVGQDFYKNPGLHRTLAGDGLATAWAALWGGPPNTTYGENIGVMAITRVFFRLGKRRSPSNRGIAFVPQENSAH

SEQ ID NO: 21463 - DNA, 678 bp, Unknown
  Obtained from environmental sample
  misc_feature (1)..(678): n is a, c, g, or t
atgcgggatattcaagattttgattcgattatgatacggctggcatcgccggaaatgatcaagtcgtggtcttacggcgaagtaaaaaagcctgagacaataaactaccggactttacggccggaaaaagaagggcttttctgtgaaaggatcttcggtactaccaaagagtgggagtgttactgcggaaaatttaaatcgatccgttataagggagtcatctgcgaccgctgcggcgttgaagttacccactttaaggtacgccgtgaaaggatgggccatattgaattggcggctcctgtttcgcatatctggtactaccgttctgttccaagcagaatgggactccttctggacttaacaaccaacgccctgcgctccgttctgtactatgaaaaatacatagtaattgattccggcgataccagccttaaaaaatgccagcttctttccgaagaagaatacaacgacgcgtatgaacgtttcggcggcgcgttcaacgccggaatgggcgcggaagcaatcagcaccctgcttganaaccttgaccttgatcaaatggcggcggagcttcgcgccaagatgatcgaaaaaggcccaaaaagcgacaagcgccttttaaagcgcatcgacatcgttgaaaatttcccgcattcggaaaacagccccactggatga

SEQ ID NO: 21464 - protein, 225 aa, Unknown
  Obtained from environmental sample
  DOMAIN (4)...(225): RNA polymerase Rpb1, domain 1
  misc_feature (1)..(225): Xaa is any amino acid
MRDIQDFDSIMIRLASPEMIKSWSYGEVKKPETINYRTLRPEKEGLFCERIFGTTKEWECYCGKFKSIRYKGVICDRCGVEVTHFKVRRERMGHIELAAPVSHIWYYRSVPSRMGLLLDLTTNALRSVLYYEKYIVIDSGDTSLKKCQLLSEEEYNDAYERFGGAFNAGMGAEAISTLLXNLDLDQMAAELRAKMIEKGPKSDKRLLKRIDIVENFPHSENSPTG

SEQ ID NO: 21465 - DNA, 804 bp, Unknown
  Obtained from environmental sample
  misc_feature (1)..(804): n is a, c, g, or t
ttggacaaagcgggccatgtcgtgtctgcggacgaaaaaggtataattgtaacatccgcgggaaggctcgtttttaacggcgagatgcccgaggatcttccctatattaactatgagcttaaagacaaggaattacgcgcccttattgagcatgtattcaaggagaaaggctcatgggttacagtacaaatgctggacgcgataaaagccaccggctaccgttatgcgacagtattcggcgcgactatcggcgtggatgatattgttgtcccgaaagagaaaaccgaaatgatcaacgacgccaataaagccgttgagggaatacaaaaagactggaggcgcggccttattacccaggaagagcgctacaaccgcgtcgtggaagtttggacaagaacaaacgaagagcttacaagcaaaacaatgcagacgctggaaatggacagggacggttttaactcaatctacatgatggcaaactcaggagcgcgcggaagccgcaaccagatccgccagcttgcgggtatgcgcggacttatggcaaaaccatctggggacattatcgagcttccgatacgttcaaactttaaagaggggctttcggttatcgaattctttatttcaacaaacggcgcgcgcaaaggtctcgcggataccgcccttaaaaccgcggaagcgggctaccttacccgccgccttgtagacattgcgcaggatatggttgtaaacgaagaagactgcggcactatcaacggtattgcctactcggcggtaaacagggcgaagaaattgtcgagcctttaa

SEQ ID NO: 21466 - protein, 267 aa, Unknown
  Obtained from environmental sample
  DOMAIN (1)...(88): RNA polymerase Rpb1, domain 3
  misc_feature (1)..(267): Xaa is any amino acid
MDKAGHVVSADEKGIIVTSAGRLVFNGEMPEDLPYINYELKDKELRALIEHVFKEKGSWVTVQMLDAIKATGYRYATVFGATIGVDDIVVPKEKTEMINDANKAVEGIQKDWRRGLITQEERYNRVVEVWTRTNEELTSKTMQTLEMDRDGFNSIYMMANSGARGSRNQIRQLAGMRGLMAKPSGDIIELPIRSNFKEGLSVIEFFISTNGARKGLADTALKTAEAGYLTRRLVDIAQDMVVNEEDCGTINGIAYSAVNRAKKLSSL

SEQ ID NO: 21467 - DNA, 903 bp, Unknown
  Obtained from environmental sample
  misc_feature (1)..(903): n is a, c, g, or t
atgccagaacaggatgctacagttcgcgctgccaatcacgaagaggtaaatcttggactgagcgtaatacaggcaagattggaatcaaagcgctgtctggattgcgtagacccgacatgtatcacaggctgtccggtaaacataaacataccgaagtttatcaaatacattgaagctgggcaagttctcgacgcaggcagaacattgaaagaaagcaacgctttgccggcggtatgcggacgtgtatgtccgcaggaagtacagtgcgaggcgaaatgcttttatgtgcagaagttaaagaaacctgcagttgcgataggcaacctcgaacgttttgtggcagatttcgagcgcgagttcaacaaagtatcggtgccaaagatagcaaaaaagccaaatggcattaaagtagcggtggtcggttctggacctgccgggcttgccgttgccggcgacatggcaaaatatggttataatgttaccgtttttgaagcgttgcacgagattggcggcgttcttaaatacggaatacccgaatttcgcttaccaaacatcatcgttgatgttgaaatagataatcttcgcaaaatgggagttcatttcgaaacaaactttattgttggcaaaaccagcgatttcgatacactgcgcgctgaaggctacaaagcgtttttcataggaagcggcgccggattgcctaattttatgaatatacccggcgaaaactttacaggcgtattctcatcaaacgaatatctcacgcgggtaaaccttatgggcgcatcgcgtcccgaatgtgatactcccgtgcttaaaggacgtaatgtagcagtgattggcgaaggaaatactgctatggacagcgtccgcaccgctaaacggctcggaacaaaacgcgcatga

SEQ ID NO: 21468 - protein, 300 aa, Unknown
  Obtained from environmental sample
  DOMAIN (136)...(300): Pyridine nucleotide-disulphide oxidoreductase
  misc_feature (1)..(300): Xaa is any amino acid
MPEQDATVRAANHEEVNLGLSVIQARLESKRCLDCVDPTCITGCPVNINIPKFIKYIEAGQVLDAGRTLKESNALPAVCGRVCPQEVQCEAKCFYVQKLKKPAVAIGNLERFVADFEREFNKVSVPKIAKKPNGIKVAVVGSGPAGLAVAGDMAKYGYNVTVFEALHEIGGVLKYGIPEFRLPNIIVDVEIDNLRKMGVHFETNFIVGKTSDFDTLRAEGYKAFFIGSGAGLPNFMNIPGENFTGVFSSNEYLTRVNLMGASRPECDTPVLKGRNVAVIGEGNTAMDSVRTAKRLGTKRA

SEQ ID NO: 21469 - DNA, 804 bp, Unknown
  Obtained from environmental sample
  misc_feature (1)..(804): n is a, c, g, or t
ttgtgcagcataacggcggatatgcgggaagaagcggttaaaatcgcaaaacgggacattcaggtgattgcggttacgtctgcggacttggacggcatttttgacttgacgacaaaaataaaggagggcggttttaacgatttaataatggagtttcaaacccattcactttctgaaagttttcaaacaaactcaatcgcaagaaaagccgcgcttaaaaagagcattaaagccctgggttacgcgacgcttaaatttattaacaccggaaacgcggcggatgacgttgtagccgccattacggaaattgataaatttggcggaatgatcgcgcttccaagttttgatcccgcgcaacttatgcctcttcttacgttacgccaaaacatttataccgacccgcaaaaaccaattcaagtggagcctaaactttacgcgataggggaacctgacaggaaatcgccaatctttgtaacgacaaatttttcattaacttactttttggtatcaggagagattgagaacagcggtatttcagcgtggcttgttatccccgaatgtgaaggctttagcgtactgacagcgtgggcggcgggaaaattttcaggctcttcaatcgccaagtttattaaagagataaacatagaaaaccagacagatacgaaacaaattgttatccccggttatgttgcgcaaatatcaggcgagcttgaagaaaatatgccgggttttaaagttcttgtcggtcctggcgaagccggggatttggaaggctttattaaaaatgtgttgtttaaaaaataa

SEQ ID NO: 21470 - protein, 267 aa, Unknown
  Obtained from environmental sample
  DOMAIN (1)...(260): CO dehydrogenase/acetyl-CoA synthase delta subunit
  misc_feature (1)..(267): Xaa is any amino acid
MCSITADMREEAVKIAKRDIQVIAVTSADLDGIFDLTTKIKEGGFNDLIMEFQTHSLSESFQTNSIARKAALKKSIKALGYATLKFINTGNAADDVVAAITEIDKFGGMIALPSFDPAQLMPLLTLRQNIYTDPQKPIQVEPKLYAIGEPDRKSPIFVTTNFSLTYFLVSGEIENSGISAWLVIPECEGFSVLTAWAAGKFSGSSIAKFIKEINIENQTDTKQIVIPGYVAQISGELEENMPGFKVLVGPGEAGDLEGFIKNVLFKK

SEQ ID NO: 21471 - DNA, 783 bp, Unknown
  Obtained from environmental sample
  misc_feature (1)..(783): n is a, c, g, or t
atgaaagaagacggcactataggcatttggacttcccgctcctacgacgacccgctgattacgacttatgccgcgcacttccttacagaagcgcgtaacgctaattattatgtttcgcccgctatgatggaaaaactgcttaacgcgtgccgaaacatcgcttcaaatcccggaataagcggttacgattttaacacccgcgcttacgcgatttatattcttaccagaaacgaaattgtcaccactcagcttgttgaatcgctcaaaagggacatgaaccgctttgatgaatcgcagacggggattgccggcctttaccttgccggaacttacgcgctgttgcaaaaaacaaacgacgccgccctgcttcttggaaaaatcaagcgcgcgatggcgaaagacagcagtttccgttacattgacgaacttatgtatcattcgatatacctcaatattttatcgaggcatttcccgcagcgtttgcgcgacgtatcggagtccttgttagttgacatggcagggcagatggaaagacagtcctacaccagtatttccgccaaccacgcgcttatggcgattgacgcctatctgaaagccgttccatccgcggaaacaggcagatataccatacaggaagtttcaaaagacaaccagcgtaaagaattaaaggcagtgggaacaactttattcagcgccaacttctccgcgaacgcggcaaaaatcgcccttgaaaacaaagacaaccttnnaactgtttatcagataacggcccgccggttttga

SEQ ID NO: 21472 - protein, 260 aa, Unknown
  Obtained from environmental sample
  misc_feature (1)..(260): Xaa is any amino acid
MKEDGTIGIWTSRSYDDPLITTYAAHFLTEARNANYYVSPAMMEKLLNACRNIASNPGISGYDFNTRAYAIYILTRNEIVTTQLVESLKRDMNRFDESQTGIAGLYLAGTYALLQKTNDAALLLGKIKRAMAKDSSFRYIDELMYHSIYLNILSRHFPQRLRDVSESLLVDMAGQMERQSYTSISANHALMAIDAYLKAVPSAETGRYTIQEVSKDNQRKELKAVGTTLFSANFSANAAKIALENKDNLXTVYQITARRF

SEQ ID NO: 21473 - DNA, 939 bp, Unknown
  Obtained from environmental sample
  misc_feature (1)..(939): n is a, c, g, or t
atgatggagaggtcgtctgattccgacgaactggaagtcgacaggctgatcctttaccgcaaccacatgaaggacgacggcatgcgcatgtcccaggtttaccgttgggacaggatttccgggggctgcaccagtttggtcgaagccttcaccgacgcgacttatacccagttcctgccgggctgggtagaccatttggcggacggcaattccgtaaacagcccctcaaagctgctgccggcgcatgaagccgcggtactccagtcgttcggcatcctttcggtcgccgttataccgatacatatcaataatattttttggggcttcgcgcttttcggcgacaccaaaagcgagcgtcattttgaggatgacgtcattgaaatgatgcgctctgctgcattcctgttcgccaacgccttcatccgcgccgaagtggagtatgacgcgcttaccggcatttacaacaggcgttactttgacgagactatggagcgccttataaactccctgtcccgatcgcagagcctgttaagcatgctgatgatcgacattgacttttttaagcgctacaacgacacctacggccacgttgaaggcgacagatgcctgaaagccgtcgcgcaaaccctcgcgcagtgcgtaacaagggcggatgattttgtcgcgaggtacggcggggaggaatttatcgtcgttctgcccaatacggacgaacatggcgcgcgcctgatcgccgagaagatgctcgaaaatatacggaacctgcatctgccgcatgagaaaagcgacgcggcgaaatatgtcaccgtctctatcggaggcacgacaggtaaaattctgcatccgcctaactcgggcgatcttgtaaaaaaggccgatgagatgatgtataaatcaaaacaggaaggccggcacagattttctttcggcttgctgtaa

SEQ ID NO: 21474 - protein, 312 aa, Unknown
  Obtained from environmental sample
  DOMAIN (141)...(306): GGDEF domain
  misc_feature (1)..(312): Xaa is any amino acid
MMERSSDSDELEVDRLILYRNHMKDDGMRMSQVYRWDRISGGCTSLVEAFTDATYTQFLPGWVDHLADGNSVNSPSKLLPAHEAAVLQSFGILSVAVIPIHINNIFWGFALFGDTKSERHFEDDVIEMMRSAAFLFANAFIRAEVEYDALTGIYNRRYFDETMERLINSLSRSQSLLSMLMIDIDFFKRYNDTYGHVEGDRCLKAVAQTLAQCVTRADDFVARYGGEEFIVVLPNTDEHGARLIAEKMLENIRNLHLPHEKSDAAKYVTVSIGGTTGKILHPPNSGDLVKKADEMMYKSKQEGRHRFSFGLL

SEQ ID NO: 21475 - DNA, 378 bp, Unknown
  Obtained from environmental sample
  misc_feature (1)..(378): n is a, c, g, or t
atgtttacttttatcccgtgcgttgccggttgcggccgtcctgcaattagcggttccaatatctgttttgtgcatcaggcaaaccaggatcaggagacacagcggcttgtcgcgcatattaccgggaacaaaaccataaagaatctgtgcgccgcgggggtggggtttaacggcgtggatttttcccagcgccatttttacggctgtaatttcagggaggcgcatttttccaaatgtgtgttttccggggcccttatgagaatgtgttttttcgactttgccgactttaccgattgcgacttttccaaatcggatatgcagtttatgtcgtttggcggcgcgcgaatcagcgactgttgtttgaaggatcggaattag

SEQ ID NO: 21476 - protein, 125 aa, Unknown
  Obtained from environmental sample
  DOMAIN (64)...(103): Pentapeptide repeats (8 copies)
  misc_feature (1)..(125): Xaa is any amino acid
MFTFIPCVAGCGRPAISGSNICFVHQANQDQETQRLVAHITGNKTIKNLCAAGVGFNGVDFSQRHFYGCNFREAHFSKCVFSGALMRMCFFDFADFTDCDFSKSDMQFMSFGGARISDCCLKDRN

SEQ ID NO: 21477 - DNA, 513 bp, Unknown
  Obtained from environmental sample
  misc_feature (1)..(513): n is a, c, g, or t
atgattggggatccccaggcgcttataatggatgagcctacggccgggctggatcccaaacagattcttgagattcgggatcttatcagggaactgggcaaggatcatacaattattttaagttcccatattttgcccgaggtaagcgcagtatgcaaacgggtgcttatcatcaatgagggcaggattgtggctgacgacaccccggaaaacctggccaaacgtatacttggcgggagccatattttgctcaggatggacgcttccgagacacagatttccgaagctctggcaaaggttccttccataaagaagctggaattccgcgaatcccaggaggccggcacggtggaagccctggcggaggcggcggaagatacggacatccggcgggatctgtgccgggcattggccgccgcggatattcccattctgatgatgcgctcccaggatatgagtcttgaggaaatcttccttaatctgacaaccaaagaagacggggaggcaaagtaa

SEQ ID NO: 21478 - protein, 170 aa, Unknown
  Obtained from environmental sample
  misc_feature (1)..(170): Xaa is any amino acid
MIGDPQALIMDEPTAGLDPKQILEIRDLIRELGKDHTIILSSHILPEVSAVCKRVLIINEGRIVADDTPENLAKRILGGSHILLRMDASETQISEALAKVPSIKKLEFRESQEAGTVEALAEAAEDTDIRRDLCRALAAADIPILMMRSQDMSLEEIFLNLTTKEDGEAK

SEQ ID NO: 21479 - DNA, 573 bp, Unknown
  Obtained from environmental sample
  misc_feature (1)..(573): n is a, c, g, or t
atgttgctcttgatccccagaaccgagtggcccgatttggcggatcatgagatcaccaaacctttggcggacaaggaaaaaacacccgtggttctgcttgaggccatgtccctttcaacactggataccaagcgccggtctctcgagatcaaacccctgatgacttcttccgccggtgcctttcttcgcacaaatattgaagagtattccgttgaaaaacagccgtctgacatttccggccctcttgaactcgggctggcggttatggatcccagctggatagatcctaataagcctcaaccacaggcgcggattgttgccatcggctgcggtaaccttttgagccttgcggcccagggttttgacgccaaccgggatattttcatgaacagccttacatggcttcaggatcggcccgaaaccatttcggtgcggtccaagagccttttccttctgcctctgcggctgaatttggtgcaaatcatcgtctttggagcgctgtttatcgcgataatcccgcttgccttctttattttcgggtttgttacctggctaaagcggcggcatttgtga

SEQ ID NO: 21480 - protein, 190 aa, Unknown
  Obtained from environmental sample
  misc_feature (1)..(190): Xaa is any amino acid
MLLLIPRTEWPDLADHEITKPLADKEKTPVVLLEAMSLSTLDTKRRSLEIKPLMTSSAGAFLRTNIEEYSVEKQPSDISGPLELGLAVMDPSWIDPNKPQPQARIVAIGCGNLLSLAAQGFDANRDIFMNSLTWLQDRPETISVRSKSLFLLPLRLNLVQIIVFGALFIAIIPLAFFIFGFVTWLKRRHL

SEQ ID NO: 21481 - DNA, 828 bp, Unknown
  Obtained from environmental sample
  misc_feature (1)..(828): n is a, c, g, or t
atgcagcaggacaaacctgagggattaagcaatgatattacggttatcgacgcgatttccgtcatcaatgcgattggatcggctccccgttataaaaactgcaaactgtttgcttacaccaacaatatcgaccttgatcaggaaaaacagtttgccgctttttgcgcgataatcggcaggaggcgtttgaccagaaaaatgcttgtggtttaccggggtacggatatgacccttatcggctggaaagaaagtttaaacttgagcttcatcacctctatcccctcacaaaaagaagccgtatcctaccttgagagaacggccaggagatgccgttatcccctgatcatagccggacattcaaaaggcgggaatctggcggtttacgcgtccgccttttgcagaaaacgcgtccagaatcgcataactgtcgtttacagcaatgacgcgccgggctttcacaaacaagtaatagagagcgagggttacagggcaatctgcccccggatttgttcctttattccgcagtcgtcattagtcgggatgttgtttgagcatggcgagaccccgatggttataaaaagcaccgcaagcggccccatgcagcacagcctcgtttcatgggaagttacatataacaatatggccgatggcggggaacttacggagcagagccgtttaattgacaatattatcagcgaatggatcaatcagattgacgagagccagcggcagcagtttatccagggcatatattctatcctcgttttctgcgacgcggaatccgtgggccatcttaccgaggactggaaaaacaccgccggcgcataa

SEQ ID NO: 21482 - protein, 275 aa, Unknown
  Obtained from environmental sample
  misc_feature (1)..(275): Xaa is any amino acid
MQQDKPEGLSNDITVIDAISVINAIGSAPRYKNCKLFAYTNNIDLDQEKQFAAFCAIIGRRRLTRKMLVVYRGTDMTLIGWKESLNLSFITSIPSQKEAVSYLERTARRCRYPLIIAGHSKGGNLAVYASAFCRKRVQNRITVVYSNDAPGFHKQVIESEGYRAICPRICSFIPQSSLVGMLFEHGETPMVIKSTASGPMQHSLVSWEVTYNNMADGGELTEQSRLIDNIISEWINQIDESQRQQFIQGIYSILVFCDAESVGHLTEDWKNTAGA

SEQ ID NO: 21483 - DNA, 804 bp, Unknown
  Obtained from environmental sample
  misc_feature (1)..(804): n is a, c, g, or t
ttgaaaacggaggctttgatgattaaacatgtgtctgtggcggcgctgccggtcgcggaggacttcattatacagaagaaccgcattgagaacaacgcggtggcgggcagcaagcgcgtctgcattgttacagggactcacggcgatgaactggaagggcagtacgtctgcgcgcggctggcgaagattctgaacgacgggaaacagaagctgtcgggtattgtggacatttatcccgcggtaaacccgctggggatcgataccgttacgcggggctttccgatgttcgatctggacatgaaccgtatatttcccggctcatcctcgggatcgctcgcggaggtcgcggcttacgacgttatccgcgacattgagggagcggatatgtgcatagatatacactccagcaacatattcctgcgcgagataccgcaggtgcgcataagcgaacagaacgaggcggagctgctgccctgggccgtgatgcttaacgtcgatctcgtgtggattcacgcgtctgcgaccgtgctggaatcgacgctggcgcactcgctcaacatgcgcggcgttaagacgctggtggtcgagatgggcgtcggaatgcgaataacggagagtttctgtacgcagctcgtggacggcatactgaacctgctgcgcaaactgggaatatggaacggggccggtgaaagggcgcatccggaaatacgggcgccgctcgtctcaaaggatcacagcgtcggctttctgaattcgacgcgggtgggatatttctcccgcgggccgcgcacgccagccatgtaa

SEQ ID NO: 21484 - protein, 267 aa, Unknown
  Obtained from environmental sample
  DOMAIN (36)...(267): Succinylglutamate desuccinylase / Aspartoacylase family
  misc_feature (1)..(267): Xaa is any amino acid
MKTEALMIKHVSVAALPVAEDFIIQKNRIENNAVAGSKRVCIVTGTHGDELEGQYVCARLAKILNDGKQKLSGIVDIYPAVNPLGIDTVTRGFPMFDLDMNRIFPGSSSGSLAEVAAYDVIRDIEGADMCIDIHSSNIFLREIPQVRISEQNEAELLPWAVMLNVDLVWIHASATVLESTLAHSLNMRGVKTLVVEMGVGMRITESFCTQLVDGILNLLRKLGIWNGAGERAHPEIRAPLVSKDHSVGFLNSTRVGYFSRGPRTPAM

SEQ ID NO: 21485 - DNA, 420 bp, Unknown
  Obtained from environmental sample
  misc_feature (1)..(420): n is a, c, g, or t
atgacagattggccgaccggcccgatgagggccgatcggctgcttccagttgggcctgggtggggttaccaccaaattgccgtccacccggaccacccgggccccggctatggggccggcaaagggaatatccgaaatggtcagggccgcggaagcgcccagcatggccggcaggtccgggtcgtatttgtcatccacgctgatggcctggacaatgacctgggtctcgtaagtccaattcttgttgaacaggggccggcagggccggtcgatgaagcgggaggtcagggtttccttctcggaaggccgccctatctcccggcgaaaaaaattgccggggatgcggcccacggcgtagaagcgttccaggtaatcgaccgtgaggggcacgaaatcaagcccttcccgcttatcgtttga

SEQ ID NO: 21486 - protein, 139 aa, Unknown
  Obtained from environmental sample
  misc_feature (1)..(139): Xaa is any amino acid
MTDWPTGPMRADRLLPVGPGWGYHQIAVHPDHPGPGYGAGKGNIRNGQGRGSAQHGRQVRVVFVIHADGLDNDLGLVSPILVEQGPAGPVDEAGGQGFLLGRPPYLPAKKIAGDAAHGVEAFQVIDREGHEIKPFPLIV

SEQ ID NO: 21487 - DNA, 561 bp, Unknown
  Obtained from environmental sample
  misc_feature (1)..(561): n is a, c, g, or t
ttgcgtggagcaggcttgaatgtcaagtgggcaaaagatggcaggtatagcggagaaactgaagcaaaccacgtgttgcttcaaatgcccgccgctggcagaacggtaaagaggaacagaaccgtccttttaacactttcaaagggcaggcaagaggtgagcgttccagatttgcgaggagcaagccaaaggcaggctgaaatttctctgcaaaggcttgagcttttgctaggctccaaaatagagggggcgcactccgaaattccaagaggggtggttattcgcacggagccagaagctggcaagcgtgtgcgcataggctctaaagtaaacatcgtaatatcttcgggcaatagctctgggaaaattttgctgcctaatttgcggcaaatgtcgctttccagagcacgagaggttatagattcgctgggattcaaagtcggaaacatagtgacaattgagttggtagacaaattgcccaatactgttttggaactgaacccaaagcctggtgaatatttggaagcaggcacatcaatagatttaacggtggcggagtga

SEQ ID NO: 21488 - protein, 186 aa, Unknown
  Obtained from environmental sample
  DOMAIN (123)...(186): PASTA domain
  misc_feature (1)..(186): Xaa is any amino acid
MRGAGLNVKWAKDGRYSGETEANHVLLQMPAAGRTVKRNRTVLLTLSKGRQEVSVPDLRGASQRQAEISLQRLELLLGSKIEGAHSEIPRGVVIRTEPEAGKRVRIGSKVNIVISSGNSSGKILLPNLRQMSLSRAREVIDSLGFKVGNIVTIELVDKLPNTVLELNPKPGEYLEAGTSIDLTVAE

SEQ ID NO: 21489 - DNA, 903 bp, Unknown
  Obtained from environmental sample
  misc_feature (1)..(903): n is a, c, g, or t
gtgaagcggcggatcatggagatgggcatcaccaagggggtggaggtctatgtccgaaaagtggcgccgctgggcgacccgatggaggttacggttcggaactaccagctctccctcagaaaggcggacgtcgaactgatcgaggtcgaaaacagccgtttatacgttatcggcgacgcgccgcaagaaaacagctctgccggtcaggatagcgccgataaagcggatgctgtcaaaaaaggaccgtctatcgataaaggcaagcgcattaaaatcgcgcttgccggaaatcccaacagcggcaaaacgaccctgttcaacgcgctaaccggatcaaatcagtttgtggggaactggcccggcgtgacggtggaaaagatggagggcaagctgaagggctatgaggaggtgatcgttacggatttgcccggcatatactccctttccccatacacgccggaagaggttgtcgcccgtaattatttgatcgacgaacgccccgacgtcatcctcaacatcgtagacgccacgaatctggagcgcaacctgttccttacgacacaactgaccgaactcggcatacccgtcgtagtggcgttgaacatgatggacatcgtgcgtaaaaaaggcgacaagatcgataccgcgaggcttgccgaagaactgggctgtcacgttgaggaggtctccgccctaaagggctacggcgtcgcggaggcgtcggacgcggcggttagagcggcggatggcgtanagaccgtgccgcagcacagcttctccggcggcgtggagcacacgctggcgcacatcgaagaggcggtgctgcacaatatgccggaagagcgtcagcgcttcttttccgtaaaactctttgagcgggacaagaaatcatcgagaagctga

SEQ ID NO: 21490 - protein, 300 aa, Unknown
  Obtained from environmental sample
  DOMAIN (1)...(51): FeoA domain
  misc_feature (1)..(300): Xaa is any amino acid
MKRRIMEMGITKGVEVYVRKVAPLGDPMEVTVRNYQLSLRKADVELIEVENSRLYVIGDAPQENSSAGQDSADKADAVKKGPSIDKGKRIKIALAGNPNSGKTTLFNALTGSNQFVGNWPGVTVEKMEGKLKGYEEVIVTDLPGIYSLSPYTPEEVVARNYLIDERPDVILNIVDATNLERNLFLTTQLTELGIPVVVALNMMDIVRKKGDKIDTARLAEELGCHVEEVSALKGYGVAEASDAAVRAADGVXTVPQHSFSGGVEHTLAHIEEAVLHNMPEERQRFFSVKLFERDKKSSRS

SEQ ID NO: 21491 - DNA, 471 bp, Unknown
  Obtained from environmental sample
  misc_feature (1)..(471): n is a, c, g, or t
atgaaaattgagaccatagaaattcataattttaaagcttttcaaaatgccaaaattgaaaatataagggcaatgggagtgtttttaggcgaaaatggtacaggaaaaacttcactgtttgatgtttttggttttgtgaaagactgccttactgaaaatgtacgttcagctctgcaaaaacgaggtggatacagtgaagtttgttctcgcaaagcaactggcgatataagtattttattcaaatataaacccgagccagatcatacgctttgcacttacgaattgcaaataggactagatggaaataaaaatccaataataaataaagaaaaattaagttatagaagaggagctggtataggaaagccgtgggattttattaatttttcaaaaggcagaggtcaggctattactaatgagggaactttaaaagaagatataagtagcgcaaaaagagaaaaatttcattag

SEQ ID NO: 21492 - protein, 156 aa, Unknown
  Obtained from environmental sample
  misc_feature (1)..(156): Xaa is any amino acid
MKIETIEIHNFKAFQNAKIENIRAMGVFLGENGTGKTSLFDVFGFVKDCLTENVRSALQKRGGYSEVCSRKATGDISILFKYKPEPDHTLCTYELQIGLDGNKNPIINKEKLSYRRGAGIGKPWDFINFSKGRGQAITNEGTLKEDISSAKREKFH

SEQ ID NO: 21493 - DNA, 528 bp, Unknown
  Obtained from environmental sample
  misc_feature (1)..(528): n is a, c, g, or t
ttggatttgcctggcattcacttttcttgctctagcgatgacggcggcaacaacgaccctagcggtggaggcggttcttgcggtataaacagttacaagaacaaaaaaatgccagacggaaaaatatggatgctagagaatntgaattgcaatgttgctggtagcgagtgctatgagaaagaggaaagcaactgcacaaaatacggccgtctttacacttgggaagcggcaaagaaagcctgttctggaggctggcatttgccaaccacagatgaatgggatgcgttggtggcagcggttggcggttcctcaacagccggaaccaagctgaaagcagattctcctttgtggaatagcaatggcaaaggcactgacgatttcggctttgcggctctgccgggcggccgcggcagttctgatggcggtttccgtagcgaccgatttatcacatccttaccattttgtacattgtgttgtttggcgtatcgggtcgttgtaccaaatggtattattctgttaatcctgtaa

SEQ ID NO: 21494 - protein, 175 aa, Unknown
  Obtained from environmental sample
  misc_feature (1)..(175): Xaa is any amino acid
MDLPGIHFSCSSDDGGNNDPSGGGGSCGINSYKNKKMPDGKIWMLENXNCNVAGSECYEKEESNCTKYGRLYTWEAAKKACSGGWHLPTTDEWDALVAAVGGSSTAGTKLKADSPLWNSNGKGTDDFGFAALPGGRGSSDGGFRSDRFITSLPFCTLCCLAYRVVVPNGIILLIL

SEQ ID NO: 21495 - DNA, 921 bp, Unknown
  Obtained from environmental sample
  misc_feature (1)..(921): n is a, c, g, or t
atgctaacccatcataatctggtttccgacagcttcttggcgcagggaacgcccctgctgatctatcataccgatgtgttttacgctattcttcccctccaccatgcctataccatgctggcggtttttatagagactatatctgtcggctcggaacttgttttcggaaaacgcatggtaacaagccagattcttaaagaactgaaagacgggcggatcaccatgctgctgggcgtgccaatgcttttcaacaaagtgctggccggcattatccgggggcttaaggcaaaaggctccattgtttacggattgatttcatttttaatgggcatatcagggcttattaaaaaaatatttaaggtaaaccccggcaaaaaaatgttcggctttattcttgaaaaggccagccttacttcgataaggatctgcatctgcggcggcggccctcttgccccaagcgttttcaaaaaatacaaccagcttggcatcgactttgtgcagggttacggcctgacagaaacttcacccatcattacgattaaccccattgagcattacaaggaaaccagcgtaggcaggccttgtccccgcgctgacataaaaatattaaacccgggtgagcgcggcataggcgagataatcgtcaaaggccccatggtgatgaaaggctactataatatgtcagctgaaacctcggaaacttttacgccggacggctatctcaagaccggggaccttggttacatggacagcgaanactacctgtacctcaccggcagggaaagaaacctgatcgttaccgaaggcggtaaaaacgtctaccccgaagaaattgaaacgagttccagctttttgatgagatcgagcagatacttatcagaggttttacgccggacaaganaacaaagtcagaaaacatag

SEQ ID NO: 21496 - protein, 306 aa, Unknown
  Obtained from environmental sample
  DOMAIN (1)...(296): AMP-binding enzyme
  misc_feature (1)..(306): Xaa is any amino acid
MLTHHNLVSDSFLAQGTPLLIYHTDVFYAILPLHHAYTMLAVFIETISVGSELVFGKRMVTSQILKELKDGRITMLLGVPMLFNKVLAGIIRGLKAKGSIVYGLISFLMGISGLIKKIFKVNPGKKMFGFILEKASLTSIRICICGGGPLAPSVFKKYNQLGIDFVQGYGLTETSPIITINPIEHYKETSVGRPCPRADIKILNPGERGIGEIIVKGPMVMKGYYNMSAETSETFTPDGYLKTGDLGYMDSEXYLYLTGRERNLIVTEGGKNVYPEEIETSSSFLMRSSRYLSEVLRRTRXQSQKT

SEQ ID NO: 21497 - DNA, 957 bp, Unknown
  Obtained from environmental sample
  misc_feature (1)..(957): n is a, c, g, or t
atggaacattttaccaatactcatgattatcttaatgaagtaaactccatattgcaaaggatacgcgagctgncggtaaccggagctcacggaacttattccgaagatcagcataaaattatggcggtagaggtaaacgagcttttaaaggaacttgtcgccatttcaaataagacaggccctgatacaaagcaggcctttgccggagacaaggtgtttacggaacctttccgcattgtagagggaagggtagacggcggcgaagagtcaatgatagtccgcgttgaatacaggggagcgggagcgacccgcagggcggaaataaacgaccgcacttttgtggaacttgatataggcggggacgaggcgttttgggcggaaaaaatgaaaatcttttcatcgacagacgccacagattaccgcgtacagcaagcaggcgcgttttttgttgacggagttgaaattcaggtaactccgggagacaccttacccgcaattgtagcgaagattaacgattcggcggctcccgtaaaagcgtacatcgatcccgattcaagagggcttgttctggaaggaacaacgccgcatttgatacgcgccgaagacagcgtagttggtggagcgactgtgttacgcgacttgggaattattaacggaaatatgcaaaataacgcccctaattggagcaataccgcgcgcgttcacggaggctctttatttgatatggttatacgcttaagagacggaatgttaaggggagactccgagtttatcggaagccagggaattgcgggaatagatcttgcgttaaacaataacgcggtaagaatggcggatgtgggaagccgtcaggaacgcgctcaaatggcatgggagaggattaacagggagatacccgatattacaaatatgcttaaccgtgaatccggccttgattggcggacgccgcatgaatag

SEQ ID NO: 21498 - protein, 318 aa, Unknown
  Obtained from environmental sample
  DOMAIN (147)...(194): Flagellin hook IN motif
  misc_feature (1)..(318): Xaa is any amino acid
MEHFTNTHDYLNEVNSILQRIRELXVTGAHGTYSEDQHKIMAVEVNELLKELVAISNKTGPDTKQAFAGDKVFTEPFRIVEGRVDGGEESMIVRVEYRGAGATRRAEINDRTFVELDIGGDEAFWAEKMKIFSSTDATDYRVQQAGAFFVDGVEIQVTPGDTLPAIVAKINDSAAPVKAYIDPDSRGLVLEGTTPHLIRAEDSVVGGATVLRDLGIINGNMQNNAPNWSNTARVHGGSLFDMVIRLRDGMLRGDSEFIGSQGIAGIDLALNNNAVRMADVGSRQERAQMAWERINREIPDITNMLNRESGLDWRTPHE

SEQ ID NO: 21499 - DNA, 909 bp, Unknown
  Obtained from environmental sample
  misc_feature (1)..(909): n is a, c, g, or t
atggacagacgcgatttgttagttgataaactttcttcaataattgaagtaacagtaagccagttggatcatgacgagtttatggtgcatacttcagggcatattctggtacagggtcagaacgcgcggcagtttgatatgcgcaaggatatggacaccgaaggttacgcgcatattttctggcatgatacaaaagaccagatcgtctttacaaaaggaagccttggcgcgcttttggaacttcgcgacgttaccatagaggatgaaattcagagtcttgataacatgacaatgaattttacagaccttgtaaatgaaattcacttctcggcttacggcgctaacggcactacgggaaacaatttcttttccgaatatccttttgtaacaaatgtaaacggaaattacgatcgttccggagacggcgtttttgattcaagctatatatacagaataaacggacaaaacaggcttgaatcgcaggcccagccgggttttgagggcgtaataacgctttcaggcgccgacggggacataaacgtgccttattatcccaccgacacggttacggacataataaccagaattaacaattcaggcgcggaagtggtagcgcgtcttaacagggaaggaaaactttcattgaaaggtacccctgctgaaactatagaaggcagaagggagaatcccgattttgtaatacgtcatgttgaagattcggggcatttccttgtcggttacgcgggcgttctgcttgcttcgggagcggaaggcgctttttcttgggacagggcagacgcggtagcaagtcttcgcggcggagcggaagaatacgctcttgcccccgtagcgcatccttccggctggatagaagtaaatccggcgttgttaaaagacagtcttcggtag

SEQ ID NO: 21500 - protein, 302 aa, Unknown
  Obtained from environmental sample
  DOMAIN (169)...(219): Flagellin hook IN motif
  misc_feature (1)..(302): Xaa is any amino acid
MDRRDLLVDKLSSIIEVTVSQLDHDEFMVHTSGHILVQGQNARQFDMRKDMDTEGYAHIFWHDTKDQIVFTKGSLGALLELRDVTIEDEIQSLDNMTMNFTDLVNEIHFSAYGANGTTGNNFFSEYPFVTNVNGNYDRSGDGVFDSSYIYRINGQNRLESQAQPGFEGVITLSGADGDINVPYYPTDTVTDIITRINNSGAEVVARLNREGKLSLKGTPAETIEGRRENPDFVIRHVEDSGHFLVGYAGVLLASGAEGAFSWDRADAVASLRGGAEEYALAPVAHPSGWIEVNPALLKDSLR

SEQ ID NO: 21501 - DNA, 543 bp, Unknown
  Obtained from environmental sample
  misc_feature (1)..(543): n is a, c, g, or t
gtgggagatgatacacaaagacctccgcaactgcttggcgacaccaatgccatggtcagcacaatgcttgattgttatggtctgcccgccgacttccctgggaaaagaggactgatgacttccgaagccaaggatggctactcaatagttgaggagctagaaaaacggtttgccgcaaaggttggcagcaagcgtttcatcccatttctgacgctgttcgagttcgaatcgctggttttcagctcgcccaaggtgaccgctggtcattttggcctctccgacctcaagcgggccaagctggagcgtgacatccagagcattgttgacagagccaaatcagtggaactaatcaacggcggcaagaacacatacccaaagaagcggctgatgaacttgcttgaagagcagggcatcttgtacggcgaagtcagacatggatccgccatcctgcaaaaaatcggcatcccagccatccgcgctgcctgtccgcacttcaacgactggcttgcacgcctagaatcgcttggggaagcgccgcaatga

SEQ ID NO: 21502 - protein, 180 aa, Unknown
  Obtained from environmental sample
  misc_feature (1)..(180): Xaa is any amino acid
MGDDTQRPPQLLGDTNAMVSTMLDCYGLPADFPGKRGLMTSEAKDGYSIVEELEKRFAAKVGSKRFIPFLTLFEFESLVFSSPKVTAGHFGLSDLKRAKLERDIQSIVDRAKSVELINGGKNTYPKKRLMNLLEEQGILYGEVRHGSAILQKIGIPAIRAACPHFNDWLARLESLGEAPQ

SEQ ID NO: 21503 - DNA, 528 bp, Unknown
  Obtained from environmental sample
  misc_feature (1)..(528): n is a, c, g, or t
atgaataatctcaaggacattgtttggcagcacaccggcttcagttggctctgggacgagacggcaaggggcgaggtgtgcaaggcggcaggtgaggcgttgagcatgaggcgcttccttgccactgccaaaagcaacgagtggccggacaagctacccgggccaaatggcagggcactggtggtggccggcctggacgcctgcctggacctgctttcccccggcgacgcgggggattggctgttcggccactacaagaaggcggtgcgggccttccagacccgatacggcggggattccgcgctgatattctggatgccctcgtgcaagacccgcctgaaatcgcgccccgcaaacgattcggtggtgtggataccccaagggcaaaacaagcggggccccgactcgcctgaacctgcggtggtggagttcggacggatcatgtggggcgaacccaacagcgacgcgcaagtgataacgccagacggaaagacccccgccggcttctactaccggcggttcagctag

SEQ ID NO: 21504 - protein, 175 aa, Unknown
  Obtained from environmental sample
  misc_feature (1)..(175): Xaa is any amino acid
MNNLKDIVWQHTGFSWLWDETARGEVCKAAGEALSMRRFLATAKSNEWPDKLPGPNGRALVVAGLDACLDLLSPGDAGDWLFGHYKKAVRAFQTRYGGDSALIFWMPSCKTRLKSRPANDSVVWIPQGQNKRGPDSPEPAVVEFGRIMWGEPNSDAQVITPDGKTPAGFYYRRFS

SEQ ID NO: 21505 - DNA, 309 bp, Unknown
  Obtained from environmental sample
  misc_feature (1)..(309): n is a, c, g, or t
gtggtgaaagcggcaaaggatacgaaggaaacaaagccaacaaagacggcgaagcctgccaagccagccgcgcccgcaaaagcgactaggaagcccaatggggcaaaagcgtcaaatgacccaaagccgcagaagctgaagaaaatcgagatacacggcttcaagtcaatagagagcgccagcatagagctacgcgacctgaacgtgctgataggcgccaacggagctggcaagtcgaacctgattgaggcgttcaagttgctggagaggtactacgccggccgnctaaacggaatacatcgccagtga

SEQ ID NO: 21506 - protein, 102 aa, Unknown
  Obtained from environmental sample
  misc_feature (1)..(102): Xaa is any amino acid
MVKAAKDTKETKPTKTAKPAKPAAPAKATRKPNGAKASNDPKPQKLKKIEIHGFKSIESASIELRDLNVLIGANGAGKSNLIEAFKLLERYYAGRLNGIHRQ

SEQ ID NO: 21507 - DNA, 726 bp, Unknown
  Obtained from environmental sample
  misc_feature (1)..(726): n is a, c, g, or t
atgaaaactattttgaaaaaaaattacatctttgtcgccgccgcgatattgattgtttccgcttattttataaccggagtgcttgttttcgcaaataaacagtataacgcgataaacgaagaaaacatgaaagtaacggtgaatatcataaaaggatttacaccgttcgaagtttttacggacagggaactcgcggcggagtgggtttcaaatctggatatttccaatgaatatcgcataacgctaatcaaccgtagcggtagggttgttttcgataccgaggcggacagcgctgttattgaaaatcatctggaccggcccgaattccaggccagtgtgaggaatgggactggatttgccatccgccgttccgcgactttgggacagtattatctttacactgccgccgccataaatgatccctacggaaaatttaccggcgtccttcggttttccagattgatacccggtttctttacacgcttattaagttctacctttcccttccttgtttttggcttttttcttattatgggaatctgcctgagcctttatcattttacaagataccagtcacatctggctgaggaaaaacttaacgcggaactggaaaagaaaaccgccgagcttaaatcaataatcganaatgccgaagcggaaacgagccaccgcgaagtgattctaaacagcatgtttgacggagtaataaccctggacagcaaataa

SEQ ID NO: 21508 - protein, 241 aa, Unknown
  Obtained from environmental sample
  SIGNAL (1)...(21)
  misc_feature (1)..(241): Xaa is any amino acid
MKTILKKNYIFVAAAILIVSAYFITGVLVFANKQYNAINEENMKVTVNIIKGFTPFEVFTDRELAAEWVSNLDISNEYRITLINRSGRVVFDTEADSAVIENHLDRPEFQASVRNGTGFAIRRSATLGQYYLYTAAAINDPYGKFTGVLRFSRLIPGFFTRLLSSTFPFLVFGFFLIMGICLSLYHFTRYQSHLAEEKLNAELEKKTAELKSIIXNAEAETSHREVILNSMFDGVITLDSK

SEQ ID NO: 21509 - DNA, 378 bp, Unknown
  Obtained from environmental sample
  misc_feature (1)..(378): n is a, c, g, or t
atggccganggagataccaccctgctcattcccggtctcaacgacggcgcggaggaaatgcgcgaactcgcccgttttatcgctcaggaattgggacaggaggtgccctggcacatttcgcgttttcatccggcattccgaatgcgggatcgtccgcccacgcccctccccctgatggagcgcgccgcgcggatcgggcaggaagaggggctgcgtttcgtctatctgggcaatgtgcagcacgatctggcatccactttctgcccgcagtgcgggaagatgttgatctcgcgtctgggctacagcgtcggcgggctgccctttgacggcctgtgcgcgtgcggggagcgaattcccggcgtttggagcaggacatga

SEQ ID NO: 21510 - protein, 125 aa, Unknown
  Obtained from environmental sample
  misc_feature (1)..(125): Xaa is any amino acid
MAXGDTTLLIPGLNDGAEEMRELARFIAQELGQEVPWHISRFHPAFRMRDRPPTPLPLMERAARIGQEEGLRFVYLGNVQHDLASTFCPQCGKMLISRLGYSVGGLPFDGLCACGERIPGVWSRT

SEQ ID NO: 21511 - DNA, 546 bp, Unknown
  Obtained from environmental sample
  misc_feature (1)..(546): n is a, c, g, or t
gtgcgcgtgcggggagcgaattcccggcgtttggagcaggacatgattcttgtgtacacgggaaacggcaagggcaagacctcggcctgcgtcggccaggcgatccgcgccgtcggccgggggctgcgcgtggcctttgcccagtttatgaaaaaagagggcgtggccggagaacaaccggtgctgtatcaactgctgggggaaaggttccgcgcgggcggcaggggatttttgcgcgtggaggaagacaaacccgagcaccgtgaagccgcgctggcgaccttgcgctgggcgtgtgacgcgctgccgcaggtggacatgctggtgctggatgaaagcctctacgcgctgggcgcaggtattctgctgccggaagaattgcgtgaactggcggacagggcgcggcacggcggcgtccatctggtgctttcaggacgcgngctgcccgcttggcttgagacgatggcggatatcgttacggaaatggaagagcgcaagcatccctggcaacagggacagaacgcgatgcagggcattgaattgtga

SEQ ID NO: 21512 - protein, 181 aa, Unknown
  Obtained from environmental sample
  DOMAIN (7)...(181): ATP:corrinoid adenosyltransferase BtuR/CobO/CobP
  misc_feature (1)..(181): Xaa is any amino acid
MRVRGANSRRLEQDMILVYTGNGKGKTSACVGQAIRAVGRGLRVAFAQFMKKEGVAGEQPVLYQLLGERFRAGGRGFLRVEEDKPEHREAALATLRWACDALPQVDMLVLDESLYALGAGILLPEELRELADRARHGGVHLVLSGRXLPAWLETMADIVTEMEERKHPWQQGQNAMQGIEL

SEQ ID NO: 21513 - DNA, 459 bp, Unknown
  Obtained from environmental sample
  misc_feature (1)..(459): n is a, c, g, or t
gtgaaacggtttaagttcggccttgaaaaagtattgaaactgcggcagcacaatgagcatgaagccagggttgagctgggcagggccatcggaattcttgccggcattgaaaatgaaatcaagagaaacgccgccgtccgcagcgaagccgccatggaacgctttgccggaataaacgtcggtactggcaatgcagcggacactggttatggcggctctctttccatgcacgcatgggacgcttacataaaccgcctggaacaggaagctgaccgcctgatggaagaagccgcccgcgcggaaacggtggttgaagaaaaacgcggcctctacattgaagcttcccgcgagcttaaggtaatggaaaacctgaaagaaaggcgcgaaaaagaacaccggaaagaaatgtttgttgaggaaattaaggaactggacgacaggaagacaattaacaattaa

SEQ ID NO: 21514 - protein, 152 aa, Unknown
  Obtained from environmental sample
  misc_feature (1)..(152): Xaa is any amino acid
MKRFKFGLEKVLKLRQHNEHEARVELGRAIGILAGIENEIKRNAAVRSEAAMERFAGINVGTGNAADTGYGGSLSMHAWDAYINRLEQEADRLMEEAARAETVVEEKRGLYIEASRELKVMENLKERREKEHRKEMFVEEIKELDDRKTINN

SEQ ID NO: 21515 - DNA, 483 bp, Unknown
  Obtained from environmental sample
  misc_feature (1)..(483): n is a, c, g, or t
atgttccaggcgcaaaaaacagcaggcctcaaagaaaattatcgccttatggttgaaacggcaaagtccttcatcgaaggtgaaagcgaccttgttgccctcctcgctaatttgtccgccctcatcaaggtatatgtggaagatctcaactgggccggcttttatctcctgaagggaaacgagctggtgcttggcccctttcaggggaatcccgcctgtacgcgtatagcggaaggaaagggggtctgcggcaaagccgcccttgagggcaaacctgtcatcgttcctgacgtgcatcaattcccgggccatatcgcctgcgattcggcatccgcctcggaacttgttatcccgtttttcaaaggcggcaaggtttacggcgtgcttgatctggacagccctactcccgcccgcttctcaggtgttgaagcggaataccttggccagatcgccgctctgttgacggcctggcttggctcttga

SEQ ID NO: 21516 - protein, 160 aa, Unknown
  Obtained from environmental sample
  misc_feature (1)..(160): Xaa is any amino acid
MFQAQKTAGLKENYRLMVETAKSFIEGESDLVALLANLSALIKVYVEDLNWAGFYLLKGNELVLGPFQGNPACTRIAEGKGVCGKAALEGKPVIVPDVHQFPGHIACDSASASELVIPFFKGGKVYGVLDLDSPTPARFSGVEAEYLGQIAALLTAWLGS

SEQ ID NO: 21517 - DNA, 687 bp, Unknown
  Obtained from environmental sample
  misc_feature (1)..(687): n is a, c, g, or t
ttgatcggcgcgaaagcaggagcgcgttttcgcataacgggcggtcttgaaccgggaatcgccgccaccgatatgcaaaaacgccttattgaaacggtaaatcagcggcttgttcagcgtgagggagtaaaggtgcgttttcttggagaggcgaacgatattcaatcctacacgtcgcgttatgtgcttatagtggccgtcgcaatctttttggtttttggagttatggcgagtcagtttgaatcttttgttgatccgttaattattttcttttcaataccgcttttatttatcggagttatatggatatacaagttaggcggacaggcgatgacgatgttctccgtcgtcggcattatcgcccttgtcggggtcgtcgttaataacggaattgttcttgttgattacacaaacacgttacgcgccagaggcatgaaagtgcgcgaagcttgtcttgaagccggaaaaaggcgtttacgcccgattttaatgacaagccttacaacaatccttggaatggcgccaatcgcgttcttcccgggagcgggagctgacaccattcaaccgattggaaaaacttttgtcggcggccttattgtaagcacgtttatgacggttttcgtaactcccgtaatgtactccgtccttaactcaagacacgataaaaagaataaggctgaaagttga

SEQ ID NO: 21518 - protein, 228 aa, Unknown
  Obtained from environmental sample
  misc_feature (1)..(228): Xaa is any amino acid
MIGAKAGARFRITGGLEPGIAATDMQKRLIETVNQRLVQREGVKVRFLGEANDIQSYTSRYVLIVAVAIFLVFGVMASQFESFVDPLIIFFSIPLLFIGVIWIYKLGGQAMTMFSVVGIIALVGVVVNNGIVLVDYTNTLRARGMKVREACLEAGKRRLRPILMTSLTTILGMAPIAFFPGAGADTIQPIGKTFVGGLIVSTFMTVFVTPVMYSVLNSRHDKKNKAES

SEQ ID NO: 21519 - DNA, 789 bp, Unknown
  Obtained from environmental sample
  misc_feature (1)..(789): n is a, c, g, or t
ttgctggtgataaatccggagcagtggggcaataaaattttgtgggataaactggccgggttgaagggcttgaatgttctaacttttggcctgggcgccggagtaaattatcaggcggccaatatccgctataaaaatcaaggttcgcttttcaccgtcttaaaagacggcgcgctgatcggcgagctggagctggccattcccggcgaacataatattttgaatgcgctggccgtgctggccgtggcaatgcatctgggtctggaatttaacaaaatcaaaacggcaatcgttactttcacgggggcgaaacggcgttttacatttgtcggccagagccagggtgtgaaaatttacgatgattatgcgcatcatcccacggagattaaggcgactttgactgccgcccgtaaagcttttccgcacagccggattttctgcatatttcagccgcaccgttattcacgcacgatgcattttctcaatgagtttgccgagagcctgcagctggccgaccgggtctatgtgaccaatatttacggcgccggggaaaaaccgatacccggcgtagaagcgcgggacatcgcagcccggatgaacgctccgcaaaaagccgtgtatatcgagaaaaaagaggacgcggcggagcgggctttgcaggagctgggcaagggcgatgtcttttttaccctgggcgcgggcgatattcatattttgagcaaagaaattctcaaccgtctgcgcactaaacagccggtgaaaaatgcaaaagcagtctgtatcgcttag

SEQ ID NO: 21520 - protein, 262 aa, Unknown
  Obtained from environmental sample
  DOMAIN (103)...(190): Mur ligase family, glutamate ligase domain
  misc_feature (1)..(262): Xaa is any amino acid
MLVINPEQWGNKILWDKLAGLKGLNVLTFGLGAGVNYQAANIRYKNQGSLFTVLKDGALIGELELAIPGEHNILNALAVLAVAMHLGLEFNKIKTAIVTFTGAKRRFTFVGQSQGVKIYDDYAHHPTEIKATLTAARKAFPHSRIFCIFQPHRYSRTMHFLNEFAESLQLADRVYVTNIYGAGEKPIPGVEARDIAARMNAPQKAVYIEKKEDAAERALQELGKGDVFFTLGAGDIHILSKEILNRLRTKQPVKNAKAVCIA

SEQ ID NO: 21521 - DNA, 660 bp, Unknown
  Obtained from environmental sample
  misc_feature (1)..(660): n is a, c, g, or t
ttgccaaggaaccggaacagcagcacgaattacctttccagaatgaaaacgtataatcttcccgttaaatgcgccgcgattctttttgacgtggactccacactttacaccaatcccgaatacgcccgttcccaaattgatcttcccattgaaaaacttgccagcctgagggggatttctttcagccaaatgaaagaggcaatttcgcaatacagggctgattgggcaaaagaacataatgggcagggcatcagccacgggaatattttcaaagcctttggcatcagcataaacgaaagcgttaaatggcgagaggaactctgccagccggagcaatacctgtcaaaagatcctctgctccgttccgcgctggaacgactcaagtccgccgcgactctgggtatagttaccaacaaccccatttccatcgcaaatagaacccttagcgcgcttggcgtggaagacatgttccgcgccgttataggtcttgatacatgcggcgtctccaaaccccatgttgacatcttaacacgagcggcggttctctgcggcgcttccattgagtcctgtgtctccgtgggggatcgttatgaaattgacatcgcccttcccctggaactcggcatgggtggcatccttgtgacggctcggccgatctga

SEQ ID NO: 21522 - protein, 219 aa, Unknown
  Obtained from environmental sample
  DOMAIN (24)...(217): haloacid dehalogenase-like hydrolase
  misc_feature (1)..(219): Xaa is any amino acid
MPRNRNSSTNYLSRMKTYNLPVKCAAILFDVDSTLYTNPEYARSQIDLPIEKLASLRGISFSQMKEAISQYRADWAKEHNGQGISHGNIFKAFGISINESVKWREELCQPEQYLSKDPLLRSALERLKSAATLGIVTNNPISIANRTLSALGVEDMFRAVIGLDTCGVSKPHVDILTRAAVLCGASIESCVSVGDRYEIDIALPLELGMGGILVTARPI

SEQ ID NO: 21523 - DNA, 342 bp, Unknown
  Obtained from environmental sample
  misc_feature (1)..(342): n is a, c, g, or t
atgaagctgctcaaggagaacggagcccgcaaggtaatctgttccataagcctgccccttttctccggcagcgcagtgtcntattttgacgaagcgtataaagacggcctgttctacaagctcatcggaacaaacgcggtacaccaggaagaagttcttaatcgtgaatggtatatcaatgtgaatatatccggcctctttgccaaggttatttcaagactgcaccagaaactgtccatttccagcctgctggacaacagggagataatcagccgcctgatggtagttgccaaggaaccggaacagcagcacgaattacctttccagaatgaaaacgtataa

SEQ ID NO: 21524 - protein, 113 aa, Unknown
  Obtained from environmental sample
  SIGNAL (1)...(27)
  misc_feature (1)..(113): Xaa is any amino acid
MKLLKENGARKVICSISLPLFSGSAVSYFDEAYKDGLFYKLIGTNAVHQEEVLNREWYINVNISGLFAKVISRLHQKLSISSLLDNREIISRLMVVAKEPEQQHELPFQNENV

SEQ ID NO: 21525 - DNA, 426 bp, Unknown
  Obtained from environmental sample
  misc_feature (1)..(426): n is a, c, g, or t
gtgttaattcacagacgggacgctttccgcgctcagaaaactcttgccgaaaggacaatgaaaaacccgaaaatcgaagtgcgttttaatacggttattaaagaaattaaaggtgaaggaaaagtaaaatcagttgttttggaaaacaacaaaacaggcaaaaccaatgaagaagaaacagacgccgtttttatttttgccggcactgttccgcaatcttcgcttgcgcgcgacttgggagcgaaactggacgagggcggatgtataattaccgattccaaaatgacaactaacatttcgggtttctacgctattggcgatataagatcaggagttttccggcaagttgtaacagccgccgccgacggagcgattgccgcgcacaatgccgcagattatgttgatgaagcaaaaaacaaaaaataa

SEQ ID NO: 21526 - protein, 141 aa, Unknown
  Obtained from environmental sample
  DOMAIN (2)...(68): Pyridine nucleotide-disulphide oxidoreductase
  misc_feature (1)..(141): Xaa is any amino acid
MLIHRRDAFRAQKTLAERTMKNPKIEVRFNTVIKEIKGEGKVKSVVLENNKTGKTNEEETDAVFIFAGTVPQSSLARDLGAKLDEGGCIITDSKMTTNISGFYAIGDIRSGVFRQVVTAAADGAIAAHNAADYVDEAKNKK

SEQ ID NO: 21527 - DNA, 393 bp, Unknown
  Obtained from environmental sample
  misc_feature (1)..(393): n is a, c, g, or t
atggcagaatatttttctaattcttctgttcctgaaaatgtatggcttggagtaacagttgaaacctcttctgaaaaacgccgtattaattcacttcgtaaattagatgcttcaattcattttttgtcatgtgagccgcttgttgaagacttgggtattattgatttatctggcattgattggataattgtcggtggagaaagcggagttcaagcacgtcaaatgaaactagagtgggttcgttctataaagaaacaagctattgaacagaatattgctttcttttttaaacagtggggaacatggggagcagatggcgtgaaacgcaataaaaaagctaacggaaaagtacttgatggtaaaattattcagatgatgccaaaactagcataa

SEQ ID NO: 21528 - protein, 130 aa, Unknown
  Obtained from environmental sample
  DOMAIN (1)...(127): Phage protein Gp37/Gp68
  misc_feature (1)..(130): Xaa is any amino acid
MAEYFSNSSVPENVWLGVTVETSSEKRRINSLRKLDASIHFLSCEPLVEDLGIIDLSGIDWIIVGGESGVQARQMKLEWVRSIKKQAIEQNIAFFFKQWGTWGADGVKRNKKANGKVLDGKIIQMMPKLA

SEQ ID NO: 21529 - DNA, 645 bp, Unknown
  Obtained from environmental sample
  misc_feature (1)..(645): n is a, c, g, or t
ttggatttgcttcgcagataccgcagagttttgcagcagagaaatcgctggctaaaggataatttggaaggttctgccgtgggtggagagtatctgtttgaggctttaacggaacaactcgcttcccttgccgttttggtttgggaagagaggggatttttgtgcaaaatattggaacctcatataaataatttttaccaaattttatctgacaatacagaggagataaaattttcttatacaagggctatggataaagagagttttttaaaaaatctgagcgaaaaatccagcgcagaaagagcagcgggcaccacgctcattggtccgcacagagacgatatagagcttttgatgcaggggcattccatgcgggattttggttctcaagggcaatgccgctccatagctctttcaatgaaattcgcaagtgccgaaataatagaaaattattcgggaacaaacccaattttgcttttagacgatgtttttgccgaacttgaccgctcaagaagacagtccctcgcaaagattgttaggcaaaaaaacagccaaaccttcgccgccacccccagcttggaagatttgccgtttaaaggggatttttatttgggtatagaatcgtttactatattacccttatga

SEQ ID NO: 21530 - protein, 214 aa, Unknown
  Obtained from environmental sample
  misc_feature (1)..(214): Xaa is any amino acid
MDLLRRYRRVLQQRNRWLKDNLEGSAVGGEYLFEALTEQLASLAVLVWEERGFLCKILEPHINNFYQILSDNTEEIKFSYTRAMDKESFLKNLSEKSSAERAAGTTLIGPHRDDIELLMQGHSMRDFGSQGQCRSIALSMKFASAEIIENYSGTNPILLLDDVFAELDRSRRQSLAKIVRQKNSQTFAATPSLEDLPFKGDFYLGIESFTILPL

SEQ ID NO: 21531 - DNA, 861 bp, Unknown
  Obtained from environmental sample
  misc_feature (1)..(861): n is a, c, g, or t
atgacccagctccacgatgacattgtcggtctggatgcggcaattttgatgcacccccgcacatgggaagcttcggggcacgttgaaaattttaccgatccgctggttgattgtaaaaagtgcaaatcgcgttttcgggcggatcaaattccggaggaaaacctcgctgcaaaaaaatgccccgactgcggcggcgagttgactgatactcgtaaatttaatctgatgttcaagacccacatcggccctgctgaggacactgccagcattatctacctgcgccctgaaaccgcccagggaatttatgttaattacaggaatattattcagtcaaaccggatgaaaatcccgtttggcattgcgcaaatcggcaaggcattccgtaacgaaatcgttacaaagaactttattttccgtacctgcgaatttgaacaaatggaaatgcagtactttgtaaagccgggtacggatgtggtatggttcgatgaatggcgtaaaagacgctgggcgtattatgaaaaactcggcgtaaaaatggatcatttgcgctggcatcagcacggaccgaatgagcttgcgcattacgcgaaggacgcgtacgacattgagtaccttttcccgatgggctggcgcgagcttgaaggcgtgcataaccgtaccgattatgatttagggcggcacactcagttctccggcaaagatttacaatacatcgatcaggataacaacaacgaacggtacattccctatattatcgaaacttccgcagggcttacccgaaacctgttgatgattctctgtgacgcttacgatgaagagcangttgccgacaaaggcacggcgcttccgaaggaagcgtga

SEQ ID NO: 21532 - protein, 286 aa, Unknown
  Obtained from environmental sample
  DOMAIN (1)...(209): tRNA synthetase class II core domain (G, H, P, S and T)
  misc_feature (1)..(286): Xaa is any amino acid
MTQLHDDIVGLDAAILMHPRTWEASGHVENFTDPLVDCKKCKSRFRADQIPEENLAAKKCPDCGGELTDTRKFNLMFKTHIGPAEDTASIIYLRPETAQGIYVNYRNIIQSNRMKIPFGIAQIGKAFRNEIVTKNFIFRTCEFEQMEMQYFVKPGTDVVWFDEWRKRRWAYYEKLGVKMDHLRWHQHGPNELAHYAKDAYDIEYLFPMGWRELEGVHNRTDYDLGRHTQFSGKDLQYIDQDNNNERYIPYIIETSAGLTRNLLMILCDAYDEEXVADKGTALPKEA

SEQ ID NO: 21533 - DNA, 387 bp, Unknown
  Obtained from environmental sample
  misc_feature (1)..(387): n is a, c, g, or t
atggatcagattggccgagaacctgtgaagggggacaagaaaatggcagaagttgccaaaaaacccgctgcgaaaaaacccgcagcaaagaaacccgctgcgaaaaagcccgcagcaaagaaacccgccgcggcgaaaaagcccgcggcgaagaaacccgcagcggcgaaaaagcctgcggcaaagaaacccgcagcggcgaaaaagcctgcggcaaagaaacccgcagcggcgaaaaagcccgcggcaaagaaacccgcagcggcgaaaaagcctgcggcaaaaaaacccgcagcggcgaaaaagcctgcggcaaagaaacccgcagcggcgaaaaagcctgcggcgaaaaagcccgccgctccggcagtgcctctgctgttttaa

SEQ ID NO: 21534 - protein, 128 aa, Unknown
  Obtained from environmental sample
  misc_feature (1)..(128): Xaa is any amino acid
MDQIGREPVKGDKKMAEVAKKPAAKKPAAKKPAAKKPAAKKPAAAKKPAAKKPAAAKKPAAKKPAAAKKPAAKKPAAAKKPAAKKPAAAKKPAAKKPAAAKKPAAKKPAAAKKPAAKKPAAPAVPLLF

SEQ ID NO: 21535 - DNA, 408 bp, Unknown
  Obtained from environmental sample
  misc_feature (1)..(408): n is a, c, g, or t
ttgccaaaaaacccgctgcgaaaaaacccgcagcaaagaaacccgctgcgaaaaagcccgcagcaaagaaacccgccgcggcgaaaaagcccgcggcgaagaaacccgcagcggcgaaaaagcctgcggcaaagaaacccgcagcggcgaaaaagcctgcggcaaagaaacccgcagcggcgaaaaagcccgcggcaaagaaacccgcagcggcgaaaaagcctgcggcaaaaaaacccgcagcggcgaaaaagcctgcggcaaagaaacccgcagcggcgaaaaagcctgcggcgaaaaagcccgccgctccggcagtgcctctgctgttttaaggtttccggtttatttaaaattagtttttgttttatgcagaaagcccggcaattagccgggttttttgcatag

SEQ ID NO: 21536 - protein, 135 aa, Unknown
  Obtained from environmental sample
  misc_feature (1)..(135): Xaa is any amino acid
MPKNPLRKNPQQRNPLRKSPQQRNPPRRKSPRRRNPQRRKSLRQRNPQRRKSLRQRNPQRRKSPRQRNPQRRKSLRQKNPQRRKSLRQRNPQRRKSLRRKSPPLRQCLCCFKVSGLFKISFCFMQKARQLAGFFA

SEQ ID NO: 21537 - DNA, 372 bp, Unknown
  Obtained from environmental sample
  misc_feature (1)..(372): n is a, c, g, or t
atgtcaggtgaaattgacgcgaaagaaaaattcacctctattatggaaaaatttatcgcccttgcggctatacgccttagcgacgatgtaatgtcgcgcctgcgcgaaatgagcgagcgtgaagatactcctctgcaaaaagcaatctatgacagttaccttgaaaatttgaagatggcgctggagcttaaacgcccctgctgtcaggatacgggtcttcttcaattttacataaaagccgggactgcttttccgcatttggacattaccgccgaagccttagttgaagcgacgcggcgagccacggcaagcgtccctttaagaccgaacgctgtaaactactttgatgaaaaaaacacgggcgatacatag

SEQ ID NO: 21538 - protein, 123 aa, Unknown
  Obtained from environmental sample
  DOMAIN (11)...(123): Fumarate hydratase (Fumerase)
  misc_feature (1)..(123): Xaa is any amino acid
MSGEIDAKEKFTSIMEKFIALAAIRLSDDVMSRLREMSEREDTPLQKAIYDSYLENLKMALELKRPCCQDTGLLQFYIKAGTAFPHLDITAEALVEATRRATASVPLRPNAVNYFDEKNTGDT

SEQ ID NO: 21539 - DNA, 363 bp, Unknown
  Obtained from environmental sample
  misc_feature (1)..(363): n is a, c, g, or t
atgtttgccggaatgatgaaaaccgcccaatttaacgttaagcgcatgaaagcgtcttgttcaagcggttttttggaagcgaccgacacggcggaataccttgtcagcaaggggcttcccttccgcgccgcgcatgaaaccgccgcccttatcgtccgcgactgtattgaagcgggacagaaacacatcgcggacagaaccttcggcgaattgaaaaaacgctcaaaactttttgatgaagatatttacaaggcgttaacgcccgcgttctgcgtaagggcgcgagatcttcccggcgggccggctccaaaagaagtgcgcaggcagataaagctcctgcgtaaaaaatttcaagcgcggtaa

SEQ ID NO: 21540 - protein, 120 aa, Unknown
  Obtained from environmental sample
  misc_feature (1)..(120): Xaa is any amino acid
MFAGMMKTAQFNVKRMKASCSSGFLEATDTAEYLVSKGLPFRAAHETAALIVRDCIEAGQKHIADRTFGELKKRSKLFDEDIYKALTPAFCVRARDLPGGPAPKEVRRQIKLLRKKFQAR

SEQ ID NO: 21541 - DNA, 501 bp, Unknown
  Obtained from environmental sample
  misc_feature (1)..(501): n is a, c, g, or t
atgggaattgccgccattaccggagcgggcggtgttttgaactatccccggcatccttcccagctttacgaaatgttttttgaaggcatagtgttgtgggcttttatctggtttttcagaaacagaaagccctttaaggggtttctctttaccctgtacctttccggttacggccttgtccgctttttcatagaatatttcagggaacccgacgccgatcttggctatccgattaagctagcgaaaacaagcctgcctcccgccttaagccatcccgctctggatttttctaccggccagatcctctgcttcattatgatcgttaccgggcttgtctgggcgctcgttgcatcgcgtttaaaagaccgggagcctgtgcgggtttatagcgccggagtggaaaaagcgacaggtttacctgaagcaaaaccgacggcctcgcccggcgaaaaagccgctgaaagaaataaacgtcggaagctccggaaacagctgcgttaa

SEQ ID NO: 21542 - protein, 166 aa, Unknown
  Obtained from environmental sample
  DOMAIN (1)...(120): Prolipoprotein diacylglyceryl transferase
  misc_feature (1)..(166): Xaa is any amino acid
MGIAAITGAGGVLNYPRHPSQLYEMFFEGIVLWAFIWFFRNRKPFKGFLFTLYLSGYGLVRFFIEYFREPDADLGYPIKLAKTSLPPALSHPALDFSTGQILCFIMIVTGLVWALVASRLKDREPVRVYSAGVEKATGLPEAKPTASPGEKAAERNKRRKLRKQLR

SEQ ID NO: 21543 - DNA, 465 bp, Unknown
  Obtained from environmental sample
  misc_feature (1)..(465): n is a, c, g, or t
gtgcccaccaacgccgagttgatagaacggctgctgaaagcctatcccggcacgatcgcgggcatcaaggacagttccggcgattggaacaatacggaaatgctgctgaaaaatttccagtccgacacgtttaacgtgttctgcgggagcgaggtctttttgctgcaaaccatgcgcgggggcgggacgggctgcatcacggcaacggccaacaccaatgcgccggccatcatggacctgtatgcaagctggcgaactcccgaagctgacgacaagcaggccagggtgacggcgacccgcaagatttttgccaaactccccatgatcgcttccatgaaggccgtgatcgcccgcgaactgaacgatccggcatgggccatgccgcgtccgccgctgatgccctgcgcgcccggcaaggttgatgccgtcatggctgaactgaagagcatggggtattcgtactga

SEQ ID NO: 21544 - protein, 154 aa, Unknown
  Obtained from environmental sample
  misc_feature (1)..(154): Xaa is any amino acid
MPTNAELIERLLKAYPGTIAGIKDSSGDWNNTEMLLKNFQSDTFNVFCGSEVFLLQTMRGGGTGCITATANTNAPAIMDLYASWRTPEADDKQARVTATRKIFAKLPMIASMKAVIARELNDPAWAMPRPPLMPCAPGKVDAVMAELKSMGYSY

SEQ ID NO: 21545 - DNA, 552 bp, Unknown
  Obtained from environmental sample
  misc_feature (1)..(552): n is a, c, g, or t
ttgggcctctgctataccaaactggatcgttttgacgaggcgctgttgtactttgaacaggtgctcaccctcagcaatagcccgctgtggacgtaccaatgccgcctgatccttgcctacatttacattataaccggacgcgccgccatggcggagaatgaacttaacgaccttgaagccggcggccttgaatcggcgatgctgtacaataccctggcgtatgctgaatatgttcaaaagaattatatagccgcgatagaatggtacgaaaaagcgctggatattgaaaaggataatcctaccgccctgaacagcatgggctacattctcgccgatacgggaatggacacgcagaagggtctgcggatgtgccgtaaagcggttgaaaaaaattcccaaaaccccgcgtacctcgactctctgggatgggccgcttaccgctgcggcaaactgaacgaagcccgcaactggctgcgccgcgcgcaggaacttgccccgcaggaaaaagaaataaaacagcatctcaagatcgtcaacgaggaggcactatga

SEQ ID NO: 21546 - protein, 183 aa, Unknown
  Obtained from environmental sample
  DOMAIN (66)...(99): Tetratricopeptide repeat
  misc_feature (1)..(183): Xaa is any amino acid
MGLCYTKLDRFDEALLYFEQVLTLSNSPLWTYQCRLILAYIYIITGRAAMAENELNDLEAGGLESAMLYNTLAYAEYVQKNYIAAIEWYEKALDIEKDNPTALNSMGYILADTGMDTQKGLRMCRKAVEKNSQNPAYLDSLGWAAYRCGKLNEARNWLRRAQELAPQEKEIKQHLKIVNEEAL

SEQ ID NO: 21547 - DNA, 486 bp, Unknown
  Obtained from environmental sample
  misc_feature (1)..(486): n is a, c, g, or t
atgggccgcttaccgctgcggcaaactgaacgaagcccgcaactggctgcgccgcgcgcaggaacttgccccgcaggaaaaagaaataaaacagcatctcaagatcgtcaacgaggaggcactatgacaaaacgcctccatccctcttctattacctttgtacctttgtgtctttgtgtgacgctttttgccgcgccattccttgccgcgcagagcgccacacagagtgcttatataaccggcggcagtgatgttaacgcgattaacgccgccgaagaattccgcattggcattcacgcgtacaaccgtttcgcgtttaacgaggctatcctttcctttgagcgcgccctttctttcaggccgggcgaggcggtcataatggattggctgggcaaagcgtattacgtttcggctttgaaagcactgccctgcgtcagggaagggccgccgttgacgcttacggcaaaaataccggctcgggcatga

SEQ ID NO: 21548 - protein, 161 aa, Unknown
  Obtained from environmental sample
  misc_feature (1)..(161): Xaa is any amino acid
MGRLPLRQTERSPQLAAPRAGTCPAGKRNKTASQDRQRGGTMTKRLHPSSITFVPLCLCVTLFAAPFLAAQSATQSAYITGGSDVNAINAAEEFRIGIHAYNRFAFNEAILSFERALSFRPGEAVIMDWLGKAYYVSALKALPCVREGPPLTLTAKIPARA

SEQ ID NO: 21549 - DNA, 876 bp, Unknown
  Obtained from environmental sample
  misc_feature (1)..(876): n is a, c, g, or t
ttgcccgccgactcgatggcaaagcgcatttatatgtttgaccccaacggcaattatctgggcattttgaccgaaggcctttccggaccggaaagccttcgtttcctttccgacggcaggctcctcgtcgcggataccaaccgcgttctgctcatggataccgactccgccattgtccgtgaattgggcgtcgccgggaatcccaagacccgcatagtcggcgccgacatggataccaacggcagcctgctcgcggcaaactttgccgccggcgaagtctcggtgctgacccgttttgacgatcttgcctccggcctcttcgtgcagattgagcgaatctaccccgacaagttcccccaggtaacgctggaggtcaaggttgaagaccgcctgcgccgccccattgtgggccttgaaagccgaaacttccagatcagcgagggggggagagtggcaggcgagcagtctttcctggttccggcctaccgcgttaaccgttccgatgtttccgtattgtttgagcgctcgccggtgaccacgggcctgcgggatgatttcgccgcggcgttacgtgacattaacaaagccctgggggcgcaggggcggattgtctcggttatttcagcgggcgaacagccccagcgggaacggcatgaaaacgccctggaagccgccgcgcggggaaattcggtcaaatacagcggccgctggcgttttgatcagggactgcgccttgccgctaccgacctgcttcccggtgaaaaaaagcgttcggtggtgtatgtcggttcgggcagtccgggcgagttggcttttgaacagtacagcctctccgaaatggcggcctatctgccaaaacggctcggcngaatctga

SEQ ID NO: 21550 - protein, 291 aa, Unknown
  Obtained from environmental sample
  misc_feature (1)..(291): Xaa is any amino acid
MPADSMAKRIYMFDPNGNYLGILTEGLSGPESLRFLSDGRLLVADTNRVLLMDTDSAIVRELGVAGNPKTRIVGADMDTNGSLLAANFAAGEVSVLTRFDDLASGLFVQIERIYPDKFPQVTLEVKVEDRLRRPIVGLESRNFQISEGGRVAGEQSFLVPAYRVNRSDVSVLFERSPVTTGLRDDFAAALRDINKALGAQGRIVSVISAGEQPQRERHENALEAAARGNSVKYSGRWRFDQGLRLAATDLLPGEKKRSVVYVGSGSPGELAFEQYSLSEMAAYLPKRLGXI

SEQ ID NO: 21551 - DNA, 717 bp, Unknown
  Obtained from environmental sample
  misc_feature (1)..(717): n is a, c, g, or t
ttgaatttgttttttcagggggttcgcatcgacgtttccgccccagctcaaaggtctttacccacggcaattgaccgttggctgtccgtactgcacattgattttacggcttatcaatacgcccttacggtgaaagaatatggcgcgaaaaagacaggtaaacctgaggataacaatacattgcaattcgccctttccatggacgttattgtcgaacaggaaaacggcaaaaaaaaaatccccatcggacaatgtaaagatttggaagcgttacgcgctcccatcgccctgtcaaactatctgccggaaataaaagatttaacgtctattaagaagtcggacggttccctggtgcgcctgtccgaagagcggcttgtctctttcttggattccgcctcggggcttcttgcgcggttgggaataaaagttaaccttccaaaagccctcgcaagagagttaaaaccgcgcttagttgtcaaggggaattcatcggagaaatcgcttaaaacctatcttgatttgagcaccttgcaggaatttgaatggcaaatagccatcggcgatgaagtaatccccatgaaggaatttgaaaaactcgtaaggcaaaaacgcgcccttgtccgttttaaagacggttttgtaaaaatgaaccctgaagaattttcccgcctgcttaaaaaatcaaaagacgagaagcccggttttacgattttttaa

SEQ ID NO: 21552 - protein, 238 aa, Unknown
  Obtained from environmental sample
  misc_feature (1)..(238): Xaa is any amino acid
MNLFFQGVRIDVSAPAQRSLPTAIDRWLSVLHIDFTAYQYALTVKEYGAKKTGKPEDNNTLQFALSMDVIVEQENGKKKIPIGQCKDLEALRAPIALSNYLPEIKDLTSIKKSDGSLVRLSEERLVSFLDSASGLLARLGIKVNLPKALARELKPRLVVKGNSSEKSLKTYLDLSTLQEFEWQIAIGDEVIPMKEFEKLVRQKRALVRFKDGFVKMNPEEFSRLLKKSKDEKPGFTIF

SEQ ID NO: 21553 - DNA, 879 bp, Unknown
  Obtained from environmental sample
  misc_feature (1)..(879): n is a, c, g, or t
ttgaaggcgcaagaatacggggattcagagagaagaacggccggaataaaacttttttttatcgctcgtgttcttgtgattatactggcttttcttgccctgttttggctggttttaagattttctccctatcctgatttgaagaatttttcggctcgcccgaacagtgtccgttattatgaccgcggcggtatccttttgcagataacgcctctttcagacggtctgcgaagggaaaaacccgctgaattccccatgcaggtaaaggatgtttttgtatttgcggaagacaggcgcttttacaggcattttgggattgacggcatttctatgatacgcgctgtatatcaaaacattgcccacggaagaagggtaagcggtgcaagtacaataacaatgcagcttgccagaataatttcagataacggtcagtcaggcgctgtacagcagaaaaagaagcgtcagactattctgcgcaaaacatgcgaaatgcttaatgctctgcgtcttgaagccaggttgtcaaaagagcaaatactggaattgtacctgctttcgcttccttttgggcataataccgaaggagccgcgtcagccgccagaacttttttcgcgagcgatatttcaatgctttctcccgctcaaattttttgtcttgcggtaattccgcgaagaccgggaatgtacaatccgcttgagaaccctgaaacatgtattgccgccgcctccgaattacatgaaagatttgtccgaactgaagggttgtcaaaaagaaaaaaatccgctcagccgttgcttgcgcaaataaacgacgatgactggaaatttgctttcttctccgcaagcgttttgaatatcctcttgaactgcctcatttaa

SEQ ID NO: 21554 - protein, 292 aa, Unknown
  Obtained from environmental sample
  DOMAIN (57)...(235): Transglycosylase
  misc_feature (1)..(292): Xaa is any amino acid
MKAQEYGDSERRTAGIKLFFIARVLVIILAFLALFWLVLRFSPYPDLKNFSARPNSVRYYDRGGILLQITPLSDGLRREKPAEFPMQVKDVFVFAEDRRFYRHFGIDGISMIRAVYQNIAHGRRVSGASTITMQLARIISDNGQSGAVQQKKKRQTILRKTCEMLNALRLEARLSKEQILELYLLSLPFGHNTEGAASAARTFFASDISMLSPAQIFCLAVIPRRPGMYNPLENPETCIAAASELHERFVRTEGLSKRKKSAQPLLAQINDDDWKFAFFSASVLNILLNCLI

SEQ ID NO: 21555 - DNA, 453 bp, Unknown
  Obtained from environmental sample
  misc_feature (1)..(453): n is a, c, g, or t
ttgatgaggaccttttatatgtttagcgaagaatttgatgaaagaattctttataagacaaagtattcaacagcaacattctttttcccaattatttttattttatttggtctttgcatagaaaggattggtctgattatagtgatacccagcgctatttggcttattattgaaattaagaattatgtttcttgtgaatttacaattactaacaaaagaataatagccaaatatggtttcttttcaaggaatatcttagaaatagatattaataaagttgatgaaatagatgtcggacaaggaattatagggcatatattagattatggatcaataacaataaaagctgctggcataaaaaatatttggcccagaggagtagacaatccaaatgattttgaaaaagcattttatagggttatcaataaggaatgggaaaacgcctttaggtag

SEQ ID NO: 21556 - protein, 150 aa, Unknown
  Obtained from environmental sample
  DOMAIN (61)...(140): Bacterial membrane flanked domain
  misc_feature (1)..(150): Xaa is any amino acid
MMRTFYMFSEEFDERILYKTKYSTATFFFPIIFILFGLCIERIGLIIVIPSAIWLIIEIKNYVSCEFTITNKRIIAKYGFFSRNILEIDINKVDEIDVGQGIIGHILDYGSITIKAAGIKNIWPRGVDNPNDFEKAFYRVINKEWENAFR

SEQ ID NO: 21557 - DNA, 369 bp, Unknown
  Obtained from environmental sample
  misc_feature (1)..(369): n is a, c, g, or t
ttgaagggggaatcaagtatagaagaagctttcaaaatggcaagcgatctgatcggtggctctattcggcctgcctcaataatttgtgcaaataactttctggctttcggatgtttgagggctttgcagacacataatgtcaaagtaccggatgatatatccttaataacatttgacgattttcctctcgcgcaactgacaaacccaacgctgacaactgtaagcattgatatgtatgatataggggatcaggccggaaatcttcttgtaaacaaaatcaaaagaccgcaaatgcaggtgcagatatacacaacggttccccaccttgtagcaagaggcagtacaatgccactccgcaagaccacataa

SEQ ID NO: 21558 - protein, 122 aa, Unknown
  Obtained from environmental sample
  misc_feature (1)..(122): Xaa is any amino acid
MKGESSIEEAFKMASDLIGGSIRPASIICANNFLAFGCLRALQTHNVKVPDDISLITFDDFPLAQLTNPTLTTVSIDMYDIGDQAGNLLVNKIKRPQMQVQIYTTVPHLVARGSTMPLRKTT

SEQ ID NO: 21559 - DNA, 939 bp, Unknown
  Obtained from environmental sample
  misc_feature (1)..(939): n is a, c, g, or t
ttgatcagatcggccgaggatatggccggcctcctgaaaccctacgaaggctacaatctggttaaagcgatcaaaaaagtaaccagcatccccatcgaaattcatacccatgccacaaccggtatgtctgtggcgactctgaccaagtgcgccgaggcgggtgcggaaattcttgatacggttatttcatcattagcaatgggaaccagccacagccccaccgaaacaatggtagagattttcaaaggaaccgaatacgacaccgggttagacaccaacctgctgctggaaatcgccgcctatttccgcgaggtacggaagaattataaaaagtttgagtccagcttcctcggcgcggacacacgcatccttgtcagccagattcccggcggaatgttgagcaatctggaaagccagcttaaggaacagggagcctcccaaaaaatggacgaggtgctgaaagagattgccgtggtacagaaagactcaggctatccgcctctggtaacgcccaccagccagattgttggaacacaggcggtgttcaatgtactgttcggccgttacaacaaactttccggcgaattccaggaccttgtggccggaaaatacggcgcctgccccgctcctaaaaacgccgaccttgtaaagaaggcccttgaagccctcaagatggaaaaagaaataacccaccgtccggcggacgatatacccgctgaatatggcaagctggaagaagagaccaaaaaagttctgggaacaagcactgttacaaccgaggacgtattgacctacgccatgttcccaaaagtcgcgcccaacttcttcaaaacacgcgcggacggcccggtggtattcaaaccggagacgcggctcccgccgcagcccctgccgcaaaagcggcgcccggacaggccgaagagtaacatgttaatgtaa

SEQ ID NO: 21560 - protein, 312 aa, Unknown
  Obtained from environmental sample
  DOMAIN (123)...(305): Conserved carboxylase domain
  misc_feature (1)..(312): Xaa is any amino acid
MIRSAEDMAGLLKPYEGYNLVKAIKKVTSIPIEIHTHATTGMSVATLTKCAEAGAEILDTVISSLAMGTSHSPTETMVEIFKGTEYDTGLDTNLLLEIAAYFREVRKNYKKFESSFLGADTRILVSQIPGGMLSNLESQLKEQGASQKMDEVLKEIAVVQKDSGYPPLVTPTSQIVGTQAVFNVLFGRYNKLSGEFQDLVAGKYGACPAPKNADLVKKALEALKMEKEITHRPADDIPAEYGKLEEETKKVLGTSTVTTEDVLTYAMFPKVAPNFFKTRADGPVVFKPETRLPPQPLPQKRRPDRPKSNMLM

SEQ ID NO: 21561 - DNA, 636 bp, Unknown
  Obtained from environmental sample
  misc_feature (1)..(636): n is a, c, g, or t
gtgcttcgtttcatggaagaaggttttttcaggaatatgctgccgggaacaacggtaattttaatttcccgttccataacccgcctaaacatcgcgggcataacataccgggatcaaatattcaatgtaaacgaaagcgacctgcgttttaccgaaaacgaattggcccaatatttccgccggatggaaatttcattacggacggaaagcctgcgcgaaattatgcaggataccgaaggctgggcattcgcgatcaaccttatcgcgcggtcatatcaaaaagctcccggctacggcggctatgtgcgcagcgcgatgaagcagaatatctttcggcttttggaaatggaaatatgggccgggctgtcggaacctttgcagatttttttggttcgtctttcgctcatcgatcacctgtcagttgatttactcacccaactggcgggaaaagaagaagagtttgtcggggaattggaaaaacaaagcgcctatgtgcgccgggacagctatatcaacgcgtaccttattcaccctttgtttttggaatttttaagaacaaagcaaacattgcttacggaagaacagaaaagggaaacttacgccgtatcaggcgattggtgcgcccgaacggtttaa

SEQ ID NO: 21562 - protein, 211 aa, Unknown
  Obtained from environmental sample
  misc_feature (1)..(211): Xaa is any amino acid
MLRFMEEGFFRNMLPGTTVILISRSITRLNIAGITYRDQIFNVNESDLRFTENELAQYFRRMEISLRTESLREIMQDTEGWAFAINLIARSYQKAPGYGGYVRSAMKQNIFRLLEMEIWAGLSEPLQIFLVRLSLIDHLSVDLLTQLAGKEEEFVGELEKQSAYVRRDSYINAYLIHPLFLEFLRTKQTLLTEEQKRETYAVSGDWCARTV

SEQ ID NO: 21563 - DNA, 972 bp, Unknown
  Obtained from environmental sample
  misc_feature (1)..(972): n is a, c, g, or t
ttggggnnnnnggttgatgcgagagaaccggcgaaacgtgcgggtggtcaaatcggcgggaccgggccggtgaagcggcggatcatggagatgggcatcaccaagggggtggaggtctatgtccgaaaagtggcgccgctgggcgacccgatggaggttacggttcggaactaccagctctccctcagaaaggcggacgtcgaactgatcgaggtcgaaaacagccgtttatacgttatcggcgacgcgccgcaagaaaacagcgctgccggtcaggatagcgccgataaagcggatgctgtcaaaaaaggaccgtctatcgataaaggcaagcgcattaaaatcgcgcttgccggaaatcccaacagcggcaaaacgaccctgttcaacgccctcaccggatcaaaccagtttgtggggaattggcccggcgtgacggtggaaaagatggagggcaaactgaagggctatgaggaagtgatcgttacggatttgcccggcatatactccctttccccatacacgccggaagaggtcgtagcccgtaattatttgatcgatgaacgccccgacgtcatcctcaacatcgtagacgccacgaatcttgagcgcaacctattccttacgacgcagctgaccgaactcggcatacccgtcgtagtggcgttgaacatgatggacatagtgcgtaaaaaaggcgacaagatcgataccgcgaggcttgccgaagaattgggctgtcacgttgaggaggtctccgccctaaagggctacggcgtcgcggaggcgttggacgcggcggttaaagcggcggacggcgtgaagaccgtgccgcagcacagcttctccggcggcgtggagcacacactggcgcacatcgaagaggcggtgctccatagtatgccggaagagcgtcagcgcttctttgccgtaaaactcgttgagcgggacaagaaatcatcgagaagctga

SEQ ID NO: 21564 - protein, 323 aa, Unknown
  Obtained from environmental sample
  DOMAIN (3)...(74): FeoA domain
  misc_feature (1)..(323): Xaa is any amino acid
MGXXVDAREPAKRAGGQIGGTGPVKRRIMEMGITKGVEVYVRKVAPLGDPMEVTVRNYQLSLRKADVELIEVENSRLYVIGDAPQENSAAGQDSADKADAVKKGPSIDKGKRIKIALAGNPNSGKTTLFNALTGSNQFVGNWPGVTVEKMEGKLKGYEEVIVTDLPGIYSLSPYTPEEVVARNYLIDERPDVILNIVDATNLERNLFLTTQLTELGIPVVVALNMMDIVRKKGDKIDTARLAEELGCHVEEVSALKGYGVAEALDAAVKAADGVKTVPQHSFSGGVEHTLAHIEEAVLHSMPEERQRFFAVKLVERDKKSSRS

SEQ ID NO: 21565 - DNA, 510 bp, Unknown
  Obtained from environmental sample
  misc_feature (1)..(510): n is a, c, g, or t
ttgagacggcggcagcgtttgctccccgaacaacagagtgaaaccgtcatgagtgaaggcgtaaaaatcatagcgcagaaccgaaaagcgagacacgactattctgtggatgaaacttatgaatgcggcatggagcttttgggaacggaagtaaaatctttccgtgacggaaaaatctcattccccgattcttgggcggaagtgataaacggcgaagtatggcttcgttcgctgatagtagcggaaaatccgttttcatcgatttttaaccacgaaccggacaggaaaaaacggcttcttttgcataaggacgaaataaaaagaattcagcgaaaagtggaagaaaagggctatacgctaattccgctgtcgttttattttaagaaaggcagggtaaaagtagaaatcgggctgtgtaagggtaaaaaagcgtttgacaaacgggcgggaatacgtgaaaaagacttaaaacgtgaaattgcccgtgaattcaggcatggacttcaataa

SEQ ID NO: 21566 - protein, 169 aa, Unknown
  Obtained from environmental sample
  DOMAIN (22)...(89): SmpB protein
  misc_feature (1)..(169): Xaa is any amino acid
MRRRQRLLPEQQSETVMSEGVKIIAQNRKARHDYSVDETYECGMELLGTEVKSFRDGKISFPDSWAEVINGEVWLRSLIVAENPFSSIFNHEPDRKKRLLLHKDEIKRIQRKVEEKGYTLIPLSFYFKKGRVKVEIGLCKGKKAFDKRAGIREKDLKREIAREFRHGLQ

SEQ ID NO: 21567 - DNA, 615 bp, Unknown
  Obtained from environmental sample
  misc_feature (1)..(615): n is a, c, g, or t
ttggagtatcacgagatttcatttcaaactgaaaaattggcggagatccttaacgaagcgcttagcgcaaagtggagggaaggccgcggcatagaaatcgttaattttggaattacatgcaccgcttcgccggaagatgaaacgcggatcaaacaacttcaaacatcggcagttatgcgcgacccgacaatggcagccgcgtccctggtaaacgcccagagcgacgccatgcgtactgccgcgggaaatacaggcggcgcaatggcaggtttcatgggcatgggtatggcaggcgcggcaggcggcatgaatgcgcaaaacttgtttgcgatggggcagcaaaacgccccgcagcaagcgccgcagcaacaagcggcaggttggacatgcgcctgcggtcgtgccgggaacaccggcaaattctgcgccgaatgcggacagccaatgcccgcatcggcttctacatggacatgctcatgcggccacgccggaaacaccggcaaattctgcgccgagtgcggaaagcccgcgcctgccgccgaatggacttgctcttgcggacaagccggaaacaccggcaaattctgcgcgggatgcggaaagcccaggccttaa

SEQ ID NO: 21568 - protein, 204 aa, Unknown
  Obtained from environmental sample
  misc_feature (1)..(204): Xaa is any amino acid
MEYHEISFQTEKLAEILNEALSAKWREGRGIEIVNFGITCTASPEDETRIKQLQTSAVMRDPTMAAASLVNAQSDAMRTAAGNTGGAMAGFMGMGMAGAAGGMNAQNLFAMGQQNAPQQAPQQQAAGWTCACGRAGNTGKFCAECGQPMPASASTWTCSCGHAGNTGKFCAECGKPAPAAEWTCSCGQAGNTGKFCAGCGKPRP

SEQ ID NO: 21569 - DNA, 762 bp, Unknown
  Obtained from environmental sample
  misc_feature (1)..(762): n is a, c, g, or t
gtgaaccagacagagtggaaaaattttactgcggcaagagagcgttttcgtcacataacggaagaaattgaaaagagcctgccgaaattaaaaaaaatacagcaaaaattcgccgacagccgctctgaagcaaagaacgccgcctacactgtagaaactccggttgtgtacaataccgcgcttgacgatattacaattgacgatgaaataaaacttattttagtggcggacaatcccggcagaagagaacaggccgcagagaacaggcgctatcttgtagggccatcgggaaaaatagcgcaaaaatttttccgcgacaatccgtctttgggcattgatttccttaaaaacgtgattatccttaacaaaaccccgattcactccccgcgtaccgccgaattgagccttctttgcagtatagaagaagaaaccggcggcaattcaatcacccgcgttctggaaagctctcaaaaaaacatggctgatcttcttcttgaattccagcgggcgcttaatacgcaggtttggataacaggctattcggaaatgaaaaaaggcggtatttttgaaatttataccgacaggctcaaagaactgtacgcggataaacccgaattgtacaaacagattttctttttcaggcatttttccatgaaccaatttaccattgatcttaaaaaacaggcgatagacggagaaacaaccgcaaaaacacttaatcgcataggccgcgcctacagaaaacgaatactgggattgtaa

SEQ ID NO: 21570 - protein, 253 aa, Unknown
  Obtained from environmental sample
  misc_feature (1)..(253): Xaa is any amino acid
MNQTEWKNFTAARERFRHITEEIEKSLPKLKKIQQKFADSRSEAKNAAYTVETPVVYNTALDDITIDDEIKLILVADNPGRREQAAENRRYLVGPSGKIAQKFFRDNPSLGIDFLKNVIILNKTPIHSPRTAELSLLCSIEEETGGNSITRVLESSQKNMADLLLEFQRALNTQVWITGYSEMKKGGIFEIYTDRLKELYADKPELYKQIFFFRHFSMNQFTIDLKKQAIDGETTAKTLNRIGRAYRKRILGL

SEQ ID NO: 21571 - DNA, 405 bp, Unknown
  Obtained from environmental sample
  misc_feature (1)..(405): n is a, c, g, or t
atgaaaaatattatcaaatccagaattacaggttttcttactatgttagcggtaattgccgctttcggagcggcggcaatgctgttgtggaacgccctcatgcctcagattttcgccatgcctgcgctgacttactggcagacggtcggattaatgctgttggcgaggatacttttcggcggactggcgcatgacatggcgcacggcggacgcaggggaaggggagacgtactgatgtttcgtcaaggaaacaaactccgtgaaaaatggatgaacatgagcgaagaagaacgcaaagagttcatggaaaaggaaaaggattttttcaagttccatagagatttttcacgttttaacggtttcttcggcggcgatgaaggcaagaaggacgataaaaatgagtaa

SEQ ID NO: 21572 - protein, 134 aa, Unknown
  Obtained from environmental sample
  SIGNAL (1)...(26)
  misc_feature (1)..(134): Xaa is any amino acid
MKNIIKSRITGFLTMLAVIAAFGAAAMLLWNALMPQIFAMPALTYWQTVGLMLLARILFGGLAHDMAHGGRRGRGDVLMFRQGNKLREKWMNMSEEERKEFMEKEKDFFKFHRDFSRFNGFFGGDEGKKDDKNE

SEQ ID NO: 21573 - DNA, 660 bp, Unknown
  Obtained from environmental sample
  misc_feature (1)..(660): n is a, c, g, or t
atggaagaccctgtggaaatgaacatagaaggagtgaaccaagggcaaataaacaatgccgcaggttttacctttgcttctggaataagagctattctccgtcaagatcctgatgttattatgataggcgaaatgcgcgataaagaaacggcgagcatggcaatagaaagtgccttaacgggtcatttagtgttcagcacccttcacaccaacgatgcagcaggtgccttcccccgtttgctagaaatgggactagaacccttccttgttgctacggcaataaagggcgttttagcccaaagacttgtgcgcagaatttgccccaactgcaaagatgaagaccctacaatagacccagaggttagaaaagatttgcacattccaccgcatattaaattctacagaggcaaaggctgcaataggtgcgagaacacgggctataaaggtcgtactggaatttatgaatttttggttccaagcgaagaagtccgcaatttggttttaagaagagcgagcggtgacgaaataaaaagagtgtgcatgacacaaggcatgaacacgttgcgcatggacggtatggaaaaagccttaactggcgtaactaccttggaacaagtactcagtgcatctgaaaaagacgaattcaagaagtcggtataa

SEQ ID NO: 21574 - protein, 219 aa, Unknown
  Obtained from environmental sample
  DOMAIN (1)...(106): Type II/IV secretion system protein
  misc_feature (1)..(219): Xaa is any amino acid
MEDPVEMNIEGVNQGQINNAAGFTFASGIRAILRQDPDVIMIGEMRDKETASMAIESALTGHLVFSTLHTNDAAGAFPRLLEMGLEPFLVATAIKGVLAQRLVRRICPNCKDEDPTIDPEVRKDLHIPPHIKFYRGKGCNRCENTGYKGRTGIYEFLVPSEEVRNLVLRRASGDEIKRVCMTQGMNTLRMDGMEKALTGVTTLEQVLSASEKDEFKKSV

SEQ ID NO: 21575 - DNA, 717 bp, Unknown
  Obtained from environmental sample
  misc_feature (1)..(717): n is a, c, g, or t
atgtccgttccgttttatcctgattttattcctttggatattaacctgaaagacagccttcatccgcgcctttctctgacacctgacggcgtttcggaatttactttctcaggactatatcttttcaggaacagatacaaatatcgtatttcgcgtaataccggcgaagacggcggatttatcatttccggcgtacagcccgctgccggaacagagcgcgaaaaaacattctttatgacaccctgcgccgctcctgactggaaaacactggaaaacctgtttataactcatgattactggaagaatatttctgaatcagtcgtttctcctgtcagggaaaaattagaggagcgcggcgttgtttttacggaagacagggataattttgattatctttactaccgtaaagatttggcggaattgaacgggaaaaagtatcataaaaagaaaaaccatgttaatcatttcagaaatgcctatcctgatcatgaacagaagcctgtaagcaaagaaacgatctctgcagctaacgagattttggacaggtggcggcaggatgctccgctggacggcgattataaagcttcaaaagaagcgcttgatttatttgacgttcttgcgctaaggggaacagtcttttatgtgaacggaaatcctgctgcatattgtctgggtgaaagcatcgcaagggggaagaatgtttgcaattcattttga

SEQ ID NO: 21576 - protein, 238 aa, Unknown
  Obtained from environmental sample
  misc_feature (1)..(238): Xaa is any amino acid
MSVPFYPDFIPLDINLKDSLHPRLSLTPDGVSEFTFSGLYLFRNRYKYRISRNTGEDGGFIISGVQPAAGTEREKTFFMTPCAAPDWKTLENLFITHDYWKNISESVVSPVREKLEERGVVFTEDRDNFDYLYYRKDLAELNGKKYHKKKNHVNHFRNAYPDHEQKPVSKETISAANEILDRWRQDAPLDGDYKASKEALDLFDVLALRGTVFYVNGNPAAYCLGESIARGKNVCNSF

SEQ ID NO: 21577 - DNA, 606 bp, Unknown
  Obtained from environmental sample
  misc_feature (1)..(606): n is a, c, g, or t
ttgaaaacgggtgtgcgtttttatgtaatggttacagttacagggtatcctgccgaactggaaggcgatgcgccggacacagcgaaggttttggcttccatgaaaaaactggcgcaaaaaatcgggcaggatagagtaatttggcgttatgatcctgtcatactgacaagtataactgatgaagaatttcaccgcaggaattttcaagacttggcgcagacgcttgccggttctgtccggcgggttattatcagtatttacgatgaatatcctgcggcaaaaaagcggcttgatttaaaagaaaaagcgggagtgctgcgaatgccggaagcaaataatattctacctcaattgcttggcggtttcgcaaaaagcgcggaagccgccggcattgaaatacaaagctgcgccgaaaaggaagatttttcttcttttggaattaagagaggagcatgtatagacgcaatgttaatcaataaattgtgggggcttgaatccggcggcaaggataaaaaccagcgtcctcattgcctgtgctgtaaaagtgttgacatcggcgcttacggaacttgcagtgcgcaatgtgtttactgttacgcatggtaa

SEQ ID NO: 21578 - protein, 201 aa, Unknown
  Obtained from environmental sample
  misc_feature (1)..(201): Xaa is any amino acid
MKTGVRFYVMVTVTGYPAELEGDAPDTAKVLASMKKLAQKIGQDRVIWRYDPVILTSITDEEFHRRNFQDLAQTLAGSVRRVIISIYDEYPAAKKRLDLKEKAGVLRMPEANNILPQLLGGFAKSAEAAGIEIQSCAEKEDFSSFGIKRGACIDAMLINKLWGLESGGKDKNQRPHCLCCKSVDIGAYGTCSAQCVYCYAW

SEQ ID NO: 21579 - DNA, 462 bp, Unknown
  Obtained from environmental sample
  misc_feature (1)..(462): n is a, c, g, or t
atgatctacagtgtgcatttttacgagccgctgctcttcacgcaccaaaacgcgccctggatcaacaatcctgaaattaagactgcaaggccgtatccgggcgattacggtcccggctttgtccgcaaatacggcctgacgctgtcggccggagtctggaacaaggagcggctcgcgaaggaattcgcgcctgtcaacgcgttcaggaaaaagtacaataccaaagttatctgtaacgagtttggcgtttacacgcccgtcgagcttatatcgcagctgcgctggtatgacgatctgctctcaatcctcaatgagatggggattggtttctcgtactggaactataaaaacctggacttcgggataatttccatcggggagaagctgcacgaaccccttccgcaatacgacaacgccgacaggataaatcacccggttcttgaagtgttaaggaagtattaa

SEQ ID NO: 21580 - protein, 153 aa, Unknown
  Obtained from environmental sample
  misc_feature (1)..(153): Xaa is any amino acid
MIYSVHFYEPLLFTHQNAPWINNPEIKTARPYPGDYGPGFVRKYGLTLSAGVWNKERLAKEFAPVNAFRKKYNTKVICNEFGVYTPVELISQLRWYDDLLSILNEMGIGFSYWNYKNLDFGIISIGEKLHEPLPQYDNADRINHPVLEVLRKY

SEQ ID NO: 21581 - DNA, 690 bp, Unknown
  Obtained from environmental sample
  misc_feature (1)..(690): n is a, c, g, or t
gtgaagcggcttaaaaacgacagaaaagaaatgaaaatactgacggttgaggaagttaaaaaactgtttccccaaaattatgaggctatatggggcgatgaaattttatcctatgccgcttgccgccttgcttcgctgactggtatgaggataggggaaattctcgggcttcggaaagaatttgtgtttgacgattatatctacgtctgcggtcaatccggcggtagagagggttatagaccgcataccaaaactaaagagaatagaaatatccctctaattcctgaaatgatcgctctgttgcgggagttgcatgacggcaagggttttgtgttctcgctggacggcggggtgtctccgactacatcaacctacgtccgcaatggttttaataaggcgttgagaaatatcgggataagcgaagaggaaagggcgcgaaggtctataactattcacagttggcggcatttcctcaataccgaattgttaaggcagggtatgacgattatgcaagtgcagaatgttacagggcataaatcgcagagaatgaccgaaatgtataaccacccaagcgaagggcaaataaacgatgttataaaggcacagtcggctatcatcgggactaacgaaacggaaaaggtcgaaaatggtttgaagctggttaaaggttctggacggaaatcagcataa

SEQ ID NO: 21582 - protein, 229 aa, Unknown
  Obtained from environmental sample
  DOMAIN (13)...(197): Phage integrase family
  misc_feature (1)..(229): Xaa is any amino acid
MKRLKNDRKEMKILTVEEVKKLFPQNYEAIWGDEILSYAACRLASLTGMRIGEILGLRKEFVFDDYIYVCGQSGGREGYRPHTKTKENRNIPLIPEMIALLRELHDGKGFVFSLDGGVSPTTSTYVRNGFNKALRNIGISEEERARRSITIHSWRHFLNTELLRQGMTIMQVQNVTGHKSQRMTEMYNHPSEGQINDVIKAQSAIIGTNETEKVENGLKLVKGSGRKSA

SEQ ID NO: 21583 - DNA, 522 bp, Unknown
  Obtained from environmental sample
  misc_feature (1)..(522): n is a, c, g, or t
atgagcatgggcggcatcctctttgtcgatgaagcctatgtgcttgcagatacacaacggggaggcgcggctgatcagtacgcaagggaagcggtggaaattctgatgacccgtttggaaaatgacagaacaaaatttgtcggcgtagtcgcgggttacgaaaaagagatgcagatcttcctggacactgtaaatccgggaatgaggcggcgctttaaacattacctcagtctgagcgattacagcgcggaagaactttttgctatttttgtttcgatggtgaagaaagcaggttacaccctgacgcctgatgcaaacggtgccgcaaaagccgccattacggatatgttcaacaacaagggaccgaacttcggcaacgcaggagagattagagtgttctttgaaaaaaccacaagcaggttggcgaccagactttcggcgctctccaaagaagaacgcgccgacaaattgaaaaccattgaagcctgtgatattccggttaaagaaggaggcgccgcatga

SEQ ID NO: 21584 - protein, 173 aa, Unknown
  Obtained from environmental sample
  misc_feature (1)..(173): Xaa is any amino acid
MSMGGILFVDEAYVLADTQRGGAADQYAREAVEILMTRLENDRTKFVGVVAGYEKEMQIFLDTVNPGMRRRFKHYLSLSDYSAEELFAIFVSMVKKAGYTLTPDANGAAKAAITDMFNNKGPNFGNAGEIRVFFEKTTSRLATRLSALSKEERADKLKTIEACDIPVKEGGAA

SEQ ID NO: 21585 - DNA, 690 bp, Unknown
  Obtained from environmental sample
  misc_feature (1)..(690): n is a, c, g, or t
atgaaagcttacgccgcgctggaaaaaactgtgattgagcgcgaggagaaagcgatagaagcggagttggatagattgtttccggcgccgcctgcggcggacacaagcgctgaggacgcgcggcttgcggaaatagaacggaaccgcgccgagatggaaaaaaagtttaatgaagcgctggcaaatgtgaacggcgaggttgacgatttccgcaaagaagaagaacgcaagcgcattgaagaagaacgcaggcgtcttgaagaagaagcgcgccgtcttgaggaagaacgcagacgtaaagaggaggaagcgcgccgggaagccgagcgtcagcgggaaattgaaaggcaacggcttgaggaagagcggcgcagaagacgttttcagggggattactatcatatgagtcatagcggaatgttgactgctgaacttagaattggtagcgatcgtgctgaatgctggtatcgctgtactgtctgcggacgcgctactgttgtttattcagtttcaataagaggcgacaacattacattgaccgggggaagaaaacgcggcgattattgcagtttccaggaatacaaactggtagagaattacagcgggacggtgaacagttcaggaacaatattggaagggtactggtataataatggcgttagcgtgccgattgttttttacaaacgctaa

SEQ ID NO: 21586 - protein, 229 aa, Unknown
  Obtained from environmental sample
  misc_feature (1)..(229): Xaa is any amino acid
MKAYAALEKTVIEREEKAIEAELDRLFPAPPAADTSAEDARLAEIERNRAEMEKKFNEALANVNGEVDDFRKEEERKRIEEERRRLEEEARRLEEERRRKEEEARREAERQREIERQRLEEERRRRRFQGDYYHMSHSGMLTAELRIGSDRAECWYRCTVCGRATVVYSVSIRGDNITLTGGRKRGDYCSFQEYKLVENYSGTVNSSGTILEGYWYNNGVSVPIVFYKR

SEQ ID NO: 21587 - DNA, 429 bp, Unknown
  Obtained from environmental sample
  misc_feature (1)..(429): n is a, c, g, or t
atgccgatctacacccgtatgcgggctttgcctccttccaagatgaatttcagcaacatgagccaggctatcgcttccgaaggctgcatcatcactaatgcgtcaatttccaactccatagtaggggtcagaaccaccatcgaatccggggcaagcctgaacggagtagtctgtatgggggccgatcgctacgaaacagaggaagagaaaaagctgaacaacgaaaaacggcttcccaatttaggcattggtcagggtgttatcatcaaaggtgctatcatcgacaaaaacacccgcataggcgaaggctgccgcatcggaatcgacaacatcaaccgggttgacggcaactacggacattatcacatcattgacgggataatcgttattcccaaaaacaccgttctctatccgggaaccgtgatatag

SEQ ID NO: 21588 - protein, 142 aa, Unknown
  Obtained from environmental sample
  misc_feature (1)..(142): Xaa is any amino acid
MPIYTRMRALPPSKMNFSNMSQAIASEGCIITNASISNSIVGVRTTIESGASLNGVVCMGADRYETEEEKKLNNEKRLPNLGIGQGVIIKGAIIDKNTRIGEGCRIGIDNINRVDGNYGHYHIIDGIIVIPKNTVLYPGTVI

SEQ ID NO: 21589 - DNA, 450 bp, Unknown
  Obtained from environmental sample
  misc_feature (1)..(450): n is a, c, g, or t
atggacagcgggaaattcgaggcggcggccctttgggagctgcggcggctctttaaccccgagtttatcaaccggatagacgatgtgattgtctttaaggccctttcgcaaaaggaaatagaaaagatcctcgacagggaactggcggacatttcggtgaggctttccaagcagaacttctcgctgctcgtaactcctgcggcccgccgcattcttatcgaaaaaggctgggatcccaagttcgggggaaggcccctgcgccgggcggttcagaaagagcttgaagatcggatcgcctttttgattctggaggaaacgcatccgaccggaacagtttttatcgcggaaggaagaaacggcagaatcacccttaaagtaaaaacgggaaaagcagccggtgagcgatccgcagaagcgcttgccgaaccctatatcacggttcccggatag

SEQ ID NO: 21590 - protein, 149 aa, Unknown
  Obtained from environmental sample
  misc_feature (1)..(149): Xaa is any amino acid
MDSGKFEAAALWELRRLFNPEFINRIDDVIVFKALSQKEIEKILDRELADISVRLSKQNFSLLVTPAARRILIEKGWDPKFGGRPLRRAVQKELEDRIAFLILEETHPTGTVFIAEGRNGRITLKVKTGKAAGERSAEALAEPYITVPG

SEQ ID NO: 21591 - DNA, 951 bp, Unknown
  Obtained from environmental sample
  misc_feature (1)..(951): n is a, c, g, or t
atggccgagcgacggttattttccgtggctgaagaaaatcacgattgcgatgttattgctgtttgcgtcgatgtggggcaggctgcggactggaaggcgatttccaagcgggcgatgtctacgggggcgagcgcttgctatgtcgccgatgttaaaaaagaatatgttgaagaatatatttggcctgctctgaaagcgggggctgtctacgaagacaagtatcttcttggcacttcgacggctagaccgcttatcgctaaggtacttgtcgattacgcaagaaaagaaaaagcggacgctatcgcccacggcgcgacgggtaagggtaacgatcaggttaggttcgatcttggtattatggctcttgctcccgatatcgaaattatcgctccgtggaggacttggaagctgaaaagcaggcaggacgagatgaggtatctggctcggagaaaaattcctgtgcctatgaagaaaaaaaattcctacagtatggacgataatctttggcatatttctcatgaggggctggaacttgaagaccctgcgaatgagccgcagctcagaaaaatgcttactatgattgttccgccagaaaaagcgcctaacaaagctgaatatgtggaaattgaatttgaaaagggtattcctgtgtctcttaacggaagaaaaatggaaggggtgcagttgattaacgctcttaataagatcggcggcgctaacggggttggtattgttgacttggtggaaaatcgggttgtgggtatgaaaagccgaggtgtttacgaaactccgggcggctctattctctactatgctcatcaggagcttgaacatctttgtcttgacaggcagacttactctttcaacagcaggtttctcttaattaagcgagcttatttacggggggctttggtttacgccgttacgggaagcgttatgcgcttttattga

SEQ ID NO: 21592 - protein, 316 aa, Unknown
  Obtained from environmental sample
  DOMAIN (8)...(312): Arginosuccinate synthase
  misc_feature (1)..(316): Xaa is any amino acid
MAERRLFSVAEENHDCDVIAVCVDVGQAADWKAISKRAMSTGASACYVADVKKEYVEEYIWPALKAGAVYEDKYLLGTSTARPLIAKVLVDYARKEKADAIAHGATGKGNDQVRFDLGIMALAPDIEIIAPWRTWKLKSRQDEMRYLARRKIPVPMKKKNSYSMDDNLWHISHEGLELEDPANEPQLRKMLTMIVPPEKAPNKAEYVEIEFEKGIPVSLNGRKMEGVQLINALNKIGGANGVGIVDLVENRVVGMKSRGVYETPGGSILYYAHQELEHLCLDRQTYSFNSRFLLIKRAYLRGALVYAVTGSVMRFY

SEQ ID NO: 21593 - DNA, 561 bp, Unknown
  Obtained from environmental sample
  misc_feature (1)..(561): n is a, c, g, or t
ttgtcccgcgataccatgatcaatacagtcttggacgcgctttctcacgctatagagggaatgttgtctgtaaaagccggtattatttccgatacgctggcgtcttgtgccataaaaacaataatttcatcctgcgatgatttggaaaaaggttcgcttacaaaagaacaaaacgccggcttattatacgcggccacgcttgcgggcatggtgattgccaataccggtacgactgtggttcacgccatgggatattctcttacctactataaggacatcagccacggccgcgccaacggactggtgttgggacgctatctggaatatgtccgcgacaaggcgccctcgctgtgcgataagatatgcgctgccgcggggtttaaggccgaaaaggaaattaaaataaaaattgcgtcgcttctgggtaaagttgaacaactgaccggcgcggagatttcacattattcggcaaaggccgccgtaacgaaaaatattcaaaacggccttatccccatttcccaaaacgagattgaaacaatttacagggattcaatggcctaa

SEQ ID NO: 21594 - protein, 186 aa, Unknown
  Obtained from environmental sample
  misc_feature (1)..(186): Xaa is any amino acid
MSRDTMINTVLDALSHAIEGMLSVKAGIISDTLASCAIKTIISSCDDLEKGSLTKEQNAGLLYAATLAGMVIANTGTTVVHAMGYSLTYYKDISHGRANGLVLGRYLEYVRDKAPSLCDKICAAAGFKAEKEIKIKIASLLGKVEQLTGAEISHYSAKAAVTKNIQNGLIPISQNEIETIYRDSMA

SEQ ID NO: 21595 - DNA, 822 bp, Unknown
  Obtained from environmental sample
  misc_feature (1)..(822): n is a, c, g, or t
gtgaatacaaatgccgaacaggaggccgtaaaccgtatcgccaccgattacgcctccatacttctgaataatgacatactggcgtattacgggcatccgcgctctacgataatgggcattcttggacgattccccatggaagaactcgacaagaaactcaccgcactcgccgcagaatacaaggcggcgggcgggcgtaatgttattaaagcgttttatattatttacgggacggtatggcccgaaggcgaaatcggcattatcaacgcggaacttctgacccgctggattgaatacgcgaaagggcgggatatgcttgtttttatcgaccaccagataggccgctacgatcctgtcgcttcccttaaacgtatgctgccctggctcaagtatcccaatgtccatcttgcccttgaccctgaatggcgtactacaaaaccgatgaaggaaatagggtcggtcaccgccgatgagattaaccgcgcccagcaggaaatggaagactacataatcgccaatgacattcccggcgagcgttttttggttatccaccagtttaattggcgcatgattagcaacagggaaagggtgagaagcgatttccagcgcgtgaggcttgtccactgcgccgacggtttcggttcgccgcacctcaagcgcggctcttatgcgtataacgccgaggcgaccaatataccgattaaagcttttaaactgttctacaatttcgggatacccggcgcgggttacgaccacccccttatgagccccagtgaggtatacgccctgaaaccgcgcccctatattatcatgtaccagtga

SEQ ID NO: 21596 - protein, 273 aa, Unknown
  Obtained from environmental sample
  misc_feature (1)..(273): Xaa is any amino acid
MNTNAEQEAVNRIATDYASILLNNDILAYYGHPRSTIMGILGRFPMEELDKKLTALAAEYKAAGGRNVIKAFYIIYGTVWPEGEIGIINAELLTRWIEYAKGRDMLVFIDHQIGRYDPVASLKRMLPWLKYPNVHLALDPEWRTTKPMKEIGSVTADEINRAQQEMEDYIIANDIPGERFLVIHQFNWRMISNRERVRSDFQRVRLVHCADGFGSPHLKRGSYAYNAEATNIPIKAFKLFYNFGIPGAGYDHPLMSPSEVYALKPRPYIIMYQ

SEQ ID NO: 21597 - DNA, 972 bp, Unknown
  Obtained from environmental sample
  misc_feature (1)..(972): n is a, c, g, or t
atgccccatgatcatatcgcaaacgccgtcaatgacgggttgtgcgagcctattccggccgatctcaggcagaaattctctgcggctctattggacgcagcaattcaaacctgtacttccgatggcaagctttgggcggtacctattgaaaccgaaaatatcgctttcttctacaataaggatcttctgggaaacactcccgttccgcagtctttcgaggaagtaattgcctttgcggaaaaatggaacaatgcggcgcagaataaatacgccctgcgctggcaggtagacgacgcgtatcacaattatttcttcctctccgcgtatggcatgagcgttttcgggcctaaccgcgacgattaccggaatccgggtttcgactccgacgcagcccgcaaaggtatcgaattccagaatagcctgcggaagtatttcaatgttaacgtagcggatgctacatgggacagcacggtcgccgcattccagcggggtgaggttccctttactattactggtccctgggctatcgccgatgctcaaaagaacggtgttaactttggcataaccaagataccgaccatcgaagggaaacagccgcgctgcttctctggtaatattattgcaacggtttccagcttcagcaataatttcgacacggcctttgcctttctggattttcttgccggcaccgatgccgctgctataaagtacaatgtctcaggaaagcttcctgcgcttaaagatatcagcggaattccgggattgcgcgatgatgtatatctggcgggtatccagcatcagtcgccgtatgcggatcccatgccgacgatccccgaagtcaactttatgtgggagtccttaaagaccctctttacatttacctgggacggacagcttactgcccaacaggcgcagcagaaggcaatgaccgactacgacgctgcccctcgcatagccggcaagaaacgctga

SEQ ID NO: 21598 - protein, 323 aa, Unknown
  Obtained from environmental sample
  DOMAIN (28)...(234): Bacterial extracellular solute-binding protein
  misc_feature (1)..(323): Xaa is any amino acid
MPHDHIANAVNDGLCEPIPADLRQKFSAALLDAAIQTCTSDGKLWAVPIETENIAFFYNKDLLGNTPVPQSFEEVIAFAEKWNNAAQNKYALRWQVDDAYHNYFFLSAYGMSVFGPNRDDYRNPGFDSDAARKGIEFQNSLRKYFNVNVADATWDSTVAAFQRGEVPFTITGPWAIADAQKNGVNFGITKIPTIEGKQPRCFSGNIIATVSSFSNNFDTAFAFLDFLAGTDAAAIKYNVSGKLPALKDISGIPGLRDDVYLAGIQHQSPYADPMPTIPEVNFMWESLKTLFTFTWDGQLTAQQAQQKAMTDYDAAPRIAGKKR

SEQ ID NO: 21599 - DNA, 642 bp, Unknown
  Obtained from environmental sample
  misc_feature (1)..(642): n is a, c, g, or t
ttgtttcaggcaatgctgttacgcgcaaagggattgcgttttatcaaattctggcgcggtatttttatcctgccgtgggcggttccgggcattgtgtccatgatgatattccgcgttatgttcaacaaagaaggcgcgcttaaccagatactgcttaattttggcttgataaaggaagcgatatcttttatgtccgatccaaattgggcaaaaactgtgctggttctggtaaatatgtggctgggtttcccgtattttatggcccttatcgcaggaattatgacaacaattcccgaagagcaatacgaggcggcgcagatcgacggtgcgaacgcgtttcagcaattcagatcgataactctgccctttatactgtcatcaacggctcctcaaattatgatgagccttacttttaattttaacaacttcaaccttatctatttcctgacaggcggcgggcctcccaattcgacactgcaaatggcaggctctaccgatattttaatttcctggatttttaaactcacgctggatcagcggatgtacaattacgcagcggccatgagtatctttattttcgtgattgtcgcttcgatttccggctggaacctgatgcgtacaagagcgtttaaggaggattaa

SEQ ID NO: 21600 - protein, 213 aa, Unknown
  Obtained from environmental sample
  misc_feature (1)..(213): Xaa is any amino acid
MFQAMLLRAKGLRFIKFWRGIFILPWAVPGIVSMMIFRVMFNKEGALNQILLNFGLIKEAISFMSDPNWAKTVLVLVNMWLGFPYFMALIAGIMTTIPEEQYEAAQIDGANAFQQFRSITLPFILSSTAPQIMMSLTFNFNNFNLIYFLTGGGPPNSTLQMAGSTDILISWIFKLTLDQRMYNYAAAMSIFIFVIVASISGWNLMRTRAFKED

SEQ ID NO: 21601 - DNA, 465 bp, Unknown
  Obtained from environmental sample
  misc_feature (1)..(465): n is a, c, g, or t
gtggcgctggcgtgggccaccatcctcgccttcctgccgcaaacgataggcggcgcgccgaaaatcgtctcatcaacccttgccgccttcgccgtggtcttcatcctgagtttcatacggtcgctgatcttcgacctgcgcgacatagagggcgacagaatcatgggccgcgagaccctgatcacaatcatcggcgagacccgggcccgtaaggcgctgcttataatgatatgggcctgcgtcggcctgctggcaatctcccccgcggtaatgggcctgaccgcctaccgctacgccggaaccctgcgctacctcttccaaatccccgccctggtctacgccgcaatcttcgtccgcctaaacgccggaatccgccccaaccactcggcgctcttctgcctgctggcggacggaatcttctacctggccgcccttggagccttcgcggcgacgcttattgtttga

SEQ ID NO: 21602 - protein, 154 aa, Unknown
  Obtained from environmental sample
  misc_feature (1)..(154): Xaa is any amino acid
MALAWATILAFLPQTIGGAPKIVSSTLAAFAVVFILSFIRSLIFDLRDIEGDRIMGRETLITIIGETRARKALLIMIWACVGLLAISPAVMGLTAYRYAGTLRYLFQIPALVYAAIFVRLNAGIRPNHSALFCLLADGIFYLAALGAFAATLIV

SEQ ID NO: 21603 - DNA, 660 bp, Unknown
  Obtained from environmental sample
  misc_feature (1)..(660): n is a, c, g, or t
atggtgggcatagcgcaagcgcgttacgagatcataaacatgggaaagcatgaccgcgagatgctcgaaaaactcaaagccctcctctccggaaacaccggcggcgcaggcggtatggagagcgttgaaaacgaagagaaattggtagggagcatattctataaggaagaggtaatggacaacatacagcgcgagataaccgtcttcctgacagacgtcctatccggcaacgtccccagaagcctggcggaagaggcgcaagttcaaatacgcttagccgacgattacgaaacaataagcgactacataaccacactggccaaactctacaaacgcataaaaaacgccaccggcgtggaaatgccccaaataatgcgagacgaactggtttcgctccacgactccgtctccgattacttcgacttggtcaaccacgcgttcagcgtgaacaacaaggccatcatatcaaaggccaacccgcaaggcgacgccataacccacaagttcagagaactgcgcggcagacacttggccaggttgtcggagactccggtagacccgctgctgagcacaacttttccggatatgctcataagctacaggcggataaaagaccacatcttgaatatcgcggaggtgatgtcgggagaggaaacgtag

SEQ ID NO: 21604 - protein, 219 aa, Unknown
  Obtained from environmental sample
  misc_feature (1)..(219): Xaa is any amino acid
MVGIAQARYEIINMGKHDREMLEKLKALLSGNTGGAGGMESVENEEKLVGSIFYKEEVMDNIQREITVFLTDVLSGNVPRSLAEEAQVQIRLADDYETISDYITTLAKLYKRIKNATGVEMPQIMRDELVSLHDSVSDYFDLVNHAFSVNNKAIISKANPQGDAITHKFRELRGRHLARLSETPVDPLLSTTFPDMLISYRRIKDHILNIAEVMSGEET

SEQ ID NO: 21605 - DNA, 579 bp, Unknown
  Obtained from environmental sample
  misc_feature (1)..(579): n is a, c, g, or t
gtgtttaaaaagagttttttattgattttatgcgttttttctgctgttttggcagattttagcttttatcgcaatagagatgctcaaaggtttgtagaaaaaactgccaagcctttcaaagcagataaagatgttgttgtggtaattatgcgcgaaggtattcctcggggtgggggttacacatatcaatacccaagggaaaacccgcccccatttatgacagacaaatatgccaaagaaggtgatttatctatggaaatagaacttatagcttcagactattctggtgttgctattgccatagctggtagcgtggatttaaatccttatatggaagaaggtgttttggaattttggataaaaggcaacaaaggcgaagaagtttgccaatatgttttattagacgatggcgtaaaaagcaacggcgagagcttgcaggtgaaaatcggttccaagagttttggggatatagccacagaatggcaactcgttagcattcctttaaagctttttggcggaactggcgtatattgggacataaaaaatcaacgagaagtttccatgcctttgcatggatga

SEQ ID NO: 21606 - protein, 192 aa, Unknown
  Obtained from environmental sample
  SIGNAL (1)...(18)
  misc_feature (1)..(192): Xaa is any amino acid
MFKKSFLLILCVFSAVLADFSFYRNRDAQRFVEKTAKPFKADKDVVVVIMREGIPRGGGYTYQYPRENPPPFMTDKYAKEGDLSMEIELIASDYSGVAIAIAGSVDLNPYMEEGVLEFWIKGNKGEEVCQYVLLDDGVKSNGESLQVKIGSKSFGDIATEWQLVSIPLKLFGGTGVYWDIKNQREVSMPLHG

SEQ ID NO: 21607 - DNA, 435 bp, Unknown
  Obtained from environmental sample
  misc_feature (1)..(435): n is a, c, g, or t
atgcacgacgtaggaaaaattggtaccccggatgacattttaaacaaggaaggcccgctttccgattgggaatggtcggtaatgagggagcacaccaaaaacggcgcttttattctctcaacctatcccaatccaatggcaaaagaaattgccctttcccatcacgaacgctgggacggctcaggatacccttaccagctcgcgggtgaaatgataccacttgccgccagaattgttaccatcgcggatgtatacgatgccctaagaatggtaagaagctacaagcccggctttgatcatgatgtaacaatgaaaaaaatgattgaagaaaaagaaacccagtttgatcccttcattattgaagttttttcttctataggggatgattttagaaagatcttcgatgaaaatcaggatatcgggaaggccagctaa

SEQ ID NO: 21608 - protein, 144 aa, Unknown
  Obtained from environmental sample
  DOMAIN (1)...(88): HD domain
  misc_feature (1)..(144): Xaa is any amino acid
MHDVGKIGTPDDILNKEGPLSDWEWSVMREHTKNGAFILSTYPNPMAKEIALSHHERWDGSGYPYQLAGEMIPLAARIVTIADVYDALRMVRSYKPGFDHDVTMKKMIEEKETQFDPFIIEVFSSIGDDFRKIFDENQDIGKAS

SEQ ID NO: 21609 - DNA, 774 bp, Unknown
  Obtained from environmental sample
  misc_feature (1)..(774): n is a, c, g, or t
ttgcctaaagatcccaataacggtaaagatataatcatggaaatacgcgccggaaccggaggcgaagaggccgctctgtttgccggtgatctctttcgcatgtatacgaggttcattgataaaaagggctggaagatggaatacatagacgggaacgaaaccgaaataggcggcttcaaagaggtaatattttcggtgcgcagctccgaagcctatgaaaatatgaaatttgaatcgggcggccacagggtgcagcgcatcccgactacggaatccggcgggcgcatacatacatcggcggttaccgtggcagttatgcccgaagccgaagagaccgatatcgcaatagaccccaatgacataagggtcgatgtttaccgctctaccggccatggcgggcaatctgtaaatacgacggattccgcagtcaggattactcatataccgacgggcatggttgtcacatgccaggacgagaagtcccagctaaaaaacaagtccaaggccatgcgggtacttcgcgcccgtttgtacgaaaaagaacaggaagagcgccgcaaagaagaatctgaactgcgtaaattgcagataggctccggagacaggagcgaccgcgtacgaacatataattacccgcagtcaagggttaccgagcaccgtataggccttaccctctattctttggaaagctttcttgagggcgagatggacgaaataataaacgccctgaagaagggcgaggttgaggagtcgcttaaaaggctttaccagtga

SEQ ID NO: 21610 - protein, 257 aa, Unknown
  Obtained from environmental sample
  DOMAIN (1)...(78): PCRF domain
  misc_feature (1)..(257): Xaa is any amino acid
MPKDPNNGKDIIMEIRAGTGGEEAALFAGDLFRMYTRFIDKKGWKMEYIDGNETEIGGFKEVIFSVRSSEAYENMKFESGGHRVQRIPTTESGGRIHTSAVTVAVMPEAEETDIAIDPNDIRVDVYRSTGHGGQSVNTTDSAVRITHIPTGMVVTCQDEKSQLKNKSKAMRVLRARLYEKEQEERRKEESELRKLQIGSGDRSDRVRTYNYPQSRVTEHRIGLTLYSLESFLEGEMDEIINALKKGEVEESLKRLYQ

SEQ ID NO: 21611 - DNA, 456 bp, Unknown
  Obtained from environmental sample
  misc_feature (1)..(456): n is a, c, g, or t
atgagtaatcctgactgcggaatccgtcgtatttacagattgcccgccatggccggtagagcggtaaacatcgacccttatgtcattggggtctattgcgatatcggtctcttcggcttcgggcataactgccacggtaaccgccgatgtatgtatgcgcccgccggattccgtagtcgggatgcgctgcaccctgtggccgcccgattcaaatttcatattttcataggcttcggagctgcgcaccgaaaatattacctctttgaagccgcctatttcggtttcgttcccgtctatgtattccatcttccagccctttttatcaatgaacctcgtatacatgcgaaagagatcaccggcaaacagagcggcctcttcgcctccggttccggcgcgtatttccatgattatatctttaccgttattgggatctttaggcaaaagctgaaattatag

SEQ ID NO: 21612 - protein, 151 aa, Unknown
  Obtained from environmental sample
  misc_feature (1)..(151): Xaa is any amino acid
MSNPDCGIRRIYRLPAMAGRAVNIDPYVIGVYCDIGLFGFGHNCHGNRRCMYAPAGFRSRDALHPVAARFKFHIFIGFGAAHRKYYLFEAAYFGFVPVYVFHLPALFINEPRIHAKEITGKQSGLFASGSGAYFHDYIFTVIGIFRQKLKL

SEQ ID NO: 21613 - DNA, 774 bp, Unknown
  Obtained from environmental sample
  misc_feature (1)..(774): n is a, c, g, or t
gtggcaggcgcggcaagagcgctgaatgaacagtccttgtccagagatattttttcgtggatatgggcagccggcggaaatttttggcctaatgaggattctgcgccggttataaacacaagacagataattagcgattttgatttcctcggtcggctctaccgtgaagaaactctgtccccaaaatcaagctctgtccctcaaaatcgagctctgtccccaaatggctttaaaatggcagaagagcaggcgctggaagattttgctcagggaaaaatagccatgctcattacgtcaacccgtgccattccggctctcagggaagaaatgggcgatgaaattttcggtataacgacaatcccgagtgccgggacagcgggtaaatacagcgtcagtcttacaggtatatttgccggaattaataaaaattgtgtatttcccgaagctgcgcaggtttttcttgattttcttgttgcccaaagcccacttttctgcgctcagttgaaagccgttcccggttatgtgccggaattattgtccacagacaacaaaaactacataaaagaagaccctttctacgccaaagcatgggatatttttgaatcttctgtggttgtaaagggttttttgggtgtaccagacgcgcaggagtacgaaaacgccgcctgcgaggaaatacaactcttttttgaaagcagccgtactgcgcgggagactgtaacggctatacagcagcgatgggataagatttttgcgagctctgtccccaaatga

SEQ ID NO: 21614 - protein, 257 aa, Unknown
  Obtained from environmental sample
  misc_feature (1)..(257): Xaa is any amino acid
MAGAARALNEQSLSRDIFSWIWAAGGNFWPNEDSAPVINTRQIISDFDFLGRLYREETLSPKSSSVPQNRALSPNGFKMAEEQALEDFAQGKIAMLITSTRAIPALREEMGDEIFGITTIPSAGTAGKYSVSLTGIFAGINKNCVFPEAAQVFLDFLVAQSPLFCAQLKAVPGYVPELLSTDNKNYIKEDPFYAKAWDIFESSVVVKGFLGVPDAQEYENAACEEIQLFFESSRTARETVTAIQQRWDKIFASSVPK

SEQ ID NO: 21615 - DNA, 414 bp, Unknown
  Obtained from environmental sample
  misc_feature (1)..(414): n is a, c, g, or t
ttgaatatattcatattggacgcatgtgctcttttggctgtattggcaatggaaaaaggagccgaaaacatacgggatttgtttcaaaagacagttgaccgtcaggtaatcttaatgatgaataaatttaattttcttgaagtatattacaagatttatagagcttatggaaaaacggaagcagataatttgcttaaaacaatggaacaaatgccaataataataaaagatacattaacaaatgaaatacttaaagaagccggaagattgaaatctaaatataaattatctttagctgattcgattgcaattgctgaaagtataataaacaaaggttcattagttaccgctgatcaccatgaaattgaaccaatcgaaatcgctgaaaaaataaatgttacatggtttcgataa

SEQ ID NO: 21616 - protein, 137 aa, Unknown
  Obtained from environmental sample
  SIGNAL (1)...(16)
  DOMAIN (4)...(133): PIN domain
  misc_feature (1)..(137): Xaa is any amino acid
MNIFILDACALLAVLAMEKGAENIRDLFQKTVDRQVILMMNKFNFLEVYYKIYRAYGKTEADNLLKTMEQMPIIIKDTLTNEILKEAGRLKSKYKLSLADSIAIAESIINKGSLVTADHHEIEPIEIAEKINVTWFR

SEQ ID NO: 21617 - DNA, 591 bp, Unknown
  Obtained from environmental sample
  misc_feature (1)..(591): n is a, c, g, or t
atggacgatattttaaacgatgactttgtagtagtttctcccgacacnggcgctgtgnacagaaataaattctacgcttccgcgcttaaaaaacctctggctcttttgtacaaggagagagattactcaaaaatatcaaaggacgcctcccaatcaaatatttcgcaaatacgcctgctgggtaatgtaagagataaaaccgttttcatggcggatgacattttgggcacaggcggcacgctgataaagggtatgaggcatcttaaagaaaacggcgcgcgcagaattatctgctccataagtctgccgcttttctccggtaattcaatttcacactttgacgaggcgtacagcgaagggcttttttatcggcttatcggaacaaacgccgtctatcaggaagaagttgtaaagcgcgaatggtatgtaaatgtaaatattacgcgtctgtttgccgatgttatttcgcgccttcatcaaaatcagtctgtttcaagcctgcttgataattccgcaattattaaccgtctgctttccaaaaagaaaatagaaccccaaaatgagcttccttttacacaaacaaacgaataa

SEQ ID NO: 21618 - protein, 196 aa, Unknown
  Obtained from environmental sample
  DOMAIN (2)...(116): Phosphoribosyl transferase domain
  misc_feature (1)..(196): Xaa is any amino acid
MDDILNDDFVVVSPDTGAVXRNKFYASALKKPLALLYKERDYSKISKDASQSNISQIRLLGNVRDKTVFMADDILGTGGTLIKGMRHLKENGARRIICSISLPLFSGNSISHFDEAYSEGLFYRLIGTNAVYQEEVVKREWYVNVNITRLFADVISRLHQNQSVSSLLDNSAIINRLLSKKKIEPQNELPFTQTNE

SEQ ID NO: 21619 - DNA, 447 bp, Unknown
  Obtained from environmental sample
  misc_feature (1)..(447): n is a, c, g, or t
ttgaccaaccacaggcagcaggccgacaccggcaccaagatggtgcacattgggcgcaacacaaagtccaccatcatttcaaagggcataagcgccggaagcagctccaacagctacaggggcctagtcaaagtgtcccaaaaagccggcggggcgcggaatttcagccaatgcgactcgatgctgattgggcagtcgtgcagcgcgaacacattcccgcgcatcgaggccagcaacccatctgcgacaatcgagcatgaagcctcgaccagcaaaattggcgaggagcagctgttttacttccagcagcgaggggttcccgccgaggaagccatctcggtgataatcaacgggttctgcaaagaggtcttcagggagctgccgatggaattcgccgtcgaagcgtccaggctgctctcgctcaaacttgaaaacagcgttggatag

SEQ ID NO: 21620 - protein, 148 aa, Unknown
  Obtained from environmental sample
  DOMAIN (1)...(119): Uncharacterized protein family (UPF0051)
  misc_feature (1)..(148): Xaa is any amino acid
MTNHRQQADTGTKMVHIGRNTKSTIISKGISAGSSSNSYRGLVKVSQKAGGARNFSQCDSMLIGQSCSANTFPRIEASNPSATIEHEASTSKIGEEQLFYFQQRGVPAEEAISVIINGFCKEVFRELPMEFAVEASRLLSLKLENSVG

SEQ ID NO: 21621 - DNA, 507 bp, Unknown
  Obtained from environmental sample
  misc_feature (1)..(507): n is a, c, g, or t
atgatatttctttccaaggtttttacatatttaattcttcccccgggatgttttatttttatccttttccttgtttttatatttataccgaaaaaaaagaaaatatttccgctcctctcgcttttaatcttgtatctattgtctatacagcctgtttccgacttgctgctgaaacctctggaaaacgcgtatccgcccttgtcgtccgaatttaaaaaggactggccgcaggctgttgtaattttaggcggcggaataatacaagcttctccggaagcgggagcggggaaggatgcccttacatcggacgcggtgaaaagagtggtgtacgcgttctcgcttcgcgatacatttaaagtcccttatattttttccggcggaaaaacttttgaatacggtcaggagccggaagcgtttacggccggcaggttatttgtttctttggggcttccttttgatcggcttattctggaatcaagaagcctaatacatgctcggccgatctga

SEQ ID NO: 21622 - protein, 168 aa, Unknown
  Obtained from environmental sample
  misc_feature (1)..(168): Xaa is any amino acid
MIFLSKVFTYLILPPGCFIFILFLVFIFIPKKKKIFPLLSLLILYLLSIQPVSDLLLKPLENAYPPLSSEFKKDWPQAVVILGGGIIQASPEAGAGKDALTSDAVKRVVYAFSLRDTFKVPYIFSGGKTFEYGQEPEAFTAGRLFVSLGLPFDRLILESRSLIHARPI

SEQ ID NO: 21623 - DNA, 405 bp, Unknown
  Obtained from environmental sample
  misc_feature (1)..(405): n is a, c, g, or t
atgatagatcggccgagtcttccgtatggacttgtactgggcagtacctcctacccggctgaccgaaaggcccacatcaattgccggacggaaaccggaattgaaaagctcggtatccaaaaaaatctgtccgtcggttatagaaattacgttagtgggaatatacgaagaaatgtctcctgcctgggtttccacaatgggcatggcggtaatggaaccgcctcccaggtgactagagagcttggcagcgcgttccagaagccgggagtggaggtagaacacgtccccgggaaacgcttctctgcccggaggcctgcggagcaggaggcttatagccctgtacgcaacggcgtgtttggaaagatcgtcgtagacaatgagcacatccttaccctgatacattaa

SEQ ID NO: 21624 - protein, 134 aa, Unknown
  Obtained from environmental sample
  misc_feature (1)..(134): Xaa is any amino acid
MIDRPSLPYGLVLGSTSYPADRKAHINCRTETGIEKLGIQKNLSVGYRNYVSGNIRRNVSCLGFHNGHGGNGTASQVTRELGSAFQKPGVEVEHVPGKRFSARRPAEQEAYSPVRNGVFGKIVVDNEHILTLIH

SEQ ID NO: 21625 - DNA, 429 bp, Unknown
  Obtained from environmental sample
  misc_feature (1)..(429): n is a, c, g, or t
atgccggagatgagctgccaccaagtggtcaggggtctgatcgaggccatcgagtccggcgagtacaaggtggtcatctgcaaccttgccaacggcgacatggtgggccacacaggcgtcctggacgcagccgtgtccgcctgcaccatagtggacgattccgtaaggaaagtggcggacgcagtgcttcgcaaggaaggcgccctgttggtcacggccgaccacggtaactccgacatcatgctggacgagcacgggcacccccacacggcccacaccctgagcctggtgccgtgcgccatagtggccaagggattcgagcacaggcccctgcgcagcggcggggcgctgtgcgacgtcgcacctacgttgctcaagctcctgggcatcgacaagcccaacgaaatggaggggaccagcctgttctga

SEQ ID NO: 21626 - protein, 142 aa, Unknown
  Obtained from environmental sample
  DOMAIN (3)...(118): Metalloenzyme superfamily
  misc_feature (1)..(142): Xaa is any amino acid
MPEMSCHQVVRGLIEAIESGEYKVVICNLANGDMVGHTGVLDAAVSACTIVDDSVRKVADAVLRKEGALLVTADHGNSDIMLDEHGHPHTAHTLSLVPCAIVAKGFEHRPLRSGGALCDVAPTLLKLLGIDKPNEMEGTSLF

SEQ ID NO: 21627 - DNA, 504 bp, Unknown
  Obtained from environmental sample
  misc_feature (1)..(504): n is a, c, g, or t
gtgatgaaccctctgggcggcggtcttattccacagaaccccgcgcgttttgactttttaaagcgtgacggagaggaaattgtcccggcggccctgcgcttcctctgggaccacccggagataagcgttacccttgtgggttttgatacgcttcagcatgtggagcaggcccttgccgcgatcgaagactacaagcccagggcagaagcggaactggcggcgcttaaagaaaatgtcctcgcttctcttgagggaatctgtaccggctgcgcctattgcgatgattgccctcagggtattcctattcccaaatttatggacgcctacaatcaaaagattttaagcgcgccggacactaaagaccctattggcgagcggctgtattggcactggaaccttgagcgccaaatcgcgaacaagtgttccgcctgcggtcaatgcgaaaaagcctgcacccagcacataaatatcattgaacggcttaaggaaatagctggtcattga

SEQ ID NO: 21628 - protein, 167 aa, Unknown
  Obtained from environmental sample
  misc_feature (1)..(167): Xaa is any amino acid
MMNPLGGGLIPQNPARFDFLKRDGEEIVPAALRFLWDHPEISVTLVGFDTLQHVEQALAAIEDYKPRAEAELAALKENVLASLEGICTGCAYCDDCPQGIPIPKFMDAYNQKILSAPDTKDPIGERLYWHWNLERQIANKCSACGQCEKACTQHINIIERLKEIAGH

SEQ ID NO: 21629 - DNA, 450 bp, Unknown
  Obtained from environmental sample
  misc_feature (1)..(450): n is a, c, g, or t
atggcgtcgcggataatcctgttcagcagatatttcggcatcttctcgctattcgccgccggtgtatttgccggcggttttaagacgcagaaacagcgtaatatcattttgattataacggcaacaacattgattattaccctgggggtccccattgatactcaggcatgggattccagcctgaatatgattaacggctatacttcaatgttaaggctcattgaggccgtgactttccttattactaccatcagtttttttattgccgcatggtcgcgcagttcacgtgaatttgttttcatcggcgcaggttctgtcttggccttcttaggcagaaatatcctgctcaacaccgacacttgggcaggcttgcccataggtttattgtttcttgccgcgggaacatggcttatctgtacgaggcttcacaaggtttatttatggctttaa

SEQ ID NO: 21630 - protein, 149 aa, Unknown
  Obtained from environmental sample
  SIGNAL (1)...(24)
  misc_feature (1)..(149): Xaa is any amino acid
MASRIILFSRYFGIFSLFAAGVFAGGFKTQKQRNIILIITATTLIITLGVPIDTQAWDSSLNMINGYTSMLRLIEAVTFLITTISFFIAAWSRSSREFVFIGAGSVLAFLGRNILLNTDTWAGLPIGLLFLAAGTWLICTRLHKVYLWL

SEQ ID NO: 21631 - DNA, 468 bp, Unknown
  Obtained from environmental sample
  misc_feature (1)..(468): n is a, c, g, or t
atgcgcgactattgcaagcaggggccgcttggtttccccgtcgtggacatctcggttgagctttactttggcagctaccacgatgtggattcctccgacatggccttcaagactgccgccaggatagggatgcaggaaggcctgcaaaaatgctcgccagttctgctggaacccatcctaaaagtacacatcagcgtccccaacgaacacaccagcaaggcccagcgccttgtcacgggacacagggcgggccagatcctaggcttcgacgccaagcccgactggccaaattgggacgtagtggatgcctacctgccgcagagcgagatgaacgacctcatcatagaaatcaggtcgcaaaccatgggcgttggcttcttcacttgggagttcaaccacctgcaagagctagagggcagggaagccgacaaaatcgttgaggcaagaaagaaagcattagagggatga

SEQ ID NO: 21632 - protein, 155 aa, Unknown
  Obtained from environmental sample
  DOMAIN (54)...(145): Elongation factor G C-terminus
  misc_feature (1)..(155): Xaa is any amino acid
MRDYCKQGPLGFPVVDISVELYFGSYHDVDSSDMAFKTAARIGMQEGLQKCSPVLLEPILKVHISVPNEHTSKAQRLVTGHRAGQILGFDAKPDWPNWDVVDAYLPQSEMNDLIIEIRSQTMGVGFFTWEFNHLQELEGREADKIVEARKKALEG

SEQ ID NO: 21633 - DNA, 675 bp, Unknown
  Obtained from environmental sample
  misc_feature (1)..(675): n is a, c, g, or t
ttggaacgcggcaaaacccttattgacggcatccatcagcggtattttgccctgaaaaacctccaggaaagggcggatgaagatatccgcatgacggtcagcgagattaacgaactatcccgccagattgcgggcttgaacgagactatacagagagtcagggctcagggggatgaccccaacgatctctatgacaggcgcgatctcctggtagacagcctttcttcgaagctcaatgttacggtggacaggcgcgatcctgatgagtttatggttcacaccaacggaatcgtccttgttcagggcagaatcggacggcagcttgatcttgtactgaaccctgagaccggctattcaaacatagtctggagcgaaaccaggaacgggctggaaatgctgaatggcgatcataacggaagcctgggagcccttctcgatcttcgtgattatacaatcaacgcggaaattcaaagcctggacaatatgaccatgaatttcgtaggccttgtgaacgagatacacgaaaaggcctacggcatgaacggagaaacaggagtcaaattttttagcgagcatccttttgctaccaacgttaacggcaattatgacagggacggggacggagatgacgacagcacctatatcttcagggtttcaggaaccaaatacccttga

SEQ ID NO: 21634 - protein, 224 aa, Unknown
  Obtained from environmental sample
  misc_feature (1)..(224): Xaa is any amino acid
MERGKTLIDGIHQRYFALKNLQERADEDIRMTVSEINELSRQIAGLNETIQRVRAQGDDPNDLYDRRDLLVDSLSSKLNVTVDRRDPDEFMVHTNGIVLVQGRIGRQLDLVLNPETGYSNIVWSETRNGLEMLNGDHNGSLGALLDLRDYTINAEIQSLDNMTMNFVGLVNEIHEKAYGMNGETGVKFFSEHPFATNVNGNYDRDGDGDDDSTYIFRVSGTKYP

SEQ ID NO: 21635 - DNA, 621 bp, Unknown
  Obtained from environmental sample
  misc_feature (1)..(621): n is a, c, g, or t
atggaattcaccgagaaatccggtcatttcggaacaagttccgtcggaacaagttccgtcggaacaagttccatcggagcaagctccgctggcagttcctcagatatttctgggcaagccccgtcggggcaagccccgtcggggcaagccccgtcggggcaagccccgtcggggcaagccccgttagaattgcttaaagccgcccggcaggaaatggcaaagcgcattgtaggtcaggatgaaatgatcgacggccttcttacggctcttattgcaggtgggcacatactgctggaaggagttccggggcttgccaaaaccagggccgttaagactttggcggaaatcaccggattggtttttaaacgcattcaatttaccccggacttactgcctgccgaccttaccgggactttggtgtgggaacaggcgacctcttcgttttcagtgcgccgggggccggtgtttgccaacgtaatcctggcggacgagatcaaccgggcaccggcaaaagttcagtccgcccttctggaagccatggaagaacagcaggttacaattggtgaaaaaatatattccctgccgtcgcctttctttgtctggcaacccaaaacccaatag

SEQ ID NO: 21636 - protein, 206 aa, Unknown
  Obtained from environmental sample
  DOMAIN (95)...(206): ATPase family associated with various cellular activities (AAA)
  misc_feature (1)..(206): Xaa is any amino acid
MEFTEKSGHFGTSSVGTSSVGTSSIGASSAGSSSDISGQAPSGQAPSGQAPSGQAPSGQAPLELLKAARQEMAKRIVGQDEMIDGLLTALIAGGHILLEGVPGLAKTRAVKTLAEITGLVFKRIQFTPDLLPADLTGTLVWEQATSSFSVRRGPVFANVILADEINRAPAKVQSALLEAMEEQQVTIGEKIYSLPSPFFVWQPKTQ

SEQ ID NO: 21637 - DNA, 861 bp, Unknown
  Obtained from environmental sample
  misc_feature (1)..(861): n is a, c, g, or t
ttgctggagaacaaaaacgtgattttccgctcggccaccggcacgggcaagaccctcgcctacctgctccccggcctgcaattattgttaggcgacatcgaagccccgtatcagggcccgcggcttcttgtctgcgcccccacccttgaactctgctcccaaataaagaatgaaattgattttctgctggaggaaaaaagcggcatcaatgtttcgcttcttatcggctccgtaaatctgggccgccagatcgacagcataaaaaaaaacaggccccatgtcgtcgtcggcaatccgggcaggctgctcttgttggcgaagatgggcaagctcaaactccggagcctgaactttctggttcttgacgaagccgaccgcctaacctctcccgagtgccgcgaagaaactgacgccctggcgcagttggcggtgacggaactaaagcgccgcgcttcaaacagccaagccgcttttgtcatagcggcctgctcggccaccgtatccgcaaaaacaaaggaactgctggctccgctttttgagggcgccgagctgctggaaacggacgagcaggagattctgcgggacaggataagccactgggccattttcagcgaatgtcgccgtaaaaaccagacgcttgtttcttttctcgcggctgccaaaccaaagaaagcccttgttttcacaagccgctcgaacgaggctgaaaaaataaattcgattttgcagcgcanaaaaatcgccgccgccgccctgttcggcggcatggacaagaaagaccggcgggaggctatggaccgcttccgctcgggcaaggccgcggtgctggtttgctccgatctcgcagcccgggggtcttga

SEQ ID NO: 21638 - protein, 286 aa, Unknown
  Obtained from environmental sample
  DOMAIN (1)...(174): DEAD/DEAH box helicase
  misc_feature (1)..(286): Xaa is any amino acid
MLENKNVIFRSATGTGKTLAYLLPGLQLLLGDIEAPYQGPRLLVCAPTLELCSQIKNEIDFLLEEKSGINVSLLIGSVNLGRQIDSIKKNRPHVVVGNPGRLLLLAKMGKLKLRSLNFLVLDEADRLTSPECREETDALAQLAVTELKRRASNSQAAFVIAACSATVSAKTKELLAPLFEGAELLETDEQEILRDRISHWAIFSECRRKNQTLVSFLAAAKPKKALVFTSRSNEAEKINSILQRXKIAAAALFGGMDKKDRREAMDRFRSGKAAVLVCSDLAARGS

SEQ ID NO: 21639 - DNA, 666 bp, Unknown
  Obtained from environmental sample
  misc_feature (1)..(666): n is a, c, g, or t
ttgaaccttcagtttacccaaaggccgccggacgatcttatagaaattatggggcggattctggatgccaacgtaaactcaaaaaaacgaagggaagaacggattattattacgcccgattccatgaggaagctgagtataacaaaagaaagctctattttaattcagggcgtacccaggcattgcattttgcgcgatatttctttttcaggagctaaaataataatgatgggggtagccaaattcctggtggacaaggaggcgtttctgcgcctggaatttgaagacccgaaagaggtttttcttttaaagggaaaattcctgcgcagcgaacctgtagaaggccggaaagagcttgtttcgctggttattcttttcgatgaaggcatcacccccatgggctacaagatccggataaacaattacatttcacagatcaggccggatgcgcggggcgttgatagagggggagactcctcaagctcaaggccgacaccaacaaagccggaagccaaaccggcgccaggtccatcaaaagccccccccaaaaatgatgattggccatcccccgacgaagtagcggcttccgcacaaaaacccgccccggcagcaaaaccggcgcctgaaaagtcgacaaatgatgactttgatctgaatctcccgtaa

SEQ ID NO: 21640 - protein, 221 aa, Unknown
  Obtained from environmental sample
  DOMAIN (28)...(125): PilZ domain
  misc_feature (1)..(221): Xaa is any amino acid
MNLQFTQRPPDDLIEIMGRILDANVNSKKRREERIIITPDSMRKLSITKESSILIQGVPRHCILRDISFSGAKIIMMGVAKFLVDKEAFLRLEFEDPKEVFLLKGKFLRSEPVEGRKELVSLVILFDEGITPMGYKIRINNYISQIRPDARGVDRGGDSSSSRPTPTKPEAKPAPGPSKAPPKNDDWPSPDEVAASAQKPAPAAKPAPEKSTNDDFDLNLP

SEQ ID NO: 21641 - DNA, 648 bp, Unknown
  Obtained from environmental sample
  misc_feature (1)..(648): n is a, c, g, or t
atgccaacagttgacgataaaaaagttatttattccatgtaccgggtctcgaagaaacatgggacaaagcaggtattaaaggatatcaacctttcatatttttatggtgcgaagatcggggtcatcggccttaacgggtcgggcaaatccagcttattgaaaattcttgcaggtgtggatacggagttcgcgggggagacctcggtaagccccggattcaccatcggctttatggagcaggaaccgtttttggagaacggcaagacggtaaaagaagtggtatccgagggcgttcaagacctggttgatcttctgcaagagtttgataaggtgagcgaagctttcgccgaccccgacgcggactacgacaaacttggcgcgaggcaggctgaacttcaggaaaagatcgaagccgccgacggatggaaccttgacagccgcctggatttagctatggacgccctgcgctgcccgcctgcttccgacctggtcgataaccttttcggaggtgagaagcgccgcgttgcactttgccggcttctcctaaaaagccggacatcctttttgctgacgagccgacaaaccacctggacgctgaaaccgtcgcctggcttgaaaggcaccttagggagtacgcggggacggtaa

SEQ ID NO: 21642 - protein, 215 aa, Unknown
  Obtained from environmental sample
  DOMAIN (36)...(214): ABC transporter
  misc_feature (1)..(215): Xaa is any amino acid
MPTVDDKKVIYSMYRVSKKHGTKQVLKDINLSYFYGAKIGVIGLNGSGKSSLLKILAGVDTEFAGETSVSPGFTIGFMEQEPFLENGKTVKEVVSEGVQDLVDLLQEFDKVSEAFADPDADYDKLGARQAELQEKIEAADGWNLDSRLDLAMDALRCPPASDLVDNLFGGEKRRVALCRLLLKSRTSFLLTSRQTTWTLKPSPGLKGTLGSTRGR

SEQ ID NO: 21643 - DNA, 879 bp, Unknown
  Obtained from environmental sample
  misc_feature (1)..(879): n is a, c, g, or t
ttggtctcttatgtcctaaacggcagtaaccgcacagtcgcgcccgaaacccgtcaaaaaatacttaatgccatcgacgagctgggataccgcccaaataagtttgcccaagccctgagcatgggaaaccagggcgttcttgccgacaggcatatcggagtagtattgcgttatgaaaagatgtttatgcgtccttattatacggagatactttctggcatatataccgcggcccatgaaaaaggtttccatatccggtttatcaggttttatgaggaactaaaagatccggtcattttcaatcaattgattcattcagaggaaatatgcggcctgttgcttttagccattgatagatgccttgccgcccccgaagactggaagcttcttgaacgggtacaggcgcggatcgagcagattgtatgcatagattggcaggccccgggcatttcttcggtattaattgacaggcaggccgccgcgctccaggtaacgaattatctttttgatcagggctacaaggatatagtttatataggccagtccgatcaacgaatttccggatttaagcaggcctttgtcgaaagggcccttgatatatccggcctttacactgcctatgcttatgacatggaaaccggatataacgtggttcagtctttgcataaagaccggaaggccctgccaaaggccatctttgccggttcggacgaggttgctttggggattctcctttacctgcatgaacaaggcatcactgtacccggcaatacggctgttatcagcatggacaacattgaaattgccgcttatacaaatccgcaactgacaacgatgaatgttcaaaacacgccatgggataccgtgcagtggaaatga

SEQ ID NO: 21644 - protein, 292 aa, Unknown
  Obtained from environmental sample
  DOMAIN (49)...(292): Periplasmic binding proteins and sugar binding domain of the LacI family
  misc_feature (1)..(292): Xaa is any amino acid
MVSYVLNGSNRTVAPETRQKILNAIDELGYRPNKFAQALSMGNQGVLADRHIGVVLRYEKMFMRPYYTEILSGIYTAAHEKGFHIRFIRFYEELKDPVIFNQLIHSEEICGLLLLAIDRCLAAPEDWKLLERVQARIEQIVCIDWQAPGISSVLIDRQAAALQVTNYLFDQGYKDIVYIGQSDQRISGFKQAFVERALDISGLYTAYAYDMETGYNVVQSLHKDRKALPKAIFAGSDEVALGILLYLHEQGITVPGNTAVISMDNIEIAAYTNPQLTTMNVQNTPWDTVQWK

SEQ ID NO: 21645 - DNA, 651 bp, Unknown
  Obtained from environmental sample
  misc_feature (1)..(651): n is a, c, g, or t
atgccgaaacgcaacgacataaaaaagattctccttataggttccggacctattgttattgggcaagcttgcgagtttgattattcgggagtgcaggcttgcaaatcgctgaaaacggaggggtatgaattggtactggtgaattcaaatccggctaccataatgacagacccagattttgcagacaggacatatatagaacctcttaccaaagaggctttaacggagataatccgcagggaacgcccagatgccctgctgcctacgctaggtgggcaaactgccctgaacctcgctatggagcttgcagacggcggtgtgctggaacgctatggcgttacgatgcttggggcaactcctgatgtaattcgcaaagccgaagacagaggcttgttcaaagaagctatgaaaaaaatagggcttgatatgccacgcagcggaatcgcacattcttacgaagaggcttgcaacataaaaaatacgctggatacttggccccttgttatacgcccaggcttcacacttggaggcacaggcggcggcattgctcagaacgaaaaagaattcaaggaaatatgcgaaagaggtttgtattactcccccacaaaagaattgctgattgaagaatccatgaaggctggaaagaattga

SEQ ID NO: 21646 - protein, 216 aa, Unknown
  Obtained from environmental sample
  SIGNAL (1)...(23)
  DOMAIN (6)...(126): Carbamoyl-phosphate synthase L chain, N-terminal domain
  misc_feature (1)..(216): Xaa is any amino acid
MPKRNDIKKILLIGSGPIVIGQACEFDYSGVQACKSLKTEGYELVLVNSNPATIMTDPDFADRTYIEPLTKEALTEIIRRERPDALLPTLGGQTALNLAMELADGGVLERYGVTMLGATPDVIRKAEDRGLFKEAMKKIGLDMPRSGIAHSYEEACNIKNTLDTWPLVIRPGFTLGGTGGGIAQNEKEFKEICERGLYYSPTKELLIEESMKAGKN

SEQ ID NO: 21647 - DNA, 966 bp, Unknown
  Obtained from environmental sample
  misc_feature (1)..(966): n is a, c, g, or t
atgagccacggagatagtgtttcaaagttgccagctgggttcagcgcaatagcctgcaccagcgactgcgaatttgccggagtggaaaacacagaaaagaaaatttacggaatacaattccaccccgaagttaggcacaccgaatttggcgacaaatttttggaaaattttgttcttggtatatgcgattgcaaaaaatcttggagcataaaaagctatgtgccgcaaataagcgaaaaaatatcaaaagcagcagagggcaaaaaagtatttttgctagtttccggtggggtagattccaccgtggcatttgtgcttttgaacaaggttttggggcaagaaagggttttggggttgcatatagacaacggcttgatgagattagacgaaagccaacaggtgatgaaatttttgcaaaaagaaggtatgaacaatttgcaaatttgcgatgcgggaaaagattttttgcgtgaattgcaaggtgtttctgagccggaaaaaaaacgaaacattataggcgaaacttttttaaaaattaaagatagcgaaatggcaaggctatcgctaaacgcaaacgactggataatggctcaaggcaccatttatcccgataccatagaaagcggcggcacggaaaatgcggattccattaaaacgcaccacaaccgtgtgcagggcgttttggatttgcaagaaaaaggtttgcttttagaaccgcttgcggatttatataaagacgaggtgcgaattttgggcgaggaactcggtattccaaaagaactcatttggcggcatccttttccgggtcccggtcttggcgttaggcttttgtgcggcgatggaaaagcctctggaaaatccgagattcccgaattgaaaaaagccatagacgaactttcaataaaagcaaggcttttgccgataaaaagcgtgggttcagggcagcaaggacctcggccgatctga

SEQ ID NO: 21648 - protein, 321 aa, Unknown
  Obtained from environmental sample
  DOMAIN (69)...(307): NAD synthase
  misc_feature (1)..(321): Xaa is any amino acid
MSHGDSVSKLPAGFSAIACTSDCEFAGVENTEKKIYGIQFHPEVRHTEFGDKFLENFVLGICDCKKSWSIKSYVPQISEKISKAAEGKKVFLLVSGGVDSTVAFVLLNKVLGQERVLGLHIDNGLMRLDESQQVMKFLQKEGMNNLQICDAGKDFLRELQGVSEPEKKRNIIGETFLKIKDSEMARLSLNANDWIMAQGTIYPDTIESGGTENADSIKTHHNRVQGVLDLQEKGLLLEPLADLYKDEVRILGEELGIPKELIWRHPFPGPGLGVRLLCGDGKASGKSEIPELKKAIDELSIKARLLPIKSVGSGQQGPRPI

SEQ ID NO: 21649 - DNA, 774 bp, Unknown
  Obtained from environmental sample
  misc_feature (1)..(774): n is a, c, g, or t
atgaaaaatttaattataacaattttaattattttttcaggaacgattttctcttgcggacatatttccagtttttttaataatgtttccaatgctgctaccgcatctgcggatgccatcaacaccgccaatgaagatattactcccgaacaggaatactatatcggcagggctgtagcggcaaatttacttagcagatacagactttataacagaaaccagaatttgactacttacttaaataaaatctgcgccgccataacgattaattctccgcaacctgatatttataacggttatcatgtagcgatgctggacaccgatgaaattaacgcctttgcgacttccggagggcatatttttgtaacacgcggaattattaacgtcgctgacaccgaagatgcgcttgccggaataattgcgcatgaagtcgcccatattcagttaaagcatggtattaatgctatcaaaagcagccgaaaaacacaggcttggttagtcacaggcactgcgatatccggtgttgccggaggaacggatgttaaacaattgactgatgccttaaacgattcattttcggagtttgtgcaaacgcttgtaagcaacggttattcaaaggctcaggaatttgatgctgataataaagcaatcgcattcatggccagcgccggatataatccggcaggtttaactaaaatgctcatggcgttaggccatttccaaaacctgattcangttntggcaaaacgcatccaagtcccgaagaacgcatag

SEQ ID NO: 21650 - protein, 257 aa, Unknown
  Obtained from environmental sample
  SIGNAL (1)...(27)
  DOMAIN (83)...(254): Peptidase family M48
  misc_feature (1)..(257): Xaa is any amino acid
MKNLIITILIIFSGTIFSCGHISSFFNNVSNAATASADAINTANEDITPEQEYYIGRAVAANLLSRYRLYNRNQNLTTYLNKICAAITINSPQPDIYNGYHVAMLDTDEINAFATSGGHIFVTRGIINVADTEDALAGIIAHEVAHIQLKHGINAIKSSRKTQAWLVTGTAISGVAGGTDVKQLTDALNDSFSEFVQTLVSNGYSKAQEFDADNKAIAFMASAGYNPAGLTKMLMALGHFQNLIXVXAKRIQVPKNA

SEQ ID NO: 21651 - DNA, 417 bp, Unknown
  Obtained from environmental sample
  misc_feature (1)..(417): n is a, c, g, or t
ttgagacacagcattaaagcgattaaaaacagccgaattacacaggctcttttagttacaggtacgtcggcagccggcgccgcggcagggatggatgtcaaacaactgactgatgttatgaatgaatcggttggggagattgtgcagacgcttgtaaacaacggttattcgcaggctcaggaatttgaagctgataataccgcattgtcacttatggcaagcgccaaatacaacccgtcaggtttgattgagatgctcaagtcattgagcagcgtacagacaacaggctcgggttttggaaaaacgcatccaagtcccgctcagcgtatagccaatgctgaaaagtcattgtcaaaatacaaagtcacagattcaagcgcgttaaggcagcccaggtttactacggcgacaagatag

SEQ ID NO: 21652 - protein, 138 aa, Unknown
  Obtained from environmental sample
  SIGNAL (1)...(27)
  misc_feature (1)..(138): Xaa is any amino acid
MRHSIKAIKNSRITQALLVTGTSAAGAAAGMDVKQLTDVMNESVGEIVQTLVNNGYSQAQEFEADNTALSLMASAKYNPSGLIEMLKSLSSVQTTGSGFGKTHPSPAQRIANAEKSLSKYKVTDSSALRQPRFTTATR

SEQ ID NO: 21653 - DNA, 756 bp, Unknown
  Obtained from environmental sample
  misc_feature (1)..(756): n is a, c, g, or t
ttgagaactggtgaattgcttgcagaagataaagcttttcccgcctcagcggcggaagctctaagaatagctcacaaaaaccttacggattacaaaacggacgaaaaggaaatacgccgcaccctcaacactgtccatcagatcctgctcgctgagaccgggcgctatcaggctgactgggatttttttgaacccgccggtgtgttggatcccctaaaacgccatgttttcccaggcatacaggtataccttgaggacattcgctcacccttcaatgtcggttccatgttcagaactgccgactctttcggcgcggagaagatttggctttcgccactctgtgccagccctctgcacaaaagggctctgcgtaccgcgatgggctgcgtagatgttgttccctgggagtttctttcttataatccttttggcgatgattattctgccgaccggaaaggaggggatgattcagttttatcgtttttggaggggccctttttcgctcttgaaaccgggggcacttccctcgcggatttcagatttccgtccaaagggattttaatcgctggctcggaggaactgggggtaagcccccgggcactggcagcggctgacgcttctctcggaagggtaagcatccccacctttggggcaaaaggctctctgaacgtggccggcgctttcgcaattgtcatgcacgcctgggcagtacatctggcatccattaccgcanacggcactaactataacacatag

SEQ ID NO: 21654 - protein, 251 aa, Unknown
  Obtained from environmental sample
  DOMAIN (79)...(233): SpoU rRNA Methylase family
  misc_feature (1)..(251): Xaa is any amino acid
MRTGELLAEDKAFPASAAEALRIAHKNLTDYKTDEKEIRRTLNTVHQILLAETGRYQADWDFFEPAGVLDPLKRHVFPGIQVYLEDIRSPFNVGSMFRTADSFGAEKIWLSPLCASPLHKRALRTAMGCVDVVPWEFLSYNPFGDDYSADRKGGDDSVLSFLEGPFFALETGGTSLADFRFPSKGILIAGSEELGVSPRALAAADASLGRVSIPTFGAKGSLNVAGAFAIVMHAWAVHLASITAXGTNYNT

SEQ ID NO: 21655 - DNA, 732 bp, Unknown
  Obtained from environmental sample
  misc_feature (1)..(732): n is a, c, g, or t
atgaatgttagtgaattatacaaatggatccgtgaagctaagcaccttgtggcttttacgggcgcgggggtcagcacgctttcgggcatacaggattttcgcggcaagaacgggctgaagggcggggagagaatttttaatattgaaatttttgagcaggatccttcagtgtattataacggaacgcgttcatttctctataacattgatgaaaaagaaccgtcaatagtgcacaccgttttgggggatctggaaaaaaggggaatcctcaaagcggtgataacccagaacatcgatctgctgcaccagaagggcggaagctccaatgtgatagaagtccacggatcgcccgccttccattactgccttcgctgcgcggggatcaggatggattttaaggaagctgccgccattgtgctggaaggcggaatgccccaatgcccaaagtgcggcagggtgcttaaaccggcgatcaccttttacggcgaaagcctgccgattgaggcgctgcgggaagctactgcccaggcccataaagcggaccttatgctggtgctgggaaccagcctggtggtttaccccgccgcctccatgcccgaatacactctgcgctgcggcggccgtatagtcatagtgaacaacatgcctactcatctggacagccatgcggcaatgcgctttgacgagttaggcctcgtttttgaggaactccaaagaagaatgagcaaatag

SEQ ID NO: 21656 - protein, 243 aa, Unknown
  Obtained from environmental sample
  DOMAIN (21)...(194): Sir2 family
  misc_feature (1)..(243): Xaa is any amino acid
MNVSELYKWIREAKHLVAFTGAGVSTLSGIQDFRGKNGLKGGERIFNIEIFEQDPSVYYNGTRSFLYNIDEKEPSIVHTVLGDLEKRGILKAVITQNIDLLHQKGGSSNVIEVHGSPAFHYCLRCAGIRMDFKEAAAIVLEGGMPQCPKCGRVLKPAITFYGESLPIEALREATAQAHKADLMLVLGTSLVVYPAASMPEYTLRCGGRIVIVNNMPTHLDSHAAMRFDELGLVFEELQRRMSK

SEQ ID NO: 21657 - DNA, 357 bp, Unknown
  Obtained from environmental sample
  misc_feature (1)..(357): n is a, c, g, or t
gtggctgtaagccgggttctgttcgttttcacgtggctgtcatttctcttgaaccgccgttgccgacggtttccagcgacctacccgaaatgccgcaaaagcgaaacgcgagcaacgctttcatttctgtttggtcttgcatcaagtggggcttgcactgccgtttttgttgccaaaaacgcggtgagcttttacctcgccatttcacccttaccggttcaaagaaccggcggtatattttctgttgcgctatccataccgttgccggttccggccgttagccggcactttgctctgcgatgcccggactttcctctgcgaaaaccgcagcgacanacccgccacccgtttggataa

SEQ ID NO: 21658 - protein, 118 aa, Unknown
  Obtained from environmental sample
  misc_feature (1)..(118): Xaa is any amino acid
MAVSRVLFVFTWLSFLLNRRCRRFPATYPKCRKSETRATLSFLFGLASSGACTAVFVAKNAVSFYLAISPLPVQRTGGIFSVALSIPLPVPAVSRHFALRCPDFPLRKPQRXTRHPFG

SEQ ID NO: 21659 - DNA, 402 bp, Unknown
  Obtained from environmental sample
  misc_feature (1)..(402): n is a, c, g, or t
atggcaaccaattccaaagaaacccagagcgtagaaaattcggcggaaccgggcggtttcaccagggtaacgcagcttactacaatagcgaagatgaaatcccacgcggactatgcggcagcaaaagccggcgacgttaagtccgcggagcggctggtgagggacatgatggcgggcaaggcgcagcaggataaaatcaaggctctggtggaaaagcatccggatgctatactggtagccgtccacgcggaagagcggtcagggaagaataagataccgcgaacaattgctaaatatatcagcgatgccacaggcttagaacttgatactggcatagtgcagtcatgcaaagtaggccattccgggcaagatgcctggcacaggctgcctcggccgatctga

SEQ ID NO: 21660 - protein, 133 aa, Unknown
  Obtained from environmental sample
  misc_feature (1)..(133): Xaa is any amino acid
MATNSKETQSVENSAEPGGFTRVTQLTTIAKMKSHADYAAAKAGDVKSAERLVRDMMAGKAQQDKIKALVEKHPDAILVAVHAEERSGKNKIPRTIAKYISDATGLELDTGIVQSCKVGHSGQDAWHRLPRPI

SEQ ID NO: 21661 - DNA, 384 bp, Unknown
  Obtained from environmental sample
  misc_feature (1)..(384): n is a, c, g, or t
ttggcgaataaaaaaatcgcgtttgttggttctgtcaacgaacataatgtgccaaacatcaaggcaatgtcggttgtaaaacataacgggctggaaacgttttattttgtttcaaatcattctgagattaagacggaacattataagcgtaattttaacgcttgtatatattttaccggcggaccgatttataaagaacttatcctggagggtataatgaaagtcttccatggcgatgaaataaaaaattttgtccggatgaataataataagaacgcgtataaaaacggcagaccggatcctgattattgtgtgctgcaatttgtcacaaagaagggccggtttcatcattggtttaaaaccgaagcgtttgatattgattag

SEQ ID NO: 21662 - protein, 127 aa, Unknown
  Obtained from environmental sample
  misc_feature (1)..(127): Xaa is any amino acid
MANKKIAFVGSVNEHNVPNIKAMSVVKHNGLETFYFVSNHSEIKTEHYKRNFNACIYFTGGPIYKELILEGIMKVFHGDEIKNFVRMNNNKNAYKNGRPDPDYCVLQFVTKKGRFHHWFKTEAFDID

SEQ ID NO: 21663 - DNA, 519 bp, Unknown
  Obtained from environmental sample
  misc_feature (1)..(519): n is a, c, g, or t
gtgcttggcgatgttttaaccgaagtttacgggtttaagacggcgcggcgcgttattttgacgggctttgcggtgatggttcttgccgcgctggtttttttcgtgcttggaatattgccgcctgaagccggctgggaagccgaaaccggcgggaacaccgcgttcaacgcgatactcggcggaatgagctacggcggcattgtgcttgcgagtcttgcggcgtatcttgcgggggaactttccaattcgcttattctttctaaactcaaagtaataatgaaggggcggcttctttgggtgcgtaccataggctctactctggttggcgaattgctggattcattgatttttattctgattgcctccgttgccggggtttttccttgggagattttctggtctcttgtaataacaaattatattttaaaatgcgcaatagaagccgtggtaacgccttttacctactgggtttccggttttttgaaacgaaaagaagggatagatgtatacgacgcatga

SEQ ID NO: 21664 - protein, 172 aa, Unknown
  Obtained from environmental sample
  DOMAIN (1)...(144): Uncharacterized ACR, YhhQ family COG1738
  misc_feature (1)..(172): Xaa is any amino acid
MLGDVLTEVYGFKTARRVILTGFAVMVLAALVFFVLGILPPEAGWEAETGGNTAFNAILGGMSYGGIVLASLAAYLAGELSNSLILSKLKVIMKGRLLWVRTIGSTLVGELLDSLIFILIASVAGVFPWEIFWSLVITNYILKCAIEAVVTPFTYWVSGFLKRKEGIDVYDA

SEQ ID NO: 21665 - DNA, 504 bp, Unknown
  Obtained from environmental sample
  misc_feature (1)..(504): n is a, c, g, or t
gtgcgtttttcaatgatccagttttcctacggctcggacacagcctctaaaaacagggcgaaagaggcggctgacaggctggtcagagaaattggttccgatccttcaaaattcgacgaagcggttattaaaagccgggtgcccaattccggctatgatgctggggacgtaggatacgttccgctcgacgcggaaacccagcaggtcatcggagcaaatttaatgaatgcagcaagatcgctaaagcaaggcgaagtatcaaagctaattgaaggcaatcagggctatcagataatcaagattaccgaggccttacccatgaagaccctgggattggatgaaattgcgatactcggatcttccgtaacggtgaggcagtacatagcggcaggtttgctggagcaaaaacagcaggaaattctggaaagagctaccagagaactcacaacagagctcagggccgggaatccgtttcgaataatggaaaacaacctaaactggtaa

SEQ ID NO: 21666 - protein, 167 aa, Unknown
  Obtained from environmental sample
  DOMAIN (6)...(103): PPIC-type PPIASE domain
  misc_feature (1)..(167): Xaa is any amino acid
MRFSMIQFSYGSDTASKNRAKEAADRLVREIGSDPSKFDEAVIKSRVPNSGYDAGDVGYVPLDAETQQVIGANLMNAARSLKQGEVSKLIEGNQGYQIIKITEALPMKTLGLDEIAILGSSVTVRQYIAAGLLEQKQQEILERATRELTTELRAGNPFRIMENNLNW

SEQ ID NO: 21667 - DNA, 474 bp, Unknown
  Obtained from environmental sample
  misc_feature (1)..(474): n is a, c, g, or t
gtgctgccggataattacgagacaataaaggccaccgagatcctcgcgaaagaaggatttatagtcatgccctatatgtttcccgacttgatggcggcgcgggatcttgtaaacgccggagccgcctgcgtcatgccgcttgcggcgcctattggttccaaccgcggactctgcggcaaggattttatccgtatccttctggatgagattgcgcttcccattatcatcgacgcgggaatcgggaggccttcccaggcatgcgaagtaatggagatgggagccgacgctgtcatggcaaacaccgccattgccaccgccggagatattcccgctatggctgaagcgtttaagaaagcgattgaagcgggtaggcaggcctttctcagcggtacaggcagggttcttgaaaagggcgcgtccgcgtcttcaccgttaaccgggttccttgcagagtcaggtggcgaaaatgagtga

SEQ ID NO: 21668 - protein, 157 aa, Unknown
  Obtained from environmental sample
  DOMAIN (1)...(150): Thiazole biosynthesis protein ThiG
  misc_feature (1)..(157): Xaa is any amino acid
MLPDNYETIKATEILAKEGFIVMPYMFPDLMAARDLVNAGAACVMPLAAPIGSNRGLCGKDFIRILLDEIALPIIIDAGIGRPSQACEVMEMGADAVMANTAIATAGDIPAMAEAFKKAIEAGRQAFLSGTGRVLEKGASASSPLTGFLAESGGENE

SEQ ID NO: 21669 - DNA, 513 bp, Unknown
  Obtained from environmental sample
  misc_feature (1)..(513): n is a, c, g, or t
gtgttaagggaaaaggatctttcattgaaagattatcttgatcttgcaatggatgtccttgagatttgtaccagcaggaaagttcaatttattgttcatggtcttccccaagtggccatggatttaggctgtccttttcttcatctgccgtgggcggcgtttaaggaaaatcgcataagttcaaaaggcattttttcttttggagtttctgttcacagtaccgaagaagcgaatcttgccatagctaatggagcttcatggcttattggaggccatatttatgcaacccaaagcaaagacggccttgaaggcagggggccggaattccttgcggagctctgtaagttgtcctctgtccccgtgtacgggatcgggggaattaatgaacataacataaccgaaattgtaaaaaccggcgcggcgggagcatgcctgatgtcttctttgatgcaatgtcccgatccttccgcgttgatatccgcgctgaaaaacataagtaaaagaaatatttag

SEQ ID NO: 21670 - protein, 170 aa, Unknown
  Obtained from environmental sample
  DOMAIN (2)...(149): Thiamine monophosphate synthase/TENI
  misc_feature (1)..(170): Xaa is any amino acid
MLREKDLSLKDYLDLAMDVLEICTSRKVQFIVHGLPQVAMDLGCPFLHLPWAAFKENRISSKGIFSFGVSVHSTEEANLAIANGASWLIGGHIYATQSKDGLEGRGPEFLAELCKLSSVPVYGIGGINEHNITEIVKTGAAGACLMSSLMQCPDPSALISALKNISKRNI

SEQ ID NO: 21671 - DNA, 741 bp, Unknown
  Obtained from environmental sample
  misc_feature (1)..(741): n is a, c, g, or t
gtggatttcaccattgaggtggaacgctccctgagagttctggatggcgcgattctagttctctgcggcgttgccggcgttcaatcccagtctataacagtggataggcagatgcgccgctacaatgttccccgcatagcttttgtgaacaaatgcgaccgcgcaggtgcagacccgctccgcgttgcttcgcagctccgcgaaaagctcaaccacgtcccctgcgtgatgcaactccccataggtctggaagataaattaaaaggcgttgtggatttggttaaaatgaagggttttctctttgaagggcaaaacgggcaggacataaaagagattgaaatacccgaagacatgaaggcgcaagccgccgaataccgttcaaagctgatagaaaccgttgctgatttcaacgaccacataatggaatccgccttggaaggcaaggatgttcccgaagagcttctcaaagaaacaattcgcaaagcgacaatagacctcaaaataacgccagtattcttaggttctgcctataaaaacacaggtattcaaaaacttttggatggcgtaacagactacctgccaaacccaacggaagttaaaaacgtagccctcaacttagacaaaaacgaagagccaaccgagcttgagagcaaggatagcaaacctctcgtttgctacgcttttaaactaacagacgaccgctacggtcagttgacatacattagaatttatcagggttga

SEQ ID NO: 21672 - protein, 246 aa, Unknown
  Obtained from environmental sample
  DOMAIN (1)...(197): Elongation factor Tu GTP binding domain
  misc_feature (1)..(246): Xaa is any amino acid
MDFTIEVERSLRVLDGAILVLCGVAGVQSQSITVDRQMRRYNVPRIAFVNKCDRAGADPLRVASQLREKLNHVPCVMQLPIGLEDKLKGVVDLVKMKGFLFEGQNGQDIKEIEIPEDMKAQAAEYRSKLIETVADFNDHIMESALEGKDVPEELLKETIRKATIDLKITPVFLGSAYKNTGIQKLLDGVTDYLPNPTEVKNVALNLDKNEEPTELESKDSKPLVCYAFKLTDDRYGQLTYIRIYQG

SEQ ID NO: 21673 - DNA, 570 bp, Unknown
  Obtained from environmental sample
  misc_feature (1)..(570): n is a, c, g, or t
atgatgaaacctctatttttttccgtattaattctcttttcctcggggctttttgcggctccgcttgaaagtaattttgtcaaggctccggcgtctaccgcttcgcaggctgaaaaagagcaggcttacatagatgcgcggaacaaggtaattaaagccgcggcaaagtacgagaaagtaccctaccgtcacggcggggtaacaaagagcggagtggattgttcgggttttgtttacgcgagtttcaaagacgccctgggcgtttccacgccgcgttcttctacggggctttatacatgggcggaaataatccctcttgaaaaagcgcagcccggcgatcttttgttttttaagactacaggcggcaatacaatttcccatgtcggaatttatctcggcgaccgccgttttatacactcggcgtccgccggcccgaataccggcgttatttattcaactcttgacgagaggtactggtcccgcgcttacgccgcctccggcagagttttcccggaaaccgaaggatacaatgtgtttagcaagcgcgaaagaccgctcggccgattctga

SEQ ID NO: 21674 - protein, 189 aa, Unknown
  Obtained from environmental sample
  SIGNAL (1)...(19)
  DOMAIN (59)...(168): NlpC/P60 family
  misc_feature (1)..(189): Xaa is any amino acid
MMKPLFFSVLILFSSGLFAAPLESNFVKAPASTASQAEKEQAYIDARNKVIKAAAKYEKVPYRHGGVTKSGVDCSGFVYASFKDALGVSTPRSSTGLYTWAEIIPLEKAQPGDLLFFKTTGGNTISHVGIYLGDRRFIHSASAGPNTGVIYSTLDERYWSRAYAASGRVFPETEGYNVFSKRERPLGRF

SEQ ID NO: 21675 - DNA, 363 bp, Unknown
  Obtained from environmental sample
  misc_feature (1)..(363): n is a, c, g, or t
gtgccgaataattttaatccaaaggaatccgaatggtataatttggctgtcgcaggcaaaggcaaaattgccgtttccgttccttacaaaagcccgttttattcgttcaacatcctgaagttttcacgcgccatctttgacgataacggccgcccgttaggtgtaatctgccttgatttggactttaaaaaagttacaaacattgttttaaatttcagttttacggaaaacagttacggattccttctcaataacaggcaggatgtaatagcccatccttcttattatattccgactgatcatatatccgatattgataacggtttaacttttatgttttgggatatggagcatgggaagtaa

SEQ ID NO: 21676 - protein, 120 aa, Unknown
  Obtained from environmental sample
  DOMAIN (25)...(105): Cache domain
  misc_feature (1)..(120): Xaa is any amino acid
MPNNFNPKESEWYNLAVAGKGKIAVSVPYKSPFYSFNILKFSRAIFDDNGRPLGVICLDLDFKKVTNIVLNFSFTENSYGFLLNNRQDVIAHPSYYIPTDHISDIDNGLTFMFWDMEHGK

SEQ ID NO: 21677 - DNA, 321 bp, Unknown
  Obtained from environmental sample
  misc_feature (1)..(321): n is a, c, g, or t
ttggtcatggcgtataggcggttgtctaagcatattacggtgatgtcaaaattttttctcgcggcgtggacgaagtgcgccgcgcctatggagagcaggtcgccgtcgcccgtcgccacgattaccgggatatcggggcgcgccagccttgagcctatggcgaccggcagcggcctgccgtgcagggtgtgcataccgtgcgtgttcaggaatagcggtaaccgcgaggagcagcctattcctgaaatcacgcatatttcgtccggcgcgataccgcgttcgtcgaagcactccgttagggcggagagcacggtgaagtaa

SEQ ID NO: 21678 - protein, 106 aa, Unknown
  Obtained from environmental sample
  misc_feature (1)..(106): Xaa is any amino acid
MVMAYRRLSKHITVMSKFFLAAWTKCAAPMESRSPSPVATITGISGRASLEPMATGSGLPCRVCIPCVFRNSGNREEQPIPEITHISSGAIPRSSKHSVRAESTVK

SEQ ID NO: 21679 - DNA, 429 bp, Unknown
  Obtained from environmental sample
  misc_feature (1)..(429): n is a, c, g, or t
atgccattaagcgcggtagtttctgataatactgtgaaagttccccctgaagttctctccgacccggctttgttatttttatattaccgcattgagcagatacttggcataagggcgggaagcgaatcccttataagattaaatgaatatcttgagaataattgcggttcgtcttttattaaaaaccccgccgcttacgaatatcttcttacttcccgtgaacagatattcagcatatcaaaatttcttaccgtaaacgaaacatattttttcagggaaggcgcccattttgatcttcttgcgggcgttttgcccgaactggcggaacttggccgcccattacaaatatgctccgccgccgtttcaattggatgtgaagcgtacagcatcgcaatgcttcttgatcaccatataaaaaacgcggcttaa

SEQ ID NO: 21680 - protein, 142 aa, Unknown
  Obtained from environmental sample
  misc_feature (1)..(142): Xaa is any amino acid
MPLSAVVSDNTVKVPPEVLSDPALLFLYYRIEQILGIRAGSESLIRLNEYLENNCGSSFIKNPAAYEYLLTSREQIFSISKFLTVNETYFFREGAHFDLLAGVLPELAELGRPLQICSAAVSIGCEAYSIAMLLDHHIKNAA

SEQ ID NO: 21681 - DNA, 312 bp, Unknown
  Obtained from environmental sample
  misc_feature (1)..(312): n is a, c, g, or t
atgtggcgaagggattccagtttaaatgatgcgcaacacaatggcgcggattacgaaaggcttatggaaagatcaatgaccgaagaaggcgaaagaagaatggtgactttggctgaagcagaaaaactacttttagatcgcggaactgtattacctatatttcatactttagcgataaatattataaacattgatgaaatagacggctggtatcctaatgctcttgacatacatccatttaagtatttgtcatataaagcaattacgccattgccaaatgttgctttaatcccactctccaacaggttttaa

SEQ ID NO: 21682 - protein, 103 aa, Unknown
  Obtained from environmental sample
  misc_feature (1)..(103): Xaa is any amino acid
MWRRDSSLNDAQHNGADYERLMERSMTEEGERRMVTLAEAEKLLLDRGTVLPIFHTLAINIINIDEIDGWYPNALDIHPFKYLSYKAITPLPNVALIPLSNRF

SEQ ID NO: 21683 - DNA, 303 bp, Unknown
  Obtained from environmental sample
  misc_feature (1)..(303): n is a, c, g, or t
atgttaaagagaaacaaaaaatattttgcgcttaaagtaaaaggcgattcaatgatcggcgcgggtattctggaaggagatatagcgattattgaaaaacagcatatagttcaaaacaaagagattgccgtagtggtcataatggaaaaagattcatctgaagaaggtataacattgaaacggtttttcaaggaaagcacaagaattcgattggaagcggaaaatcccgcgtacaagccgcgttattacacccatgatataaaagttttgggcagattatccacagtaataagatcatattga

SEQ ID NO: 21684 - protein, 100 aa, Unknown
  Obtained from environmental sample
  DOMAIN (12)...(86): Peptidase S24-like
  misc_feature (1)..(100): Xaa is any amino acid
MLKRNKKYFALKVKGDSMIGAGILEGDIAIIEKQHIVQNKEIAVVVIMEKDSSEEGITLKRFFKESTRIRLEAENPAYKPRYYTHDIKVLGRLSTVIRSY

SEQ ID NO: 21685 - DNA, 318 bp, Unknown
  Obtained from environmental sample
  misc_feature (1)..(318): n is a, c, g, or t
gtgacacttcgcttgcgcgtagcggaattggtcgggctttctgaagcggagttggagcgggttaaatccgtgctggcgaacaggctcacaaaagaggacgaaattgttttaacttcggaggaggagcgctctcagcggacaaaccttgagagggcgtatatccgcatggaggcgttgatttccggcgctgcaagactgccaaaggtgcgaaggccaacaaagccggggagggcggcaaaagaaaagcgcctccttgcaaagaggcgccaatcacaaaaaaaggccgaaagggcgaaacaggcggattgtttcacgtga

SEQ ID NO: 21686 - protein, 105 aa, Unknown
  Obtained from environmental sample
  misc_feature (1)..(105): Xaa is any amino acid
MTLRLRVAELVGLSEAELERVKSVLANRLTKEDEIVLTSEEERSQRTNLERAYIRMEALISGAARLPKVRRPTKPGRAAKEKRLLAKRRQSQKKAERAKQADCFT

SEQ ID NO: 21687 - DNA, 420 bp, Unknown
  Obtained from environmental sample
  misc_feature (1)..(420): n is a, c, g, or t
ttgcgcggaaccagcccaagggaagttctggaggcttttataggcgcattgctgcctatcccttcggttcaggcggatgaattattgacggcgctgttggagagggaagctttaatgtcaaccggcattggcggcggtattgcccttcctcaccccaggaacccgcttgcggggacggacagcgaacaatttgtggctctcgcttttttggaaacaccggtggactggaattccctggacggtgaaaaggtagacactttactgcttattttttcctgttcggcaaaacagcaccttcaaaccctgtcggaaattaccttcttttgccgcaagaaagaattctgccagctcttgaaagatcgcgctccgctggaagatctgctatgctttataagagaagccgagaaaaactggaagtag

SEQ ID NO: 21688 - protein, 139 aa, Unknown
  Obtained from environmental sample
  SIGNAL (1)...(25)
  DOMAIN (2)...(134): Phosphoenolpyruvate-dependent sugar phosphotransferase system, EIIA 2
  misc_feature (1)..(139): Xaa is any amino acid
MRGTSPREVLEAFIGALLPIPSVQADELLTALLEREALMSTGIGGGIALPHPRNPLAGTDSEQFVALAFLETPVDWNSLDGEKVDTLLLIFSCSAKQHLQTLSEITFFCRKKEFCQLLKDRAPLEDLLCFIREAEKNWK

SEQ ID NO: 21689 - DNA, 735 bp, Unknown
  Obtained from environmental sample
  misc_feature (1)..(735): n is a, c, g, or t
atgtcctgtatcgttgaactaagaaatatcttctattcggcgcagaacaggaagctgtgtaagggaatgtcttatgaatttgaagaagggaagactaccgccctggtcgggccctcgggctgcgggaaaagcaccgtgttaaagctggccgccgggctttttgcgccgaacgaaggagaagtgttgttcaggggaaaggatatattccgcatgaacaggcttgagaatctcgcgttcaggcgggaggccgcggtggtttttcaagattccgcattgtgggcaaaccagaatttgtttcagatactggatctgcccctgagactgcattttccctcaatgaccaaacagcagcgggagaggaggattgaagccgtggtcgccgaggtgggttataaaaaagacctggggatacgcccttcggcgctttccatgggcgagcagaaactgatcgccttcgccagagccctaatgtgccgtcccatgctgctctacctggacgaatggacggaatcgctggacgagacggcttcccagcgtttgatagaaatggtaaagaaactccagcaagagggcgtctctattatttttgttagccatgatatacggattatcaacggccttgccgattatgtcataatgatcctcggggggcagatttttatcaggcttaccaaagagcagattaagtctgataatttctacgtcgaatttattgagaagggtatggaaacatga

SEQ ID NO: 21690 - protein, 244 aa, Unknown
  Obtained from environmental sample
  DOMAIN (30)...(217): ABC transporter
  misc_feature (1)..(244): Xaa is any amino acid
MSCIVELRNIFYSAQNRKLCKGMSYEFEEGKTTALVGPSGCGKSTVLKLAAGLFAPNEGEVLFRGKDIFRMNRLENLAFRREAAVVFQDSALWANQNLFQILDLPLRLHFPSMTKQQRERRIEAVVAEVGYKKDLGIRPSALSMGEQKLIAFARALMCRPMLLYLDEWTESLDETASQRLIEMVKKLQQEGVSIIFVSHDIRIINGLADYVIMILGGQIFIRLTKEQIKSDNFYVEFIEKGMET

SEQ ID NO: 21691 - DNA, 657 bp, Unknown
  Obtained from environmental sample
  misc_feature (1)..(657): n is a, c, g, or t
ttgttgatccgttcgggcctttccctcggtaatgtgttgttctcgctgggcagcgcgcaggacgccgccgaagcctggaacaaagccatggaagaggcggcgtttttcggaaacaaggaatttgccgccatctgccgcgtacatatcgcgcgggggaaactgctttcaccgggcggcaaggacatcgcacagtccgttcgtgacgaggtaacccaggaactgtcccagataaaatccgaaggaacatatatcgccttcgcgtggacggttatcggccttgcggaaaaggaaatgggccgttatgccgccgcggaagacgcggtcaaacgggctttggcgatccatttaaaagccgccaaccttgaactcgcggcctacgactggtttatgatagcctctttccgttccctttccggcaattccggagaggccttgaaagctcttgaaagcgcgatcgaatacgaccgccgcaccgagaattcctggggccttgccaacgactggcaggccattggcgacgtgcagaaaaaagccggcaaccgcgatgccgccaacgccgcgtacacgcgcgccgccgccattttccacgccataggggattacgatgtggcggagaaaatattggggagaagggacgcagagggtgcaccgcgctaa

SEQ ID NO: 21692 - protein, 218 aa, Unknown
  Obtained from environmental sample
  SIGNAL (1)...(22)
  misc_feature (1)..(218): Xaa is any amino acid
MLIRSGLSLGNVLFSLGSAQDAAEAWNKAMEEAAFFGNKEFAAICRVHIARGKLLSPGGKDIAQSVRDEVTQELSQIKSEGTYIAFAWTVIGLAEKEMGRYAAAEDAVKRALAIHLKAANLELAAYDWFMIASFRSLSGNSGEALKALESAIEYDRRTENSWGLANDWQAIGDVQKKAGNRDAANAAYTRAAAIFHAIGDYDVAEKILGRRDAEGAPR

SEQ ID NO: 21693 - DNA, 771 bp, Unknown
  Obtained from environmental sample
  misc_feature (1)..(771): n is a, c, g, or t
atgaatcttattcaaagcgacggctttaacccgcttaaagtgcttggcgtcagttttacatttgaaaccaatgaaaacagacggcgttttattgacgaagattttaaaacaaacgcaataaatgtaaaagaatttcccggttttattgacaaacttgtatcctttacatcaaagacttttactatcggcagtctctttcattttattgaagaaaacaaaataaaaatttctaatcgtaaaaccctgcttgcgtcgcttttaaaatacgcgaagaaaataagccttgcggaacacggcgaagggtattggtcggatcattggcattacaataccgatctaatcgaaaattaccttgctgtttttcctgatcgtctcaaacaacttctccttgaaacctgcgactacactttttttgatgattgctattttgttgaaccgcgcagcgttaaatatgttctattcagaggaatgccgagacaaatccgcgccgtgcgccgtgaccccgagaaagcggctcttattacatcgcgtacaaagaatcctaatgtaatgcgaacggattttggctcaggtaaagagtactgcacaaaccttctaggcaaactgctttgcctgatcgcgaataaatacgcttcgcttgatcctgaatgtcttggcgtggaaatggaaggagacaaaccaaactggtgcgacgccttaaacgggcttccgggcctctttggctcttccagcgcggaaagccttgagttactgaggcttatctcctcctga

SEQ ID NO: 21694 - protein, 256 aa, Unknown
  Obtained from environmental sample
  misc_feature (1)..(256): Xaa is any amino acid
MNLIQSDGFNPLKVLGVSFTFETNENRRRFIDEDFKTNAINVKEFPGFIDKLVSFTSKTFTIGSLFHFIEENKIKISNRKTLLASLLKYAKKISLAEHGEGYWSDHWHYNTDLIENYLAVFPDRLKQLLLETCDYTFFDDCYFVEPRSVKYVLFRGMPRQIRAVRRDPEKAALITSRTKNPNVMRTDFGSGKEYCTNLLGKLLCLIANKYASLDPECLGVEMEGDKPNWCDALNGLPGLFGSSSAESLELLRLISS

SEQ ID NO: 21695 - DNA, 336 bp, Unknown
  Obtained from environmental sample
  misc_feature (1)..(336): n is a, c, g, or t
atgacggtacggcggtatgaatgtgaatcgtgcaaatactgcagaatacaaaaacaatgtaaaaaaggcgtggggaaccgaggcatagaacgaaacgagcgttggctcagattgaaacgcaaagccaagcgtgtgctggaagacgagaaatacatagaactgaggaaacggcggtctgttgaagttgaaacggtattcggacagataaaagggaatcaggggttcaggaggtttctgttgcggggaactgaaaaagtctcaactgaatgggggttgctgtctcttgggtataatttgaagcatatgtttaggacaaaccggaataaagcggcataa

SEQ ID NO: 21696 - protein, 111 aa, Unknown
  Obtained from environmental sample
  misc_feature (1)..(111): Xaa is any amino acid
MTVRRYECESCKYCRIQKQCKKGVGNRGIERNERWLRLKRKAKRVLEDEKYIELRKRRSVEVETVFGQIKGNQGFRRFLLRGTEKVSTEWGLLSLGYNLKHMFRTNRNKAA

SEQ ID NO: 21697 - DNA, 396 bp, Unknown
  Obtained from environmental sample
  misc_feature (1)..(396): n is a, c, g, or t
atgattctccataagatacaggaaactttcgggttcatttccagggaatcggcggataaattgtcccagattaccggaattccgctggcacgtatctacggggtaatcactttttatcattttttcaaaactactaagcccggcaagaacaaaatttccgtatgcctgggaactgcctgctatctgaaaggcggtcaggatcttattgaagaagcccggaaaattttgaaccttgctcccggcggtgtaacggaggacgggcttttttccattgatgaagtccgttgcgtaggatgctgcggcctttcaccggtaataaccgtggggcctgatacttacggcaagctcacagcggaaatgcttccggaaattatcgccaagtataagaacgcataa

SEQ ID NO: 21698 - protein, 131 aa, Unknown
  Obtained from environmental sample
  DOMAIN (2)...(129): Respiratory-chain NADH dehydrogenase 24 Kd subunit
  misc_feature (1)..(131): Xaa is any amino acid
MILHKIQETFGFISRESADKLSQITGIPLARIYGVITFYHFFKTTKPGKNKISVCLGTACYLKGGQDLIEEARKILNLAPGGVTEDGLFSIDEVRCVGCCGLSPVITVGPDTYGKLTAEMLPEIIAKYKNA

SEQ ID NO: 21699 - DNA, 342 bp, Unknown
  Obtained from environmental sample
  misc_feature (1)..(342): n is a, c, g, or t
gtgtcccaggacggcagggtntccgttgtcgtgccgcagattgacgatgagccaatccagattggccagattgagctgtaccgctttcctaaccctgtgggccttaccgccgttggggaaaacctttttaagataaccgccgcctcgggggatccgattccaggcgtacccggctatgagggcatgggcaagatagctcacaaattcctggagatgtcgaatatctcggtggttcgtgagatggtcgaccttattgtcgcccagcgcgcctacgaattcaattccagaacgatacagaccagcgacaatatgcttggaacggcaacaagtttgaagaggtaa

SEQ ID NO: 21700 - protein, 113 aa, Unknown
  Obtained from environmental sample
  DOMAIN (73)...(111): Domain of unknown function (DUF1078)
  misc_feature (1)..(113): Xaa is any amino acid
MSQDGRVSVVVPQIDDEPIQIGQIELYRFPNPVGLTAVGENLFKITAASGDPIPGVPGYEGMGKIAHKFLEMSNISVVREMVDLIVAQRAYEFNSRTIQTSDNMLGTATSLKR

SEQ ID NO: 21701 - DNA, 543 bp, Unknown
  Obtained from environmental sample
  misc_feature (1)..(543): n is a, c, g, or t
ttgtcaaatgagctttatgacaaacttattcatcatattgagaaacgttctaacattgtcgtctcgggagctacgggaagcggtaagactactttcactaacgcatgtattgagaaaatgtgcgagtttactcccgatgaacgcatatacattgttgaggatactcccgagctccaatgcaacagccgtttcaaaactcagctttatataagaaaagatcaggctgtcgcggccatacagacggctttgcgctttactcctaaaagaattattttcggcgagctccgttccggagaggtagccgtagagcttcttgaggcctggaataccggacacccgggaaactttactactattcacgccgacagcgccgcttccaccattccccgcattgagggacttttacgtcaggttattaaaggacaattacccgacttggcggattctatccggcttatcgttcatctttcgagccgcgcgggtttcgggcccgttgtggacgaaatccttactgtccgtgaaatacaggagggtaaattatga

SEQ ID NO: 21702 - protein, 180 aa, Unknown
  Obtained from environmental sample
  DOMAIN (1)...(160): Type II/IV secretion system protein
  misc_feature (1)..(180): Xaa is any amino acid
MSNELYDKLIHHIEKRSNIVVSGATGSGKTTFTNACIEKMCEFTPDERIYIVEDTPELQCNSRFKTQLYIRKDQAVAAIQTALRFTPKRIIFGELRSGEVAVELLEAWNTGHPGNFTTIHADSAASTIPRIEGLLRQVIKGQLPDLADSIRLIVHLSSRAGFGPVVDEILTVREIQEGKL

SEQ ID NO: 21703 - DNA, 435 bp, Unknown
  Obtained from environmental sample
  misc_feature (1)..(435): n is a, c, g, or t
gtggattattaccgggatgttctggatgaatcgaccgatacacgggcaagcaccgagccggtcaattcactgatatggatacttgatgtggagaaaggctcttatgaacgttccgtagaggcgcccttttacgagtacagtttttctgaaaatggcaaaacagtttacgcgcgtcttttgtactccatgctgggagttatccggggaggcggaatattgctctatttccccattgataccggatacgccgttttaagcatggactcaggaggacaccggcagcgccggggccatatcaaagttgaccctgaagaattgcgttttaatgattttcacctttccccggaaggtatactttccgccctgctggtaagcgactggaaaataaaagtagtttggtggcgcatggataaattcatgagggatgtattgtga

SEQ ID NO: 21704 - protein, 144 aa, Unknown
  Obtained from environmental sample
  misc_feature (1)..(144): Xaa is any amino acid
MDYYRDVLDESTDTRASTEPVNSLIWILDVEKGSYERSVEAPFYEYSFSENGKTVYARLLYSMLGVIRGGGILLYFPIDTGYAVLSMDSGGHRQRRGHIKVDPEELRFNDFHLSPEGILSALLVSDWKIKVVWWRMDKFMRDVL

SEQ ID NO: 21705 - DNA, 783 bp, Unknown
  Obtained from environmental sample
  misc_feature (1)..(783): n is a, c, g, or t
ttgagtaacgctgtcaaattcacggcagaaaaaggatcgatcactcttgatgcgcgttgtattggggcggaaaaagatatttacactatccaaatctccgtgacagataacggaattggcataagccgcgaacaacaagaacgcctgttcaagtcctttcagcaggcagagagcagcacaacgcgcaaatacggcggtacggggctggggcttgcgatttccaaaagcattgtggaattgatgggcggcaaaatatgggtcgtatccgagccggagaaaggctctacttttagctttacgatcatggcgaagaaaggcaaaaccgctgaaatcgtcaatgaacaagcctccggggaaaacaggcaagcggaggaaacgcggacggatattaacggtctttttgcggggcggcgcgttttgctggtagaagatgtggaaatcaaccgcgaaattgtactttccctgcttgaaccaacacagttggagatagactgcgcagaaaacggcgcggaagccgtacgcatgttcagtgaagccccgaacaggtacgagttgatttttatggatgtgcagatgcccgaaatggacggctacgaggctacgcggcgtatccggtcgctggatgcgtcgaaggggaaaaccgtcccgatcatagccatgactgcgaacgcgtttcgcgaagatatagaagaatgcctcgctgccggcatggacgatcatatagggaagccgattgatttcgagaaggtcatagaaaagttgtgcgcttatttagtaagataa

SEQ ID NO: 21706 - protein, 260 aa, Unknown
  Obtained from environmental sample
  DOMAIN (137)...(255): Response regulator receiver domain
  misc_feature (1)..(260): Xaa is any amino acid
MSNAVKFTAEKGSITLDARCIGAEKDIYTIQISVTDNGIGISREQQERLFKSFQQAESSTTRKYGGTGLGLAISKSIVELMGGKIWVVSEPEKGSTFSFTIMAKKGKTAEIVNEQASGENRQAEETRTDINGLFAGRRVLLVEDVEINREIVLSLLEPTQLEIDCAENGAEAVRMFSEAPNRYELIFMDVQMPEMDGYEATRRIRSLDASKGKTVPIIAMTANAFREDIEECLAAGMDDHIGKPIDFEKVIEKLCAYLVR

SEQ ID NO: 21707 - DNA, 711 bp, Unknown
  Obtained from environmental sample
  misc_feature (1)..(711): n is a, c, g, or t
atgtccatatccaaccccagctgcatatacgtgttccgtatggagccgcttgaggggttggcgatcatagagataaacccgtcgcttgtattctacatcatagacaggctgttcggcggccaagggcgcccgtttgagggcaaccgcgagttgaccatgatcgagcagaacgtgataaaccgcatagtgcagcgcggcctcggggatttgtgcaccgtgtgggagcatatcggttcgttctcctccaagatcgaggcgtacgagacgaacccgcagtttgtgcagatcgcgccgcccagcgagacggtgatcctcataagcttggaggtgcgcatgcagaacgcctccggccttatgagtttgtgctttccctacatggtgctcgagagcgtgatcaacaacttgacggtggagaactggatgtctctgcagggccaggcgacgccggagacccgcgaactgatggagcgcgagttgagcgacgtgacgctcttcatttccacggtgatagggaagacgacgcttactatgagggacttgttgcagttgcagcgcggcgacgtgatatgtttggacaagcgccacgacagcgatctcttggtgcagatagggggcaagacgaagttggcgggccgcgccgggctaatagggcgcaggaaagcggtgaagatcacaagcattgtggaaagggaggtgcctggttgtgagtga

SEQ ID NO: 21708 - protein, 236 aa, Unknown
  Obtained from environmental sample
  DOMAIN (155)...(231): Surface presentation of antigens (SPOA) protein
  misc_feature (1)..(236): Xaa is any amino acid
MSISNPSCIYVFRMEPLEGLAIIEINPSLVFYIIDRLFGGQGRPFEGNRELTMIEQNVINRIVQRGLGDLCTVWEHIGSFSSKIEAYETNPQFVQIAPPSETVILISLEVRMQNASGLMSLCFPYMVLESVINNLTVENWMSLQGQATPETRELMERELSDVTLFISTVIGKTTLTMRDLLQLQRGDVICLDKRHDSDLLVQIGGKTKLAGRAGLIGRRKAVKITSIVEREVPGCE

SEQ ID NO: 21709 - DNA, 327 bp, Unknown
  Obtained from environmental sample
  misc_feature (1)..(327): n is a, c, g, or t
gtggatatgtcgggccgcccttttttattttttgacggacagcttcctgattctcacataatttcgataaacaaagacggaaaggaatataagtttcaaacaggtttaacggaagatttttggcaaggttttacaaattcggcaggctgtaatcttcaccttgaaatcttacgcggcagaagcgatcaccataagattgaagccatgttcaaagccgccgcccgcgccattcgcgccgcctgcgagatagacgggcgtgctaaagattcaatcccctcaaccaagggcgttcttcccggttttgacgcgccgagtgtgcttgtatga

SEQ ID NO: 21710 - protein, 108 aa, Unknown
  Obtained from environmental sample
  DOMAIN (1)...(78): Imidazoleglycerol-phosphate dehydratase
  misc_feature (1)..(108): Xaa is any amino acid
MDMSGRPFLFFDGQLPDSHIISINKDGKEYKFQTGLTEDFWQGFTNSAGCNLHLEILRGRSDHHKIEAMFKAAARAIRAACEIDGRAKDSIPSTKGVLPGFDAPSVLV

SEQ ID NO: 21711 - DNA, 483 bp, Unknown
  Obtained from environmental sample
  misc_feature (1)..(483): n is a, c, g, or t
gtgatggggaggctcatgccctttgtcgacctctgcatcgcaaacgaggaagacgccgccgacgttttcggcatacacgcgaagaacagcgacgtcagctccggcagcataagccatgatggttacaaggaagtggcaaaagccctgacggaccgtttcaagttcaaaaaagtggcgataacattgagggaatcgatcagcgcgaacgacaacaactgggcggcgatgtattactgcggcggggatttttatttttccaaaaaatacgcagtgcatatagtggatcgcgttggcggcggcgacagtttcggcgctggccttatttacgcgaacctcaaaggttttggcccccaggaaagcgtcgaattcgccgtcgccgcaagctgcctgaagcactcaatcgaaggcgactttaaccaggtatccgttgacgaagtgcagaaactcgccggcggcgacgcgtcgggaagggtacagaggtag

SEQ ID NO: 21712 - protein, 160 aa, Unknown
  Obtained from environmental sample
  misc_feature (1)..(160): Xaa is any amino acid
MMGRLMPFVDLCIANEEDAADVFGIHAKNSDVSSGSISHDGYKEVAKALTDRFKFKKVAITLRESISANDNNWAAMYYCGGDFYFSKKYAVHIVDRVGGGDSFGAGLIYANLKGFGPQESVEFAVAASCLKHSIEGDFNQVSVDEVQKLAGGDASGRVQR

SEQ ID NO: 21713 - DNA, 612 bp, Unknown
  Obtained from environmental sample
  misc_feature (1)..(612): n is a, c, g, or t
atgatttctattgtacttatagatgaccaccccctggctaccaacgggataggcgcgtggctgaacggaacaggcaggttcactgtttgcggtacggcaaaaaatcttgccgaagcctcggctcttatggaaaagccgggaaaactgcccgaaataatcattcttgatatttctcttggagcggaagacggtcttgatttcatccccaagttaaaggaaatatgcgcgaagcgaaacgtttccgtgccgggtattttggtatgctcaatgtatgaagacccttttttgatacagcgcgcgatagaccaaggcgcgagagcgtatgtctcaaaatccgcggaatcgggggaaattcttaccgctatagacgctcttttgaaaggcggttcttatattaatccccggtataatatagaaaaaccgaaacattcatggtctttattaacccgccgcgaaaatgaaattgtcgcctgtattaagcaaaatatgaataacaagcaaatagcgaaaagattgaatattgccgttcgtactgtggaaaaccatgtttcgcacatttattacaaaaccaggcgttgcttcccgggaagaattgctggaattgtaggttaa

SEQ ID NO: 21714 - protein, 203 aa, Unknown
  Obtained from environmental sample
  DOMAIN (145)...(193): Bacterial regulatory proteins, luxR family
  misc_feature (1)..(203): Xaa is any amino acid
MISIVLIDDHPLATNGIGAWLNGTGRFTVCGTAKNLAEASALMEKPGKLPEIIILDISLGAEDGLDFIPKLKEICAKRNVSVPGILVCSMYEDPFLIQRAIDQGARAYVSKSAESGEILTAIDALLKGGSYINPRYNIEKPKHSWSLLTRRENEIVACIKQNMNNKQIAKRLNIAVRTVENHVSHIYYKTRRCFPGRIAGIVG

SEQ ID NO: 21715 - DNA, 375 bp, Unknown
  Obtained from environmental sample
  misc_feature (1)..(375): n is a, c, g, or t
atgcttttcgcgattttgctggttttgtttctgatcgtgtgcgtgttcatctgtttgctcatcctcgtccagtccgacaagggcggcgggatatccggcgccatcggcggtttgagcggggccaacaactttttgggcactcaggacacggccaacgtgctgaccaagggcacgtacatattcggcgccgtgtttttggttctttgcgtccttatgaccctctttgaaccgggcggcggaaccgtcaagtccggattgcagaagagggcggagaaggtgcagacggtaaccccggtgcccgcctcggcgttcggggcggacgggatcgtcgacgacgccggagaggcgccggttgagagcgcgccggcggagtag

SEQ ID NO: 21716 - protein, 124 aa, Unknown
  Obtained from environmental sample
  SIGNAL (1)...(25)
  DOMAIN (3)...(77): Preprotein translocase SecG subunit
  misc_feature (1)..(124): Xaa is any amino acid
MLFAILLVLFLIVCVFICLLILVQSDKGGGISGAIGGLSGANNFLGTQDTANVLTKGTYIFGAVFLVLCVLMTLFEPGGGTVKSGLQKRAEKVQTVTPVPASAFGADGIVDDAGEAPVESAPAE

SEQ ID NO: 21717 - DNA, 795 bp, Unknown
  Obtained from environmental sample
  misc_feature (1)..(795): n is a, c, g, or t
atgagcggagggctgataaagttggagcattacagagacgacgtaaaatacaatgagtggaggttggattacggcggatggcagctgtttgacggaaacggaaaacccgcgactctcaactacacgaattatatcgcggaagacggcgtattgtacaacagggacaaaacggttttggtggcttgtggaaacaatcgggaaacgttcacgattcccaaaagcgtcaaatctatcggcgacgacgcgttttccggatgttacggcatgacttccttaacgcttaaaagttcaacgccgcccaaaataagtcaaagagcaatttcttcacttaatgtggagacttgcatcctatacgtgcctaaaggcggcgcgtacgcaaaaacatcagggtggaaaggatttaagaatatagtatacgtggatcccaacgccaaagcgccgccggcggcgtcggtttacgcgcccgcgccgtctaatgcagacgcgcaagccgaacaggggcaagcggcgcaggtgcagtacggggatcactatggggcgacgacccgttttcagccgatgataaacctatacaagaaccaactcgcggagtgcggcgctcaaaggagcgaacaatgcgaactggccttgtttatgctgggcggcacctatttttcgcaggcgcaagcaaaagcgtcgttatccggcggaatcggaggggattattcaatggctgtacagacctatcagcaatttttgacagaatatccatggtctcaatacgcgtcggaggttaaaacgaattggcgcaaatag

SEQ ID NO: 21718 - protein, 264 aa, Unknown
  Obtained from environmental sample
  misc_feature (1)..(264): Xaa is any amino acid
MSGGLIKLEHYRDDVKYNEWRLDYGGWQLFDGNGKPATLNYTNYIAEDGVLYNRDKTVLVACGNNRETFTIPKSVKSIGDDAFSGCYGMTSLTLKSSTPPKISQRAISSLNVETCILYVPKGGAYAKTSGWKGFKNIVYVDPNAKAPPAASVYAPAPSNADAQAEQGQAAQVQYGDHYGATTRFQPMINLYKNQLAECGAQRSEQCELALFMLGGTYFSQAQAKASLSGGIGGDYSMAVQTYQQFLTEYPWSQYASEVKTNWRK

SEQ ID NO: 21719 - DNA, 354 bp, Unknown
  Obtained from environmental sample
  misc_feature (1)..(354): n is a, c, g, or t
ttggttgttagttttatgtcgcatacctacacgcggacatccgctcttatcaatgaatttgcttccgcttttggcgatgcggatattctttttttacataaaatctacgcatccgcaagggaaaattacaaaggcggcgttgacggaaggattctttttgaaaaagcttctgctgtaagaagcggggaaacatattatattgacgagcctgacgatgcctttgctccattatgtgaaatattaagaaacggagacatttttatcacgcttggagccggaaacaactggcctctcggcgagaaactttttacacattttaaaatgacttccggtgcagaggttcatcatgattag

SEQ ID NO: 21720 - protein, 117 aa, Unknown
  Obtained from environmental sample
  misc_feature (1)..(117): Xaa is any amino acid
MVVSFMSHTYTRTSALINEFASAFGDADILFLHKIYASARENYKGGVDGRILFEKASAVRSGETYYIDEPDDAFAPLCEILRNGDIFITLGAGNNWPLGEKLFTHFKMTSGAEVHHD

SEQ ID NO: 21721 - DNA, 588 bp, Unknown
  Obtained from environmental sample
  misc_feature (1)..(588): n is a, c, g, or t
atgccgcaacagcaattagaatggtcgaacctcggtttcgagtacatgcagaccgacgcctatatccgcgccgacttcaaagagggccgttggggcaagctctccgtttgcaccgacccgaacttctcaatccacgccgccgccgtttgtctgcactacggccaagcctgttttgagggtcttaaggcttttcgccgcaaggacggctccgcggcgcttttccggccgcgcgaaaacggggagaggatgatcaacaccgcgaagcgcactatgatggagccaccgccgcttgaactgtttatagaggcggtaaaagagaccgtctcgcgtaacatagattgggttccgccctacggcaccggcgcgagcttatatgtccgcccgctgctgataggcacaagcccgcgcgtgggcgtagggccgtccgaagattacacgcttttctctctcggcatgcccgtcggcccgtattacaaacacggcttctccccggttaaggcctacgtccaagagtcctacgaccgcgccgcgccccttggcgtgggcaacgtaaaggtcgccggaaactacacactcggccgaatctga

SEQ ID NO: 21722 - protein, 195 aa, Unknown
  Obtained from environmental sample
  DOMAIN (33)...(195): Aminotransferase class IV
  misc_feature (1)..(195): Xaa is any amino acid
MPQQQLEWSNLGFEYMQTDAYIRADFKEGRWGKLSVCTDPNFSIHAAAVCLHYGQACFEGLKAFRRKDGSAALFRPRENGERMINTAKRTMMEPPPLELFIEAVKETVSRNIDWVPPYGTGASLYVRPLLIGTSPRVGVGPSEDYTLFSLGMPVGPYYKHGFSPVKAYVQESYDRAAPLGVGNVKVAGNYTLGRI

SEQ ID NO: 21723 - DNA, 435 bp, Unknown
  Obtained from environmental sample
  misc_feature (1)..(435): n is a, c, g, or t
ttgggaagacggaagaaaaatatcggaaaccagggtaagaaattgaataattcgtggatattatttgtagcgtctcgttatatttttaaagggcgaagcagttctcctgttttggctgttttgggaatcgctataggagtgcttgccctgatagtgattatcgccgttatgaacgggtttcaactgggttttatagaaagtattttggaagtttcatcgtttcatttgcgagtagagtcctttgaaaaaactcaagctgatcagatacaatcaatagtacttgggattcccggagtaagagcggtagttccttttaaggaatatcaggctatcgctagaggaaaacgagtaaaccagcaggctgtattggtaagaggattaggcgaaaatactctggaaatagacaaggcaatgtgggaaaaacntggaatttga

SEQ ID NO: 21724 - protein, 144 aa, Unknown
  Obtained from environmental sample
  misc_feature (1)..(144): Xaa is any amino acid
MGRRKKNIGNQGKKLNNSWILFVASRYIFKGRSSSPVLAVLGIAIGVLALIVIIAVMNGFQLGFIESILEVSSFHLRVESFEKTQADQIQSIVLGIPGVRAVVPFKEYQAIARGKRVNQQAVLVRGLGENTLEIDKAMWEKXGI

SEQ ID NO: 21725 - DNA, 693 bp, Unknown
  Obtained from environmental sample
  misc_feature (1)..(693): n is a, c, g, or t
atgggacagaattcgcacgnnaggctcaggaactccgntctgccaaaccataaaatcctcaatattgtatcaggcgcgcttcttcacgatataggcatgatcagactgtccaaaggcattacagagaaaaaaggcgggctttcagacgcggaatttgaacagataaaaagccacactgtccattcgtcaaaaatcgtttctaaggaactgttcggtaataacgaagtgaacttaatcgcccttcaccaccatgaacggtgggacggaaaaggttatcccgaccaattggccggaaacgccattgatatgggcgccagaattgtatccgtcgccgacgcttttgaagccatggtaagcaagaaatcctacagggaatccatagtaggctatcaggctgtaaaaaacatgctcgcggacaatgcccgccgatttgatcccgcggtaataatggcctttacaaagattatgggcatatatcccataggttcaataatacggttaaatgacgagtccgtggcaagggttttatcggttaacagcaacgctcccatgcgccctatagtggaaatattaataagcaaggccgggcaaatttacaagtcaggaaaaggagaggttatcgatctgcttgccgataaatcccttttcattaaaaaagcgatggatccggccgaatttgccgctacagaatga

SEQ ID NO: 21726 - protein, 230 aa, Unknown
  Obtained from environmental sample
  DOMAIN (14)...(117): HD domain
  misc_feature (1)..(230): Xaa is any amino acid
MGQNSHXRLRNSXLPNHKILNIVSGALLHDIGMIRLSKGITEKKGGLSDAEFEQIKSHTVHSSKIVSKELFGNNEVNLIALHHHERWDGKGYPDQLAGNAIDMGARIVSVADAFEAMVSKKSYRESIVGYQAVKNMLADNARRFDPAVIMAFTKIMGIYPIGSIIRLNDESVARVLSVNSNAPMRPIVEILISKAGQIYKSGKGEVIDLLADKSLFIKKAMDPAEFAATE

SEQ ID NO: 21727 - DNA, 333 bp, Unknown
  Obtained from environmental sample
  misc_feature (1)..(333): n is a, c, g, or t
gtgggccgcgacctgtatacgaacagttattcctcacaaaaaccggaatttgaaaaagcccgcgcaatggttcccggcggaaaccgcatgatagccctgacagaaaacggcagaatccccgatccggacgaatgtatcaaagatgaggcgatgtggctgtggtttatgacatggaatgaccggagccgctctgttcagggcgaaaccaataaggaaaactactggaccggggaattccacaattcccaggcccacaagaataaagtctatcatcatccggcagtgataactttggataaactgccggatttaaccaaataccggctggagtaa

SEQ ID NO: 21728 - protein, 110 aa, Unknown
  Obtained from environmental sample
  misc_feature (1)..(110): Xaa is any amino acid
MGRDLYTNSYSSQKPEFEKARAMVPGGNRMIALTENGRIPDPDECIKDEAMWLWFMTWNDRSRSVQGETNKENYWTGEFHNSQAHKNKVYHHPAVITLDKLPDLTKYRLE

SEQ ID NO: 21729 - DNA, 606 bp, Unknown
  Obtained from environmental sample
  misc_feature (1)..(606): n is a, c, g, or t
atggtctccgcaaactacgacaccggatcgctatacctctcggcaaactccgtgggcggcgactactacgacctcttcaacatctccgacgacacctacggcgtaatcgtcgccgacgtctccggacacggcgtggcctccgcgctcatcatgtcaatgttcaaaatcctgctgaaaatctactcgcgaaaggaaacctcgccgcaaaaaacgctggaacacataaacgatatcttcatctccgaaatcgcgacggaacacttcgtcaccgtcttctacgccatcgtaaacacaaccacgcaaaagatacgctactcgtctgccggccactgccccgtcatctacatgaaaaagcaaaccggcagcaacatcatgctcaaaacagacggcctcttcctgggcgtattcccggaaatgctgctgcgagagaaagagacggactacatacgcggggagcataggatgatactctacacagacggacttaccgaggcggtaaacgcaaagtcggatatgtacggaacggaacggttgcaaaacatggcggcgcatacgctatcattaagcccgaagcgaggcggtttccgcaatactcgcgcaccataa

SEQ ID NO: 21730 - protein, 201 aa, Unknown
  Obtained from environmental sample
  DOMAIN (29)...(196): Stage II sporulation protein E (SpoIIE)
  misc_feature (1)..(201): Xaa is any amino acid
MVSANYDTGSLYLSANSVGGDYYDLFNISDDTYGVIVADVSGHGVASALIMSMFKILLKIYSRKETSPQKTLEHINDIFISEIATEHFVTVFYAIVNTTTQKIRYSSAGHCPVIYMKKQTGSNIMLKTDGLFLGVFPEMLLREKETDYIRGEHRMILYTDGLTEAVNAKSDMYGTERLQNMAAHTLSLSPKRGGFRNTRAP

SEQ ID NO: 21731 - DNA, 774 bp, Unknown
  Obtained from environmental sample
  misc_feature (1)..(774): n is a, c, g, or t
ttgcaaagcaagacgatcccgcaaatcgccggtactctggtaattatcctcgcgcttttcatgctgatacgtacgttcacaacaagcaatcttgccgcggctttcccgcttgcccgtgaaggcatgagttacgcaatgctaattgttatcggtcttcttacaagcgtccactgtgccgccatgtgcggggggattaacctttcgcaaacattaaagacaagtgaagagggaaatgaattagcaatgagcaatgagcaattagtaattagggaaaaaggtatctactctttgcttattccgggggttctctacaatggggggcggcttgtttcttatacggcggttggagttctcgtcggcgctttggggtcggcgattaccttatcagggcggtttcagggaattatacaattgattgccggggtctttatggtaatcatgggaatcaatatgctcggactgtttcctttcttgaggcgaattattcctagtgcacctaaaattttttcaaaaaatattgacgaacaaaaaattgggcgtggccctttggttgtcggtttcctgaacggctttatgccctgcggccccttacaggcgatgcaggtttacgctctctccaccggaagccccgtaaagggcggcatttccatgttcctgttttgcgtcggcacaattccgctgatgttcgctctgggagctgtaagcgggttattaagcggcgcaaaggggcgcgtgttctcacgccgcgttatgcaaacaggggctattctttaa

SEQ ID NO: 21732 - protein, 257 aa, Unknown
  Obtained from environmental sample
  SIGNAL (1)...(29)
  misc_feature (1)..(257): Xaa is any amino acid
MQSKTIPQIAGTLVIILALFMLIRTFTTSNLAAAFPLAREGMSYAMLIVIGLLTSVHCAAMCGGINLSQTLKTSEEGNELAMSNEQLVIREKGIYSLLIPGVLYNGGRLVSYTAVGVLVGALGSAITLSGRFQGIIQLIAGVFMVIMGINMLGLFPFLRRIIPSAPKIFSKNIDEQKIGRGPLVVGFLNGFMPCGPLQAMQVYALSTGSPVKGGISMFLFCVGTIPLMFALGAVSGLLSGAKGRVFSRRVMQTGAIL

SEQ ID NO: 21733 - DNA, 432 bp, Unknown
  Obtained from environmental sample
  misc_feature (1)..(432): n is a, c, g, or t
atggcaaagaaaagggttcaggctgtaattaagctgcaatgcccggcgggaaaggctacgccggcgccgcctgtaggacccgcgcttggcccccatgggatcagcgcgccgcagtttgtccagcagtttaatgaccggacaaagagcatggagccggggcttatcatcccggtggttatcaccgcttatgcggataaatcctttacgtttatcctcaaaacgccgcccgcgtccgttttggtaaaaaaggccatcgggctggaaaagggatcccctgaatcgcataagacaaaggttggaaaaatccccaaggcgaaacttgaggaaatcgccaaactgaagatgccggatctgacggctaacgacataaatgccgccatgcggattatcgccggtactgcccggtctatgggtgttgaggtggaaaaatga

SEQ ID NO: 21734 - protein, 143 aa, Unknown
  Obtained from environmental sample
  DOMAIN (9)...(68): Ribosomal protein L11, N-terminal domain
  misc_feature (1)..(143): Xaa is any amino acid
MAKKRVQAVIKLQCPAGKATPAPPVGPALGPHGISAPQFVQQFNDRTKSMEPGLIIPVVITAYADKSFTFILKTPPASVLVKKAIGLEKGSPESHKTKVGKIPKAKLEEIAKLKMPDLTANDINAAMRIIAGTARSMGVEVEK

SEQ ID NO: 21735 - DNA, 849 bp, Unknown
  Obtained from environmental sample
  misc_feature (1)..(849): n is a, c, g, or t
atggacatcacttccggtcttccccgtgtcagcgaactgtttgaagcccgcaagccgagaagcccggcggaacttgccaaggtttcggggacagtgtttttccagggaattgtcaaaggcaagcgcaaagttaccgttcaggacgcgtttggccgcgagtacccccattttattcccatgaccaaacgtctcctggtgcgggatggcgacacggtggaagccggagaagccctctgcgccggatcagtcaatcctcacgacgtactgcacatcctgggtgaaagcacccttcagcgttatctgatggatgaaattcagcaggtataccgtttgcagggcgtgtcgattaacgacaagcacatcggcgttataatccgccagatgatgcgcaaggttgagatacgttctgtcggcgatacgcggtttatttacggacaaatggtggacaagtaccgcttccatgaagagaacgcgcgggtcattgccgaaggcggacagcccgccattgcccagcccatgttccagggtattaccaaagcgtcgctgaacattgactcgttcctgtcggcggcaagcttccaggaaactacccgcgtcctgaccaacgccgccatagccggcagtaccgactatctgcggggcctcaaggaaaacatcatcatcggtcaccccatacccgcgggcacaggcatgaagcgttaccgggaaattaagttatacgatgaggacagtcaggatctggacaagcagatgcaggaaattctggaacagcgcaaacttgaagctgccgttattgccgaagcggctatggcggcggagattaccgttgaagacaatgatgaagactag

SEQ ID NO: 21736 - protein, 282 aa, Unknown
  Obtained from environmental sample
  DOMAIN (1)...(190): RNA polymerase Rpb1, domain 5
  misc_feature (1)..(282): Xaa is any amino acid
MDITSGLPRVSELFEARKPRSPAELAKVSGTVFFQGIVKGKRKVTVQDAFGREYPHFIPMTKRLLVRDGDTVEAGEALCAGSVNPHDVLHILGESTLQRYLMDEIQQVYRLQGVSINDKHIGVIIRQMMRKVEIRSVGDTRFIYGQMVDKYRFHEENARVIAEGGQPAIAQPMFQGITKASLNIDSFLSAASFQETTRVLTNAAIAGSTDYLRGLKENIIIGHPIPAGTGMKRYREIKLYDEDSQDLDKQMQEILEQRKLEAAVIAEAAMAAEITVEDNDED

SEQ ID NO: 21737 - DNA, 567 bp, Unknown
  Obtained from environmental sample
  misc_feature (1)..(567): n is a, c, g, or t
ttggagtgggtacaaattggaaacgaaaccaatcctggaatgttgcttcccgagggcagtaccggtaattntgataaactaacaaaactgtacaatgcgggctatgacgcggttaaggcggttcaggcgaatgcaaaggtaatgatccatctggccgagtttaacatcacggattttatcacggattattttgaaaacctggaacggcggggctgccgctacgatatgatgggattctcgttttacccgtttcatctgccccagttgtcatacgaaacctgtatggaagggcttaggcgatccatggttgaaatcccaaagcgtttcggaaaagatatcatgatcgtggaaaccggaggcgtggacgaacaggaagaagagacttccaaattgctgacagacattatcgaggaaatgcatagccagccaaaatgcaagggcattttattatgggaacctgaaggggccaaggcatggagcggctatccgctcagcgcctggcgttctgacggaagccccggcaaagccctcgacgcgctacacagtatccataaaaccaattcttga

SEQ ID NO: 21738 - protein, 188 aa, Unknown
  Obtained from environmental sample
  DOMAIN (1)...(183): Glycosyl hydrolase family 53
  misc_feature (1)..(188): Xaa is any amino acid
MEWVQIGNETNPGMLLPEGSTGNXDKLTKLYNAGYDAVKAVQANAKVMIHLAEFNITDFITDYFENLERRGCRYDMMGFSFYPFHLPQLSYETCMEGLRRSMVEIPKRFGKDIMIVETGGVDEQEEETSKLLTDIIEEMHSQPKCKGILLWEPEGAKAWSGYPLSAWRSDGSPGKALDALHSIHKTNS

SEQ ID NO: 21739 - DNA, 753 bp, Unknown
  Obtained from environmental sample
  misc_feature (1)..(753): n is a, c, g, or t
atggtattttccagtcagaccattttgggggatcatcatgccaacgtgcaaaaagtgcggttcggagcgggcggtcaaaagcggcgtggttgcagggaagcagcggtattgctgcaaaggctgcgggtgcaactttcgcgagggggacgagaggacaagcggcggagtggcggcgaaaaaggccctcttgctgctgttctacgccatgggcaagggctcgtacaggatgctcgggaagatattcgggatagaccacacccttgtctaccgctggatacgtgcgttcggcgagggcctgcccgagcccgaagtgccaggggggatcagggagatggagttcgacgaggtgtggcacttcattgggtcaaaaaaaacaagacttgggtcatcaaggcccttgaccgtggcgcacggcgaaccgtggcctgggtgctcggccgtcgtgattctgcaacgttcaggaggctctacaggaaagtcaggcacctgaagcgctgcaccttctacaccgacaattgggacgcgttcagggaggtgctgccgcgggggaggcatgtcatcggcaaggcgcacacaatcgccatcgagcgcgacaacagcaacacacggcaccatctgggcaggttcaccaggcggacgaaggtggtctcccgcgcagagcgcatggtggacttgtctttgcggatttggcatgcggttaccacaacagacctgttctttcgtctcagggaaaccgctttatctatattttag

SEQ ID NO: 21740 - protein, 250 aa, Unknown
  Obtained from environmental sample
  DOMAIN (118)...(233): IS1 transposase
  misc_feature (1)..(250): Xaa is any amino acid
MVFSSQTILGDHHANVQKVRFGAGGQKRRGCREAAVLLQRLRVQLSRGGREDKRRSGGEKGPLAAVLRHGQGLVQDAREDIRDRPHPCLPLDTCVRRGPARARSARGDQGDGVRRGVALHWVKKNKTWVIKALDRGARRTVAWVLGRRDSATFRRLYRKVRHLKRCTFYTDNWDAFREVLPRGRHVIGKAHTIAIERDNSNTRHHLGRFTRRTKVVSRAERMVDLSLRIWHAVTTTDLFFRLRETALSIF

SEQ ID NO: 21741 - DNA, 453 bp, Unknown
  Obtained from environmental sample
  misc_feature (1)..(453): n is a, c, g, or t
atgccaacgtgcaaaaagtgcggttcggagcgggcggtcaaaagcggcgtggttgcagggaagcagcggtattgctgcaaaggctgcgggtgcaactttcgcgagggggacgagaggacaagcggcggagtggcggcgaaaaaggccctcttgctgctgttctacgccatgggcaagggctcgtacaggatgctcgggaagatattcgggatagaccacacccttgtctaccgctggatacgtgcgttcggcgagggcctgcccgagcccgaagtgccaggggggatcagggagatggagttcgacgaggtgtggcacttcattgggtcaaaaaaaacaagacttgggtcatcaaggcccttgaccgtggcgcacggcgaaccgtggcctgggtgctcggccgtcgtgattctgcaacgttcaggaggctctacaggaaagtcaggcacctga

SEQ ID NO: 21742 - protein, 150 aa, Unknown
  Obtained from environmental sample
  misc_feature (1)..(150): Xaa is any amino acid
MPTCKKCGSERAVKSGVVAGKQRYCCKGCGCNFREGDERTSGGVAAKKALLLLFYAMGKGSYRMLGKIFGIDHTLVYRWIRAFGEGLPEPEVPGGIREMEFDEVWHFIGSKKTRLGSSRPLTVAHGEPWPGCSAVVILQRSGGSTGKSGT

SEQ ID NO: 21743 - DNA, 522 bp, Unknown
  Obtained from environmental sample
  misc_feature (1)..(522): n is a, c, g, or t
atggataataaagctattgtattaaccttgtatggaaccggaaaagccattaatgattttacagtaactctttttgatgaagggagttacaatttccatgaaagtacagtaaaggactattgctccaatattaacgatcttgaacttaaagatgataactggatttacgcaaccatagtaaaagaaaatcaaaaaataaagtttgaaaaaccggggagttatactgactttgatattatcggtactcttgacgacttgtcaattcaaagagtgatacaagtggttgacaagtctgaattacgaaaggcattaaaatcagccgaaaagaaaacactcaaagcaatattaaaaaatatgagcaaaagggccgcaaaaatgttctttgaagatatggagtacatgggtcctgtaagattaatagatgtaaaacaagcgcgaagaaatattgttaatattatacggcatctggaggatataggcgtgataactgtccaaagattcgacaaggatgagatggtttaa

SEQ ID NO: 21744 - protein, 173 aa, Unknown
  Obtained from environmental sample
  DOMAIN (63)...(165): FliG C-terminal domain
  misc_feature (1)..(173): Xaa is any amino acid
MDNKAIVLTLYGTGKAINDFTVTLFDEGSYNFHESTVKDYCSNINDLELKDDNWIYATIVKENQKIKFEKPGSYTDFDIIGTLDDLSIQRVIQVVDKSELRKALKSAEKKTLKAILKNMSKRAAKMFFEDMEYMGPVRLIDVKQARRNIVNIIRHLEDIGVITVQRFDKDEMV

SEQ ID NO: 21745 - DNA, 630 bp, Unknown
  Obtained from environmental sample
  misc_feature (1)..(630): n is a, c, g, or t
atgctcataaaagtggacaagggggagtacctggtttattggcaggcgactcgcggaacaggccgtcgaaaccatgtatttccgacgggcccctcaaatctctggattatgataaagcccaattccatcgacgatatttacaaaaaaataaagcttataaccatggaagatacccgctacctccactgcaacatcaagaccatcaaccttcttctcaatgtcatcgcctcccagcgggcgctggaagcggactgccacgaaacggtatttcaccgtggcgaaacagtaaccgaatgcgcccacagcaatgtccacatcgtcaaaaacggcaggtttatcacccatccggcggacaacctgatcctccgtggcatagcccgcagtcatttactgcaagcctgcgacaggctaaacattcctgccgacgaaagggagtttaccctttcggaactgtttgacgcggatgaggtacttgtatccagcaccgacaatttcggcctttctgccgaaacaatcgacggaaaaaacgtgggtggaaaagccccggaactgctcaaaaaaattcaggacgaggtgcttagggaatttatcgaagcgacaggttacacgcctgcgtggtacaagggatag

SEQ ID NO: 21746 - protein, 209 aa, Unknown
  Obtained from environmental sample
  DOMAIN (1)...(193): Aminotransferase class IV
  misc_feature (1)..(209): Xaa is any amino acid
MLIKVDKGEYLVYWQATRGTGRRNHVFPTGPSNLWIMIKPNSIDDIYKKIKLITMEDTRYLHCNIKTINLLLNVIASQRALEADCHETVFHRGETVTECAHSNVHIVKNGRFITHPADNLILRGIARSHLLQACDRLNIPADEREFTLSELFDADEVLVSSTDNFGLSAETIDGKNVGGKAPELLKKIQDEVLREFIEATGYTPAWYKG

SEQ ID NO: 21747 - DNA, 687 bp, Unknown
  Obtained from environmental sample
  misc_feature (1)..(687): n is a, c, g, or t
ttgggagagcgcgttattgctgttaccgctcgttcttgttctttcccaaaacgtgaattagatgaggcggcggctttttgcaaaaaagaatgcattgctcatataatattcaattccgaagaacttgagattgaaggtttttctaaaaaccccgcaaaccgctgttacctgtgcaagagagaactttttactaaaattttaaatatagcaaaggaacacaaaattttgcacattgccgaaggctcaaacaaagacgatgaaggagattatcgccccggattgactgcggtggcagaactgggaataaaaagccccttgcgttatgccgaactgaacaagcaagaaattcgccatctttccaaagagatgaatttaccaacttggaacaaacaatcgtttgcctgcctctcttctcgcttcccctacggcgaagagattaacccggagcggctcggtaaaatagacaaagcggagcagtttttgctagacatgggttttcaccaagtacgcctgcgttatcacggcaaccttgcccgcatagaaacagatgaggatggttttgcgctgatttcatcgcctgaaaaacgggagaaaatctacgcagcgttaaaggaactgggttttacatatattgcattggatttgctcggttaccggactgggagtatgaatgagacgttgagctaa

SEQ ID NO: 21748 - protein, 228 aa, Unknown
  Obtained from environmental sample
  misc_feature (1)..(228): Xaa is any amino acid
MGERVIAVTARSCSFPKRELDEAAAFCKKECIAHIIFNSEELEIEGFSKNPANRCYLCKRELFTKILNIAKEHKILHIAEGSNKDDEGDYRPGLTAVAELGIKSPLRYAELNKQEIRHLSKEMNLPTWNKQSFACLSSRFPYGEEINPERLGKIDKAEQFLLDMGFHQVRLRYHGNLARIETDEDGFALISSPEKREKIYAALKELGFTYIALDLLGYRTGSMNETLS

SEQ ID NO: 21749 - DNA, 675 bp, Unknown
  Obtained from environmental sample
  misc_feature (1)..(675): n is a, c, g, or t
atgcgcgacttggaaatccgcggcgcgggaaatattctgggcacccgtcagcacggcttcatcgccgccgtaggatttgaactctactgccgattgctgcaagacgcagtggaagaaataaagggcggcgcggagagggaagaggataaaaccgccctgcctgacacgcggttagacgtacccatacaagcctacattcccaccgaatatatctcagacggacaaacccgcatcgccgtatatcaagagatgtcgtcgcttaaaacaacggaagaactatccgagacggaacgcggcttatcggacagattcggcgcgctgccggaacccgtcgaggcgcttatgctgttgatgcggctcaaaatatcgggaagacaggcggggtgctcgaaaatcgcaatcggcaaagacggcgctctcactctgtcaatcgacggagaccgagatgccgccaaggagcggatcaggagaatattcgaagccgcgccgcaatatgagttcgaagtcgcgtatgaaactgagaagcgggaacaggaatcaactcaggaccaaggaccggcggcgacgcanatgcaggttcagcttagaacggagttgacggcggacacggtgccggggatggcgattgaggcggctcaactgctgggatcgtcgggatcgccggagatgatgtaa

SEQ ID NO: 21750 - protein, 224 aa, Unknown
  Obtained from environmental sample
  DOMAIN (59)...(167): TRCF domain
  misc_feature (1)..(224): Xaa is any amino acid
MRDLEIRGAGNILGTRQHGFIAAVGFELYCRLLQDAVEEIKGGAEREEDKTALPDTRLDVPIQAYIPTEYISDGQTRIAVYQEMSSLKTTEELSETERGLSDRFGALPEPVEALMLLMRLKISGRQAGCSKIAIGKDGALTLSIDGDRDAAKERIRRIFEAAPQYEFEVAYETEKREQESTQDQGPAATXMQVQLRTELTADTVPGMAIEAAQLLGSSGSPEMM

SEQ ID NO: 21751 - DNA, 489 bp, Unknown
  Obtained from environmental sample
  misc_feature (1)..(489): n is a, c, g, or t
atggttgcggcttactgtaacgatcgagccaagttgctttctgccgggtttatgcttccaaatgacaaagcttccgataagttgattgtaagttttcattattatgatccctatgaattcggaattcaggggagccggacatcatggggaagctccgccgacaaacaaaaaacagagaatgattttgccccgtttaaggaaaaatacatagataaaaatatacctgtaatagtcggggaatgcggagcggtgctgcaattatatcccgatgatcctgcgaaagaacagcaggcgcgtcaaagccgcagggaatacctgccgcatatttttggtacggcaaaaagatacgggctggttcctatatattgggacaatggttctgtgcgaggtaatggggagaagttcggtctttttgaccggacaagcggtcagccgaattcatctgagagtgatactctgatcaaactaatgataagtgctgtaaagtaa

SEQ ID NO: 21752 - protein, 162 aa, Unknown
  Obtained from environmental sample
  misc_feature (1)..(162): Xaa is any amino acid
MVAAYCNDRAKLLSAGFMLPNDKASDKLIVSFHYYDPYEFGIQGSRTSWGSSADKQKTENDFAPFKEKYIDKNIPVIVGECGAVLQLYPDDPAKEQQARQSRREYLPHIFGTAKRYGLVPIYWDNGSVRGNGEKFGLFDRTSGQPNSSESDTLIKLMISAVK

SEQ ID NO: 21753 - DNA, 453 bp, Unknown
  Obtained from environmental sample
  misc_feature (1)..(453): n is a, c, g, or t
ttgccagtttattttgcggatagcccaaataatgttggaaaatatttgccagacattaaacccactgttttaactgttgtgcctcgtgttttggaaaaactttacgacaaactcacaggggcaacaagggaaaagcacggtccagtgaagtggcttatgaaatacgccatanacaaagcgaanaacgcagatccgagcaaggttagcttgcgaggaacatatgngataaactggtgtattccaaatgcgcgatgcgcttggcggaaatttagccctatagtatctggaagctctgcgctcaacatttccgtcaatagattttttgagaaaacatggggtggcccctttttgagggcttatggaatgaaccaaatgccccccccctttttttttctgcgaaaaaaacccggggaaattccaaaaaaggggtttcgggggggaaaaacccaataa

SEQ ID NO: 21754 - protein, 150 aa, Unknown
  Obtained from environmental sample
  misc_feature (1)..(150): Xaa is any amino acid
MPVYFADSPNNVGKYLPDIKPTVLTVVPRVLEKLYDKLTGATREKHGPVKWLMKYAIXKAXNADPSKVSLRGTYXINWCIPNARCAWRKFSPIVSGSSALNISVNRFFEKTWGGPFLRAYGMNQMPPPFFFLRKKPGEIPKKGFRGGKTQ

SEQ ID NO: 21755 - DNA, 573 bp, Unknown
  Obtained from environmental sample
  misc_feature (1)..(573): n is a, c, g, or t
atgtccggctcttcgattacggtgatgagtttaagccttcgcgatgccatacggcgggaaaactgganagaggcgcagggatatttgaacaagatacttcccgtccgccgcaccgatcaagatcttcaggacgcgtacaatacggaacgcggtttgaacaacaacgcaagagcgctcgctttcgcgcgggaactgtatgaaaaggacacatctaaaaatgaatatgccgccgtctatatttcggcgttaattgataacggcagaaaagaagaagcgtccagattattggaaagcagaattgccgccgcaagcgcgggaatcgacaaaggccggtattttttccttcgcagccgccttcaaaccaatgaagaggcggcgttaggcgatcttcgttccagtctttttgaagacccgcgcaatcttgatgcgttaatcgccatgtttgaaatctaccaccgccgccgcgaagaacgccgcgcggttcattatctaaggcaagccctcgctctttctcctgacaacccgcgtttgaaacgttatgagtcggaatactcggctttgttgaagaattag

SEQ ID NO: 21756 - protein, 190 aa, Unknown
  Obtained from environmental sample
  misc_feature (1)..(190): Xaa is any amino acid
MSGSSITVMSLSLRDAIRRENWXEAQGYLNKILPVRRTDQDLQDAYNTERGLNNNARALAFARELYEKDTSKNEYAAVYISALIDNGRKEEASRLLESRIAAASAGIDKGRYFFLRSRLQTNEEAALGDLRSSLFEDPRNLDALIAMFEIYHRRREERRAVHYLRQALALSPDNPRLKRYESEYSALLKN

SEQ ID NO: 21757 - DNA, 465 bp, Unknown
  Obtained from environmental sample
  misc_feature (1)..(465): n is a, c, g, or t
gtgggctaccaggaactgggccgggtccacaaggcccggctggaccagcggacggccatggaaaatgtccagcgggccctccggcgctccggagcggccgaaagcacccgccttttcaaatacctgccgttcttggccacctgcggcaatgccgcgcccttcattggccttttcggcacggtctggggcatcatggattccttccatgaaataggccaggccggcacggccaatctggccaccgtggccccgggcatttccgaggccctggtggccacggccgtgggcttggccgcggccattccggcggtcatttttttcaactacttcaacagccgggttcgggaactggaagcggaaatgggcaatttcaacgctgatttcatcaatatcctggaacgcgacctcttgaagcgcggccccgccgccccccagccgggccgggccggaacccgggagggctga

SEQ ID NO: 21758 - protein, 154 aa, Unknown
  Obtained from environmental sample
  DOMAIN (2)...(126): MotA/TolQ/ExbB proton channel family
  misc_feature (1)..(154): Xaa is any amino acid
MGYQELGRVHKARLDQRTAMENVQRALRRSGAAESTRLFKYLPFLATCGNAAPFIGLFGTVWGIMDSFHEIGQAGTANLATVAPGISEALVATAVGLAAAIPAVIFFNYFNSRVRELEAEMGNFNADFINILERDLLKRGPAAPQPGRAGTREG

SEQ ID NO: 21759 - DNA, 699 bp, Unknown
  Obtained from environmental sample
  misc_feature (1)..(699): n is a, c, g, or t
ttgctctacgcgcaccaccacaacgtaatccaccgcgacatcaaaccgcagaacatactcctcgataaagacaacgtcatacacataaccgatttcgggatagccaagatagccgccaacaccgacctaacgagaaccggatcgaccgtcggcacgccggagtatatgtcgcccgaacaggcccaagggaagaagatcgacgcgcagtcggacatctactcgctcggcatagtgatgtacgagatgctgacccgcaagccgccgttcgtggcgcccaactccatggccgtggccttaaaacaggtgaacgagccgcccatgccaccctccgtcaaacgcaaagacacgcccaaacagttggagctgataattctcaaggccctcaaaaagaacaagatcgaccgctaccaatcggtagaggaactcttgacgcatttagacatggtggaccccaacgagcgggtagaccgccagacgttgttcttccgccccacgcaaaggtatgcgccggccgtgacggacgataaaaggatcaccgaccgccgcagcggcgacaggcgcggcggggtattagacggtgtgcaacaaccaatcttcagccttgaatactggaaaacgatgctgcggatcaactggccgacgtggattgcgatagcggcgctgggcggcgctctcgccgtccatatttttaagcggtag

SEQ ID NO: 21760 - protein, 232 aa, Unknown
  Obtained from environmental sample
  DOMAIN (1)...(146): Protein tyrosine kinase
  misc_feature (1)..(232): Xaa is any amino acid
MLYAHHHNVIHRDIKPQNILLDKDNVIHITDFGIAKIAANTDLTRTGSTVGTPEYMSPEQAQGKKIDAQSDIYSLGIVMYEMLTRKPPFVAPNSMAVALKQVNEPPMPPSVKRKDTPKQLELIILKALKKNKIDRYQSVEELLTHLDMVDPNERVDRQTLFFRPTQRYAPAVTDDKRITDRRSGDRRGGVLDGVQQPIFSLEYWKTMLRINWPTWIAIAALGGALAVHIFKR

SEQ ID NO: 21761 - DNA, 639 bp, Unknown
  Obtained from environmental sample
  misc_feature (1)..(639): n is a, c, g, or t
atggaggcgtccatcgacagcacccgttccgccctgattgccctgctctttgacggattttttccatcccattcgcccagccagtatttacagtacaatctgcaataccttgtcgttctcgccttatgcttctgttattatataataatgaggcggtattcgggaaaactgccgttttccagttggatactaattattatcccgcctttgattctgtgggcggttctgacttatttcacttatgtcgcagatccgcttttgattaatcggggcattaacatctacggcccctgtttctgcttcgggctgttctgtatattgctgaatatagggatactttatctctatatacgccaattgattattaccgacgccaggaacctggcaattgcggtttccgatgtagaaccggtatggactcaggagaacggcctttcggagaatttccgcaagcactaccagttgacagacagggagaaagacattgttgaagttatgatgcaggggaaaagcaacaaagaaatcgccgatactctgttaatttcgctcaggacagtgggggcataccttcaaaatgtctacaagaaaaccggcgtgtcgaaccgcttcgccctatactcaatgataaagggtaattag

SEQ ID NO: 21762 - protein, 212 aa, Unknown
  Obtained from environmental sample
  DOMAIN (152)...(209): Bacterial regulatory proteins, luxR family
  misc_feature (1)..(212): Xaa is any amino acid
MEASIDSTRSALIALLFDGFFPSHSPSQYLQYNLQYLVVLALCFCYYIIMRRYSGKLPFSSWILIIIPPLILWAVLTYFTYVADPLLINRGINIYGPCFCFGLFCILLNIGILYLYIRQLIITDARNLAIAVSDVEPVWTQENGLSENFRKHYQLTDREKDIVEVMMQGKSNKEIADTLLISLRTVGAYLQNVYKKTGVSNRFALYSMIKGN

SEQ ID NO: 21763 - DNA, 399 bp, Unknown
  Obtained from environmental sample
  misc_feature (1)..(399): n is a, c, g, or t
atggaacgagagcaggaaaccgcgttaaaaattgcacattggctttgcgagcagagcaaggtgactaaggtttattatgtgggtttgccagaacatcctaaatatgaggtttcgcgccgccaagcgagcggttttggcgggatgctctcttttgcagtgcaagacgagcagacagcggttaaaatactggagagcgtgaaagttataaagtatgccgaaagtttaggcggcgttgagagcttaatcacatatccgatgctccagacccacgcggacttgccggaaagcgagcgtaatgcgcggggcataaatgcctgcttgttgcgtttatcggtgggtttggaatctgcaaatgatttgattgcggatttggagcaggcaataggaggttctgcctga

SEQ ID NO: 21764 - protein, 132 aa, Unknown
  Obtained from environmental sample
  DOMAIN (1)...(129): Cys/Met metabolism PLP-dependent enzyme
  misc_feature (1)..(132): Xaa is any amino acid
MEREQETALKIAHWLCEQSKVTKVYYVGLPEHPKYEVSRRQASGFGGMLSFAVQDEQTAVKILESVKVIKYAESLGGVESLITYPMLQTHADLPESERNARGINACLLRLSVGLESANDLIADLEQAIGGSA

SEQ ID NO: 21765 - DNA, 531 bp, Unknown
  Obtained from environmental sample
  misc_feature (1)..(531): n is a, c, g, or t
atggaagaattgaaattcagggacgcgttaataacagatttgaaaaaaatcgttgaaatatacaattctacaattccttccagaatggtcacggctgacacagaacctgtatcagtggaaagcaaaaaaaaatggtttgacgagcataattcaacaaaaaggccgctctgggttattgagaataaatctgatgaaataataggatgggttagttttcagtcattttacggaaggcctgcctatgatgcgacggttgaaataagtatttatctggatgtgcaacagagaggcaaaggattaggaaaacaaattttacaatatagtattgacaatgccccaaaatttggaattaagactttacttggatttattttcgcgcataatgaaccaagtttaaaattatttagatcttttgggtttgaagattgggcaacactcccaaatatcgcggagcttgacgggcaggaacgtggattaaaaatattgggcaagcgtatattaagcgcccggacattcgtgaagactttatga

SEQ ID NO: 21766 - protein, 176 aa, Unknown
  Obtained from environmental sample
  DOMAIN (58)...(141): Acetyltransferase (GNAT) family
  misc_feature (1)..(176): Xaa is any amino acid
MEELKFRDALITDLKKIVEIYNSTIPSRMVTADTEPVSVESKKKWFDEHNSTKRPLWVIENKSDEIIGWVSFQSFYGRPAYDATVEISIYLDVQQRGKGLGKQILQYSIDNAPKFGIKTLLGFIFAHNEPSLKLFRSFGFEDWATLPNIAELDGQERGLKILGKRILSARTFVKTL

SEQ ID NO: 21767 - DNA, 714 bp, Unknown
  Obtained from environmental sample
  misc_feature (1)..(714): n is a, c, g, or t
gtgctgtccgccgacgcttttgcgcgtttttgcaggcttcgcggttatgaaaccctatacgtctgcggcactgacgagtacggaaccgccacggaaaacaaagcggcggaagaaggcataactcctaaagaactgtgcgaccgctatcacgcgatccatcgggatatttataattggtttaacatcgcgtttgacaagttcggacgcacttcaaccccaatccagacggaagtaacccaggatatatttttaaaattggataaagccggttttatctgtgaaagaacgatagaacagttttactgccccaactgtaaaagatttcttgcggacagatatattcgcggcgtttgcccagtttgcggcggcgcggaagcaaggggcgatcaatgtgaggcttgcggcaagttgttggaccctaccgatctaaaagagccaaaatgttcttcctgcggcggtaccccgtctttgcaaaagacaaatcacctttacattgaccttcccgcggtcagggaaaaattggaagaatggataaaaaccgcgtcagtaaaaggcttttgggcgaataacgccgtacagatgacgcaggcttggatacgtgacggccttaaagaacgcgccattacaagagatttaaaatggggaatccccgttccaaaacccggttacgagaacaaggtgttttacgtgtggtttgacgctccaatcggctaa

SEQ ID NO: 21768 - protein, 237 aa, Unknown
  Obtained from environmental sample
  misc_feature (1)..(237): Xaa is any amino acid
MLSADAFARFCRLRGYETLYVCGTDEYGTATENKAAEEGITPKELCDRYHAIHRDIYNWFNIAFDKFGRTSTPIQTEVTQDIFLKLDKAGFICERTIEQFYCPNCKRFLADRYIRGVCPVCGGAEARGDQCEACGKLLDPTDLKEPKCSSCGGTPSLQKTNHLYIDLPAVREKLEEWIKTASVKGFWANNAVQMTQAWIRDGLKERAITRDLKWGIPVPKPGYENKVFYVWFDAPIG

SEQ ID NO: 21769 - DNA, 561 bp, Unknown
  Obtained from environmental sample
  misc_feature (1)..(561): n is a, c, g, or t
atgcgatctgattatgtcggctcaagccaatcccaaaaacttatagagcaggtattttacctgatacctcttaccctgcttttaattttagtttatctggttatccgctttaagatacaatatgccattggaggcgtaatcgccatattgcacgatttactggttataatagcctatttggtttgggcaagaatggaatttaacaccacgactatcgcggcgattcttaccattcttggttactccatcaacaacacaataattttatttgaccgtatcagggaaaatatacgcgtatatcccgataacacttacactgatattatggatatttcaataacgggcatcttagggcgtactattataacgacagtgacaaccatgattgccgtattattcctatttatctttacgacaggttcaatgaaagattttgcccttgtcctgttgataggaatgacatcaggcacatacacgtcactctttatagcttccggttttgtaaacttctgggagaccagaaagaagaagcagacaaagaaaaaaccggcagcgtcataa

SEQ ID NO: 21770 - protein, 186 aa, Unknown
  Obtained from environmental sample
  DOMAIN (1)...(174): Protein export membrane protein
  misc_feature (1)..(186): Xaa is any amino acid
MRSDYVGSSQSQKLIEQVFYLIPLTLLLILVYLVIRFKIQYAIGGVIAILHDLLVIIAYLVWARMEFNTTTIAAILTILGYSINNTIILFDRIRENIRVYPDNTYTDIMDISITGILGRTIITTVTTMIAVLFLFIFTTGSMKDFALVLLIGMTSGTYTSLFIASGFVNFWETRKKKQTKKKPAAS

SEQ ID NO: 21771 - DNA, 687 bp, Unknown
  Obtained from environmental sample
  misc_feature (1)..(687): n is a, c, g, or t
atgaatgcgttgctggaaagcctcctgaagcaggattacctggccgaaataatctttgtcgatgaccgttcaaacgatgaaagccccgccatgctcgccaaattcgcaaaggacgcggcggagcagggtatggaaaattgcaaaattatcaccttgggggacaaccccggtccaaactacaaacagttcgccttgtcggcgggcatagcccaggcgcggggggattacttcctgtttaccgacggcgactgcgaggcgccgcccggctggatccgcgccatgtcccgcagaatgggagacccggaaaccggcgcggttatcgggccggtattcaaaaaaaaacaggggaaaggatttttcagcctgtaccaatgttatgatcacgcggtgcgctacaactaccttgccggggcaataggcctgggcgcggcgggcggcggttttgggaataacctcattgtcagcagggcggcgcttgaggccgccggcgggtacgacgctgttcctgtctccccgaccgaggatgccgcgttaatctcgttgatacgctctcagcgcaaataccgcgtacacgccatagccctgcccgacgcggctgtggaaacagtcgccgaaaatacctggcgcggttttatcagccaaaccctccgctggaacaacggcggcctttcagccccgagccaatga

SEQ ID NO: 21772 - protein, 228 aa, Unknown
  Obtained from environmental sample
  misc_feature (1)..(228): Xaa is any amino acid
MNALLESLLKQDYLAEIIFVDDRSNDESPAMLAKFAKDAAEQGMENCKIITLGDNPGPNYKQFALSAGIAQARGDYFLFTDGDCEAPPGWIRAMSRRMGDPETGAVIGPVFKKKQGKGFFSLYQCYDHAVRYNYLAGAIGLGAAGGGFGNNLIVSRAALEAAGGYDAVPVSPTEDAALISLIRSQRKYRVHAIALPDAAVETVAENTWRGFISQTLRWNNGGLSAPSQ

SEQ ID NO: 21773 - DNA, 315 bp, Unknown
  Obtained from environmental sample
  misc_feature (1)..(315): n is a, c, g, or t
atggataaagaacaagctctcaaaatagccgaaaactacgccgaaatagttgcgaaagagtttaatcctaagcagatattgcttttcggctcctatttgaacggaaccccgcacgaagatagtgacatagatgtcgccgtcgtctgcgataaatacgccgggcccggtgattggtgggacggcgccgctcgtcttacgtctatatgccgacaagtggatccgaccatagagccgcatttattggaattatccgacgatccgtgggggttcgcgcataaagtagtggaaaccggaaaggttctttatcccaaataa

SEQ ID NO: 21774 - protein, 104 aa, Unknown
  Obtained from environmental sample
  DOMAIN (6)...(101): Nucleotidyltransferase domain
  misc_feature (1)..(104): Xaa is any amino acid
MDKEQALKIAENYAEIVAKEFNPKQILLFGSYLNGTPHEDSDIDVAVVCDKYAGPGDWWDGAARLTSICRQVDPTIEPHLLELSDDPWGFAHKVVETGKVLYPK

SEQ ID NO: 21775 - DNA, 462 bp, Unknown
  Obtained from environmental sample
  misc_feature (1)..(462): n is a, c, g, or t
atggtcggctctccgtatcagacaaccgaatatttaattgaggatttacggtttttacaggagttacaacccgacatgataggcattggcccctatatttcacatcaaaatacgccttttcacgatcagcaaaacggcgatttgcgtgtatgcctgcggctcatagccattttacgccttatgtttcccaacgcgctgataccggctaccaccgcgctgggaaccattaacgccgagggccgcgaattgggactcatggcgggagcgaatgtgcttatgcccaatctaagccccgtcaatgtcagaaaacaatatgagctgtatgacaataaaatatgcgttttcgaaggagcggcgcagtgccgcggctgtctggaaaacagggttgaggccgcggggtatcacattgtaacgaacatcggcaataaagccaaggttcccgcggacaaaaaaatcgtttga

SEQ ID NO: 21776 - protein, 153 aa, Unknown
  Obtained from environmental sample
  misc_feature (1)..(153): Xaa is any amino acid
MVGSPYQTTEYLIEDLRFLQELQPDMIGIGPYISHQNTPFHDQQNGDLRVCLRLIAILRLMFPNALIPATTALGTINAEGRELGLMAGANVLMPNLSPVNVRKQYELYDNKICVFEGAAQCRGCLENRVEAAGYHIVTNIGNKAKVPADKKIV

SEQ ID NO: 21777 - DNA, 762 bp, Unknown
  Obtained from environmental sample
  misc_feature (1)..(762): n is a, c, g, or t
gtgctgaaacaccgcgaaaagatgctggatacgctgaacagggcggctgtcatgtttctctcgcgaaatgagaaaacatttgaagagaccatgacggcgggcgtaaaggaaatcgccgacgtcttcgatctggacaggctttcaatttggcgtaacttaaacaggcctgacgccatgcacgtgtcccagatataccgctgggacagagatgccggcggtactacggaaccgacaaaagggctggaggatgtcacctacgcccagttcgcgccgcgctgggaaaaactctttgcctcgggcgaatccattaacagtccggtaaggcttctgcccgaagcgcccatgctgcaatcatttggctgtatatcagcgtttataacgccgatttttatcaacaacgccatctggggttttgcccttcttgaagaccggcacacagaacgcttttttgaaggtgacagcattgaaatgatgcgctcaggcattctcctgtgcgcgaacaccgtcatccgcgtcgatatggaacgtgaaataaccaacgctaatgaatttaaccgttccctccttgacgcttcgcctgtgggttttaccctttttgacgaaaccgcccgcgttattgactgtaacgatgttacttttaaaacaatgagaacaacaaaaaagtattttatggaacatttttacgatttttctcctgaattccagagcgacggggtaagatcccaggataaggtaattgagataatcaagcnggggtattaa

SEQ ID NO: 21778 - protein, 253 aa, Unknown
  Obtained from environmental sample
  DOMAIN (26)...(169): GAF domain
  misc_feature (1)..(253): Xaa is any amino acid
MLKHREKMLDTLNRAAVMFLSRNEKTFEETMTAGVKEIADVFDLDRLSIWRNLNRPDAMHVSQIYRWDRDAGGTTEPTKGLEDVTYAQFAPRWEKLFASGESINSPVRLLPEAPMLQSFGCISAFITPIFINNAIWGFALLEDRHTERFFEGDSIEMMRSGILLCANTVIRVDMEREITNANEFNRSLLDASPVGFTLFDETARVIDCNDVTFKTMRTTKKYFMEHFYDFSPEFQSDGVRSQDKVIEIIKXGY

SEQ ID NO: 21779 - DNA, 717 bp, Unknown
  Obtained from environmental sample
  misc_feature (1)..(717): n is a, c, g, or t
ttggtgtggatgagggttaaagacggcgatgaagtggaaacacaggttgccaaattcttcaccacggagcaattgaacgcactccgcgatgcggtgggcggcaaagccggcgatatgatgttctttatagcaggttctgagaaagtggcggctaacgcgatggggcagctccgcttggaaatagcccgcataaaaggcttgatgaacagcgatgttcgcaagttcgcttggataactgggttcccgatgtttgaatacagcgaaacggaaaaacgctttatgtccatgcaccacccgttcacaagccctatccccgaacatttggatatgatgctaggcggcaacctaagtgattgcgaagcccaagcctacgaccttgttttgaacggcgtggaaattggcggcggctcggttcgtatacataatcccgaagttcaggaaaaagtattccgtttgctgggtttaagcgaaacccaagtgaaggaaaaattcggcttttttgtggatgcctttaaattcggtgctcctccgcacggcggtttagcccttggcttagacagggtagtggcaactatggaaggtcaggactccatccgcgatttcatagcgttcccaaagaacacaagcgcaagctcacctatggatcaatgcccaagcgaagtggataccatacagcttttggaaactcacatatcgcttaatgtgcagcagaggtag

SEQ ID NO: 21780 - protein, 238 aa, Unknown
  Obtained from environmental sample
  DOMAIN (1)...(209): tRNA synthetases class II (D, K and N)
  misc_feature (1)..(238): Xaa is any amino acid
MVWMRVKDGDEVETQVAKFFTTEQLNALRDAVGGKAGDMMFFIAGSEKVAANAMGQLRLEIARIKGLMNSDVRKFAWITGFPMFEYSETEKRFMSMHHPFTSPIPEHLDMMLGGNLSDCEAQAYDLVLNGVEIGGGSVRIHNPEVQEKVFRLLGLSETQVKEKFGFFVDAFKFGAPPHGGLALGLDRVVATMEGQDSIRDFIAFPKNTSASSPMDQCPSEVDTIQLLETHISLNVQQR

SEQ ID NO: 21781 - DNA, 774 bp, Unknown
  Obtained from environmental sample
  misc_feature (1)..(774): n is a, c, g, or t
ttggcagggagatatgttgaaattcatatatatccattttctttttccgaagcaaagcttgcagggctagattcttttgaggaatatgtaaagaagggaggaatgccgtttttataccaaaattcaatggattggcattcttccaaattgtatttgagcgatatttattcttctgttcttttgaaagatattgttgagagatacaatgttagagatgttgatttacttaaaaggctcttgcaattttttatagcaaatataggacattccttttctgccactagcgtattgaaatatttgaaaaatgaaaaacgaagcttgtctgctgagacaatatataattacattgactattgcaaaaatgcctgtttgttgtacttggttcacagaaaagatatttcagggaaaaaaatgcttaaatttcaagaaaaaatttacattgcagaccacgggattagagaagctgtttatgggaataacacgaaagacattgagcaggttttggaaaacgtagtgtatatggaattgctccgtagaggttatgacgtttgcgttgggaaaatagaggagtttgaaatagattttgtagcatcaaaaggagcaaagcaaatttacattcaagtttgctatttgctagcttcgccagaaactatagaaagagaattttttccattgcttaaaataaaagacaatttcccgaaaatagttatatcaacagataaatttgatatgagcagggaaggcatagttcacaggaatatagaggagttttaa

SEQ ID NO: 21782 - protein, 257 aa, Unknown
  Obtained from environmental sample
  misc_feature (1)..(257): Xaa is any amino acid
MAGRYVEIHIYPFSFSEAKLAGLDSFEEYVKKGGMPFLYQNSMDWHSSKLYLSDIYSSVLLKDIVERYNVRDVDLLKRLLQFFIANIGHSFSATSVLKYLKNEKRSLSAETIYNYIDYCKNACLLYLVHRKDISGKKMLKFQEKIYIADHGIREAVYGNNTKDIEQVLENVVYMELLRRGYDVCVGKIEEFEIDFVASKGAKQIYIQVCYLLASPETIEREFFPLLKIKDNFPKIVISTDKFDMSREGIVHRNIEEF

SEQ ID NO: 21783 - DNA, 783 bp, Unknown
  Obtained from environmental sample
  misc_feature (1)..(783): n is a, c, g, or t
atggagacaatggaggaaataacaaacggcaatattaaactgctctatatcgctcccgagcgtctgcaaaggattgatatgtctgaatttgcggctaacaacattccgcttgttgtagttgacgaggcgcattgcgtgtcacagtgggggcatgatttcaggacgagttatctgcaaatagcggattttatcagaagtattaaacctcgccccgtagttgccgcttttaccgcgaccgcgaccgtcaacgtgaggggagacatcagtaaattgctggctctgagaagtcccctttgcgtaaacaccggttttgacagaccaaatctttattttgaggttcaaaaaccaaaagacaaaaaaaccgcgcttttggaatgccttgataaacgaaaagaaacaagcggtataatttattgcgctaccagaaaaaccgtggaagaaacttgcaatttcctgattagttgcggttttaacgctacccgttatcacgccggtcttgacgatgaagaacgcagaaaaaatcaagatgattttatttacgacaacaagacagtgatggtagcaactaacgccttcggcatggggattgataagtcaaatgtgtcgtatgtcattcattacaatatgcccaaaaacattgaaagctattatcaggaagccggacgtgcaggacgtgacggctctcccgcggactgcattcttttgtacaacggtcaggatgtgcagataaatcagtatcttataacccataacgaagacgaagatgccgcggacgaagtttaa

SEQ ID NO: 21784 - protein, 260 aa, Unknown
  Obtained from environmental sample
  DOMAIN (151)...(227): Helicase conserved C-terminal domain
  misc_feature (1)..(260): Xaa is any amino acid
METMEEITNGNIKLLYIAPERLQRIDMSEFAANNIPLVVVDEAHCVSQWGHDFRTSYLQIADFIRSIKPRPVVAAFTATATVNVRGDISKLLALRSPLCVNTGFDRPNLYFEVQKPKDKKTALLECLDKRKETSGIIYCATRKTVEETCNFLISCGFNATRYHAGLDDEERRKNQDDFIYDNKTVMVATNAFGMGIDKSNVSYVIHYNMPKNIESYYQEAGRAGRDGSPADCILLYNGQDVQINQYLITHNEDEDAADEV

SEQ ID NO: 21785 - DNA, 669 bp, Unknown
  Obtained from environmental sample
  misc_feature (1)..(669): n is a, c, g, or t
ttgagaaaggatcaaccccccgttaattcagaaagagcaacatcatcatcaagcaatggagatccttcaagagtttcaacagtcctcaaatcatccatggactgttcgtctgtatctgaattcagatcaacacccagattgtcaaaatcaatctctatttcttcaggagcggcgtccccttcaggagacaaggcttcttcaggagacaaggcttcttcaggagacgaggtttcgttctgttctgacagccttttaagagctgcttcgtcttcttccctcaacggatcaaaggggatgttttccatctcatcgccggttaggggtatttcttcatcaatacttgataaatcggaggaactgagtatgttgtccatctcatcgccgctcagggctattttttcatcatcatcttcggaaaaaaagccgctcttggatttatcagccccgctaaagccgccttccgcgcggatgccggtaaattcattttttaaggtggtaagctcggttctgattgatgaaagctcgtcggcaattttcatcaacaactgcgtggacattccttcctgggcgtcacgttcaatgctcccaacgccgtcgcccggatcattatttatttcatatccgggctcctcaatacccgcggtcatcccgttatcgaagttgtcgtag

SEQ ID NO: 21786 - protein, 222 aa, Unknown
  Obtained from environmental sample
  misc_feature (1)..(222): Xaa is any amino acid
MRKDQPPVNSERATSSSSNGDPSRVSTVLKSSMDCSSVSEFRSTPRLSKSISISSGAASPSGDKASSGDKASSGDEVSFCSDSLLRAASSSSLNGSKGMFSISSPVRGISSSILDKSEELSMLSISSPLRAIFSSSSSEKKPLLDLSAPLKPPSARMPVNSFFKVVSSVLIDESSSAIFINNCVDIPSWASRSMLPTPSPGSLFISYPGSSIPAVIPLSKLS

SEQ ID NO: 21787 - DNA, 444 bp, Unknown
  Obtained from environmental sample
  misc_feature (1)..(444): n is a, c, g, or t
atgtacgaagttttagaaagattacattcaagatataatcctcaactggaagcccagcgctatattgacgccctgaaaattgacaaggatattaactgttttattcttatagaacccggcatgggttatatgatcccggttctgcgggaaaagagtcccagaggcaaaatcgttgttctccacgcggatgaccgtttcagaacattgacgggcgtttttcatggtgacgccgaatggtatccggacggcgaagaaggcgctcaaggatttctggaagccgaggttcctgttgcagcgcgggtcaggatggtggagtggaggcccggcctgaatgtttatggcgacatagtccttgatcttgtccgtgaaagcgcggaattcatcaagcggctggaggccggccgcaggacggacgctttctttgggaaaagatngggtgcgtaa

SEQ ID NO: 21788 - protein, 147 aa, Unknown
  Obtained from environmental sample
  misc_feature (1)..(147): Xaa is any amino acid
MYEVLERLHSRYNPQLEAQRYIDALKIDKDINCFILIEPGMGYMIPVLREKSPRGKIVVLHADDRFRTLTGVFHGDAEWYPDGEEGAQGFLEAEVPVAARVRMVEWRPGLNVYGDIVLDLVRESAEFIKRLEAGRRTDAFFGKRXGA

SEQ ID NO: 21789 - DNA, 594 bp, Unknown
  Obtained from environmental sample
  misc_feature (1)..(594): n is a, c, g, or t
gtgatggaagcgcttgctttattgccctgcgaaaaaaaaatactggcctgcccggaagacagcgtttccgcttttgcccccctcgctgaagaagccggttttattctggttcccggcccaaaggaagacgtgcttgcgcgctactgccttgcgattcgcgagtctggcgcggacagggtgatccgcgcaaccgccgacaatccctttgtttttgttgacgccgccttggccattgaaagcgaagcgtcagcgctgggcgcggactacgccgggtacttcggcctgccctacggcgcaggggtggagtctgtcgcgtcggaagcgctcttgcgcgccgaaagggaagccgaggcccccgatgaacgggagcacgtttgcccttacctttacaggcatcctgagttttttcgccttcacaggccgcttgccccaaggcgttggcagggtcctgattgcaggatcaccgtggacacaagggaggattacgacagggccaaatcgctatatgagcgcctttcttccctgcctctggaaaagcgaaaccttggcgaaaatgttctttccgtctatgagtctttatggaagggcgaatga

SEQ ID NO: 21790 - protein, 197 aa, Unknown
  Obtained from environmental sample
  misc_feature (1)..(197): Xaa is any amino acid
MMEALALLPCEKKILACPEDSVSAFAPLAEEAGFILVPGPKEDVLARYCLAIRESGADRVIRATADNPFVFVDAALAIESEASALGADYAGYFGLPYGAGVESVASEALLRAEREAEAPDEREHVCPYLYRHPEFFRLHRPLAPRRWQGPDCRITVDTREDYDRAKSLYERLSSLPLEKRNLGENVLSVYESLWKGE

SEQ ID NO: 21791 - DNA, 570 bp, Unknown
  Obtained from environmental sample
  misc_feature (1)..(570): n is a, c, g, or t
ttgcttaacgaaataattgggaacaaagccaaaatattcgcatttgaaccttcaaggatcacttttgatgatatgaaagataatattaatggaatagaaaacataatttgctataattttggctttggcgacaaggacacaactttaatattatattccaataaaaacggttctggacttgcaagcatttataaaaggaatttagaacattttggcattaatatgaatattgaggaaaaagttgaaatgaaaacaatagattcattctgtaaagaaaaaaatattcaaaaaattgattttctgaaacttgatgttgaaggaaatgaattaaaagtattagaaggtgcaaaagaaataataaaatccggaaatgttgaccatattcaatttgaattcggtggctgtaatattgactcgcgaacatattttcaggatttttattatttattgaacgggcaatataaaatataccgtatactaaaaaatgggttattccatattgagaaatacaaggaaatatacgaatgttttataatgacaaatttccttgcaataaagagaggaatataa

SEQ ID NO: 21792 - protein, 189 aa, Unknown
  Obtained from environmental sample
  misc_feature (1)..(189): Xaa is any amino acid
MLNEIIGNKAKIFAFEPSRITFDDMKDNINGIENIICYNFGFGDKDTTLILYSNKNGSGLASIYKRNLEHFGINMNIEEKVEMKTIDSFCKEKNIQKIDFLKLDVEGNELKVLEGAKEIIKSGNVDHIQFEFGGCNIDSRTYFQDFYYLLNGQYKIYRILKNGLFHIEKYKEIYECFIMTNFLAIKRGI

SEQ ID NO: 21793 - DNA, 354 bp, Unknown
  Obtained from environmental sample
  misc_feature (1)..(354): n is a, c, g, or t
atgtttgatttgctgaacgagcatttcggtttggacagcgccgacgtgatctttgagagtatggcgcaaaataccagggataacgccagatacacgcgggaggcgctcacggcggcggggcttgggcttgacatcatactcgtaacgagcgcctatcatatgccgcgttccgtggctgtttttgaaaaggccggctttacggtgacgcccgcccctatcggtttcttctcggacaaagagttcggccgcaacccgctcatgtggctacccagtgcgatggcgctctttgaatcatcggttgcgatgcgcgagtatttggggttgctcgtctataagttggcggggtggatatga

SEQ ID NO: 21794 - protein, 117 aa, Unknown
  Obtained from environmental sample
  DOMAIN (1)...(108): DUF218 domain
  misc_feature (1)..(117): Xaa is any amino acid
MFDLLNEHFGLDSADVIFESMAQNTRDNARYTREALTAAGLGLDIILVTSAYHMPRSVAVFEKAGFTVTPAPIGFFSDKEFGRNPLMWLPSAMALFESSVAMREYLGLLVYKLAGWI

SEQ ID NO: 21795 - DNA, 390 bp, Unknown
  Obtained from environmental sample
  misc_feature (1)..(390): n is a, c, g, or t
atgagcgcgcttgccatgcttaagccgtcggagggttccgccggcgtggctaagttcgtctgcgacgccgtgatccgcgccggcgggaacacgtgtccgccggtaatcgtgggcgtcggtgtcggcggtacggcggacgcggtatgcgccttggcaaagaaagcgttgctgcgtccggtaggcgtgcacaacagcgacggcaggtacgctcagatcgagcgctacctgataaaagagataaacgacagcggagtaggtccgcagggtcttggcggtatgagcaccgccttgtgggtggcggtggagtatatgccctgccatatagcctccatgcctgtagcggtatgtatgaactgccacgccgccagaagggcgtcggtggaattatga

SEQ ID NO: 21796 - protein, 129 aa, Unknown
  Obtained from environmental sample
  DOMAIN (1)...(129): Fumarate hydratase (Fumerase)
  misc_feature (1)..(129): Xaa is any amino acid
MSALAMLKPSEGSAGVAKFVCDAVIRAGGNTCPPVIVGVGVGGTADAVCALAKKALLRPVGVHNSDGRYAQIERYLIKEINDSGVGPQGLGGMSTALWVAVEYMPCHIASMPVAVCMNCHAARRASVEL

SEQ ID NO: 21797 - DNA, 642 bp, Unknown
  Obtained from environmental sample
  misc_feature (1)..(642): n is a, c, g, or t
ttgtcgcgcagcgcggaaggcgaacagaccaaggtactcaacctggtgatcaaggccgatgtgcagggatcgctcgaagccattgccgaagccgtgcgcaagctcagcacggacaaggtgcgcattgacgtcattcatggcggggccggcgcgatcaccgaatcggacattctcctggccacggcctcgaacgccatcgtcatcggcttcaacgtgcgcccgaccgtcaaggtcaaggaaatggccgaacaggaaaacgtggacatccgtttttacgacatcatctacaagcttgtggatgaaatccgcaacgccatgaccggcatgttggcgccggtgcagcgcgaggtctatctcggccaggccgaggtgcgcgaagtgttcaacgtgcccaaggtcggcgccgtggccggcagccatgtgtccgacggcaagctgacgcgcaacgccggcgtgcgcctgttgcgcgacggcgtggtggtttacgccggcaaggtggcctctttgcggcgcttcaaggacgatgtgcgcgaagtgctcaagggctacgaatgcggcatcggcctggaaaacttcaacgacatcaaagtcggcgatgtggttgaagcctttgaaaccgttgaagaagccgcgacattgtaa

SEQ ID NO: 21798 - protein, 213 aa, Unknown
  Obtained from environmental sample
  DOMAIN (134)...(202): Elongation factor Tu domain 2
  misc_feature (1)..(213): Xaa is any amino acid
MSRSAEGEQTKVLNLVIKADVQGSLEAIAEAVRKLSTDKVRIDVIHGGAGAITESDILLATASNAIVIGFNVRPTVKVKEMAEQENVDIRFYDIIYKLVDEIRNAMTGMLAPVQREVYLGQAEVREVFNVPKVGAVAGSHVSDGKLTRNAGVRLLRDGVVVYAGKVASLRRFKDDVREVLKGYECGIGLENFNDIKVGDVVEAFETVEEAATL

SEQ ID NO: 21799 - DNA, 633 bp, Unknown
  Obtained from environmental sample
  misc_feature (1)..(633): n is a, c, g, or t
ttgttaatggcaaaatttacgtgcccttattgcataaggagttacaatctaaagaaggctctgtatgtctgtcccgactgcggggagacggcaacccctgattcgtttgaaaaagaaccaatcaagtgcaagaaaaccggatgcggggggcttgcaacgcaaaggaaatgccctttgtgcggtgaaaatcttcccagaatagcgttacagacgccaaatcttccttttagtataatcggcgtatcaaactcaggaaaaacaaactatataacggttatgctgaacgagatgggcagggcgcccgggcttcgtttggcgcttgggcaccaaaacgcgtctacgctggatcatcagaatgaaaactataaacgtatttatgaagatcatgtgccgcctgagagtacggccggaggcgccagtataccccagatatggtacatcaaaaaccttcttaaaaagagaggcaacaatgtacctacctatacgttcaccatatttgacggcgcgggcgaagatcatgagcatagtttagacccgtcatccccggtatgccggtatatacagacatctaaagcgattatcattaccctggacccgttgatactgccaacaatcaggaaaggaggcatgtag

SEQ ID NO: 21800 - protein, 210 aa, Unknown
  Obtained from environmental sample
  misc_feature (1)..(210): Xaa is any amino acid
MLMAKFTCPYCIRSYNLKKALYVCPDCGETATPDSFEKEPIKCKKTGCGGLATQRKCPLCGENLPRIALQTPNLPFSIIGVSNSGKTNYITVMLNEMGRAPGLRLALGHQNASTLDHQNENYKRIYEDHVPPESTAGGASIPQIWYIKNLLKKRGNNVPTYTFTIFDGAGEDHEHSLDPSSPVCRYIQTSKAIIITLDPLILPTIRKGGM

SEQ ID NO: 21801 - DNA, 516 bp, Unknown
  Obtained from environmental sample
  misc_feature (1)..(516): n is a, c, g, or t
gtgacagaatcggccgagtgtcggcggttcctgaccgatcattatgacccttccgcaaaagtgctgcggctttcccagcctgtttacaaccagaattcaattgccgctgtaggcgtcgccgcccacgaaaccggacacgccattcaacacgcccgttcctgggggccgctgatcatgcgcggcacactggtcccagtcgccaatgtaggttccatgttcggcccctggctggcgatggcgggaattttcttttccatgcctatgcttattaacattgggattttgctttttggcggggcggtgcttttttatgttattacccttccggtggaattcgacgcttcaatgcgggccattgccatactgcgatccagcaatgtgcttacgccggatgagttaaggggagtaaaaaaggtgcttaccgccgcggcgctgacctatgtggcctccgccctcaccgccctgatgagcctcctcaggcttattctgctgtcacagagcaggcggcggcgttag

SEQ ID NO: 21802 - protein, 171 aa, Unknown
  Obtained from environmental sample
  DOMAIN (6)...(169): Putative neutral zinc metallopeptidase
  misc_feature (1)..(171): Xaa is any amino acid
MTESAECRRFLTDHYDPSAKVLRLSQPVYNQNSIAAVGVAAHETGHAIQHARSWGPLIMRGTLVPVANVGSMFGPWLAMAGIFFSMPMLINIGILLFGGAVLFYVITLPVEFDASMRAIAILRSSNVLTPDELRGVKKVLTAAALTYVASALTALMSLLRLILLSQSRRRR

SEQ ID NO: 21803 - DNA, 417 bp, Unknown
  Obtained from environmental sample
  misc_feature (1)..(417): n is a, c, g, or t
atgggcagaggattttcttttgtcggccggcaattccgtataagtacggaaacaacgcatttctatatcgaccttgtattttataattatttactaaaatgttttgtggtcattgacctgaaaaccaaaaaactgactcatcaagacatcggacaaatggatatgtatgtaaggatgttcgataatttgaaacgaggcggggatgataatcctactattggagttattttatgcgcggaaaaggatgaaacaatagcaaaatattccgtattatcagagaataagcagttatttgcgtctaagtatagaataattcttcctacggaagaagaactaacagcggaacttgaacggaatgtacgttatcttcgtgagatgcagattgataagaaaaaagcatattcaaataacatatag

SEQ ID NO: 21804 - protein, 138 aa, Unknown
  Obtained from environmental sample
  DOMAIN (1)...(119): Protein of unknown function (DUF1016)
  misc_feature (1)..(138): Xaa is any amino acid
MGRGFSFVGRQFRISTETTHFYIDLVFYNYLLKCFVVIDLKTKKLTHQDIGQMDMYVRMFDNLKRGGDDNPTIGVILCAEKDETIAKYSVLSENKQLFASKYRIILPTEEELTAELERNVRYLREMQIDKKKAYSNNI

SEQ ID NO: 21805 - DNA, 498 bp, Unknown
  Obtained from environmental sample
  misc_feature (1)..(498): n is a, c, g, or t
ttgatttactctttggaaaagaaactatttttaatacaagaaaaaaagataacatttttgagaaaacaatcagccaaaaagggaaactcttgtatgaacaatgaaaatgtaaaagaatggctgcaacttgcagatgatgatttatattctgcaaaaatcttaaacgaacaaatccgcagaccgtttgagattatatgttatcattgcgctcagtctatagaaaaatatctaaaagcttatttaacatttaataatattgtacctaaaaaaactcacgatttagtttttcttaataacttgtgtatagaaaataatagtgaattcgtaaatataaaaactatctgcgactttttgaatagatttgctaatgatatacgttatcctcacaaatatgaaataaacgaaaatgaagttaattttgccattaattctgttgagaaagtaagcatattagaaccaattataaacatacgaaatgaaatcaacaaagaaccataa

SEQ ID NO: 21806 - protein, 165 aa, Unknown
  Obtained from environmental sample
  DOMAIN (37)...(154): HEPN domain
  misc_feature (1)..(165): Xaa is any amino acid
MIYSLEKKLFLIQEKKITFLRKQSAKKGNSCMNNENVKEWLQLADDDLYSAKILNEQIRRPFEIICYHCAQSIEKYLKAYLTFNNIVPKKTHDLVFLNNLCIENNSEFVNIKTICDFLNRFANDIRYPHKYEINENEVNFAINSVEKVSILEPIINIRNEINKEP

SEQ ID NO: 21807 - DNA, 579 bp, Unknown
  Obtained from environmental sample
  misc_feature (1)..(579): n is a, c, g, or t
atggtcagaatggccgagctccgntaccgcaagcacgcttttgacggggcgctggctctgttgttcaatccgggtacaaaagaaaacggcggcatcttcctgcaaacgcagggctggataatccttgccgaagcgttattaggacacggaaaccgcgctgttgagtactatctggaaagctgtcccgccgcgcaaaacgaaattgccgaaacgcgccttatggagccttacgcttactcgcaatttaccgaaagtcaagacagcccgtttgaaggccgcagtcacgttcactggcttacaggcaccgcaagcacggtaatggtcggcagcgttgagggcattttaggcttaaggccggacattgaaggactgcgcctgtcgcccgcgattccctcatcgtggaaatcttttacaatggagaaatctttccgcgggaaaaagcttaacataaaagtgaataaccccgacgggcgcgaaagcggctgtaaaaaactgactgtcaacggaaaggcggcagagggcaattatattcccgcttcgattttaaaagcggaaaacgaaataattttagatatgtga

SEQ ID NO: 21808 - protein, 192 aa, Unknown
  Obtained from environmental sample
  misc_feature (1)..(192): Xaa is any amino acid
MVRMAELRYRKHAFDGALALLFNPGTKENGGIFLQTQGWIILAEALLGHGNRAVEYYLESCPAAQNEIAETRLMEPYAYSQFTESQDSPFEGRSHVHWLTGTASTVMVGSVEGILGLRPDIEGLRLSPAIPSSWKSFTMEKSFRGKKLNIKVNNPDGRESGCKKLTVNGKAAEGNYIPASILKAENEIILDM

SEQ ID NO: 21809 - DNA, 564 bp, Unknown
  Obtained from environmental sample
  misc_feature (1)..(564): n is a, c, g, or t
gtgcggttggtgcgcgaggctaagcagcgcggcgtgaacgttaccgcggagagctgcccgcactacttcacgctcacggatgaggatgtgggtcactacgacacaaacaagaagatgaacccgcccctgcgtaccgcggttgacagggaggcggtgatagccgggcttgccgacggtacgatagacgccgtagccagcgaccacgccccgcacgtccccgaggagaaggacgtggagttcgacaacgccgccttcggcgttatcggcatggagacttcgctagcccttgtgcttaccgttcttgttcataaaggattattgactcccgtacagatggtggagaggatgagcgtagcgcccaatagaatacttggtttgcccggcggaacgcttaaagagggaaagccggcggacgtgacgctgatcgacccggaggcgcggtggacggtgaatccggcggagtttttctccaaagcgagaaattcggcgtttatcgggatggagcttaccggggcggtctccgccactattttgggcggcagggtggtctataagagaggctga

SEQ ID NO: 21810 - protein, 187 aa, Unknown
  Obtained from environmental sample
  misc_feature (1)..(187): Xaa is any amino acid
MRLVREAKQRGVNVTAESCPHYFTLTDEDVGHYDTNKKMNPPLRTAVDREAVIAGLADGTIDAVASDHAPHVPEEKDVEFDNAAFGVIGMETSLALVLTVLVHKGLLTPVQMVERMSVAPNRILGLPGGTLKEGKPADVTLIDPEARWTVNPAEFFSKARNSAFIGMELTGAVSATILGGRVVYKRG

SEQ ID NO: 21811 - DNA, 786 bp, Unknown
  Obtained from environmental sample
  misc_feature (1)..(786): n is a, c, g, or t
atgcaaagaatnttagatacatctgaactgatacctgtaatagccgaacttgcgaaaaaggcctgttacgaaccgggcgacgacgtgatagcagccctgcgtgaggcgcaacacagggaggaatcgccctacggcagagactgcctgcgccagcttgtcgaaaacgccgaatacgcgaaaaaagaacaaatcgcctgctgccaggataccggtacctgcaatgtcctgctggaaatcggccaggaggtttcctggaaaggcatgcccctgtccgatgcggtcaacgagggtgtgcgtcggggttacggggaaggctttttaagaaaatccatggtggctgatccctttgacagggtgaacacgggcgacaatacgccggcaatgctgcacacggatatcgtgccgggcgacagggtgtcggtaaccgtcatgcccaaaggcggcggctgcgaaaacatgggggcgttttgcacgctgctgccgtctgacggggcgcagggggtaaaggactttgtgatacaaaccgtggataaggccgggggcaaggcctgcccgcctttaattgtgggcgtagggatcggcggcagcatggacaagtgcgtatggctcgcaaagaaagccctgctccgtccaataggcagccgcaattccaatcccttctattcaagcctggaaacagagcttttggaaaagataaacaatttaggcatagggcctatggggacgggcggcaggatcacggctcggacgcgcatgtcgaatntgcccgtgtctcggccgatctga

SEQ ID NO: 21812 - protein, 261 aa, Unknown
  Obtained from environmental sample
  DOMAIN (10)...(261): Fumarate hydratase (Fumerase)
  misc_feature (1)..(261): Xaa is any amino acid
MQRXLDTSELIPVIAELAKKACYEPGDDVIAALREAQHREESPYGRDCLRQLVENAEYAKKEQIACCQDTGTCNVLLEIGQEVSWKGMPLSDAVNEGVRRGYGEGFLRKSMVADPFDRVNTGDNTPAMLHTDIVPGDRVSVTVMPKGGGCENMGAFCTLLPSDGAQGVKDFVIQTVDKAGGKACPPLIVGVGIGGSMDKCVWLAKKALLRPIGSRNSNPFYSSLETELLEKINNLGIGPMGTGGRITARTRMSNXPVSRPI

SEQ ID NO: 21813 - DNA, 351 bp, Unknown
  Obtained from environmental sample
  misc_feature (1)..(351): n is a, c, g, or t
ttggaattgcggctgcctattggacggagcagggctttctttgcgagccatacgcacttgtccatgctgccgccgatccctacgcccacaattaaaggcgggcaggccttgcccccggccttatccacggtttgtatcacaaagtcctttaccccctgcgccccgtcagacggcagcagcgtgcaaaacgcccccatgttttcgcagccgccgcctttgggcatgacggttaccgacaccctgtcgcccggcacgatatccgtgtgcagcattgccggcgtattgtcgcccgtgttcaccctgtcaaagggatcagccaccatggattttcttaaaaagccttccccgtaa

SEQ ID NO: 21814 - protein, 116 aa, Unknown
  Obtained from environmental sample
  misc_feature (1)..(116): Xaa is any amino acid
MELRLPIGRSRAFFASHTHLSMLPPIPTPTIKGGQALPPALSTVCITKSFTPCAPSDGSSVQNAPMFSQPPPLGMTVTDTLSPGTISVCSIAGVLSPVFTLSKGSATMDFLKKPSP

SEQ ID NO: 21815 - DNA, 669 bp, Unknown
  Obtained from environmental sample
  misc_feature (1)..(669): n is a, c, g, or t
atgcttaccagcataaccatacccaacagcgttaccagtattgtgaacggcgcgtttctcggctgtacaagccttaccgcaataaacgtcgccgccgataatagcaggtattcttccgtagacggcgtactgtttaacaaaagcaaaacagttttaatacattttccgggggggaaaacaggcacatataccatacccaaaagcgttaccaacatcgggggcagcgcttttcgctattccaaacttaccggcataaccatatccaacagcgtcagcaacattggtgagtacgcttttgccgaaagcagcttaaccagcgtaataataccgaacagcattatcaccatcaggaacagcacttttgacggctgcaacgaccttaccagcgtaaccttacccaacagcgttaccagcattggtgagcacgcttttcaggcatgcggcagccttaccagcatatctattccgataaccgttaccagtattgaggcttttgctttttccgaatgcgtaaaccttataagtgtaacgtttcagggcccgattccttcaaacaagttccatgagggcgtgttcgacggacttggcgacctgcgcgaaatgtacatttccggcgggccgggaaagtatacgaggccgctccgcagcaacaaatgggtgagacagtag

SEQ ID NO: 21816 - protein, 222 aa, Unknown
  Obtained from environmental sample
  SIGNAL (1)...(27)
  misc_feature (1)..(222): Xaa is any amino acid
MLTSITIPNSVTSIVNGAFLGCTSLTAINVAADNSRYSSVDGVLFNKSKTVLIHFPGGKTGTYTIPKSVTNIGGSAFRYSKLTGITISNSVSNIGEYAFAESSLTSVIIPNSIITIRNSTFDGCNDLTSVTLPNSVTSIGEHAFQACGSLTSISIPITVTSIEAFAFSECVNLISVTFQGPIPSNKFHEGVFDGLGDLREMYISGGPGKYTRPLRSNKWVRQ

SEQ ID NO: 21817 - DNA, 672 bp, Unknown
  Obtained from environmental sample
  misc_feature (1)..(672): n is a, c, g, or t
atgatacacccgaatatggcgaccatgctctgcttcctgaccaccgacgtttccatttcacgggaactccttgatgcaagcctgcaacaggctgtaaggcgatcgtttaaccgcgtcacagttgacggcgacacatcgaccaacgacatgatcctgatcatggcgaatggggcttccggcgtgacagtcgcctcaaaagccgaacacgaggcgttttccctggcgcttgaggaagcctgcgtatctctggcaaaggcaatggcgcgggacggcgaaggcgcgacaaagctggttaccgtcaccgtaagcggcgcagttgacgaaaaaaccgccgaagttctggcaaaatccgttgcctcctccagcctggtcaaagccgcctgtttcggcgcggacgccaactggggccggatcctctgcgctatgggttattcaggcgcggaattcgatccaggcaggacaagcgtaagtttcaaaagcaatgccggggaaatagccgtatgttctaacggcgggccggtcccattttcagaagataacgccagggcgatactgtcagaagaagaaatcgaaatcctgattggcgccggagagggaaacggcgcggcttcggcatggggctgcgatctgacttacgactatgtaaagatcaatggggattacaggtcttag

SEQ ID NO: 21818 - protein, 223 aa, Unknown
  Obtained from environmental sample
  DOMAIN (1)...(223): ArgJ family
  misc_feature (1)..(223): Xaa is any amino acid
MIHPNMATMLCFLTTDVSISRELLDASLQQAVRRSFNRVTVDGDTSTNDMILIMANGASGVTVASKAEHEAFSLALEEACVSLAKAMARDGEGATKLVTVTVSGAVDEKTAEVLAKSVASSSLVKAACFGADANWGRILCAMGYSGAEFDPGRTSVSFKSNAGEIAVCSNGGPVPFSEDNARAILSEEEIEILIGAGEGNGAASAWGCDLTYDYVKINGDYRS

SEQ ID NO: 21819 - DNA, 354 bp, Unknown
  Obtained from environmental sample
  misc_feature (1)..(354): n is a, c, g, or t
atggacgagtgtctcgctcgcgccgctgttgatatttcaggcagacctttccttttctttgacggacaactgtctcagactccactcatttccgagaatgggaaagaacccgcctatcagtttcaaactgatgtaatcgaagatttctggcaaggctttacaaatgccgcgggctgtaatttgcaccttgagattctccgaggcagaagcgatcatcataagatagaagcgctttttaaatccgccgcaaaagcattacgtgcagcctgcgaaattgacgaacactccggagattcaatcccttcaaccaagggttcgctgcatggattcgacgtaccgggagtgattgtgtga

SEQ ID NO: 21820 - protein, 117 aa, Unknown
  Obtained from environmental sample
  DOMAIN (1)...(87): Imidazoleglycerol-phosphate dehydratase
  misc_feature (1)..(117): Xaa is any amino acid
MDECLARAAVDISGRPFLFFDGQLSQTPLISENGKEPAYQFQTDVIEDFWQGFTNAAGCNLHLEILRGRSDHHKIEALFKSAAKALRAACEIDEHSGDSIPSTKGSLHGFDVPGVIV

SEQ ID NO: 21821 - DNA, 357 bp, Unknown
  Obtained from environmental sample
  misc_feature (1)..(357): n is a, c, g, or t
atggctctgggatatggagttgatgttttagggaacattccgtggcttcatcacgcacgatgcatttactggggcgacattgatacacatggttttgctattctgaaccgcgccagaacatacttgccttcactaaaatcaatactaatggatgaatcaacacttttttctcatcgtgatttatgggttcaagagaaagaacaaagcacatcatccgaattaccgctgctcaccaaaagcgaatatgaactttttttatcactgaaaaataattctttcggacagcaagtccgtcttgaacaagagcggatttgttggaatacggcatggggagctataacccacttctcaaattag

SEQ ID NO: 21822 - protein, 118 aa, Unknown
  Obtained from environmental sample
  misc_feature (1)..(118): Xaa is any amino acid
MALGYGVDVLGNIPWLHHARCIYWGDIDTHGFAILNRARTYLPSLKSILMDESTLFSHRDLWVQEKEQSTSSELPLLTKSEYELFLSLKNNSFGQQVRLEQERICWNTAWGAITHFSN

SEQ ID NO: 21823 - DNA, 354 bp, Unknown
  Obtained from environmental sample
  misc_feature (1)..(354): n is a, c, g, or t
gtgcccttgagcgcgacagcgctggccgcgctaaaaaaatatatcgaggacgaacgcagtcagttaaaaaatccggcagcggaattattcctttcgcacaacggccgcgctttaacccggcaaatgatttggcatatcgtgaagcgcctggcacggtcttccggcctgctcaaaaacatcacaccgcatactttccggcattcgctcgccacgcatctcatcgagaacggcgcggatgtgcgcaccgtgcaggagatactcggccatgccaacattgccaccacgcaaatctacacttccgtctcgcgcgaacatctgcggcgtgtgtatgccggagcgcacccgcggcaatag

SEQ ID NO: 21824 - protein, 117 aa, Unknown
  Obtained from environmental sample
  DOMAIN (1)...(108): Phage integrase family
  misc_feature (1)..(117): Xaa is any amino acid
MPLSATALAALKKYIEDERSQLKNPAAELFLSHNGRALTRQMIWHIVKRLARSSGLLKNITPHTFRHSLATHLIENGADVRTVQEILGHANIATTQIYTSVSREHLRRVYAGAHPRQ

SEQ ID NO: 21825 - DNA, 309 bp, Unknown
  Obtained from environmental sample
  misc_feature (1)..(309): n is a, c, g, or t
atgaaaaacatgaacaagcttctgaagcaagctcagaagatgcagacccaagtagtaaaggcccaggaggaactgcagcgcaagcagtacgaaggcgtggccggcggcggcatggtcaaggtcgtccttagcgggaagaatgaactggtatcaatcaagattaaccccgaggtggtcgacccgcaggacgtggagatgctcgaggacttaatcgtcgccgcccacacgagcgccttagaggcggccaagggcgattcggagtcggtcttcgggtcgatacagagcggcctggggctgccgggtctgtag

SEQ ID NO: 21826 - protein, 102 aa, Unknown
  Obtained from environmental sample
  DOMAIN (8)...(100): Uncharacterised BCR, YbaB family COG0718
  misc_feature (1)..(102): Xaa is any amino acid
MKNMNKLLKQAQKMQTQVVKAQEELQRKQYEGVAGGGMVKVVLSGKNELVSIKINPEVVDPQDVEMLEDLIVAAHTSALEAAKGDSESVFGSIQSGLGLPGL

SEQ ID NO: 21827 - DNA, 690 bp, Unknown
  Obtained from environmental sample
  misc_feature (1)..(690): n is a, c, g, or t
atgggagactcccttttaatgttttccgacggcgtaagccaagccggtcttgggcacggtcaagggatgggcatcggctcggatggggtttcctcttacatcaacctgaactataagccgcacgacagtatctccaccctctccaagcgcattgttgaaatgtgcaaaacagtatcgggcggaaatcacgaagacgacactacgcttattctgctcaattgccgcgaagcgaatgagttaacgcttctgacgggtccgccctccaacagatcgatgaatcacaattacgcgctaaagtttatggatatgcccggcaagaaaatactctgcggctcaacaactacggatattatttctgaggagttaggattaaaagtagaaacaactatgagtaaaacttacgggcaattaccggactacagcatcgaaggaattgatttagtcacagaaggcgcaattactctgaatcaggcctataatattcttgacgaaccggtggaacggctatccaccagtaccgcagcggagcgtatctgtcttttgctgcacgccgcggacgttatttacttaatggtaggaaacgctgcaaactccgcccacgaagatctaatctttaagcaaacgggcgttcatttacgcaaacatgtaataaaacatattgccgccagcctgagacacatggcaagttag

SEQ ID NO: 21828 - protein, 229 aa, Unknown
  Obtained from environmental sample
  misc_feature (1)..(229): Xaa is any amino acid
MGDSLLMFSDGVSQAGLGHGQGMGIGSDGVSSYINLNYKPHDSISTLSKRIVEMCKTVSGGNHEDDTTLILLNCREANELTLLTGPPSNRSMNHNYALKFMDMPGKKILCGSTTTDIISEELGLKVETTMSKTYGQLPDYSIEGIDLVTEGAITLNQAYNILDEPVERLSTSTAAERICLLLHAADVIYLMVGNAANSAHEDLIFKQTGVHLRKHVIKHIAASLRHMAS

SEQ ID NO: 21829 - DNA, 369 bp, Unknown
  Obtained from environmental sample
  misc_feature (1)..(369): n is a, c, g, or t
atgagtaagcagattctggtggttgacgactccaaaacagtccgcaacttggttgcgtttatcttgaagagtgaaggcttcaaagtcacaaccgccgaagacggtctggacggtctggaaaaactgtattccatgcaaaagatcgatctcatcatgtctgacgtaaacatgccccgcatggacggttttacctttatacgcactgtgcgcgagcagcccgcatatcgcgatgttccgatcatcgtgctgtccaccgagggacaagaaaaagatatccagaccgggatgagtctgggggccaatctgtacatggtcaaacccgcccagccggatacgatggtgcgcaacgtcaagatgttgttgggttga

SEQ ID NO: 21830 - protein, 122 aa, Unknown
  Obtained from environmental sample
  DOMAIN (3)...(118): Response regulator receiver domain
  misc_feature (1)..(122): Xaa is any amino acid
MSKQILVVDDSKTVRNLVAFILKSEGFKVTTAEDGLDGLEKLYSMQKIDLIMSDVNMPRMDGFTFIRTVREQPAYRDVPIIVLSTEGQEKDIQTGMSLGANLYMVKPAQPDTMVRNVKMLLG

SEQ ID NO: 21831 - DNA, 720 bp, Unknown
  Obtained from environmental sample
  misc_feature (1)..(720): n is a, c, g, or t
ttggaagctgataaactgccgcttgccctgcagaatatttcccttcctcagatttccaacgcgaccgccgccaagtcggattatttaagcgggattgtccagcagaatcttatgatcctctgtttctcactggcccttttacagctttcaataggccatataattgccattacaaagcacaaatcactgaaaatcctggccgagcttggctcaattgcgatgctcgttggcatgtacggtgtaattctgattctcatcgccagcaatgaatcccgaaaccttggagactatatcccaatgatgccctgcgcatacatacttggcatcggttttgtttttaattttattttcgcaagttacgacgggagcataggcaagtcaatccttgaaagctgcaaaaatatcatttcaatgatactggggatagccaacgtgttttcggatattatgtcctatatcaggctgtgggccgtaggccttgccggagccgccatcgcgtcaaccgtaaatgctatggcaggtcctatgctgggacattttatcctgtttattttcggcgtggtgcttatcgtgttcgggcatggcttaaaccttgtgctgaacgcgctttctgtgctggttcacggggtgcgcctgaatactctggaattttcaggccatgtaggtttaacctgggcgggctttccgtacaagccgtttagcgagaacaaaaacaagtag

SEQ ID NO: 21832 - protein, 239 aa, Unknown
  Obtained from environmental sample
  misc_feature (1)..(239): Xaa is any amino acid
MEADKLPLALQNISLPQISNATAAKSDYLSGIVQQNLMILCFSLALLQLSIGHIIAITKHKSLKILAELGSIAMLVGMYGVILILIASNESRNLGDYIPMMPCAYILGIGFVFNFIFASYDGSIGKSILESCKNIISMILGIANVFSDIMSYIRLWAVGLAGAAIASTVNAMAGPMLGHFILFIFGVVLIVFGHGLNLVLNALSVLVHGVRLNTLEFSGHVGLTWAGFPYKPFSENKNK

SEQ ID NO: 21833 - DNA, 912 bp, Unknown
  Obtained from environmental sample
  misc_feature (1)..(912): n is a, c, g, or t
atggtcagaatcggccgaggcgtccgagcggcggagagaaacaccataaacggcgatgaaatcaggctcatcaacggcgagcccatatcgcctgaaagcaggatatactcactggtttcatccacgccgaaatggcatccgctgctgggttggtctttccatatctacataccgcataaacttctctacggctatgagggcgggcgctcaggcgaagtgaatgtcggagacgggacttatcttaacatccgggcattctattatgcctacgcggattaccgcggggctttcagggacaacccgtttattctaagggtgtcacaggaaataaaccggcccctgccgccgggcgcctacatggaggaaacggtcagcacctttacccagatcgcaaaagataatacaaagaccgtaagagatccgctggatatggtaaacaatataacagggattctgcaaaaggaaaaaggcatgaatgtagacatcgccgtctgccttgacgttactggttccatggaactctatttcgacgctatacgcacgcggctaatcccaatgctgaaagatatgtcagccgattttaaatctttcagaataggcatggttttttataaggactacttcgatgattttcttaacaaggtttttccttttaccaatgactttgacgcgcttcagaagaatatcggaagcgtgaaggtaggcgggggaggggatattcccgaggctgtttacgaggcgctttatgcgggcgttacaaagttgtcctgggaagcggaaaaaagaatcatgctcctcataggcgacgcgccgccccatccgcgccccaggggcagcatcacaaagcaaatggtagacagggaggcggcaaacaggggaatcgatctgcatgcgatgattctaccccagtga

SEQ ID NO: 21834 - protein, 303 aa, Unknown
  Obtained from environmental sample
  misc_feature (1)..(303): Xaa is any amino acid
MVRIGRGVRAAERNTINGDEIRLINGEPISPESRIYSLVSSTPKWHPLLGWSFHIYIPHKLLYGYEGGRSGEVNVGDGTYLNIRAFYYAYADYRGAFRDNPFILRVSQEINRPLPPGAYMEETVSTFTQIAKDNTKTVRDPLDMVNNITGILQKEKGMNVDIAVCLDVTGSMELYFDAIRTRLIPMLKDMSADFKSFRIGMVFYKDYFDDFLNKVFPFTNDFDALQKNIGSVKVGGGGDIPEAVYEALYAGVTKLSWEAEKRIMLLIGDAPPHPRPRGSITKQMVDREAANRGIDLHAMILPQ

SEQ ID NO: 21835 - DNA, 822 bp, Unknown
  Obtained from environmental sample
  misc_feature (1)..(822): n is a, c, g, or t
atgttcgcaaataccgcaaaggtgattcactttgacattgatcctgcggaggtaggcaagaatattgaaacccacgcgtgggtaatcggaaacctaaaggatactctggcaaggctgttgtcaaaacttccggcgcgtcttaaaaccgaatggcacggcgagattgataaatggaaaacccatctgcctcaaacctacacccatgaggttaccttcgcgaaaaacgcccttcacccgcgctttattatagaagaaaccgcgaaactgctggggccccaaacaatcgccgttaccgacgtaggccagcatcagatgtgggcggcgcagtttttcccggcggagaagccgaggtcgtttatcagctcgggcgggcttggaaccatgggctttggtctgggcgcggcttgcggcgcaaaagtcgcgaatccaaaaaaacctgtgattctttttaccggtgacggcagtttcagaatgaactgcgcggagatggcgaccataagcaacaataaaattccgcttttaataattctttttaacaacggtgttctcggcatggtaaggcaatggcagagtttcttttacgaaggccgctattcggaaacgactttaggagctttccccgacttcttaaaactctgcgacgcatacggcattacaggtttccgcgcaaacaacagggaatctttcaagaaggcgctccacagtgccgtggaagaactctcagccggaaaagcggcgctcatcgaagcggacatagaccgcgacgaanacgtgctgcctatggttccgtcgggaaagcccatagatgagcagattttgtaa

SEQ ID NO: 21836 - protein, 273 aa, Unknown
  Obtained from environmental sample
  DOMAIN (99)...(250): Thiamine pyrophosphate enzyme, C-terminal TPP binding domain
  misc_feature (1)..(273): Xaa is any amino acid
MFANTAKVIHFDIDPAEVGKNIETHAWVIGNLKDTLARLLSKLPARLKTEWHGEIDKWKTHLPQTYTHEVTFAKNALHPRFIIEETAKLLGPQTIAVTDVGQHQMWAAQFFPAEKPRSFISSGGLGTMGFGLGAACGAKVANPKKPVILFTGDGSFRMNCAEMATISNNKIPLLIILFNNGVLGMVRQWQSFFYEGRYSETTLGAFPDFLKLCDAYGITGFRANNRESFKKALHSAVEELSAGKAALIEADIDRDEXVLPMVPSGKPIDEQIL

SEQ ID NO: 21837 - DNA, 447 bp, Unknown
  Obtained from environmental sample
  misc_feature (1)..(447): n is a, c, g, or t
ttgatatattcaaggcccccggcttgttcggcagggaaaaacttcactacctcaaggccgaattccagggcctgttcaatgtccgatggattggcgcagccgggcgcgaccggtattcccttctttatgcagtacgatactacctttgggttgagtcccgggctgacgacaaactttgcccccgcgttaatggccttgtcgacctgttcggttgtcagcacggtgcctgcgcccaccaggatttcgggcgcttcttttgatatgcgcctgatggcttcttcggcctggctggtacggaaagtcaattccgtgcaggggatacccccggccgccagcgccctggccaacgggacagctttctccgcatcatcaatcttgattacaggtacaatgccgatttttcccagttcttccaaaaccgcgtacatggcatgctcctcttgttga

SEQ ID NO: 21838 - protein, 148 aa, Unknown
  Obtained from environmental sample
  misc_feature (1)..(148): Xaa is any amino acid
MIYSRPPACSAGKNFTTSRPNSRACSMSDGLAQPGATGIPFFMQYDTTFGLSPGLTTNFAPALMALSTCSVVSTVPAPTRISGASFDMRLMASSAWLVRKVNSVQGIPPAASALANGTAFSASSILITGTMPIFPSSSKTAYMACSSC

SEQ ID NO: 21839 - DNA, 612 bp, Unknown
  Obtained from environmental sample
  misc_feature (1)..(612): n is a, c, g, or t
gtgcaaatgagcgttaatccaaaagtgattaccacaccaaaggtcagcgcggttgccttggatggtattcagttgcaggcggttaccagaatcactgtgcgagccagcattcgcaagctggttggcggcgcaggcgaagaaacggttattgcacgcgttggcgagggcattgttagttccataggcagcgcaaaaaatcacaaggaagttttggaaaaccctaatatgatttccaaaaaagtgctagccagcggcttggatgccggaacagcttttgaaattctctccatagatattgcagatgttgatgttggtcataatataggtgcaattctggaaaccgaccgtgccgaggcagataaaaaaatcgcgcaggcaaaagcagaggagagaagggcaatggctgccgctgcggaacaagagatgaaagcaagggttgttgaaatgcaggcaaaagttgtggaagcagaggctcaaattccgcttgcaatggcagatgccttgaaaaacgggcgtatgggagttatggactattacaatttgcaaaacataaaagcagatacccaaatgcgtgctcaaatttccggtcagtcagaaaaggatttgaaataa

SEQ ID NO: 21840 - protein, 203 aa, Unknown
  Obtained from environmental sample
  DOMAIN (1)...(198): Protein of unknown function (DUF1432)
  misc_feature (1)..(203): Xaa is any amino acid
MQMSVNPKVITTPKVSAVALDGIQLQAVTRITVRASIRKLVGGAGEETVIARVGEGIVSSIGSAKNHKEVLENPNMISKKVLASGLDAGTAFEILSIDIADVDVGHNIGAILETDRAEADKKIAQAKAEERRAMAAAAEQEMKARVVEMQAKVVEAEAQIPLAMADALKNGRMGVMDYYNLQNIKADTQMRAQISGQSEKDLK

SEQ ID NO: 21841 - DNA, 849 bp, Unknown
  Obtained from environmental sample
  misc_feature (1)..(849): n is a, c, g, or t
atggatttatcaaatgctatttccataactgcggctttaattggattttatttttttggcggcgattttgcatcaaagtgcgaagaaattatgcgtgaatttttcacaggctacatagactgggaaccaaccataacgaatttttcctcgctgtccatccatatactatattcggttatgggcttgcttgccccaatgcttttgttttttttggttgttggcattattgggaatctgtctcaggttggtttgcattttacgttggaaaagttgcaacccaaattatcaaatgttttttccctctctggattaaagcaaatgtttgggaaaaatgcgtggattgagcttataaaaggcttgataaaaataaccatagttgggataatagcctatacggtgataaaaaagcattacgaagatgttttatacatggcagatatgcaaataggagttttctgtgcttatatgatagatattctggttgaaatgcttttgaaaatattggtgtttttaataatattcggaactgcggatttaatttatcaaaaaagaaaaactttcagcgaaatgaaaatgactaagaacgaagttaaagacgaacacaaaaattccgaaggcgacccaaaagttatagcagcccgcaagcgagctatgtatcaaatgcaccaacggtttatgatgaaagaagttcccagcgcaactgtggttataacaaacccaactcacttggcaatagccttgcgctacgatcgcggcaaagaccaagttccgcttgttgttgcaaagggagcagacaaaaccgccgagcgaataaaagaaatagcaacagaacacgatgtgcccaagtga

SEQ ID NO: 21842 - protein, 282 aa, Unknown
  Obtained from environmental sample
  SIGNAL (1)...(20)
  DOMAIN (1)...(281): FlhB HrpN YscU SpaS Family
  misc_feature (1)..(282): Xaa is any amino acid
MDLSNAISITAALIGFYFFGGDFASKCEEIMREFFTGYIDWEPTITNFSSLSIHILYSVMGLLAPMLLFFLVVGIIGNLSQVGLHFTLEKLQPKLSNVFSLSGLKQMFGKNAWIELIKGLIKITIVGIIAYTVIKKHYEDVLYMADMQIGVFCAYMIDILVEMLLKILVFLIIFGTADLIYQKRKTFSEMKMTKNEVKDEHKNSEGDPKVIAARKRAMYQMHQRFMMKEVPSATVVITNPTHLAIALRYDRGKDQVPLVVAKGADKTAERIKEIATEHDVPK

SEQ ID NO: 21843 - DNA, 681 bp, Unknown
  Obtained from environmental sample
  misc_feature (1)..(681): n is a, c, g, or t
atgcgggcttactatgccatgaccgccaatctggacgataatatcggccgcctcatggacgctgtcaagaggctcggcatctatgacaattccatcattgttttcacctccgaccacggcgagcttttcggcgcccacgggcgcagggcaaaaaatattttttacgatgaggcggtgcgcgttcccttcctcatgcgctggaaaggcgttctggatgaaggcggcgtttcggatgtttgcttcaacaccgtggacatcatgcccacccttctctctttaatggatcttggcatacctaaggaagttgaaggctttaatttcaaggacgccctgtgtgggaaggccggaaccgcggagccggaaggagcccttatgatgggaaccggcgcaacggcgatctttgaagacggccatgagtggcgggctttcagaacaaagcgttacacctacgcgcaatacctgtctgacacatcggaactactctttgacaacatcgaagatcctttgcagatgaaaaaccttatttcggatcctgcctatgccgtgacaaggcaggagttgcagcgcgcaatgcttgataagatgagagaaatcaaagacagctttgagccgtgctcctggtatgagaagaactggataaaagatcggcttatcctaaaaaccgccgcgtcgggaaaataa

SEQ ID NO: 21844 - protein, 226 aa, Unknown
  Obtained from environmental sample
  misc_feature (1)..(226): Xaa is any amino acid
MRAYYAMTANLDDNIGRLMDAVKRLGIYDNSIIVFTSDHGELFGAHGRRAKNIFYDEAVRVPFLMRWKGVLDEGGVSDVCFNTVDIMPTLLSLMDLGIPKEVEGFNFKDALCGKAGTAEPEGALMMGTGATAIFEDGHEWRAFRTKRYTYAQYLSDTSELLFDNIEDPLQMKNLISDPAYAVTRQELQRAMLDKMREIKDSFEPCSWYEKNWIKDRLILKTAASGK

SEQ ID NO: 21845 - DNA, 684 bp, Unknown
  Obtained from environmental sample
  misc_feature (1)..(684): n is a, c, g, or t
atggaagcgatcaaaaaaattaaaaaggaattcaacattcccgtaatcggcggaaatgtcgccaccaaagaaggaacaaaaaaattaatagacgccggggcggacgcggttaaagtcggcatagggccggggtcaatctgcaccacgcgtgttgtcgcgggaataggagtgccgcaattttccgccgtctgggactgcgccgaagaggcggcaaagtcaaaaataccggtaatcgcggacggaggcataaagttttcaggagacattaccaaggcaataggcgcgggagcgggcgttgtaatgataggaaacctttttgcaggattaaaagaagcgccgggcagtgaaattatttttgacggaagaatttacaaagaataccgagggatgggaagcatgggcgcaattgccgacggagcgggcgaccgttaccagataagcaaggacgaggaacctgtaccggaaggtattgaggggcgcgtgccttacaagggcgaacttcgcacctacctaaaccagcttatatccggtttacgcaagggcatggggtattgcggctgtaagagcataacagagcttaataaataccgaaaatttgtaaaaattaccgcttccggcctgcgcgaaagccatcctcatgacattaccatcacgcaggaagcgcctaattattcgccgtcctga

SEQ ID NO: 21846 - protein, 227 aa, Unknown
  Obtained from environmental sample
  DOMAIN (1)...(213): IMP dehydrogenase / GMP reductase domain
  misc_feature (1)..(227): Xaa is any amino acid
MEAIKKIKKEFNIPVIGGNVATKEGTKKLIDAGADAVKVGIGPGSICTTRVVAGIGVPQFSAVWDCAEEAAKSKIPVIADGGIKFSGDITKAIGAGAGVVMIGNLFAGLKEAPGSEIIFDGRIYKEYRGMGSMGAIADGAGDRYQISKDEEPVPEGIEGRVPYKGELRTYLNQLISGLRKGMGYCGCKSITELNKYRKFVKITASGLRESHPHDITITQEAPNYSPS

SEQ ID NO: 21847 - DNA, 804 bp, Unknown
  Obtained from environmental sample
  misc_feature (1)..(804): n is a, c, g, or t
gtgttgcttgacgcccagaagaaccttattgattacgagggctccggtatgtccgtgatggaaatgagccatcgcgcaaaggaattcgacgaaatcatcaaaaaagcagagagcctttttcacgccgtgcttggaattcccgacacttacaaggttttgtttttgcagggaggcgcgacgcagcagttcgcaatggtgccgatgaaccttttggcaaaaaacggaaaagcggattatatcctgaccggaaatttttcaacctcggcttacaaggaagcgctgcttttcggtaaacagatttcagtagcgggcagcacaaaggaagagaattttaagcggattcctgaaagcggcgagttaaagcttgatcccggcgcggactacgtgcacatttgcgaaaacaacactatcttcggttccaaatggaagtatctccccgacaccggaagcgtgccgctggtctccgacatgtcttcctgcatactctccgagccgattgacgttaccaaatacggccttatctacgcgggcgcgcaaaaaaacatcgccccagccggccttacggtcgctataatccgcaaggacttaatcggtacccccctgccggggacgccgaccatgctcaactacaaggtgcaggccgacaacgactcgatgaaaaatacgcctccctgctgggctatctaccttgccaaacttgttctggagcacattcaaaaactgggcgggcttgaagaaaatgagcgccgcaacgaagcaaaggcaaagctgctctacgattatcttgactcgacggatttctaa

SEQ ID NO: 21848 - protein, 267 aa, Unknown
  Obtained from environmental sample
  DOMAIN (1)...(267): Aminotransferase class-V
  misc_feature (1)..(267): Xaa is any amino acid
MLLDAQKNLIDYEGSGMSVMEMSHRAKEFDEIIKKAESLFHAVLGIPDTYKVLFLQGGATQQFAMVPMNLLAKNGKADYILTGNFSTSAYKEALLFGKQISVAGSTKEENFKRIPESGELKLDPGADYVHICENNTIFGSKWKYLPDTGSVPLVSDMSSCILSEPIDVTKYGLIYAGAQKNIAPAGLTVAIIRKDLIGTPLPGTPTMLNYKVQADNDSMKNTPPCWAIYLAKLVLEHIQKLGGLEENERRNEAKAKLLYDYLDSTDF

SEQ ID NO: 21849 - DNA, 552 bp, Unknown
  Obtained from environmental sample
  misc_feature (1)..(552): n is a, c, g, or t
gtgttatcgggaacgttaagctatatttttaacaattttgacgggtcaaaacctttttccgcccttgtgcgcgaggcaaaagagaagggctacacggaaccggatccaagggacgaccttaacgcgatggacgcggcgcgaaaagtattaattctcgcaagggaatgcggtcttaacattgaatttaagaacgtaaaaattgatcctatcctgcctccagcctgttttaacgcgaaagatatcaacgcttttttcagtgagctggaaaaaactgacgctgattatgaaaaacgccgcgcgcaggctgccgccgagggcaaacaactgcgttatatagccatgatagaagaaggaaaagcgaagatttctttccgcgccgaaggggagggaagcccgttccgttcgttagttgacagcgataacattgtagtaattacgacaaaccgttattcaaaactcccgatggttattaaagggccgggagcgggagcccaggtaacggcggggggagtgtttgccgacattttacgcaccgcaagaacattggtttaa

SEQ ID NO: 21850 - protein, 183 aa, Unknown
  Obtained from environmental sample
  DOMAIN (2)...(176): Homoserine dehydrogenase
  misc_feature (1)..(183): Xaa is any amino acid
MLSGTLSYIFNNFDGSKPFSALVREAKEKGYTEPDPRDDLNAMDAARKVLILARECGLNIEFKNVKIDPILPPACFNAKDINAFFSELEKTDADYEKRRAQAAAEGKQLRYIAMIEEGKAKISFRAEGEGSPFRSLVDSDNIVVITTNRYSKLPMVIKGPGAGAQVTAGGVFADILRTARTLV

SEQ ID NO: 21851 - DNA, 564 bp, Unknown
  Obtained from environmental sample
  misc_feature (1)..(564): n is a, c, g, or t
ttgagtgtaatggcttacgcgccttatggcgcgggtggggtgataatccgggtggaagcggatatacgccggggtattccgggtattgacattaccgggcttgccgaaggggcggttcgggaagcgcgggaaagggtaagggcggcgttcaggaattccgggtttgcttttcctctggacaggattcttatcaacctggcccccgctggcttgcggaaaggcggggctgatctggatctgccgatcgcgctggcggtaatggcggcagcggggattatcccgccgccgccgaacatcctggtaatgggggaactggagctttcgggaaacatacgtccggtacggggcgttctggcggcaatctccggagggcttgaggagggcattaccgagttcattgttccggccgaaaacaaaggagaagcagcgatactatacggcgcgggggagaaccccgttatgcgattcagggcggtggcgtccctgcgtgaagcgtttgaggcgcttttatcccgcgaggaaagcggagcgctgtctgttccagaagaaccnggatgccaataa

SEQ ID NO: 21852 - protein, 187 aa, Unknown
  Obtained from environmental sample
  misc_feature (1)..(187): Xaa is any amino acid
MSVMAYAPYGAGGVIIRVEADIRRGIPGIDITGLAEGAVREARERVRAAFRNSGFAFPLDRILINLAPAGLRKGGADLDLPIALAVMAAAGIIPPPPNILVMGELELSGNIRPVRGVLAAISGGLEEGITEFIVPAENKGEAAILYGAGENPVMRFRAVASLREAFEALLSREESGALSVPEEPGCQ

SEQ ID NO: 21853 - DNA, 393 bp, Unknown
  Obtained from environmental sample
  misc_feature (1)..(393): n is a, c, g, or t
ttgttttcggccggaacaatgaactcggtaatgccctcctcaagccctccggagattgccgccagaacgccccgtaccggacgtatgtttcccgaaagctccagttcccccattaccaggatgttcggcggcggcgggataatccccgctgccgccattaccgccagcgcgatcggcagatccagatcagccccgcctttccgcaagccagcgggggccaggttgataagaatcctgtccagaggaaaagcaaacccggaattcctgaacgccgcccttaccctttcccgcgcttcccgaaccgccccttcggcaagcccggtaatgtcaatacccggaataccccggcgtatatccgcttccacccggattatcaccccacccgcgccataa

SEQ ID NO: 21854 - protein, 130 aa, Unknown
  Obtained from environmental sample
  misc_feature (1)..(130): Xaa is any amino acid
MFSAGTMNSVMPSSSPPEIAARTPRTGRMFPESSSSPITRMFGGGGIIPAAAITASAIGRSRSAPPFRKPAGARLIRILSRGKANPEFLNAALTLSRASRTAPSASPVMSIPGIPRRISASTRIITPPAP

SEQ ID NO: 21855 - DNA, 636 bp, Unknown
  Obtained from environmental sample
  misc_feature (1)..(636): n is a, c, g, or t
atgaatatatcgcaattaataccattcttaaatgaaaatcaaatagatataaaaatccattgtgctattggaaatgcagaaaaaggtaaaaataaattagagcctttttttgaattcacaaaaggaaaatttaaagaatggcaagaagggcaaaatcaaaaaaactttgaacgaaaatatattttatcaattatatttataaataaaaatgaatggctctttgcgggtatatataaatgtttaggtgtaaaagaagcaaaaaaagaaagtgggaagacatattatatatatgaaacagaattattagaatatggctatgaattaattggaaaattaattatctattttgaaaaggattttagagcatcatatttattacttgaaaaatttattaacgaattattattatgtgagattaaaaaacaagaatataagtttgatcctttccctgggttctcaaatgttcatattacttttgatttgttacaagaaataataaatagtaatgaacaaagttggcaatcagcattatcaagtgttaaaggaatatatttaataagtgataaaagtaatggtaaattatatgttggttctgcatacggcgaaaatgcttttggcaaagatggtcagcaatag

SEQ ID NO: 21856 - protein, 211 aa, Unknown
  Obtained from environmental sample
  misc_feature (1)..(211): Xaa is any amino acid
MNISQLIPFLNENQIDIKIHCAIGNAEKGKNKLEPFFEFTKGKFKEWQEGQNQKNFERKYILSIIFINKNEWLFAGIYKCLGVKEAKKESGKTYYIYETELLEYGYELIGKLIIYFEKDFRASYLLLEKFINELLLCEIKKQEYKFDPFPGFSNVHITFDLLQEIINSNEQSWQSALSSVKGIYLISDKSNGKLYVGSAYGENAFGKDGQQ

SEQ ID NO: 21857 - DNA, 372 bp, Unknown
  Obtained from environmental sample
  misc_feature (1)..(372): n is a, c, g, or t
atgtggatgcgcaggtacatggtcgatgaaataaacaaagattatgtcaaacttgcgatcgcaaaaggacaaacaagccagaggatcatgctcaggcacgtctttaggaactcctttgttccggtaattcaatatataccgtcctcaatattatacaccatcgcgggttcgatttatgtcgaatcactttattccataccaggtatgggcgggcttttggtacaggctatacaaaggcaggacaatcctcttgtacagatccttgttttgatatactcaagcatgggcgtattcgggatgatgctgggagacatagcaatgacaattgttgacccgcgcattagatttgcacaaaaaagaggggcgcggtaa

SEQ ID NO: 21858 - protein, 123 aa, Unknown
  Obtained from environmental sample
  misc_feature (1)..(123): Xaa is any amino acid
MWMRRYMVDEINKDYVKLAIAKGQTSQRIMLRHVFRNSFVPVIQYIPSSILYTIAGSIYVESLYSIPGMGGLLVQAIQRQDNPLVQILVLIYSSMGVFGMMLGDIAMTIVDPRIRFAQKRGAR

SEQ ID NO: 21859 - DNA, 477 bp, Unknown
  Obtained from environmental sample
  misc_feature (1)..(477): n is a, c, g, or t
ttgatggccgagcaacggtacgacacaggctatactttcgccgcagcgtgtgttgttcctgaattgcccttacagagggacgcgcttattgaattggcgaaaaacctcgcgacagccccgcaggttaaaaacagccaggaacttaccactgaaattctcaagcgcgaggagcttatgagtaccgcgattggcagaggcatcgcgattccccatatacggctccagtcaataaccgatcttgttgtttctgtcgggattagccacgtagatattacggattttaaccctctggacgacgagcctgtaaggctggttcttatgatcgccgcggcctacaaccagcataccgcttatctgcagaccctctcctatttcagcgcaaggcttaaaaaccctttgctgcgccattcattgataaacgctcaaacagaggatgaggtgtacaaactgcttgcggaaacggaggaaaccaaatga

SEQ ID NO: 21860 - protein, 158 aa, Unknown
  Obtained from environmental sample
  DOMAIN (11)...(154): Phosphoenolpyruvate-dependent sugar phosphotransferase system, EIIA 2
  misc_feature (1)..(158): Xaa is any amino acid
MMAEQRYDTGYTFAAACVVPELPLQRDALIELAKNLATAPQVKNSQELTTEILKREELMSTAIGRGIAIPHIRLQSITDLVVSVGISHVDITDFNPLDDEPVRLVLMIAAAYNQHTAYLQTLSYFSARLKNPLLRHSLINAQTEDEVYKLLAETEETK

SEQ ID NO: 21861 - DNA, 393 bp, Unknown
  Obtained from environmental sample
  misc_feature (1)..(393): n is a, c, g, or t
atgaaagcgggtgttattggagctaccggttatgcgggggcggagattgtcaggcttctttcaggccattccggcgttgacgagttgattctatcatcggtcagctttgaaggcggaagaatcgaggaagtgtaccctaattttatcgggttaatatcagcgcctcttgtaaaagcggaagctgtcgtcagcgaagccgacgtggtcttttccgccctgccccacggcgtcggggagcaattcgctaaaatctgcgttgaaaaaggaaaaccctttatcgacatgtccgccgattttcgctttggtgaagacgaggccgctttcaaaaaatggtacggcaaagactatgttcaccctgaactgcgaaagtattctatatatggggcttcctga

SEQ ID NO: 21862 - protein, 130 aa, Unknown
  Obtained from environmental sample
  DOMAIN (2)...(129): Semialdehyde dehydrogenase, NAD binding domain
  misc_feature (1)..(130): Xaa is any amino acid
MKAGVIGATGYAGAEIVRLLSGHSGVDELILSSVSFEGGRIEEVYPNFIGLISAPLVKAEAVVSEADVVFSALPHGVGEQFAKICVEKGKPFIDMSADFRFGEDEAAFKKWYGKDYVHPELRKYSIYGAS

SEQ ID NO: 21863 - DNA, 630 bp, Unknown
  Obtained from environmental sample
  misc_feature (1)..(630): n is a, c, g, or t
atgaagatttcaagccacgtacaggctattatcaacgccgcatataacgaggcgagggtacgaaaccacggctacctcaccccggagcatatactctacgccgcgctttcctttgaggaagtgcagggcgctcttgcctcatgcggggccaataccgaacaaataaaacacggaatagaaagttattttgagcaggaaatcccgcctgtagccaacccggctgatgagcctacccagactgtgggtttccagagcgtcattgagcgtgccgtccttcaaagccgctcggcccaaaaagaaatgatcgacgttgcggacattctggtgtccctgtatgacgaggacagaaaccacagcgctttttaccttcgcaaagccggggttaagcggcttgatctattggaagtgctttcccacgggcatggcgcgggtaccggagcctactccaagattccggacagtgaagacaacagatatcggcacctgcccgatgaggaaatagcggagccggggcagaaaaccaaagcggcgaaaaaaaccgccctggaacgtttttcatccgacctgaccgctctggcgcgtgacaacaaagctggaaccctttcatcgtgcagaagcggaggagcttga

SEQ ID NO: 21864 - protein, 209 aa, Unknown
  Obtained from environmental sample
  DOMAIN (14)...(64): Clp amino terminal domain
  misc_feature (1)..(209): Xaa is any amino acid
MKISSHVQAIINAAYNEARVRNHGYLTPEHILYAALSFEEVQGALASCGANTEQIKHGIESYFEQEIPPVANPADEPTQTVGFQSVIERAVLQSRSAQKEMIDVADILVSLYDEDRNHSAFYLRKAGVKRLDLLEVLSHGHGAGTGAYSKIPDSEDNRYRHLPDEEIAEPGQKTKAAKKTALERFSSDLTALARDNKAGTLSSCRSGGA

SEQ ID NO: 21865 - DNA, 330 bp, Unknown
  Obtained from environmental sample
  misc_feature (1)..(330): n is a, c, g, or t
atgcaggtagtgacccattcccaggcggttgaggaacccaaagaccccaataccagccagattttcctgttatacaaactttttgcctctgcggatgagcaagccgcccttgccgcccgttaccgcgcgggaggcatgggctggggcgaggctaaagaagaactgttccgcgtcgcaaaccgcgagcttgctccgatacgggaacgttataacgcgatcatggcggatattcccactctggacaaaattcttgagcagggagccgcaaaagcccgtcccattgcggccgccacggtaaaacgtttcagaaaagcggcggggatagactga

SEQ ID NO: 21866 - protein, 109 aa, Unknown
  Obtained from environmental sample
  misc_feature (1)..(109): Xaa is any amino acid
MQVVTHSQAVEEPKDPNTSQIFLLYKLFASADEQAALAARYRAGGMGWGEAKEELFRVANRELAPIRERYNAIMADIPTLDKILEQGAAKARPIAAATVKRFRKAAGID

SEQ ID NO: 21867 - DNA, 705 bp, Unknown
  Obtained from environmental sample
  misc_feature (1)..(705): n is a, c, g, or t
atggcgagggccgagacatcaaaaaaatcagcgctccccattattggtattgtattgtcgtttttaattttttcattgtcacccacaataacattcggcaaatacacactttttacttaccctgtaatacagcctattaaacgtttatggagtatgtttcgttccaccgggagaatgacctggccggttgtatatattattatgattttttgcatatggcggacaattaagcaattttctgtaaaaaaatccatcctgattttaagcgtatttttactgatccaatgggccgatctaaagccatggtttgtcggcaagggggaaagttttaagacaaaagttacatggcagagcgaattgtcatcgccggtatggaacgatctggcaaataaatataagcatatattctttatgagcagtactccgaaattgttacattttttgtacctggcgggggatcataaaatgactgttaatacttcttatataggtagtataagttcgaaaaagatatgggataacgtacggaaagaatcagactatttgctgaaaaacggaccaaagagcgacatgatatatgtctttgagagtgaagatcatgcttcttattataaaagtagaagtagtataaatctttaccttattgatgatgtgattattggcataaattcgagagaatcttaccttgataattacaggttttga

SEQ ID NO: 21868 - protein, 234 aa, Unknown
  Obtained from environmental sample
  SIGNAL (1)...(25)
  misc_feature (1)..(234): Xaa is any amino acid
MARAETSKKSALPIIGIVLSFLIFSLSPTITFGKYTLFTYPVIQPIKRLWSMFRSTGRMTWPVVYIIMIFCIWRTIKQFSVKKSILILSVFLLIQWADLKPWFVGKGESFKTKVTWQSELSSPVWNDLANKYKHIFFMSSTPKLLHFLYLAGDHKMTVNTSYIGSISSKKIWDNVRKESDYLLKNGPKSDMIYVFESEDHASYYKSRSSINLYLIDDVIIGINSRESYLDNYRF

SEQ ID NO: 21869 - DNA, 783 bp, Unknown
  Obtained from environmental sample
  misc_feature (1)..(783): n is a, c, g, or t
atgcctttaccgcttttcgaacccaaacgggtcagcctgaactatactgaagcgcttgcctttatcgaagctatagcccgatggctgcacaatgaaggtatcagacggggcgatcgggttgcggtgacaggaaaaaattcccccgaatgggccatcgcgtaccttggcatactattcgcgggagcggttgtcgttcccattgattaccagcttaaactagaggaaagcgatctccttatcagaacctccgaagcaaaaatactgtttgttgacgaggagaaacatgagtattacacaaaaaatccgggcaaactgacgaagattatatccctcaaaaaaggagttggaaagtatatttacgaactggacggcccccaagcggagatagaacaggccgccgaacatgacctggcggcgattctgtttacttcgggaacaatggggaatcccaaaggggttatgctaacccattataatctggtttccgacagcttcctggcgcagggaactcccttgctgatttatcataccgacgtattttacgcgattcttccgctccaccatgcctataccatgctggcggtttttatagagactatatctgtcggctcggaacttgtttttggcaaacgcatggtaaccagccagattcttaaagaactgaaagaaggaaagatcaccatgctgctgggcgtaccaatgcttttcaataaggtactgactggaatcattagagggcttaaagcanagggctccattgtttatgggctgatgttattttaa

SEQ ID NO: 21870 - protein, 260 aa, Unknown
  Obtained from environmental sample
  DOMAIN (14)...(260): AMP-binding enzyme
  misc_feature (1)..(260): Xaa is any amino acid
MPLPLFEPKRVSLNYTEALAFIEAIARWLHNEGIRRGDRVAVTGKNSPEWAIAYLGILFAGAVVVPIDYQLKLEESDLLIRTSEAKILFVDEEKHEYYTKNPGKLTKIISLKKGVGKYIYELDGPQAEIEQAAEHDLAAILFTSGTMGNPKGVMLTHYNLVSDSFLAQGTPLLIYHTDVFYAILPLHHAYTMLAVFIETISVGSELVFGKRMVTSQILKELKEGKITMLLGVPMLFNKVLTGIIRGLKAXGSIVYGLMLF

SEQ ID NO: 21871 - DNA, 345 bp, Unknown
  Obtained from environmental sample
  misc_feature (1)..(345): n is a, c, g, or t
atgtgcgacaaagccgtattgaatatagttacggagaaggtctgtgccgccgccaaagaggttttgggcgacaagttggagaaggtgatactcttcggttcatacgcgaggggcgactacgacgaggagtcggacatagacatcatgataatcgccgacattgcgttggaggaggctaatgagacgcgcaggaagattcatgcccgtatggaatacgtcgatttagagcatgatgtagttgtctgtttgagtatggcgtgcagcgacatattccgcgagcaccaagacatctcaggtttatatataaacgtgcgaaaagacgggatggaattatatgctgcttga

SEQ ID NO: 21872 - protein, 114 aa, Unknown
  Obtained from environmental sample
  DOMAIN (10)...(97): Nucleotidyltransferase domain
  misc_feature (1)..(114): Xaa is any amino acid
MCDKAVLNIVTEKVCAAAKEVLGDKLEKVILFGSYARGDYDEESDIDIMIIADIALEEANETRRKIHARMEYVDLEHDVVVCLSMACSDIFREHQDISGLYINVRKDGMELYAA

SEQ ID NO: 21873 - DNA, 498 bp, Unknown
  Obtained from environmental sample
  misc_feature (1)..(498): n is a, c, g, or t
atgagagttctgacttccaaaaagggatactggttttatgatataacaagtatcctgtgccagccggaagcttttcagttttgcattgaagctatggtagatatatacaaagacaagaagatcgacgcggtggccgcaattgaggcgcgcggctttcttttcgctgctcctttcgcggtacgcatgggtattccccttattccaatccgcaaaaaaggcaagctccccggaacaaccctgtcaaaaaaatatgaacttgaatacgcccaggccgaaatagaagttcacaaagaagacgttccggcgggcaagcgtatactcttaaccgacgacctaattgccaccggaggaacgctgaacgccgcaaaggcgcttctcaacgaaggcggggccgaggttccggagatcttcggcgtagtggccctacctttccttggttatgagaaagcgcttagccctacgcctgtaacgaccctcattcaatatcacagcgaatga

SEQ ID NO: 21874 - protein, 165 aa, Unknown
  Obtained from environmental sample
  DOMAIN (14)...(150): Phosphoribosyl transferase domain
  misc_feature (1)..(165): Xaa is any amino acid
MRVLTSKKGYWFYDITSILCQPEAFQFCIEAMVDIYKDKKIDAVAAIEARGFLFAAPFAVRMGIPLIPIRKKGKLPGTTLSKKYELEYAQAEIEVHKEDVPAGKRILLTDDLIATGGTLNAAKALLNEGGAEVPEIFGVVALPFLGYEKALSPTPVTTLIQYHSE

SEQ ID NO: 21875 - DNA, 306 bp, Unknown
  Obtained from environmental sample
  misc_feature (1)..(306): n is a, c, g, or t
atggaagctgtaattattaaccctatctgccccttcgcgttatcaaaccggccttttgtgcttccttcgcgtctgccctttgttataaccgtgcntgaacaacagcgttcaggcgtgcttttaaccatagacgggcaggatacctgtgatcttaaaagcgcggataaaattttcatccaacaggccgcaaaacccgcccagcttattttcgcggacaggcacgcttattattccgcgctaaggtctaaacttttctggtcgggaaaccctttaaacaaaactcccgcggggcaaggcgatgcttga

SEQ ID NO: 21876 - protein, 101 aa, Unknown
  Obtained from environmental sample
  misc_feature (1)..(101): Xaa is any amino acid
MEAVIINPICPFALSNRPFVLPSRLPFVITVXEQQRSGVLLTIDGQDTCDLKSADKIFIQQAAKPAQLIFADRHAYYSALRSKLFWSGNPLNKTPAGQGDA

SEQ ID NO: 21877 - DNA, 384 bp, Unknown
  Obtained from environmental sample
  misc_feature (1)..(384): n is a, c, g, or t
atgtgtcaggctctttttttgtggttcagaatgtatgttgacaaatgtgagacaatatggtactatatggatatattaatcaggaggaaaataattatgaaatttgttactgtaagggattttaggacaggctccgccaatatttgggcaacattacctcaggaacaggaaatgattatcacaaataacgggaaacctgtagctttactgaccccattaagcgataaaacccttgaggaaactctttcggctgtcagaagagcaaaagcaataaacgcggttaaacttttgcagcagcaatcggtaagaaaaggaactgataaaatgactttggaggaaataaacgatgaaataaaaaaagcaaggaaaaaacataaaaattga

SEQ ID NO: 21878 - protein, 127 aa, Unknown
  Obtained from environmental sample
  misc_feature (1)..(127): Xaa is any amino acid
MCQALFLWFRMYVDKCETIWYYMDILIRRKIIMKFVTVRDFRTGSANIWATLPQEQEMIITNNGKPVALLTPLSDKTLEETLSAVRRAKAINAVKLLQQQSVRKGTDKMTLEEINDEIKKARKKHKN

SEQ ID NO: 21879 - DNA, 513 bp, Unknown
  Obtained from environmental sample
  misc_feature (1)..(513): n is a, c, g, or t
atgcttaccacggatagcggcgcggtgaacaacgcgcttgtggcgttgggtataatcaaagagcctatattgtggcttgccgaacccaggtatttctggggagtagtcgggattacatacgtctggaaagaagtaggctggaatacgattatatacctcgcggcgatcgccggtatagatccgaacctgtatgaagccgcggcgattgacgggtgtaacaggttccagaaaatgtggcgcattacccttccatgtataaagccgaccataattattctgttaataatgagcgtggggcatatccttgacgcgggttttgaattgcagtatctgcttagaaacgggcttgtcatggacgtgtcggacacgattgatgtatacgtacttatatacggccttaaaaattattcccttggctctgcggccggtatgataaagaatatagtaaatatatcgctgatatttatcgccaacgagatcgccaaaagggccggagaggagcgactgatatga

SEQ ID NO: 21880 - protein, 170 aa, Unknown
  Obtained from environmental sample
  misc_feature (1)..(170): Xaa is any amino acid
MLTTDSGAVNNALVALGIIKEPILWLAEPRYFWGVVGITYVWKEVGWNTIIYLAAIAGIDPNLYEAAAIDGCNRFQKMWRITLPCIKPTIIILLIMSVGHILDAGFELQYLLRNGLVMDVSDTIDVYVLIYGLKNYSLGSAAGMIKNIVNISLIFIANEIAKRAGEERLI

SEQ ID NO: 21881 - DNA, 420 bp, Unknown
  Obtained from environmental sample
  misc_feature (1)..(420): n is a, c, g, or t
atgggatttgccatagaccttttggaacaggcttacggcgataattcaaaatggagatggacgtttgttgatcttgagggacgttttgccgtaacggcaaaaaatattcttgatttaaaaaatatttacgagaatatggctcccggagcgcaatattatgattctaccgtatatcatcttagactggtaaaaagacttatctcgcaagccgccgaccgttaccgtgaaaaatacgagctgagtacagggcaggttcttgattttaaaacgggaataaactttcttagcgcgttacgccgtttgcacattgttctctccgagaacgaagaatccaatgaaataaaaaagaaattggcaatttggtcggcaaaacttgagactgatcataaaaagcaggaagaagccaaaaagagagcatga

SEQ ID NO: 21882 - protein, 139 aa, Unknown
  Obtained from environmental sample
  misc_feature (1)..(139): Xaa is any amino acid
MGFAIDLLEQAYGDNSKWRWTFVDLEGRFAVTAKNILDLKNIYENMAPGAQYYDSTVYHLRLVKRLISQAADRYREKYELSTGQVLDFKTGINFLSALRRLHIVLSENEESNEIKKKLAIWSAKLETDHKKQEEAKKRA

SEQ ID NO: 21883 - DNA, 519 bp, Unknown
  Obtained from environmental sample
  misc_feature (1)..(519): n is a, c, g, or t
atgatcgggaatgtaagccatttaacgccgtcttttttacgcattgatttctcaaagccggcggaacaggttatcgtttttaacggagaacagctcacaatatacctgcctgaattcagggcggtgttgaatcaaagcgtcacccaaaccagaaggggaacttcgggagcgggaatggcgacggcgaacgggcttgtaatgttaaggcgcaattatgttccttctttcgttacaggacctaacccggaagcgctgtccggcgattccagagaaagggttgttaaactgcgccttacaaggcgttcagtctcggaaggattcagggaaattattctaagcattaatcccgatacaaaattaatccggcggatcgaagccagaactgtcgcagagggcgaaattcgttttgactttaccaacatcaggattaatcagggaattccggaactgcggtttctttatgactcccccgcgtcggcaaatatgtacaacaattttttgttcagagatactgattaa

SEQ ID NO: 21884 - protein, 172 aa, Unknown
  Obtained from environmental sample
  misc_feature (1)..(172): Xaa is any amino acid
MIGNVSHLTPSFLRIDFSKPAEQVIVFNGEQLTIYLPEFRAVLNQSVTQTRRGTSGAGMATANGLVMLRRNYVPSFVTGPNPEALSGDSRERVVKLRLTRRSVSEGFREIILSINPDTKLIRRIEARTVAEGEIRFDFTNIRINQGIPELRFLYDSPASANMYNNFLFRDTD

SEQ ID NO: 21885 - DNA, 825 bp, Unknown
  Obtained from environmental sample
  misc_feature (1)..(825): n is a, c, g, or t
ttgtcccaagcttgcccgaatttggggccaaaaggccgctgtataacggggccgggatggggatccaatgatcaaggcccttgggggcattggggggtttccctttcccaaacagtaacggataacgcaaggaattaccgccaggccgggcttggggaagaactcctagcgtctggcccctgttggactgctaaaaagccccccggcatgggtaccggctccaaaggagccgatggctgtcccattcaccagcggatacccgattacctcgccgtcgtggcggcggggaactacggtaccgcctttaagattatcgcgcaagacaataccgcaacctcggttaccgggactatctgcgatcaccagtgccagcgcaagtgtaccagggttgattacgaagatccgctgtgcatcagaaaggcaaaacttgccgcatcggagcatgcccaggaagcctacacggattcactggccgcgccggaaattaaaacagacgaatccgcaggcatcatcggcgctggcccagcgggcattgccgccgcgacattcctgcggcgtaacggcgtaccggtaacggtatacgaaaagcgggaccggcccttcggcatcgtgcagtacgttattccctccttcagaatttccgatgaggcaatcttccgtgatttccaaatggcgcaaaaactcgggcttgaattccggtttaacgcgcccgataactattcgatttccgaattgcgcaagaaacaccggttcgtggtaatagcttcaggcgcgtggaagcagggggcaacagtagtaacagcaggggcaggaaaaaattattga

SEQ ID NO: 21886 - protein, 274 aa, Unknown
  Obtained from environmental sample
  misc_feature (1)..(274): Xaa is any amino acid
MSQACPNLGPKGRCITGPGWGSNDQGPWGHWGVSLSQTVTDNARNYRQAGLGEELLASGPCWTAKKPPGMGTGSKGADGCPIHQRIPDYLAVVAAGNYGTAFKIIAQDNTATSVTGTICDHQCQRKCTRVDYEDPLCIRKAKLAASEHAQEAYTDSLAAPEIKTDESAGIIGAGPAGIAAATFLRRNGVPVTVYEKRDRPFGIVQYVIPSFRISDEAIFRDFQMAQKLGLEFRFNAPDNYSISELRKKHRFVVIASGAWKQGATVVTAGAGKNY

SEQ ID NO: 21887 - DNA, 486 bp, Unknown
  Obtained from environmental sample
  misc_feature (1)..(486): n is a, c, g, or t
atgaaatcaccaatcacaagcatccttacagcggttaccggctctgatgcgtctattatggcggcgaaatacgccatagtcctggcgaaactctatcactgcaaacttggcgtggtgtatgttgtggacacggcgacgataaagcagcttaccctgagcaagatctttatccaggctgaaagctccgaatatgaaaaaagccttgaggagaacggacagcgttatttgtcttttgtggaagaactcgccaacgcgaaaggcgtaaaagccgacaagattttacggaagggcgcggtatacacggagattctcaccgttgccgatgaccgcgaggcggacctaatcgtgatgggcggctgggaaaaaaaccgcagcgcccttgacatcattggacacgcccaccgcgaaattatgcttaacgcaaaatgctcggtgctgctggtgaaagagccgggcatcgatctgctctataaacaacttcattaa

SEQ ID NO: 21888 - protein, 161 aa, Unknown
  Obtained from environmental sample
  SIGNAL (1)...(21)
  DOMAIN (4)...(149): Universal stress protein family
  misc_feature (1)..(161): Xaa is any amino acid
MKSPITSILTAVTGSDASIMAAKYAIVLAKLYHCKLGVVYVVDTATIKQLTLSKIFIQAESSEYEKSLEENGQRYLSFVEELANAKGVKADKILRKGAVYTEILTVADDREADLIVMGGWEKNRSALDIIGHAHREIMLNAKCSVLLVKEPGIDLLYKQLH

SEQ ID NO: 21889 - DNA, 639 bp, Unknown
  Obtained from environmental sample
  misc_feature (1)..(639): n is a, c, g, or t
atgacaagtaaagaccaaaagatgctcagcgccgccgctattttttctaataatatggttttacagcacggcaaacccattcctttttgggggacgggcggcgaagaaggctcgtctgtttttgtaatttgggaaagcaaaaaaaacagcataaagaaagaaacaaaggtctgcggcgataaatggagccttacgctcccacctttaccctcctgcgtatcaggcgaaataacaataaagaatgaagccgaagagattcgtttttccaatgtaataacaggcgatgtatggtttgcgggcggccagagcaatatggaaatggagcttgtaaactgcaagaacggaaaagccgaacttgccgcctgcgccaatcccaacattcgtttttatcaggtggtaaaacgcgccgttgtagacgatgattatctgcgtgaagaatctgaaggttattggaaagaatgttcgccggaaaccgctgcaatgctcagcgccgccgcgttcttcttcgctcggaaaataaacgcggaaactaaaatccccatcggaataattaattgctcatggggcggtacatcaataagcgcatggatgagcgaaaagcagctaaaaagactacggcgggcagacgtttatagatga

SEQ ID NO: 21890 - protein, 212 aa, Unknown
  Obtained from environmental sample
  SIGNAL (1)...(22)
  DOMAIN (163)...(210): Domain of unknown function (DUF303)
  misc_feature (1)..(212): Xaa is any amino acid
MTSKDQKMLSAAAIFSNNMVLQHGKPIPFWGTGGEEGSSVFVIWESKKNSIKKETKVCGDKWSLTLPPLPSCVSGEITIKNEAEEIRFSNVITGDVWFAGGQSNMEMELVNCKNGKAELAACANPNIRFYQVVKRAVVDDDYLREESEGYWKECSPETAAMLSAAAFFFARKINAETKIPIGIINCSWGGTSISAWMSEKQLKRLRRADVYR

SEQ ID NO: 21891 - DNA, 579 bp, Unknown
  Obtained from environmental sample
  misc_feature (1)..(579): n is a, c, g, or t
atgagttgcaacgaagaaaaagatgagaaaaaaaaggattttctaaaagaggcagagtatgcactcgcaaaaagcagacgtgtatttttgtgggggcccgtggaagattccagcgcagaagagctggtgaagcaatttctatatctggattccatttcaaatgaagacatctatttcttgataaacagccccggcggagcaatttcgagcggtctttcaatttacgactgtatgaaatcgctgaagagcaatgtggtcacaatttgcgcagggcaggctgcttcttttggagcggtgcttttgtgcgcagggacaaagggcaaacgctacgcatggccccacgcgagaattatgattcaccagccgcttatacacggcgaaatggttgccccggcaagcgaccttgcgatacaagcagaggaaatgctccgcatccgcgatgtgctaaacgagattttcagcgagcacacgggcaaatccaaagaagagcttgagcgcgacaccgaccgcgactattttatgagcgcagagcaggcaaaggaatacggcattattgacgaagtgaaaagtgttcggtaa

SEQ ID NO: 21892 - protein, 192 aa, Unknown
  Obtained from environmental sample
  DOMAIN (15)...(192): Clp protease
  misc_feature (1)..(192): Xaa is any amino acid
MSCNEEKDEKKKDFLKEAEYALAKSRRVFLWGPVEDSSAEELVKQFLYLDSISNEDIYFLINSPGGAISSGLSIYDCMKSLKSNVVTICAGQAASFGAVLLCAGTKGKRYAWPHARIMIHQPLIHGEMVAPASDLAIQAEEMLRIRDVLNEIFSEHTGKSKEELERDTDRDYFMSAEQAKEYGIIDEVKSVR

SEQ ID NO: 21893 - DNA, 645 bp, Unknown
  Obtained from environmental sample
  misc_feature (1)..(645): n is a, c, g, or t
ttgattgccgagcggaaagggccaggctgggatgcgggcgttgatcttcactatcaatcgttgaacctgggcctgacctatttttcgaccgattacgaggacaagatcagtgcccgtccggttcccggcggtaacaatcaatactacaatgtgggcggcacagtatattatcgcgggattgaggcccaggccggctacgatatcggcgaggccctcgccaagccctttatgctgcggccatacgccaacctgacgcaaatgctggaataccggggccggggccaggatccggccttgcccgacagctacgcgacaatgcgcaacgtcagcgatatgagcctagcttacggtttgcagttcaagtaccctgacatcggcctggaggcggatctgcgcgcgacctattacggatatcgcaaagagctggtgtatgacagctccacatggacatccgaactggaaaagaagggcggcgagacggtggtggatttctttgtcgcaaaaaccctgcacaagtgggagggcgcgggcgcgctcagcctgaagggcgaagtacgcaatataggaaacgccaagcatgaggcgaccgcgaactacccgctaccggggcgttccttctggcttgggctgcgctacgattattag

SEQ ID NO: 21894 - protein, 214 aa, Unknown
  Obtained from environmental sample
  misc_feature (1)..(214): Xaa is any amino acid
MIAERKGPGWDAGVDLHYQSLNLGLTYFSTDYEDKISARPVPGGNNQYYNVGGTVYYRGIEAQAGYDIGEALAKPFMLRPYANLTQMLEYRGRGQDPALPDSYATMRNVSDMSLAYGLQFKYPDIGLEADLRATYYGYRKELVYDSSTWTSELEKKGGETVVDFFVAKTLHKWEGAGALSLKGEVRNIGNAKHEATANYPLPGRSFWLGLRYDY

SEQ ID NO: 21895 - DNA, 300 bp, Unknown
  Obtained from environmental sample
  misc_feature (1)..(300): n is a, c, g, or t
gtgcgtctgagtgctttgagctttgaggttgccatgcgtgatgttgacatagcaaaatatttcatcagcgccgccaccgccattacatataccatggcgaaactcgtcatcacctccggcaaatttttcgtcaaacacgaccggaaagccctgggcgagatcacagccatcatgcatgtgaccgggcaaaggtccggcaccatcgtcgtctctttctcccacgcgggcgcgaaggagcttgccaagggcatgctcggcgatgctatgacggacaggatcacgacactcggccgaatctga

SEQ ID NO: 21896 - protein, 99 aa, Unknown
  Obtained from environmental sample
  misc_feature (1)..(99): Xaa is any amino acid
MRLSALSFEVAMRDVDIAKYFISAATAITYTMAKLVITSGKFFVKHDRKALGEITAIMHVTGQRSGTIVVSFSHAGAKELAKGMLGDAMTDRITTLGRI

SEQ ID NO: 21897 - DNA, 948 bp, Unknown
  Obtained from environmental sample
  misc_feature (1)..(948): n is a, c, g, or t
ttgagcatacctgccttaacctggaaagggtaccctgcttttatagggaaaatcgtttcacttaaaaagctgtcgcttggccattacagctatggtcataaggaacaagataatataatactgcctgccgagttggctaatttgcgaaatttaaggaatctttccttaggatacgatattcccgaaatcccatcctgggtttggacgcttgataagctggaagcgttgagtatatacaacgattccatagaatcaattccggcagaaatatcagatataaaacgactgcgtaaattgcgaatatactgcgaaaatatcaccacgctccctgaagaaattggggaaaagctttcgctgaccgtccttgatctgcaatgcccccgacttaaggccttgccggactccttagctaatctgaaagcgatgaaggggtttttcattgacacatgtaatttaacagcccttccaggctatatatgcaattggacagacttacaggagtttaagatatccgatgaaaaatactttcagaggtctcatacaaaattgaacaacatttcgcggaatatcggaaatctgaaaaaactaaaataccttgaccttaacggcgtcagcattgaagaaattcccgcttctcttggcagctgtccgctggaatatcttgaacttgcaggcaattttggcattgtgccggaacccctggggaattgcacaaaactcaaagtcctccatcttaattccgataagcctgtaagcctgccaaaaagctttggcggcctttccgcgttaaaagagctttgccttttttctccggaaatacacagcataccggattcaataggcaactgcaaaaatcttaaacttattatcattgaaagcgaaaaactaaccgcattgcccggaatcggtttgcaaattagaaaaacctggaagaggcttcgcccttga

SEQ ID NO: 21898 - protein, 315 aa, Unknown
  Obtained from environmental sample
  misc_feature (1)..(315): Xaa is any amino acid
MSIPALTWKGYPAFIGKIVSLKKLSLGHYSYGHKEQDNIILPAELANLRNLRNLSLGYDIPEIPSWVWTLDKLEALSIYNDSIESIPAEISDIKRLRKLRIYCENITTLPEEIGEKLSLTVLDLQCPRLKALPDSLANLKAMKGFFIDTCNLTALPGYICNWTDLQEFKISDEKYFQRSHTKLNNISRNIGNLKKLKYLDLNGVSIEEIPASLGSCPLEYLELAGNFGIVPEPLGNCTKLKVLHLNSDKPVSLPKSFGGLSALKELCLFSPEIHSIPDSIGNCKNLKLIIIESEKLTALPGIGLQIRKTWKRLRP

SEQ ID NO: 21899 - DNA, 804 bp, Unknown
  Obtained from environmental sample
  misc_feature (1)..(804): n is a, c, g, or t
ttgtcccccgttcactacgcgggccttccctgcgacatggatgctattgtcccaatagcgcgaaagcacggccttaaaataatcgaggacgctgcccattccttcccttcgtttgttgagtctattggtgacaaaagcgacccggcgaaaggccgctgggccggactttccggcgatgtgggggttttttctttttacgccaccaaaaccatcaccaccggggaaggcggcatggtcgttacacgggacaaggcaaccgccgaccgcataagaatcatgcgctcccacggcattgacaggagcgtctgggatcgttattcgaacgtaaaagcttcatggtattaccaggtgatagaacccggctataaatacaatatcccggatatactttcagctttgggaagggcccagctccgaagggcttacgatctccttgcaatgcgggaaaaaatcgcggcggtttacgatgaggcttttcgcgatgacaggcatttcttaattcccccgaccggaagcggagacgcccgccacctttacccattgcggctgtgtcctgaaaatctttcgctaacccgcaacgaatttgccgaaaagctccaggagatgggtattggcatttcggtacactttattccccttcataccatgccttattataaaagccgctactccctggaagacaatgatttccccgaaacgcttaaaacttttaaccgcacaatttctttgcccatctggcctggcatgacggaaagccagattgatcaggtactcgcaacagtcaaatccctggccgcgaattaa

SEQ ID NO: 21900 - protein, 267 aa, Unknown
  Obtained from environmental sample
  DOMAIN (1)...(262): DegT/DnrJ/EryC1/StrS aminotransferase family
  misc_feature (1)..(267): Xaa is any amino acid
MSPVHYAGLPCDMDAIVPIARKHGLKIIEDAAHSFPSFVESIGDKSDPAKGRWAGLSGDVGVFSFYATKTITTGEGGMVVTRDKATADRIRIMRSHGIDRSVWDRYSNVKASWYYQVIEPGYKYNIPDILSALGRAQLRRAYDLLAMREKIAAVYDEAFRDDRHFLIPPTGSGDARHLYPLRLCPENLSLTRNEFAEKLQEMGIGISVHFIPLHTMPYYKSRYSLEDNDFPETLKTFNRTISLPIWPGMTESQIDQVLATVKSLAAN

SEQ ID NO: 21901 - DNA, 405 bp, Unknown
  Obtained from environmental sample
  misc_feature (1)..(405): n is a, c, g, or t
ttgcagtcggcggacggaataattctcggaagccccgtctactacggcggcgtcgcaggaacgttcaaatgcttcctagaccgcctcttcttcgccggcctcaaaatgccctttaaggtcggcgcaaccgtcgtctccctaagacgaagcggcggcatatccgttttccaccaactcaacaactacttcaacctcgccgaaatcataatcacccccggcgtctattggaacatcatgcacggaaacagcgcccacgaaacgctggaagaccaagaaggccagcagatcatggagatccaaggccgaaacatggcgtggctgatcaaaacgcttgatgccggaaagagcatcgttccaatgcctaaaccggtggacgagcggaagaggacgaattttatacattga

SEQ ID NO: 21902 - protein, 134 aa, Unknown
  Obtained from environmental sample
  misc_feature (1)..(134): Xaa is any amino acid
MQSADGIILGSPVYYGGVAGTFKCFLDRLFFAGLKMPFKVGATVVSLRRSGGISVFHQLNNYFNLAEIIITPGVYWNIMHGNSAHETLEDQEGQQIMEIQGRNMAWLIKTLDAGKSIVPMPKPVDERKRTNFIH

SEQ ID NO: 21903 - DNA, 858 bp, Unknown
  Obtained from environmental sample
  misc_feature (1)..(858): n is a, c, g, or t
ttgcggctaacgacgcgctacgggaagccgcggctttcgaaaattgattttgatacggacatagtcgccgcctcaaaatacgccgaaggcggaggtattacagagcgccacctgctggcggcaatcgcgaaaaaattgatcctgaaatacggcaagggcttgggtattgccgctgggcttgagacatcgttggggattacagttgcgtcaaaaaccgccgtctcgcttgcggattctgataacccgcattatttgtacgatttgctgggcgtgttgaaatcggaattcctgccgcgaatttacatccagcccgatgaaagcgaatgtatacccgcacggcaggtaacggctttcgcggaatctgtcggcgcgatctccgcttacgcttacctgggcgatgtgggggaatcgcccaccggagacaaaaaggctgagaaattcgaggatgattatatagaagaacttttcgcggaattgtcccgcctgggctacagggctgtcgcctatatgccgcccaggaacactgcggaacagcttcgcagagtgcggcggttttgcgcagaatggggctttatggaaatttccggcgttgacatcaacagttcgcgccagtcgtttaactgccccgaagttttgcgggatgaatcccgccacctgctggacactacctgggcgcttattgctcacgagcggcttgcctcgatagacaggcgctttggccttttctctaaagagaatccgctggcaggcgcaagcctttcccggcggcttgccgtgtatgccgaagcgggaaaaaaactcgatctttttcaccctgacgaatcagccgctggaatagcggcggaaataggggagtaa

SEQ ID NO: 21904 - protein, 285 aa, Unknown
  Obtained from environmental sample
  misc_feature (1)..(285): Xaa is any amino acid
MRLTTRYGKPRLSKIDFDTDIVAASKYAEGGGITERHLLAAIAKKLILKYGKGLGIAAGLETSLGITVASKTAVSLADSDNPHYLYDLLGVLKSEFLPRIYIQPDESECIPARQVTAFAESVGAISAYAYLGDVGESPTGDKKAEKFEDDYIEELFAELSRLGYRAVAYMPPRNTAEQLRRVRRFCAEWGFMEISGVDINSSRQSFNCPEVLRDESRHLLDTTWALIAHERLASIDRRFGLFSKENPLAGASLSRRLAVYAEAGKKLDLFHPDESAAGIAAEIGE

SEQ ID NO: 21905 - DNA, 384 bp, Unknown
  Obtained from environmental sample
  misc_feature (1)..(384): n is a, c, g, or t
atggccgagaatctggacgagacgatcaaattctacgaagatgttttgggcgttaagtgcaacggcacggaaacagtcgccgaccaaaaggttaaggtcgctttttttccggtgggagataccgagcttgagtttctggagtccacaagtgaggacggccccatagccaggtttatcgaggcgaataagggcagaggcggcattcagcacattgcagtgcgggttggcgatgtccgtgcggccattggagaactgaagtcaaaaaacgtaggcatgatcgacgaagaaccgcgctacggcgcaggtggagcttcaatcgcattttgtcaccccaagtccacaggcggtatactgctggaattgtgcgaaaggaaaaccacgtaa

SEQ ID NO: 21906 - protein, 127 aa, Unknown
  Obtained from environmental sample
  DOMAIN (1)...(121): Glyoxalase/Bleomycin resistance protein/Dioxygenase superfamily
  misc_feature (1)..(127): Xaa is any amino acid
MAENLDETIKFYEDVLGVKCNGTETVADQKVKVAFFPVGDTELEFLESTSEDGPIARFIEANKGRGGIQHIAVRVGDVRAAIGELKSKNVGMIDEEPRYGAGGASIAFCHPKSTGGILLELCERKTT

SEQ ID NO: 21907 - DNA, 897 bp, Unknown
  Obtained from environmental sample
  misc_feature (1)..(897): n is a, c, g, or t
ttgatggcgttagctgaaaaaaatagaaatattgtcgtgctggaagccgaccttatgagctgtacaaacaccggcattttcaaaaaaacatatcccgatcgttttattaactgcggcatcgcggaggcgaacatggtcggcatagcttcgggtctttccactctgggaaaaatcccgttcgcggccggcttcggctgtttttcatcgcggcgggtattcgatcaatttttcctttccgccaactacgcgcgtcttaacgtaaagttaacaggcaccgacccgggcgtaaccgccgcctttaacggcggaacccacatgccctttgaggaacttgctctgatgagggttgtccccggtttaacagttcttgagccgtcggaccccgcatcctgcgccgcctttgtccgtcttatggcggaagaatacggatgtcactatctgcgtattccgcgcaagcctgttccgtacctgtatcctgaaaccgaagtttttaaattcggcaaggctaaagttttaaaagagggaaaagacttatgctttatggcgcttggcagtctcatggtgaaccagtcgctgaaagcggcagaaaccctcgccgcgagcggcataagcgcgggagtgcttgacattctgtgcttaaagcccattgatcgtgacgcgatacttgaacaggcgggaaaagtgcgcgctgttataagcgcggagaacgcccaaatagcgggaggtcttggcagcgcagttgcggaaattctcgcggagaacgggtgcaagtgtaagtttgcgcgcataggcatccgcgacgagttcggcgaagtaggtacgcaggattatcttgttgaccgttacggtcttgatgtgggaagccttgtgaaaaaagcgcaagaattgcttgcctaa

SEQ ID NO: 21908 - protein, 298 aa, Unknown
  Obtained from environmental sample
  DOMAIN (1)...(157): Transketolase, pyridine binding domain
  misc_feature (1)..(298): Xaa is any amino acid
MMALAEKNRNIVVLEADLMSCTNTGIFKKTYPDRFINCGIAEANMVGIASGLSTLGKIPFAAGFGCFSSRRVFDQFFLSANYARLNVKLTGTDPGVTAAFNGGTHMPFEELALMRVVPGLTVLEPSDPASCAAFVRLMAEEYGCHYLRIPRKPVPYLYPETEVFKFGKAKVLKEGKDLCFMALGSLMVNQSLKAAETLAASGISAGVLDILCLKPIDRDAILEQAGKVRAVISAENAQIAGGLGSAVAEILAENGCKCKFARIGIRDEFGEVGTQDYLVDRYGLDVGSLVKKAQELLA

SEQ ID NO: 21909 - DNA, 864 bp, Unknown
  Obtained from environmental sample
  misc_feature (1)..(864): n is a, c, g, or t
ttgtcggagtaccacaggaaagacggctcccgtaaaattgcgggaagaccgggaacgagaataaaaaatagagggaaaaaaatgagccggatgcgcggaataaatataggcggatggttaagccagattgacgctatacaggaaaaagaccccgataaatttccggggatagacaagcacatggaaacatttatcggcgcgggggattttgacaatgtgaaaaattggggctttgatcatgtgcgtatccctgttgactcatacctgttttttaccgaagaagaacagccgcttgaaaacaggtttgttcatcttgataacgccgtaaaatacgctaagcaaaacggccttaaatttatattggacctgcatgagtgtccggggcacgatttttccgaagcggctaaaactcccgttcaaaaacttttctccggcgatgatacctatatcaaaaaaaccgaaaaaatctgggcatatcttgcggagcgttacgcgggcaatgatcatgttctgtttgaaacgcttaatgagcctgtcgcccctgctcctgagatttggaacaatgtaaaggacaggctctgccgcgaaatacgcaaacacgcgcctaaatcaacgataataaccggttccaatatgtggaacgttccgggtacattcaacttccttactccctttgacgacggcaacatgatctactgcgtgcatttttacgagccgcttctttttactcaccagaacgcgccatggatcgataatcctgaaattaaaatcccaagaccgtaccccggcgattacngtcccggtcttgtccgcaatacngacatgcgcattcggacggcgtttgggataaacagcggcttataa

SEQ ID NO: 21910 - protein, 287 aa, Unknown
  Obtained from environmental sample
  DOMAIN (46)...(286): Cellulase (glycosyl hydrolase family 5)
  misc_feature (1)..(287): Xaa is any amino acid
MSEYHRKDGSRKIAGRPGTRIKNRGKKMSRMRGINIGGWLSQIDAIQEKDPDKFPGIDKHMETFIGAGDFDNVKNWGFDHVRIPVDSYLFFTEEEQPLENRFVHLDNAVKYAKQNGLKFILDLHECPGHDFSEAAKTPVQKLFSGDDTYIKKTEKIWAYLAERYAGNDHVLFETLNEPVAPAPEIWNNVKDRLCREIRKHAPKSTIITGSNMWNVPGTFNFLTPFDDGNMIYCVHFYEPLLFTHQNAPWIDNPEIKIPRPYPGDYXPGLVRNTDMRIRTAFGINSGL

SEQ ID NO: 21911 - DNA, 486 bp, Unknown
  Obtained from environmental sample
  misc_feature (1)..(486): n is a, c, g, or t
atgctaattgatgacattctcgcattggcaataacttacaacggaaatgacgtgaagcgcgtcaatcatttaattaaagttttttcatttgcccgtcatatcggcattatggaaaaatgtgatatgaaaacacaggaaattatagatatttccgcgatactccatgatattggcattcatgaagcggaacggaaacataattcaagcgccggaaactggcaagaaatcgaaggccctccggttgccgatgaacttttgaagaatttcaatttagatgatgttattaaagacagaatattatttcttatcggacaccatcatcaatataatagtattgatggcatggattttcaaatactgattgaagctgattttttggtaaatatttttgaggatggaatggacgtacactcaattaacagcgtcaaagaaaaaatattcaaaacaaaaaccggcataaatttactggagaagttatatttatag

SEQ ID NO: 21912 - protein, 161 aa, Unknown
  Obtained from environmental sample
  misc_feature (1)..(161): Xaa is any amino acid
MLIDDILALAITYNGNDVKRVNHLIKVFSFARHIGIMEKCDMKTQEIIDISAILHDIGIHEAERKHNSSAGNWQEIEGPPVADELLKNFNLDDVIKDRILFLIGHHHQYNSIDGMDFQILIEADFLVNIFEDGMDVHSINSVKEKIFKTKTGINLLEKLYL

SEQ ID NO: 21913 - DNA, 741 bp, Unknown
  Obtained from environmental sample
  misc_feature (1)..(741): n is a, c, g, or t
ttggaaagcgaactgtttgggcatgtaaagggcgcctttaccagcgcggtttcaaaccgccaggggcgttttgagctggcggatgggggaaccatttttctggacgaaatcggcgatttgcccttgtcattacaggcaaaactgctcagggttattcagcaaaagacttttgaaaaactggggtctgatgtctcacaaacggtgaatgtacgcatcctggcggcaaccaacaaagatatagaggcattggtggaaaaggaacaattccgaagcgatctttattaccgcctgaacgtgctgcccatatacatcccgcccctcagacagcgtcaggaagacatccctgaattggccctttttttcctttcaaaatttatgaaggaaacaaaaaagcaattcgaaggtttttctgacgaggcgctgcaggccatgatttcctattcctggccgggaaatatccgtgaacttgagaacagcgtggaacgggcatgcgtactcggcagggataaatggattcaaaagagcgatttatttcttaacccctccatttccgcggctgaacaggaaaacagggatcggagtttaaaaaatgccgttaatgtctttaaggccagttttatccgcaatgtgctggaggaaaacaactggaaccaaaccgattctgccagaatccttgatatacagcggacctatttatcgcgattgataaaagagttagatattattaatccaaaagagtaa

SEQ ID NO: 21914 - protein, 246 aa, Unknown
  Obtained from environmental sample
  DOMAIN (1)...(157): Sigma-54 interaction domain
  misc_feature (1)..(246): Xaa is any amino acid
MESELFGHVKGAFTSAVSNRQGRFELADGGTIFLDEIGDLPLSLQAKLLRVIQQKTFEKLGSDVSQTVNVRILAATNKDIEALVEKEQFRSDLYYRLNVLPIYIPPLRQRQEDIPELALFFLSKFMKETKKQFEGFSDEALQAMISYSWPGNIRELENSVERACVLGRDKWIQKSDLFLNPSISAAEQENRDRSLKNAVNVFKASFIRNVLEENNWNQTDSARILDIQRTYLSRLIKELDIINPKE

SEQ ID NO: 21915 - DNA, 900 bp, Unknown
  Obtained from environmental sample
  misc_feature (1)..(900): n is a, c, g, or t
atggccgccgcggcacggctgctaaaaaacacccggcctacagcaagcaatctggcttgggctgtagacagaatggccgccgccggttattcggggactttggaacaaaagacagaaaaggcgcgaactgaagctcagaaaatcgccgacgaggacgcggaacattgcaggcgtatcgggcagcacgggcttgaacttataaaaaagatcgccctgggtaaaaacggcgaacctgtccgcgtcctgacacattgcaacgcgggatggcttgcttttgtagattacggcacggctctttcgcctgtgtacgcggcttttgacgaggggattaaagtgcatgtgtgggttgatgaaacccggccccggaatcagggggcgtttcttaccgcgtgggagctcggtcagcacggggtaagccatgatctcattcccgacaatgccggggggcatcttatgcagcatggcatggttgatatcgtaataacaggcgcagatcgcgtaacacggcagggagacgcggcaaataaaatcggcacataccttaaagctttggcggcaaaagaaaacaatgtgccgttttatatcgccctgccttcgtcaacttttgattttgccatgcgcgacggggttaaggaaattccgattgaagagagggacgcttcggaagtaagatacatcgccggaaaaacagcggaaggcaaaatagagaccgtgcaaatttgtcccgattcgacaacggcgcggaactggggctttgatgtcactcccgctcgctatatcagcggtcttattaccgagagaggaatttgccgcgccgatgaaaaagaaatactcgctttatactctgagtatgcgggcgtacctcaaacgaaactgcccgctacactcggccgaatctga

SEQ ID NO: 21916 - protein, 299 aa, Unknown
  Obtained from environmental sample
  DOMAIN (1)...(274): Initiation factor 2 subunit family
  misc_feature (1)..(299): Xaa is any amino acid
MAAAARLLKNTRPTASNLAWAVDRMAAAGYSGTLEQKTEKARTEAQKIADEDAEHCRRIGQHGLELIKKIALGKNGEPVRVLTHCNAGWLAFVDYGTALSPVYAAFDEGIKVHVWVDETRPRNQGAFLTAWELGQHGVSHDLIPDNAGGHLMQHGMVDIVITGADRVTRQGDAANKIGTYLKALAAKENNVPFYIALPSSTFDFAMRDGVKEIPIEERDASEVRYIAGKTAEGKIETVQICPDSTTARNWGFDVTPARYISGLITERGICRADEKEILALYSEYAGVPQTKLPATLGRI

SEQ ID NO: 21917 - DNA, 450 bp, Unknown
  Obtained from environmental sample
  misc_feature (1)..(450): n is a, c, g, or t
atgcctcttatccgatatttcctggtaatttggacttttttcgttgtttacacgttcttttccttttttcttggacagaacggcgtgtacgcccgaaaacacatggaggctgaacgcgtaaggctgtatgaaaacttgaagaaacttgaaaatatcaacacagattatcaaaatatcaagaacaacctggccggagatcaggattcgctttccgtttatgcccggcagcttggttacggcagggaaggggaggaatatatacgtattatggggcttggtatttcgataaacaccgatatgcccacgggccaggtttcttataccgtaagccctgtttttgtctctgatacaacaattaagattatatccctgctgttcgcattggctgtctttgcctttctccttttccgcgatttctgcattaatgcaattctttcccacagggattaa

SEQ ID NO: 21918 - protein, 149 aa, Unknown
  Obtained from environmental sample
  DOMAIN (14)...(92): Septum formation initiator
  misc_feature (1)..(149): Xaa is any amino acid
MPLIRYFLVIWTFFVVYTFFSFFLGQNGVYARKHMEAERVRLYENLKKLENINTDYQNIKNNLAGDQDSLSVYARQLGYGREGEEYIRIMGLGISINTDMPTGQVSYTVSPVFVSDTTIKIISLLFALAVFAFLLFRDFCINAILSHRD

SEQ ID NO: 21919 - DNA, 621 bp, Unknown
  Obtained from environmental sample
  misc_feature (1)..(621): n is a, c, g, or t
atggaggacgtattagaggtctataaacgtccgtatgatgaaaaaaaaccggtagtttgccttgacgaggccaaccggcagctcattgatgaaatgctgagccctcggcctgtccagtctggacaggctgccttatatgactacgaatatgtgcgcaatggggcagccaatctctttatgatgttcgagccgcttgtcgggcggcgcgaagtgaaagcaacggaacggcgtaccggaaaagatttctcaggctgcctgaaagaattggcagaaatacaatatccagacgctgaaaaaatagtgcttgtcatggacaatctgaatacccatacgctcgcttctttgtactccgcatttgaaccggaagttgctttgcgccttgcccaacgcttcgaaatccatttcacccccaagcatggttcctggcttaatatggctgagctggaaataggggcaatgagccggcaatgcctaaaaaggagaataccgactgttgaaaagatggccggtgaagtacaagcctgggttaccgaacggaacaatcaaagaaccaccgttcactggcagttcaccaccgccgatgcacgcattaagctgagacacttgtacccgaaattttaa

SEQ ID NO: 21920 - protein, 206 aa, Unknown
  Obtained from environmental sample
  misc_feature (1)..(206): Xaa is any amino acid
MEDVLEVYKRPYDEKKPVVCLDEANRQLIDEMLSPRPVQSGQAALYDYEYVRNGAANLFMMFEPLVGRREVKATERRTGKDFSGCLKELAEIQYPDAEKIVLVMDNLNTHTLASLYSAFEPEVALRLAQRFEIHFTPKHGSWLNMAELEIGAMSRQCLKRRIPTVEKMAGEVQAWVTERNNQRTTVHWQFTTADARIKLRHLYPKF

SEQ ID NO: 21921 - DNA, 402 bp, Unknown
  Obtained from environmental sample
  misc_feature (1)..(402): n is a, c, g, or t
ttgttccgttcggtaacccaggcttgtacttcaccggccatcttttcaacagtcggtattctcctttttaggcattgccggctcattgcccctatttccagctcagccatattaagccaggaaccatgcttgggggtgaaatggatttcgaagcgttgggcaaggcgcaaagcaacttccggttcaaatgcggagtacaaagaagcgagcgtatgggtattcagattgtccatgacaagcactattttttcagcgtctggatattgtatttctgccaattctttcaggcagcctgagaaatcttttccggtacgccgttccgttgctttcacttcgcgccgcccgacaagcggctcgaacatcataaagagattggctgccccattgcgcacatattcgtag

SEQ ID NO: 21922 - protein, 133 aa, Unknown
  Obtained from environmental sample
  misc_feature (1)..(133): Xaa is any amino acid
MFRSVTQACTSPAIFSTVGILLFRHCRLIAPISSSAILSQEPCLGVKWISKRWARRKATSGSNAEYKEASVWVFRLSMTSTIFSASGYCISANSFRQPEKSFPVRRSVAFTSRRPTSGSNIIKRLAAPLRTYS

SEQ ID NO: 21923 - DNA, 894 bp, Unknown
  Obtained from environmental sample
  misc_feature (1)..(894): n is a, c, g, or t
atgatagtccgttaccggcagaaccagaaccagaacaccgagaatcgcggctatatggattatcagaactggcgcgaagcttatgaaggcgccgccatccatacggctgttcttcaggagatgaagaatgccggttataccgcccccgtaaaaaaagttgacagggaagtggcggcgctgcccgagtaccaggagaacgggcgtttttcaccgactctttacaagcggaaggataacaattcgcgcctgtcccagtggcgccaggtgcaggaagaaattgccgagaaacatttccgcgcggatgttaccgggcttctcaagccgtccgccgaggccgagtttatcggtaaaatggaagcccgccagcgcagtttcaagatgacgttttttaacgtgaacgaatatcctgacgaagaatatgaggcctatgcccgtgataattcaaacctgtttcgcagcatacatctttcaagggtgacgcttagttcaagcgaacgggaagcgcggcaggtgcttgattcgatcaagaacggcgaaaccacttttgaagacgcggcaagggcccattccaaggatgttgagtacgccgacaagggaggggacatgggaatgaaaatgtactatgaattgaacaaaaaagatgaaattcccgaagaagaaacgcgtgatattgtattttcactcgcgaagggcgattacagcaatgtgataaagacagacgccgggtggttcttcttccgctgcgaggaaccggcgcaggaagccgatttatccgatccggcggttatggcaaaagtaaaatactatctgcgtgaatatgagtacagccgcatggagaactgggcgatagagaaggcgaatagttttatcgcgcttgttacgaacatggtttga

SEQ ID NO: 21924 - protein, 297 aa, Unknown
  Obtained from environmental sample
  DOMAIN (161)...(250): PPIC-type PPIASE domain
  misc_feature (1)..(297): Xaa is any amino acid
MIVRYRQNQNQNTENRGYMDYQNWREAYEGAAIHTAVLQEMKNAGYTAPVKKVDREVAALPEYQENGRFSPTLYKRKDNNSRLSQWRQVQEEIAEKHFRADVTGLLKPSAEAEFIGKMEARQRSFKMTFFNVNEYPDEEYEAYARDNSNLFRSIHLSRVTLSSSEREARQVLDSIKNGETTFEDAARAHSKDVEYADKGGDMGMKMYYELNKKDEIPEEETRDIVFSLAKGDYSNVIKTDAGWFFFRCEEPAQEADLSDPAVMAKVKYYLREYEYSRMENWAIEKANSFIALVTNMV

SEQ ID NO: 21925 - DNA, 741 bp, Unknown
  Obtained from environmental sample
  misc_feature (1)..(741): n is a, c, g, or t
atgcgttttttaaatatttctattatcattcttctccttctgaccgcctgtacaaagcgtgaagctgttaaccaagaaaataatatggttaacgaacctaaaaaagagattacaattgacgagatttacgagaaatggctgagagcgacggaaattgccgcttctcttgacgaccgtctgcttgcggctcaggttctaatcagcgggattgagggcaaagggagtttaaactcaaacatagcaagcctgttaagcgaattcccgacgggcgggattatgcttttcaagtacaatcttgacacggacaacgattcaatccgttccctgattaatcaaaccgccgcgcttgtaaacaacgagtcaggcatttcgccgtttatagcggtagatcatgagggcggcacagtaaaccgtttcaggcgcggtacggccgacttgccggacgcttcctcttattgggaactttcgcttaaacaggacaggcagacaagttttaataaaatagaaaatgacagtttaagagcgggcaaggaattaaaaagcttaggtatcaatgtaaatttcgcccccgtggcggaatatttaaatgacgagaaccgtgtctttttaagccgccgttcttacgggcccgatccgcttttcacggcaaacgctgcgcaggcctttatcatgggaatggaacaggctggaatcttatgcgtaatcaaacatttcccggcatgcaggctcggccgatcctga

SEQ ID NO: 21926 - protein, 246 aa, Unknown
  Obtained from environmental sample
  SIGNAL (1)...(22)
  misc_feature (1)..(246): Xaa is any amino acid
MRFLNISIIILLLLTACTKREAVNQENNMVNEPKKEITIDEIYEKWLRATEIAASLDDRLLAAQVLISGIEGKGSLNSNIASLLSEFPTGGIMLFKYNLDTDNDSIRSLINQTAALVNNESGISPFIAVDHEGGTVNRFRRGTADLPDASSYWELSLKQDRQTSFNKIENDSLRAGKELKSLGINVNFAPVAEYLNDENRVFLSRRSYGPDPLFTANAAQAFIMGMEQAGILCVIKHFPACRLGRS

SEQ ID NO: 21927 - DNA, 903 bp, Unknown
  Obtained from environmental sample
  misc_feature (1)..(903): n is a, c, g, or t
ttgctggaagggcttgaagcgggcgatatagattttaccggcgaattaatgttcacccatgaacgccgaaaaacttatttcatgacaagcccaaccgtagaacgtttaatgaaagtctaccgtatcagggacagagctccgcttcacctgtatccgcagcgtgaagtaagatatgcctttttgcaaggctcggtattgaacgccgatgttattgaaaatatagggtacgaatttaaaactgtttttgttgataattataataccgcttaccgtatgcttaaaagcggcgaggttgacgcttttttcggcatggatacgtcggatgtcgcttttaaggcgtttgacgatgttgttgccgaggatttttatccgttgatatttaagtcagcctgtctgtcaacacagaaggcggaacttgagcctatcatcaccgctctggataaggtgttagacgaaaagactcttagctatcttgccgatctgtacaaagaggggaattggaagtatctggaaaacaaactgtataaccagttaacagcggaagaaaaagtgtatatacaaaaaaatcctgttatacccgtaacagcggaaaccgacaattatcctatttgttttttagataccaacacaaatgaatggcagggaatatattttgacacgcttgatgaagttacaaggctgacaggacttaaatttaagccggcaaatgatcaggatacgcagaatcatgatttgattgaaatgcttgaaaaaggcgaaaccttgattattcctgaattgttccgcctaaaagagtatgaggaccgttttttatggtcggaaactccgcttatacaggatacttacgcttttttgtctaaatcagattttagaaacatcgaaataagccaaatcattatttaa

SEQ ID NO: 21928 - protein, 300 aa, Unknown
  Obtained from environmental sample
  misc_feature (1)..(300): Xaa is any amino acid
MLEGLEAGDIDFTGELMFTHERRKTYFMTSPTVERLMKVYRIRDRAPLHLYPQREVRYAFLQGSVLNADVIENIGYEFKTVFVDNYNTAYRMLKSGEVDAFFGMDTSDVAFKAFDDVVAEDFYPLIFKSACLSTQKAELEPIITALDKVLDEKTLSYLADLYKEGNWKYLENKLYNQLTAEEKVYIQKNPVIPVTAETDNYPICFLDTNTNEWQGIYFDTLDEVTRLTGLKFKPANDQDTQNHDLIEMLEKGETLIIPELFRLKEYEDRFLWSETPLIQDTYAFLSKSDFRNIEISQIII

SEQ ID NO: 21929 - DNA, 660 bp, Unknown
  Obtained from environmental sample
  misc_feature (1)..(660): n is a, c, g, or t
ttggagggtacggggcttaaactgcgcgaatgttacgggcaaacggaactgaccgtaacgctttgcacatatccgtggctgaaaccgaaacccggctcaatgggaagaccggcgcccggttacgacattgatcttgtgctggaagacggaacttcatgcaaaatgggcgaggaaggagagatcgtagtccgcacggacaaacgcaagccgtggggaatgttcagcggctattaccgcgacgacgatcttaccgcgagcgtgtggcatgacgatgtctattacacgggcgatgtcgcatggaaagacgaagacggctacttctggtttgtcggcagaaatgacgacgtgatcaaaagctccggctaccgcattggccccttcgaggtggaaagcgcccttatggaacatcccgcagtgcttgaatgcgcgataaccggcgtcccggatgaggatcgcggagcggtagtaaaagcgacggtaatactcgcaaagggatttgaagcttcagaagagctaaaagttgaattgcagaatcatgtgaagaagacaaccgcgccttacaagtatccgcgaattattgaatttgtagacgaacttcccaaaaccataagcggaaaaatccgcagagtgcagattcgggatgaagataaaaccaaatga

SEQ ID NO: 21930 - protein, 219 aa, Unknown
  Obtained from environmental sample
  misc_feature (1)..(219): Xaa is any amino acid
MEGTGLKLRECYGQTELTVTLCTYPWLKPKPGSMGRPAPGYDIDLVLEDGTSCKMGEEGEIVVRTDKRKPWGMFSGYYRDDDLTASVWHDDVYYTGDVAWKDEDGYFWFVGRNDDVIKSSGYRIGPFEVESALMEHPAVLECAITGVPDEDRGAVVKATVILAKGFEASEELKVELQNHVKKTTAPYKYPRIIEFVDELPKTISGKIRRVQIRDEDKTK

SEQ ID NO: 21931 - DNA, 840 bp, Unknown
  Obtained from environmental sample
  misc_feature (1)..(840): n is a, c, g, or t
ttgaggaanaaaggggggggggggggggggnnnnnnnaaggggcgcgaaaaaaaaaaggttgtttttcgaatgtattttacggcgagaccttcgggcttgtgggcgaatccggttcgggtaaaaccacaattggccgcgcgattattcgggtaaaccctaccagccgcggcgatattttctttaaaggcgagaagataaacggcaagattacaaaaaaattggacagaaagattatttcacagatacagatggtctttcaggaccctatggcttcgttaaatgatcgcgccaaggtggattacattgtttcggagggattgcagaacatagagaagcggcttccggcaaaagagcggcgcttaagggtggccagcactcttggagatgtagggcttttggcggaattcgctagccgttttccacacgagttttcaggcggacagcggcaaagaataggtatagcgagagcgctgataatgaatccttcttttattatcgccgatgagcctatctccgcgttggatgtatccatacgcgcccaggtgttaaatctgctgtctaaactgcaaaaagagcatcatcttacgattctgttcatttcccacgatctgtccgttatgcgctttataacggatcgcatagctgttttacacaagggcgtgcttgttgagctggcggaaaccgaaaaattattcgccaacccgctgcatccttacacaagggccttgcttgccgccgtaccgctgccaaatcccactaaagaaaagaaaaaaaccctgatggtatatgatccatcctgccacgattattccgtggataaaccgtttggaacgaaatga

SEQ ID NO: 21932 - protein, 279 aa, Unknown
  Obtained from environmental sample
  DOMAIN (223)...(275): Oligopeptide/dipeptide transporter, C-terminal region
  misc_feature (1)..(279): Xaa is any amino acid
MRXKGGGGGGXXXGARKKKGCFSNVFYGETFGLVGESGSGKTTIGRAIIRVNPTSRGDIFFKGEKINGKITKKLDRKIISQIQMVFQDPMASLNDRAKVDYIVSEGLQNIEKRLPAKERRLRVASTLGDVGLLAEFASRFPHEFSGGQRQRIGIARALIMNPSFIIADEPISALDVSIRAQVLNLLSKLQKEHHLTILFISHDLSVMRFITDRIAVLHKGVLVELAETEKLFANPLHPYTRALLAAVPLPNPTKEKKKTLMVYDPSCHDYSVDKPFGTK

SEQ ID NO: 21933 - DNA, 729 bp, Unknown
  Obtained from environmental sample
  misc_feature (1)..(729): n is a, c, g, or t
gtggcaggtaaacggtggctggaagcgcatgcggcggagtacgcatggcttaaaccgacgcttttaggggacgatttgtactcgaaccggccattttgcgagaaaatcgttggggaggggtggagttttatctttacctgcaaggaagaatcgcaccaatggcttatggaagaggtaaccaactcctttatgcatgaggtgaaggaagaaaaatgggattcaaagaagaaaaaacgagtgacctatacctggaaatacctgaatggagtgcctatccgatatgacgaacgcgacccgtttatggtgaactatttcagtttggaaatacgagcggaaggggcgaagaaaccgagctatttcaacagctggataaccaacaaaacgataacagacaagaatgttgcgtaccttgccgaatgcgggcgtgcccggtggaagatagaaaacgaacaccacaatgtgcttaagaaccgtggttataatcttgaacataattttggacatggaagcaaccatgctgctgatatttttttccttttgaacatattgtcattacaatttcacacgatacttgaatactgcgacgtggagtatcagatgacgtattcgatattccccgtgagagtagcattttttgaagccttgcgggtattaatacgccgccgatactttagctcctggccagaattcctgcaatatgtcaggggtaaagatgatgggcctttgtaa

SEQ ID NO: 21934 - protein, 242 aa, Unknown
  Obtained from environmental sample
  misc_feature (1)..(242): Xaa is any amino acid
MAGKRWLEAHAAEYAWLKPTLLGDDLYSNRPFCEKIVGEGWSFIFTCKEESHQWLMEEVTNSFMHEVKEEKWDSKKKKRVTYTWKYLNGVPIRYDERDPFMVNYFSLEIRAEGAKKPSYFNSWITNKTITDKNVAYLAECGRARWKIENEHHNVLKNRGYNLEHNFGHGSNHAADIFFLLNILSLQFHTILEYCDVEYQMTYSIFPVRVAFFEALRVLIRRRYFSSWPEFLQYVRGKDDGPL

SEQ ID NO: 21935 - DNA, 330 bp, Unknown
  Obtained from environmental sample
  misc_feature (1)..(330): n is a, c, g, or t
atgccctggcgtttaattgaatttatcattctttttgcgattcttttcctgtttattatttttaacctggaaaacaagtgcaatattaattttggcttcaaatcgtacccggatgttccggtatttcttaccgtgttttcttcattttttatcggtatgctgtgcacccttccctttatctttgcttccaaagcgcggaaaaaggcaaaaattgcccatgaaaaagggttattggccaaagcgtcaaaaaagcaaaaacaggataaaaattccggcggaaattccgcagactcaggtctttttgacaaaaatcactatgggattgattaa

SEQ ID NO: 21936 - protein, 109 aa, Unknown
  Obtained from environmental sample
  misc_feature (1)..(109): Xaa is any amino acid
MPWRLIEFIILFAILFLFIIFNLENKCNINFGFKSYPDVPVFLTVFSSFFIGMLCTLPFIFASKARKKAKIAHEKGLLAKASKKQKQDKNSGGNSADSGLFDKNHYGID

SEQ ID NO: 21937 - DNA, 594 bp, Unknown
  Obtained from environmental sample
  misc_feature (1)..(594): n is a, c, g, or t
atgtttcgtttatttcttatagattcatctgcgcttgcttttcgtatgttttatgcttatgcaagaaacccgctcaggaatagcaaggggcagcttgtgtcggttttgcacgggtattggggggcaatacttcgcatagtgaaaagccacaaaccggattattttgctattgtgcgcgatgtgtccagaaaaactttcagaaacgagctttattccgaatacaaagcaacccgcgctccaatgccgccggaaatggtggaacaaatgccatacctcaacgaatcccttgaaaaatgcggaataccaattctcggttgcgaaggttttgaagcagacgatgtaatggcatcggtggcaaaacttgcagcgaaaaaaaattacctagtatatttggtgaccaaagacaaagatatggcgcaaattgtaaactctcaaattcacatctatcaaattgaaagcggtgcaaagggaatagatattggcattcagcaggttaaagataagtttggagttagtccagagcaaattgtggattacctcgcccttgtggagattcttccgacaatatacctggggtgcctcggccgattctga

SEQ ID NO: 21938 - protein, 197 aa, Unknown
  Obtained from environmental sample
  SIGNAL (1)...(21)
  DOMAIN (2)...(169): 5'-3' exonuclease, N-terminal resolvase-like domain
  misc_feature (1)..(197): Xaa is any amino acid
MFRLFLIDSSALAFRMFYAYARNPLRNSKGQLVSVLHGYWGAILRIVKSHKPDYFAIVRDVSRKTFRNELYSEYKATRAPMPPEMVEQMPYLNESLEKCGIPILGCEGFEADDVMASVAKLAAKKNYLVYLVTKDKDMAQIVNSQIHIYQIESGAKGIDIGIQQVKDKFGVSPEQIVDYLALVEILPTIYLGCLGRF

SEQ ID NO: 21939 - DNA, 738 bp, Unknown
  Obtained from environmental sample
  misc_feature (1)..(738): n is a, c, g, or t
atgctttcagcaatgtacagggaactcatcccgctggtaaagcccggagtggaaaccatcgagatagacaagtgggtatataactggataaaaaaagccgggggcaagccggcttttcttggggtcgtcgataaaaaaaaaccttatcccgcatcgatctgcatttcaatcaacaacgaggttatccacggtattccttcgaagcggaaaattgctacaggggatctggtttctttggactgcggcattacccttgacggatatataagcgatcaggcaattacccttgaagctggaaaagtcagccccgaggcccataagctaagcacagttacccgcgaatgcctatacgcgggaatccgttccgcaaaatcggggaacaggcttctgaatatttccagggctgtctatgatcacgccatagcttgtggctttggcgtagtgaatcagttctgcgggcacggggtcgggcttgcgcttcatgaggatccgcaaataagcaacatccccaaggggcccaaccccaggctttccgctggtatggttctggcgattgaaccaatgatcaacgcggggacgggcgaagtcgaggttctcaaagacggctggacggtggtaaccgccgacgataggctctccgcccactgggaacacacaatcgccctttttgcggatcatacggagctgctcaccgagcctgtctgcggcgaagatgcgaaagtaatatcagggcaataa

SEQ ID NO: 21940 - protein, 245 aa, Unknown
  Obtained from environmental sample
  DOMAIN (1)...(232): metallopeptidase family M24
  misc_feature (1)..(245): Xaa is any amino acid
MLSAMYRELIPLVKPGVETIEIDKWVYNWIKKAGGKPAFLGVVDKKKPYPASICISINNEVIHGIPSKRKIATGDLVSLDCGITLDGYISDQAITLEAGKVSPEAHKLSTVTRECLYAGIRSAKSGNRLLNISRAVYDHAIACGFGVVNQFCGHGVGLALHEDPQISNIPKGPNPRLSAGMVLAIEPMINAGTGEVEVLKDGWTVVTADDRLSAHWEHTIALFADHTELLTEPVCGEDAKVISGQ

SEQ ID NO: 21941 - DNA, 708 bp, Unknown
  Obtained from environmental sample
  misc_feature (1)..(708): n is a, c, g, or t
atggatcgtttttcgcggcttttgggccttcatgaaaagcccggttatctgatttgcaacaacggcgcacttattttggaaacccataccggaagcactgtgtatgaagcaaaactcgagaaagagacagtcctggcagtctgcaatctggcagacgccgaaggtttcgctcttcagatttacgataacgatattatatatgtgtcccgtctaaatgagtattcagacatagaccaaaggacaaccggcctgcgccaggtagtggttgaaaatttcagagatatggttagccacggctgctataagcttttaataccaggggatcccgagcttctcaaatatatggaaataatcatccgtacttatttggggcagggcttaaccatttttaccagccatccttattttcttgaaataacacccggagatactgacaagggaaccgcgttggggaaagtggcgaagatactgaaagtcaggcaggaacagacgatggccatcggagattccatgaacgacgaagccatgatccgttgggcaggtataggggtggcaatggtaaacggggatgaacgcataaaaagcatggccgatctggttactgagcacacaaatgatgaagacggcgtagcggaaattatcgaaaaatatttttcaattaagccggcgattaaaaacggacaaaatggagggacaaccaatgagtga

SEQ ID NO: 21942 - protein, 235 aa, Unknown
  Obtained from environmental sample
  DOMAIN (1)...(214): haloacid dehalogenase-like hydrolase
  misc_feature (1)..(235): Xaa is any amino acid
MDRFSRLLGLHEKPGYLICNNGALILETHTGSTVYEAKLEKETVLAVCNLADAEGFALQIYDNDIIYVSRLNEYSDIDQRTTGLRQVVVENFRDMVSHGCYKLLIPGDPELLKYMEIIIRTYLGQGLTIFTSHPYFLEITPGDTDKGTALGKVAKILKVRQEQTMAIGDSMNDEAMIRWAGIGVAMVNGDERIKSMADLVTEHTNDEDGVAEIIEKYFSIKPAIKNGQNGGTTNE

SEQ ID NO: 21943 - DNA, 636 bp, Unknown
  Obtained from environmental sample
  misc_feature (1)..(636): n is a, c, g, or t
ttgtttaacgaatatacgcattttaacatggaagccaaccgtacaaccgagggtgcggggcttggaatgactgttacgcgaaatttggtagagcttatgagcgggcagatcagcataaaaagcgcgataggcgaaggaacgacggtgacggtgcgcataccgcaaaaaacgcccggcataggagtgcgcgatttaatcggcaaggaaatgaccgagagccttaagcaattcaagcttggccatgtcgtgcagttaaagaaatcacaggtaaaacatgaatatatgccttacggcaaagtcctgattaccgacgatgttgaaacaaatttatacgtggcgaaagggcttatggccccgtacggtcttaacattgatcttgcgacaagcgggtttgaagccatcgaaaaagtaaagaacgggaacgtttacgacataatctttatggaccacatgatgcctaaactggacggcattgaaacgacaaaaatcatccgcgaaacgggatatacgcagcctattgtcgcgctgacggccaacgctctcgcggggcaggcggaagtgtttttgaaaaacggttttgatgattttatttcccaacccatcgatatcccgccagtaaaacgccgcgcttnataa

SEQ ID NO: 21944 - protein, 211 aa, Unknown
  Obtained from environmental sample
  DOMAIN (98)...(211): Response regulator receiver domain
  misc_feature (1)..(211): Xaa is any amino acid
MFNEYTHFNMEANRTTEGAGLGMTVTRNLVELMSGQISIKSAIGEGTTVTVRIPQKTPGIGVRDLIGKEMTESLKQFKLGHVVQLKKSQVKHEYMPYGKVLITDDVETNLYVAKGLMAPYGLNIDLATSGFEAIEKVKNGNVYDIIFMDHMMPKLDGIETTKIIRETGYTQPIVALTANALAGQAEVFLKNGFDDFISQPIDIPPVKRRAX

SEQ ID NO: 21945 - DNA, 825 bp, Unknown
  Obtained from environmental sample
  misc_feature (1)..(825): n is a, c, g, or t
ttgggacagtaccttgtgcatgacgataaaaatattacggttcttacaaggatagcggacgcctacaggaaggttcgtgattttgccaattcaaaaaaaacatatttgaaagttctggaaatggaagattccaatccttacgcgattataggccttggccacttacattatgattttaaggaatacaacgaggctctttcctattgggaaagaatgttaaacccttcaagtaatgacgttgatatccgggttctaacttcaatcggcaactgccacagaaaactaaaaacatttaaggaaggcataccctattttgaaaccgtattaaaaagggacaacaataacttttacgcgcttttcgggcttgcggactgctaccgcggtttgaatcaaattgaaaattcccttacatattggacccgtattcttgaacaggatccaagaaataaaatgattctgacacgcgccggggacgcataccgcaacttaaaagattttgacaacgccaaagcattttacgaaaaggccctgaacattgaatttgacacttatgctgttatgggacttgcccttattgcgaaagaacagggaaaattcgacgaagccgtaatatcattcaagcggttaattcagcaagacaataaaaatcaccgtctttatacggagcttgccgaatgttatatcaaaatgggcgacaaacgaaaggccgttgaattactggaagagtttcaaaaacttggaataaagaaccaaaggatcgtagaattgctggagtccgcatcagagccgcagcgaagagaaggctcccgctcaaacaatcaatga

SEQ ID NO: 21946 - protein, 274 aa, Unknown
  Obtained from environmental sample
  DOMAIN (116)...(149): Tetratricopeptide repeat
  misc_feature (1)..(274): Xaa is any amino acid
MGQYLVHDDKNITVLTRIADAYRKVRDFANSKKTYLKVLEMEDSNPYAIIGLGHLHYDFKEYNEALSYWERMLNPSSNDVDIRVLTSIGNCHRKLKTFKEGIPYFETVLKRDNNNFYALFGLADCYRGLNQIENSLTYWTRILEQDPRNKMILTRAGDAYRNLKDFDNAKAFYEKALNIEFDTYAVMGLALIAKEQGKFDEAVISFKRLIQQDNKNHRLYTELAECYIKMGDKRKAVELLEEFQKLGIKNQRIVELLESASEPQRREGSRSNNQ

SEQ ID NO: 21947 - DNA, 858 bp, Unknown
  Obtained from environmental sample
  misc_feature (1)..(858): n is a, c, g, or t
ttgcggcagatgccggaaaacgaacttaatattattgacgaagttcagcttgctcctgaacttttccgctattttaaaatcgcaatagatgaaagccgccttgccgggaaaaatcacgctttgtatgtgctgacaggttcggcgaatatattcgccctgccaaagctgtcggacgctcttgtaggaagattgtcgattttaacattgtatcctttttcagcatcggaaataaaaggaacaggagtaaattttcttgataaattatggaaggataaaatgactccccgcaaatatataagggcggatttatccggattaatttccggggcgacttttcctgaaatagcgctggacaagaagaaaaacaggagtcagtggtttaatgattaccttacaacattgcttcagagggatgtccgctctcttgccgatataaaaaatcccgataatgttttcagacttcttgtttcgctttcacagagggccggaagccttttgaataataacaatgtaatgaacgaaaccgggcttgacgcgaaaacatacgaaaaatacaaagctctctgtaataatacttttattgtttttgaactgccttcatggtcaaaaccgaataaacttaacaaaagatttatcaggcagaaaaaactttatttttccgatacctgtttgttgtgccatattctgcagagggacatagaagaaatatataaacacgataaatctgaaatggggcatatatttgaaaattttatcgccgttgaaattatgaaggccgcaaaagcgcatgggggatataatgtgtcgcattataatcctgtgcaaaatcagggaaaggaagtggattttatagtttga

SEQ ID NO: 21948 - protein, 285 aa, Unknown
  Obtained from environmental sample
  misc_feature (1)..(285): Xaa is any amino acid
MRQMPENELNIIDEVQLAPELFRYFKIAIDESRLAGKNHALYVLTGSANIFALPKLSDALVGRLSILTLYPFSASEIKGTGVNFLDKLWKDKMTPRKYIRADLSGLISGATFPEIALDKKKNRSQWFNDYLTTLLQRDVRSLADIKNPDNVFRLLVSLSQRAGSLLNNNNVMNETGLDAKTYEKYKALCNNTFIVFELPSWSKPNKLNKRFIRQKKLYFSDTCLLCHILQRDIEEIYKHDKSEMGHIFENFIAVEIMKAAKAHGGYNVSHYNPVQNQGKEVDFIV

SEQ ID NO: 21949 - DNA, 471 bp, Unknown
  Obtained from environmental sample
  misc_feature (1)..(471): n is a, c, g, or t
gtgtggacgcttttggttaaaatactgcgcggtatgaaatgggttacaatgtattccaaaggcggaacgacaatgataacaaggaaccaggccgcgcaggcaattgcgggcgctttggaaaaaacaaaaggagcgaaacgctggcctataggctgttacaatatgccatggaaagattttctcacaatcgttcataaaaacatgggaatgcctgaaagaatagtaattacaattcccaactggctgattaaaccggaaataaaatatatagaaagcatactgagaaaagacggcgataaaataggacggaaatttaatttatataaatttctggaaatacaaagcgctcaaacctacatagacagagttcacggatgcaacccccttggcgtaaaagacgatgacatagaaaacgcgattggcgagtcgattcgcttgtcggtagaattcttggacagtaaacaaaagtaa

SEQ ID NO: 21950 - protein, 156 aa, Unknown
  Obtained from environmental sample
  misc_feature (1)..(156): Xaa is any amino acid
MWTLLVKILRGMKWVTMYSKGGTTMITRNQAAQAIAGALEKTKGAKRWPIGCYNMPWKDFLTIVHKNMGMPERIVITIPNWLIKPEIKYIESILRKDGDKIGRKFNLYKFLEIQSAQTYIDRVHGCNPLGVKDDDIENAIGESIRLSVEFLDSKQK

SEQ ID NO: 21951 - DNA, 510 bp, Unknown
  Obtained from environmental sample
  misc_feature (1)..(510): n is a, c, g, or t
gtgctccgccacatcggcgagtacgagaaggtcgtggccggcttcgcgctggccgtgggcaacgacaggcgcaacctcttcgacactatccccgtctgccgccccgtccagccgtcgcgctcggtgacgacgagaaagttcggaatgaccttggacccgttcacgagcaaaaacaagatgcactacggggtagacatagcggcggagacgggcacccccgtcgtggccaccgctttgggcgtggtgacgcaggtagacgtcgacccgatctggggcaagcgcgtaacgatcacccacggacgcggtttcaggacggtgtacgcccatttgggcgctattaaagcggtcaagggcaaaacggtgacccgcggcgaggagatagggagtatgggcatgtccggcctgaccaccgggatacacctgcactacgagatatggcgcgacgacaagcagcagaatccggaggagtacttcttccccgaagaaataactgtggccggtacacaataa

SEQ ID NO: 21952 - protein, 169 aa, Unknown
  Obtained from environmental sample
  DOMAIN (59)...(154): Peptidase family M23
  misc_feature (1)..(169): Xaa is any amino acid
MLRHIGEYEKVVAGFALAVGNDRRNLFDTIPVCRPVQPSRSVTTRKFGMTLDPFTSKNKMHYGVDIAAETGTPVVATALGVVTQVDVDPIWGKRVTITHGRGFRTVYAHLGAIKAVKGKTVTRGEEIGSMGMSGLTTGIHLHYEIWRDDKQQNPEEYFFPEEITVAGTQ

SEQ ID NO: 21953 - DNA, 570 bp, Unknown
  Obtained from environmental sample
  misc_feature (1)..(570): n is a, c, g, or t
gtgacggattttataaattatgtcaccagagtacagcagaaagatgacgttggcattatccacatgctggattttaccccttctcctctgtggctggcgaaaaagcggtatctactattaaactaccagataatcgagatcgccctgtaccaggacttatgcgatctcaagtgggttggcgcggccgccaacgacacggctctcttctggtacaagtgcgatgctaatggtacccgtaacgtcaacggtactcactttagggtctccgactggcggggtatattcccccgcggcgctggtgctaatgccgtgctacggactgacatgaacgacccattgtccgcgccttatgatggaaatgtgcttgggagcgtcaatgctgacagattaaagaggcataatcatacggcatcgactatgggctttcggtggggaaataattcgccgcttaatgttctgccgcaagaaaatagttctttttattttatagatgaaacatatatagaatgtagcggcgacatcgaaaccgctcctgtttggggtgcggtgttgtttgtcatctcatattaa

SEQ ID NO: 21954 - protein, 189 aa, Unknown
  Obtained from environmental sample
  misc_feature (1)..(189): Xaa is any amino acid
MTDFINYVTRVQQKDDVGIIHMLDFTPSPLWLAKKRYLLLNYQIIEIALYQDLCDLKWVGAAANDTALFWYKCDANGTRNVNGTHFRVSDWRGIFPRGAGANAVLRTDMNDPLSAPYDGNVLGSVNADRLKRHNHTASTMGFRWGNNSPLNVLPQENSSFYFIDETYIECSGDIETAPVWGAVLFVISY

SEQ ID NO: 21955 - DNA, 666 bp, Unknown
  Obtained from environmental sample
  misc_feature (1)..(666): n is a, c, g, or t
ttgcatactcggtcctacggtagtggaaaaagtactttgcttaaatcaattgcgcgtattattgattaccgaggaagtgttttaataaacggcgaggatataagagtggtttcacgcaaagaattagcgaaaaaaatcgccctgttgagccagaacgcacaggtgttttttccctacacggtttatgagactgtatctttggggcgttatgcgtattcgcaaggctttctaaaaaatctttccaccgcagatagggcggttatcgaagacattttaaaaaaactcgacatttgggacagcaaagactgcatgattgacgaattgagcggcggagaattgcagagagttttcctcgccagaactttagcgcaaagtcccgatttaattttacttgatgagcctagcaatcatctggatttaaaacatcaaattgaactactcaagtttttaaaagcgtgggtcaaggagaacgataaaactttaataagcgtgtttcacgatcttaatctggcgcgtctttttggtgatacggcggttgttttgaataacggaacgttagctgcaagtggaaaaatagaggatgttttaaaaagcgggattttaagcggtgtttacggtgttgatatttgcggctttatgcaggaatcgttggaaaaatggaaatag

SEQ ID NO: 21956 - protein, 221 aa, Unknown
  Obtained from environmental sample
  DOMAIN (7)...(184): ABC transporter
  misc_feature (1)..(221): Xaa is any amino acid
MHTRSYGSGKSTLLKSIARIIDYRGSVLINGEDIRVVSRKELAKKIALLSQNAQVFFPYTVYETVSLGRYAYSQGFLKNLSTADRAVIEDILKKLDIWDSKDCMIDELSGGELQRVFLARTLAQSPDLILLDEPSNHLDLKHQIELLKFLKAWVKENDKTLISVFHDLNLARLFGDTAVVLNNGTLAASGKIEDVLKSGILSGVYGVDICGFMQESLEKWK

SEQ ID NO: 21957 - DNA, 417 bp, Unknown
  Obtained from environmental sample
  misc_feature (1)..(417): n is a, c, g, or t
gtgcgagcctacataactcggcgtattgcaatgcaccactttttttccttctggaatttgcacgtccattatgaacgaagtcaaatcgtctccgatagtctccgacaaacaggttgtgtgcacagctataatatctggattatacatctcaaagatatttttaaccgctgtggtgatattggttttgccaccgaatacagatgcaccttcggtaaaagacgaagaagatgcaacagcaggttctttgaagtggcgagacaacaccattctgtggtaggaacagcaaccttgagagccgtggctgtgcggcatacattttgctacgcccaaagccgcatacattgcaccaacaggttggcaagtcttgcagggatttatccgcaaggcactgcgttcttttacttccttaggggttag

SEQ ID NO: 21958 - protein, 138 aa, Unknown
  Obtained from environmental sample
  misc_feature (1)..(138): Xaa is any amino acid
MRAYITRRIAMHHFFSFWNLHVHYERSQIVSDSLRQTGCVHSYNIWIIHLKDIFNRCGDIGFATEYRCTFGKRRRRCNSRFFEVARQHHSVVGTATLRAVAVRHTFCYAQSRIHCTNRLASLAGIYPQGTAFFYFLRG

SEQ ID NO: 21959 - DNA, 318 bp, Unknown
  Obtained from environmental sample
  misc_feature (1)..(318): n is a, c, g, or t
atgccagctattcatttaacggaagacgcatttaaaaaagcaattcaagccagccagcctgtattagtggacttttgggcaccttggtgcggaccttgcaaagcattgggaccaaccatagacacattaagcgatttatacaagggcaaagcagtggttgcaaaaataaatatagacgatgttccagaacttgctgtggctttggaggttagctccattccaacggttaagatattcaaaaacggagcagaaatagagagcttcaccggagcttttccacagagcaagtaccagaaggttttggaggcaaatctctaa

SEQ ID NO: 21960 - protein, 105 aa, Unknown
  Obtained from environmental sample
  DOMAIN (2)...(104): Thioredoxin
  misc_feature (1)..(105): Xaa is any amino acid
MPAIHLTEDAFKKAIQASQPVLVDFWAPWCGPCKALGPTIDTLSDLYKGKAVVAKINIDDVPELAVALEVSSIPTVKIFKNGAEIESFTGAFPQSKYQKVLEANL

SEQ ID NO: 21961 - DNA, 450 bp, Unknown
  Obtained from environmental sample
  misc_feature (1)..(450): n is a, c, g, or t
atgccagataagtttgaagagctctttcgtttgcaagaagttttaaacgattttgtttttacaaagcaggatttgcgggataaaaacggcaaggtgcttacaatggcagctcttagggagcaggctacgggaactgaaccccttggaccaaacacagaggtcaatcagtggcttcgcaaatacttagaagcgttaacagacgaatcaaaagaactaggcgaagaattgctttggaaatggtggagcaaagacaaattggatatgcagaatataagggttgaaattgttgaccaactgcatttttggctctcgcttgcaatcaccgccggtatggatgccgaaaaggtttttgatatttatgtgcaaaaaaacaaagtaaacatagaacgccaaaacgcagggtacagcaaagataataaaaacgaagcagataataggggtattggctag

SEQ ID NO: 21962 - protein, 149 aa, Unknown
  Obtained from environmental sample
  misc_feature (1)..(149): Xaa is any amino acid
MPDKFEELFRLQEVLNDFVFTKQDLRDKNGKVLTMAALREQATGTEPLGPNTEVNQWLRKYLEALTDESKELGEELLWKWWSKDKLDMQNIRVEIVDQLHFWLSLAITAGMDAEKVFDIYVQKNKVNIERQNAGYSKDNKNEADNRGIG

SEQ ID NO: 21963 - DNA, 636 bp, Unknown
  Obtained from environmental sample
  misc_feature (1)..(636): n is a, c, g, or t
atggtttacgggcaagaaaaaaaagatttcggcccaaaaaaaagttcaccttcaaggaacatatccggggccggcggaagtcggggttcatcagcgatgagggggaccagttgggcatcatgcccctctcgaagccttgagagcggcccgggaggccggcctggacntggtggaggtggccccagaagccgcccccccggtctgtcgggtcatggatttcggccgctacaaataccagttgagcaagaaaagcgccgaatcccgcaaaaaatccacggtcatcgaagtcaaggaaatcaagttccgccccaagaccggcgagcacgattaccagttcaaactgcgcaacattcagaaattcctggccgaaaaaaacaaggtcaaggtttccatgatgttccggggccgagagatagcccacgccgacctgggccagagcctcttggaaagggtgctcaaggacatggccgagaccgcccagatggagcagacccccaagctggaaggccgcagcatggtcatgatcctgatcccgaaatgagcccccggcgcccgcgccttattatgaaaggccgggtttcaatcaaacccggccctcgccccaaaggccgcggggccttggcttcgcggccctga

SEQ ID NO: 21964 - protein, 211 aa, Unknown
  Obtained from environmental sample
  misc_feature (1)..(211): Xaa is any amino acid
MVYGQEKKDFGPKKSSPSRNISGAGGSRGSSAMRGTSWASCPSRSLESGPGGRPGXGGGGPRSRPPGLSGHGFRPLQIPVEQEKRRIPQKIHGHRSQGNQVPPQDRRARLPVQTAQHSEIPGRKKQGQGFHDVPGPRDSPRRPGPEPLGKGAQGHGRDRPDGADPQAGRPQHGHDPDPEMSPRRPRLIMKGRVSIKPGPRPKGRGALASRP

SEQ ID NO: 21965 - DNA, 405 bp, Unknown
  Obtained from environmental sample
  misc_feature (1)..(405): n is a, c, g, or t
ttgagagcggcccgggaggccggcctggacntggtggaggtggccccagaagccgcccccccggtctgtcgggtcatggatttcggccgctacaaataccagttgagcaagaaaagcgccgaatcccgcaaaaaatccacggtcatcgaagtcaaggaaatcaagttccgccccaagaccggcgagcacgattaccagttcaaactgcgcaacattcagaaattcctggccgaaaaaaacaaggtcaaggtttccatgatgttccggggccgagagatagcccacgccgacctgggccagagcctcttggaaagggtgctcaaggacatggccgagaccgcccagatggagcagacccccaagctggaaggccgcagcatggtcatgatcctgatcccgaaatga

SEQ ID NO: 21966 - protein, 134 aa, Unknown
  Obtained from environmental sample
  DOMAIN (1)...(43): Translation initiation factor IF-3, N-terminal domain
  misc_feature (1)..(134): Xaa is any amino acid
MRAAREAGLDXVEVAPEAAPPVCRVMDFGRYKYQLSKKSAESRKKSTVIEVKEIKFRPKTGEHDYQFKLRNIQKFLAEKNKVKVSMMFRGREIAHADLGQSLLERVLKDMAETAQMEQTPKLEGRSMVMILIPK

SEQ ID NO: 21967 - DNA, 717 bp, Unknown
  Obtained from environmental sample
  misc_feature (1)..(717): n is a, c, g, or t
atggcggcccttgaagctttgggaaaaatcggagccgacgaaggcatggacgcggttatagaggctgtttcttcacctgatcccaatgtgcgctcttccgcggtagcggcactggctcccttcgcgggagaagcggctgaaaacgcgatattggacgcattcagggattcttactaccgcacgcgcatgggggcggcgcaggccgcgggagaacgccgcctggaaagcgcggttccctatttgcgctacagggcggaaaatgacgatgtccccaacgtaaaagacgaggcaataaaggccctgggcgcgatcaataatgaggaagcaatgagcactcttgattcgctttttaccgagcggaagaattccgatcgcgtaaggatcatggcggcagatatgcttctgaaaaacaacgcggatgtttacggtagccgcgtatacgccgaaatgggagacgcgaagcttaaaaaccagacggccctgtacaacgggtttatacgggtaatgacaaccgcgaaatccgccactttggaaactacggttctgagcttaattaatggcggcggggtaattgaaaaatcccttgccctggatttgatactggtcaacgaattccgccagctcgcggatgtaatgcgctcgctgttggacgaaaagaaacacagcgcaagtattgcccgncaggcgcaaagtactttggataagcttgggttgtaa

SEQ ID NO: 21968 - protein, 238 aa, Unknown
  Obtained from environmental sample
  misc_feature (1)..(238): Xaa is any amino acid
MAALEALGKIGADEGMDAVIEAVSSPDPNVRSSAVAALAPFAGEAAENAILDAFRDSYYRTRMGAAQAAGERRLESAVPYLRYRAENDDVPNVKDEAIKALGAINNEEAMSTLDSLFTERKNSDRVRIMAADMLLKNNADVYGSRVYAEMGDAKLKNQTALYNGFIRVMTTAKSATLETTVLSLINGGGVIEKSLALDLILVNEFRQLADVMRSLLDEKKHSASIARQAQSTLDKLGL

SEQ ID NO: 21969 - DNA, 678 bp, Unknown
  Obtained from environmental sample
  misc_feature (1)..(678): n is a, c, g, or t
atgatcctgcttaatgacgaaatgttccgggactgttcaaagcagaaggaatttgacgccggtaataatatcgtaatagccgtagccgatggaataggcgggctggataagggagaagcggccagtgaaatggcgttgagcagattaaaagaaattcttgagaaaattcccgatgacttgagcaatcaggaattaaaagaagtattcgatgtgtatactcaggaaacccacaaactaatgtcacagggaatgggaagcaccatagccggactttttatttatcaaggcaaggttttccgtttccatgccggagactcacggatttatctgctgcgtgacggcgggctgcgtaggcttacgatagaccactcgcttaaagaagcaggggggaacccaacagccccttccaatataattaccaacgcattaggtggtgcgggcagcgcgttcatcgaatttgaggaagtcgaacaaccttttttgaataatgacatataccttctgtcttccgacggtctgcatgatcttgtagcccccgatgtaatttccgatacgcttatgctgccgcgaactgaagggttcgaagccgcagaaaaattgttaacgctcgcgaaagagaatggcggaaatgataatatttcaatcgtcaccataaaagtacaggagaaagaaaaatga

SEQ ID NO: 21970 - protein, 225 aa, Unknown
  Obtained from environmental sample
  DOMAIN (2)...(213): Protein phosphatase 2C
  misc_feature (1)..(225): Xaa is any amino acid
MILLNDEMFRDCSKQKEFDAGNNIVIAVADGIGGLDKGEAASEMALSRLKEILEKIPDDLSNQELKEVFDVYTQETHKLMSQGMGSTIAGLFIYQGKVFRFHAGDSRIYLLRDGGLRRLTIDHSLKEAGGNPTAPSNIITNALGGAGSAFIEFEEVEQPFLNNDIYLLSSDGLHDLVAPDVISDTLMLPRTEGFEAAEKLLTLAKENGGNDNISIVTIKVQEKEK

SEQ ID NO: 21971 - DNA, 885 bp, Unknown
  Obtained from environmental sample
  misc_feature (1)..(885): n is a, c, g, or t
atgaaagccgatatcggcaccgacggcgatgatgttctggtggtaaacggccacaagatcaaatgtctttcaggaaaaggtatgacacctgaccaattcccctggaaagacctgggaattgattatgtggtagagtccacaggtatttataccaatgaaaaagcttacggccacattgcagccggagcaaaaaaagtcattatttcagcgcccggcaaatccggcgatgattccaaaccgattaagaccatcgttatgggcgttaatcaggaagaatatgatgcgaagaagcatgatgtactgtccaatgcaagctgcaccacaaactgccttgcgccggtggttcatgtaattcttaaagaaggctttggaattgaaaccggtcttatgaccacaattcactcctatacagctacccagaaaaccgtagacggcgtttcccagaaagactggagaggcggacgcgcggcggctgtaaatatcattccttcaacaaccggagcggcaaaagccgtaggcgaagttcttccttctaccaaaggaaaacttacaggcatgagcttccgcgttcccacacccacaggctcggtagtagacctgacattccgcgccgagaaagacacctctattgaagaaatagataaagccatgaaaaaggcttcagaaagctacatgaaaggcgttctgtcttattgcaacgaagaaatcgtttcatccgacatcgttcacaataccaacacctcaatctatgacagccttgccacacttcagaacaacctcaagggcgaaaaacgtttcttcaaagtcgtttcatggtatgacaacgaatggggttactcaaacaaagtagtagacctgctncaatatatcgacagtaaaaaataa

SEQ ID NO: 21972 - protein, 294 aa, Unknown
  Obtained from environmental sample
  DOMAIN (1)...(106): Glyceraldehyde 3-phosphate dehydrogenase, NAD binding domain
  misc_feature (1)..(294): Xaa is any amino acid
MKADIGTDGDDVLVVNGHKIKCLSGKGMTPDQFPWKDLGIDYVVESTGIYTNEKAYGHIAAGAKKVIISAPGKSGDDSKPIKTIVMGVNQEEYDAKKHDVLSNASCTTNCLAPVVHVILKEGFGIETGLMTTIHSYTATQKTVDGVSQKDWRGGRAAAVNIIPSTTGAAKAVGEVLPSTKGKLTGMSFRVPTPTGSVVDLTFRAEKDTSIEEIDKAMKKASESYMKGVLSYCNEEIVSSDIVHNTNTSIYDSLATLQNNLKGEKRFFKVVSWYDNEWGYSNKVVDLLQYIDSKK

SEQ ID NO: 21973 - DNA, 687 bp, Unknown
  Obtained from environmental sample
  misc_feature (1)..(687): n is a, c, g, or t
atggttgttaacgaagatgactgcggaacaattaacggtattacatattcggcgataaagagcggagaggacataatagagccgttaaaagatcgtataataggaagatttacgctggaacgcgtcaagcacccgataacaggcgaacttattgttgatgttaatgaagaaataaccgaagctgtcgccgatgctattgacgcagccggagtagaaactgtgcgtatcaggacagtattgacatgtgaggcgaaatacggcgtttgccgcaaatgttacggacgcgaccttgcgacaaaccacacggtagaaataggagaagcggtaggaactattgccgcccagtcaatcggtcagccgggcacgcagcttacaatgcgcacgttccatatcggaggcgttgcgactaaggtcagcgaagaaagccgcatcaccttgaaatatcctgtatatatcagggatgtagttggtacgcatatccagcttgataacggacattttctctttacacgccgaggttatgcgactgtaaacaaggtaatgagagaatacaggcttgaacacggagacaaactggttgcagtagacggaagaagaataaaccgcggagatgtgataatcaaacgtaaaggagaagatattgtatctccgaaatcgcatacgccctattctaaagacaggaagtga

SEQ ID NO: 21974 - protein, 228 aa, Unknown
  Obtained from environmental sample
  DOMAIN (2)...(225): RNA polymerase Rpb1, domain 5
  misc_feature (1)..(228): Xaa is any amino acid
MVVNEDDCGTINGITYSAIKSGEDIIEPLKDRIIGRFTLERVKHPITGELIVDVNEEITEAVADAIDAAGVETVRIRTVLTCEAKYGVCRKCYGRDLATNHTVEIGEAVGTIAAQSIGQPGTQLTMRTFHIGGVATKVSEESRITLKYPVYIRDVVGTHIQLDNGHFLFTRRGYATVNKVMREYRLEHGDKLVAVDGRRINRGDVIIKRKGEDIVSPKSHTPYSKDRK

SEQ ID NO: 21975 - DNA, 636 bp, Unknown
  Obtained from environmental sample
  misc_feature (1)..(636): n is a, c, g, or t
atggccgagttgaatattctgacacggacagacgaacgcgtgatagacgaacttacctaccttgaaaaagacgaggtggaagagatgaaaaaacgcctgggcgtttttaacgccgactcgtctttgacctcgttcagggccagcctgcaaagggcagccacggcgccctaccctaccgacgaggaacgggatcttgcttttctgacccaaatagggataagcacaaatatcctcggcgctaccacgggttataacccggcgggactgcgcggttaccttcagattgacgaaaaaaaacttgacgcggcgattgaacagcatcttcccgcgatacggcagttattcggctccgacacaacgggcgacctgattgtagactccggcgtcgctttcaacatggacagcctttccaggccttttgtcgaaaccggcggcataatagcgctgaaaacaagcactatagattcgcgggtaagccaggaccaaagacgaatcgccaccatggaccgccagcttgccgccaaggaagccgagctcaaggcccagtacagccgcatggaaagcgccttcgcgcgcatggagcagatgacatcgtctctggaaaatttcagccgtcaaaacagtaacaacaggtaa

SEQ ID NO: 21976 - protein, 211 aa, Unknown
  Obtained from environmental sample
  DOMAIN (2)...(195): Flagellar hook-associated protein 2 C-terminus
  misc_feature (1)..(211): Xaa is any amino acid
MAELNILTRTDERVIDELTYLEKDEVEEMKKRLGVFNADSSLTSFRASLQRAATAPYPTDEERDLAFLTQIGISTNILGATTGYNPAGLRGYLQIDEKKLDAAIEQHLPAIRQLFGSDTTGDLIVDSGVAFNMDSLSRPFVETGGIIALKTSTIDSRVSQDQRRIATMDRQLAAKEAELKAQYSRMESAFARMEQMTSSLENFSRQNSNNR

SEQ ID NO: 21977 - DNA, 393 bp, Unknown
  Obtained from environmental sample
  misc_feature (1)..(393): n is a, c, g, or t
atgctgacgtttgttgggcatacagacgacgttaattcagtctgtttcagccccgacggcgcacaggttctctccggttcctctgactggacagcgaagctgtgggatgccgcgacaggccgggaactccgtacatttgccgggcatacaagctatgttacttcggtaagcttcaaccccgacgggaagcgggccctctccgcttccctggataaaacgataaagctgtgggacgtggcagcgatagcggaggtaaccgtaccgggggcacagttaccataccctcatgtatgtttattcgtaatgtggcttaatactccaccctttaggttaaatttgatcaacagaaaatttatgttccctaagaactatcaagtgcatataaatcagtga

SEQ ID NO: 21978 - protein, 130 aa, Unknown
  Obtained from environmental sample
  DOMAIN (1)...(36): WD domain, G-beta repeat
  misc_feature (1)..(130): Xaa is any amino acid
MLTFVGHTDDVNSVCFSPDGAQVLSGSSDWTAKLWDAATGRELRTFAGHTSYVTSVSFNPDGKRALSASLDKTIKLWDVAAIAEVTVPGAQLPYPHVCLFVMWLNTPPFRLNLINRKFMFPKNYQVHINQ

SEQ ID NO: 21979 - DNA, 828 bp, Unknown
  Obtained from environmental sample
  misc_feature (1)..(828): n is a, c, g, or t
ttgttgggggaagacctcgccaattccataggcgcatctaccggaagcacggtaaggatcatgactattcgttcatctaccggcagccgttatattccccgggttacgccatttaccgtgcgggggataatcagctcaggttatcgcgagctggattccctgtggtgcattatgagccttgaagcggggaagcagatcatgccggattccggcactgcgtttctaatactcaaaatcgaagatccctacagggaagcggattccatggtcagcatgctttacaatattttggatcccgactatggcgtatacacatggaaaatgcttcaaagttcccaatacagctcctatgaatcaacccggcagcttctcctttttatcatggccctgattgtgcttgtggcatcggtcaacgtgtcatcagcaacttcaatgctggttattgaacgccaaagggacattgctgtcctcaaagcctccggcgcagggccttcctttaccagcgcgattttcctttggggcgcatttctaaccggcattgcaggttctgcctttggcatcgcggcagggcttgccatcggctgctctgtgaacagcctgatacgggcgctggaaaaggcgctgacttttttttcgggaattttccatggcggtccagttttaattctggactcaggctactaccttgaaaccatccccatcatcgtgaactggaaagtggttttcataatcgccctctcgacgatcttcgctgctgtcctggcctcctggcttccagcccgccgcgcaggaaagttaaggccaattgagatattgagaaagtattga

SEQ ID NO: 21980 - protein, 275 aa, Unknown
  Obtained from environmental sample
  DOMAIN (72)...(268): Predicted permease
  misc_feature (1)..(275): Xaa is any amino acid
MLGEDLANSIGASTGSTVRIMTIRSSTGSRYIPRVTPFTVRGIISSGYRELDSLWCIMSLEAGKQIMPDSGTAFLILKIEDPYREADSMVSMLYNILDPDYGVYTWKMLQSSQYSSYESTRQLLLFIMALIVLVASVNVSSATSMLVIERQRDIAVLKASGAGPSFTSAIFLWGAFLTGIAGSAFGIAAGLAIGCSVNSLIRALEKALTFFSGIFHGGPVLILDSGYYLETIPIIVNWKVVFIIALSTIFAAVLASWLPARRAGKLRPIEILRKY

SEQ ID NO: 21981 - DNA, 885 bp, Unknown
  Obtained from environmental sample
  misc_feature (1)..(885): n is a, c, g, or t
atggcagacacagagtatctcaggctcactcaaacagcaaaagacgaatttctttccgattttgatttcaagaaaaaatcgaagcaccagggaaggggccttatccacggggataccattaccacaaaaaagctcttttacagtacccggattaataaccgtatcgccgagctgactgaaatgctgcgcgaggagaacttttccggcatcaggaaacgtcttgaagaaagcgggatgcggaccggatttgcatgtatattttcaggaccgcccggaacggggaagaccgaaaccgcttaccagattgcccgcgaaacaggcagggatgtaatgcttgtggatattgccaataccaaaagcatgtggttcggagaaagcgaaaagcgcattaaagcggttttcgatcgttacaggggaattgtgaaaaacaacggccttgttcccatactcctctttaacgaagccgatgcggtttttggaaaacgcagggaactggcggagtcccgcagcgggccggatcaaaccgagaatgctatacaaaacataattttacaagagatggaaaatttaaacgggattcttatcgccacaactaatatgacagccaactttgacaaagcttttgaacgccgcttcctttacaaaataaactttgaaaaacccgatcttgaatcaaaaaggttgatgtggcaaagttttatcccggctcttaccgattctgatgccaggaacctcgctattaagttcgatttctcaggcggtcagatagaaaacatagcacgaaaaagcgcagtgtcttttattctgaaaggagcagcgcctgatatatcttcccttgaaactttctgcggggaagagtcgttgagaagaccgcaagcggaatag

SEQ ID NO: 21982 - protein, 294 aa, Unknown
  Obtained from environmental sample
  DOMAIN (84)...(269): ATPase family associated with various cellular activities (AAA)
  misc_feature (1)..(294): Xaa is any amino acid
MADTEYLRLTQTAKDEFLSDFDFKKKSKHQGRGLIHGDTITTKKLFYSTRINNRIAELTEMLREENFSGIRKRLEESGMRTGFACIFSGPPGTGKTETAYQIARETGRDVMLVDIANTKSMWFGESEKRIKAVFDRYRGIVKNNGLVPILLFNEADAVFGKRRELAESRSGPDQTENAIQNIILQEMENLNGILIATTNMTANFDKAFERRFLYKINFEKPDLESKRLMWQSFIPALTDSDARNLAIKFDFSGGQIENIARKSAVSFILKGAAPDISSLETFCGEESLRRPQAE

SEQ ID NO: 21983 - DNA, 351 bp, Unknown
  Obtained from environmental sample
  misc_feature (1)..(351): n is a, c, g, or t
ttgatggccgaggggttttcgcaggacgcgnctggagcgatacttacctattcatggcctggcaatatacgggagctggaaaactgcgtcgagagggcctgtgtaatcgccgccggaaaatggattaggaaagaagacctcctgctcaacgctacggatcagaccggcggcgccaggggtggggacaggaaccttaaaacagccaccaacgtattcagggcgaattttattcgcaaggtgcttgatgagaaccaatggaaccagacggagaccgcgaaggcgctggatattcaaagaacctatttatcaaggttgatgaaagagcttaatataaagagagataaggagtga

SEQ ID NO: 21984 - protein, 116 aa, Unknown
  Obtained from environmental sample
  DOMAIN (73)...(109): Bacterial regulatory protein, Fis family
  misc_feature (1)..(116): Xaa is any amino acid
MMAEGFSQDAXGAILTYSWPGNIRELENCVERACVIAAGKWIRKEDLLLNATDQTGGARGGDRNLKTATNVFRANFIRKVLDENQWNQTETAKALDIQRTYLSRLMKELNIKRDKE

SEQ ID NO: 21985 - DNA, 801 bp, Unknown
  Obtained from environmental sample
  misc_feature (1)..(801): n is a, c, g, or t
atgattgaactaatggccggcaaggatgacgacgggcgtaggcttgaccgtatattgcggaaggctttaccggatttatctttgtctctgatacacaggctgttaaggcagaaaaagattcttattgatgataaacctatatcattacccaatcaccatattaaacaagggatgacgataaaggtttatgctgatgttaccggtataaacaatcaggttaacagtatttacgttaaccttaaaaatgttatggttaacgaaaattccgagcaagccccatttcctcattcctcattatccccaatccccatcttgtggcgaggctcaagcctaatcgccttcaacaaaccgcgggggctttccacgcatgggcctgacagccttgacagcattgttaacgcgtggttagccgaagagggcgccctaccccgctccctgtcgttcaggccggggccattgcataggctggacaagccgacatcgggcgtcattgttttttccttgacgcttgatggagcgagactgttcagctctttacttcgcgcgcgtaaacttgaaaaaacatacatcgctattgttgaggggcgtattgaaagtgaaaaaggaaaagtgaaaagtgaaaaaagtaaacgcggtgaatatatatggcgcgacgccttggagcatgataaaaaaacgcgcaaatcacttgtaaaaaccgactccctactccccactccccactccccactccccaaagaagctgttacaataattaaaacgctcgccacaaacgacgatactcccctcggccgaatctga

SEQ ID NO: 21986 - protein, 266 aa, Unknown
  Obtained from environmental sample
  DOMAIN (13)...(60): S4 domain
  misc_feature (1)..(266): Xaa is any amino acid
MIELMAGKDDDGRRLDRILRKALPDLSLSLIHRLLRQKKILIDDKPISLPNHHIKQGMTIKVYADVTGINNQVNSIYVNLKNVMVNENSEQAPFPHSSLSPIPILWRGSSLIAFNKPRGLSTHGPDSLDSIVNAWLAEEGALPRSLSFRPGPLHRLDKPTSGVIVFSLTLDGARLFSSLLRARKLEKTYIAIVEGRIESEKGKVKSEKSKRGEYIWRDALEHDKKTRKSLVKTDSLLPTPHSPLPKEAVTIIKTLATNDDTPLGRI

SEQ ID NO: 21987 - DNA, 807 bp, Unknown
  Obtained from environmental sample
  misc_feature (1)..(807): n is a, c, g, or t
ttgattttggtttttggaatgcgccgcgccgnctggttttataattctggcacagaacttatacctattctatctgacgaaattgtatactttagggaattcaacccctggaatcctgtccgtggggtaaatccgcttgtctctttggctctggaacttgagcaggatttttacgcaaataaagccaattcaatcctgttaaagaataatgccattccccagggcttgttgaaaacagaccagacgcttaggccagaagaagctgacgcattggaacggcggtgggaaagcaaatacggacaggttaaagccgggcgcaagattgcggtactcggaaagggaaccagctttgaggctctttcgttcaatcctgatgtcgtaaaattgtttgaattaaagaaatggaatctctacaccattctcgcaaaattcggtattccccctcgcgttgccaatatctctgacaggtcaacggcattatccggcaaagacacaagcgaacagcacagcgcattttggaaatacacgcttatccctattttgaaacaatttgagcaaattcttgaaacgcaattttttatcaggtttgggcttaaagagcgcggtgtctttgatttgtgggacattcctgaattgcaagagtccgaagactcgcagagcaagagggacatagccgagataaacgccggactaaaaacaataaacgatgtgttaaaggagcgtggcaaggagccaaagccctggggggatgtgtggtataggccgaaaaacttgtcgccagtttgtgaaagcgaagaaaagaactag

SEQ ID NO: 21988 - protein, 268 aa, Unknown
  Obtained from environmental sample
  DOMAIN (2)...(239): Phage portal protein
  misc_feature (1)..(268): Xaa is any amino acid
MILVFGMRRAXWFYNSGTELIPILSDEIVYFREFNPWNPVRGVNPLVSLALELEQDFYANKANSILLKNNAIPQGLLKTDQTLRPEEADALERRWESKYGQVKAGRKIAVLGKGTSFEALSFNPDVVKLFELKKWNLYTILAKFGIPPRVANISDRSTALSGKDTSEQHSAFWKYTLIPILKQFEQILETQFFIRFGLKERGVFDLWDIPELQESEDSQSKRDIAEINAGLKTINDVLKERGKEPKPWGDVWYRPKNLSPVCESEEKN

SEQ ID NO: 21989 - DNA, 672 bp, Unknown
  Obtained from environmental sample
  misc_feature (1)..(672): n is a, c, g, or t
gtgagtttgcgtgtgatatgggatggcgacttgcgttttgcgcaagcagattccacgccgcaaggtcttgttcgggctatgattcctcanagcgatttgcagagaataggtctagacgaaccgctgataactccgcaaaaactgagcgttattcaacttaacgaaaaagtgcagagagtaaaggaaagtatagtggaagcaccaagcgtacaaatgggcgttaatttaaccgcctatttgcatcaatcggagcagacaaaaagcgcagctgggattttagcggaattttccgaaagagattctggcaaattgaattttgcagcaggttttttagtggaggcatatccagatacagaggcaaaagatttggaaattatggatgccgttattcgcaatttgtcaaatttgaaaaagttttacgatggcagtgaatataaaataaaagatttggcagacgagttgcgcggtccttatgatatagaaatagttaaagaaattattccgcaggcttattgcccgtgtagtcgcgaaagagttatgacaagcctctctggtttgcacgaatgtgaaataagagacataaaacaaaagaacgagattttagatgtagtttgtgatttttgccgcactcattatgcggtgaccccaaacgaacttccaataccaagttaa

SEQ ID NO: 21990 - protein, 223 aa, Unknown
  Obtained from environmental sample
  DOMAIN (1)...(216): Hsp33 protein
  misc_feature (1)..(223): Xaa is any amino acid
MSLRVIWDGDLRFAQADSTPQGLVRAMIPXSDLQRIGLDEPLITPQKLSVIQLNEKVQRVKESIVEAPSVQMGVNLTAYLHQSEQTKSAAGILAEFSERDSGKLNFAAGFLVEAYPDTEAKDLEIMDAVIRNLSNLKKFYDGSEYKIKDLADELRGPYDIEIVKEIIPQAYCPCSRERVMTSLSGLHECEIRDIKQKNEILDVVCDFCRTHYAVTPNELPIPS

SEQ ID NO: 21991 - DNA, 531 bp, Unknown
  Obtained from environmental sample
  misc_feature (1)..(531): n is a, c, g, or t
gtgttctgcaaccgcttgagcatgaaggaagggctgacacctgcgtacagcatagtgggaagcacagacactaaagcatggggaaagtcgcccaagaccagtaaagggacatggaacgctgtaactatagtagaagattccaacgggtaccggctgccgaccgaggcgcagtgggaatacgcttgcagggccgggacaacgaccgcatacaacacaggcgatacgattagcgacagcacggggtggtatgtcagcaacagcggggataagacgcaccaagtagggcaaaagagcgccaacgcgttgggcctgtacgatatgcacggcaacgtgtgggagtggtgctgggactggcacgaagaaagctacgcgggtgaagcgcagagcgagcccaagggcgcgtggtctggccgtgtgctgcgcggcgggtgctggtacgccaaggcttggtacctgcgttccgcgtttcggaacaactgcattccgtcccgccggtacgatgacacgggcttccgcgttgtgctcccctga

SEQ ID NO: 21992 - protein, 176 aa, Unknown
  Obtained from environmental sample
  DOMAIN (2)...(175): Domain of unknown function (DUF323)
  misc_feature (1)..(176): Xaa is any amino acid
MFCNRLSMKEGLTPAYSIVGSTDTKAWGKSPKTSKGTWNAVTIVEDSNGYRLPTEAQWEYACRAGTTTAYNTGDTISDSTGWYVSNSGDKTHQVGQKSANALGLYDMHGNVWEWCWDWHEESYAGEAQSEPKGAWSGRVLRGGCWYAKAWYLRSAFRNNCIPSRRYDDTGFRVVLP

SEQ ID NO: 21993 - DNA, 837 bp, Unknown
  Obtained from environmental sample
  misc_feature (1)..(837): n is a, c, g, or t
gtgaatttaagctacgcgagagtgcttgtcgtggacgacatgcagaccaacctggacgtcgccgccggaatcttacgcaaatacaagatgcaggtggacttattaaccaacggacctgccgcaatagacaggatgcgcgccgggactccggtttatgatctggtgtttatggatcatatgatgcccggaatggacggcatagaaacggcggacaatatccgcgctataggcaccgaatacgccaaaaagatacctattatagcccttaccgccaacgccatacagggaaccgacaaaatgttctacgcgcacgatttccagggatttgtgaccaaacccatagacgtaatggagatggactccgtcttaagaaaatggctgtatgaccccaaacgcgagggcgctgttctttccgagccggtcattactgaagaagaagagattaacataaaaatagagataccgggagtggacgtgaaaaaagccctgtccctgtacaacggggataaggatatttatctgcccctcttgcgctcatacattaccaacacgcccgaaactctggaaaaacttaagaatgtaacggctgcgaacctgccaagctatgttatttccgtacacgggttaaaaggaacaagcgccggcataggagccgaaaaaataagagaaatggcgctggaactggaaaacatgtccaggggcggcgacttgcagggcgttttgtcaaagaacggcaaacttatcgccgagacggaaatcattgtaaacaatgtaaaaagtggctggatgaaaatgacgttcaagcggaaaaaccgcgaagaaagctctccgatctga

SEQ ID NO: 21994 - protein, 278 aa, Unknown
  Obtained from environmental sample
  DOMAIN (175)...(250): Hpt domain
  misc_feature (1)..(278): Xaa is any amino acid
MNLSYARVLVVDDMQTNLDVAAGILRKYKMQVDLLTNGPAAIDRMRAGTPVYDLVFMDHMMPGMDGIETADNIRAIGTEYAKKIPIIALTANAIQGTDKMFYAHDFQGFVTKPIDVMEMDSVLRKWLYDPKREGAVLSEPVITEEEEINIKIEIPGVDVKKALSLYNGDKDIYLPLLRSYITNTPETLEKLKNVTAANLPSYVISVHGLKGTSAGIGAEKIREMALELENMSRGGDLQGVLSKNGKLIAETEIIVNNVKSGWMKMTFKRKNREESSPI

SEQ ID NO: 21995 - DNA, 771 bp, Unknown
  Obtained from environmental sample
  misc_feature (1)..(771): n is a, c, g, or t
atgaaaatcaccggcgtaaaacgggcctttatcggcatagaggacaacaagaaaaacctcatccccatgctggaacaggagatacggcttgaggaggagaccttgggcgaatccgggggcgaaatttttatcaggctctgccgcaccctgtacccgcagggcggagagaaactgctgatcaccgccctcacgggaagggaagtgccttcgggcgggctgcccatggacgcgggctgtatcgtgcataatgtcggttccattatcgccatcgccgaggcgttctaccttggcaaacccctgattgaccgcgaccttaccgtttccggcggggcctgcaaaacccccaaaaacatccgcgcccccattggcgcttcgttaaacgacatgcctgttgagtttatggacatagatcatgacaggattgcaaagatactgtacggcggcccgatgatgggcagcgccgtttcttcacttgacgtgccgatacagaaaaacacctccggcattatactgatgacgaaagaagaaacccgcggggacgcggaagggccctgtatccgctgcggccgctgcataagatgctgctcctgccgcctcagccctgtaataatgaacaacagccttgaagccggcgattttgattacgccgtcaaggcgggcttgcttgactgcatggaatgcgggagctgcacgtacaactgcccggcaaggatcaaactggttcagcgtttccgcgtcgggaaacaaaagttaaagatgttgaaaaaataa

SEQ ID NO: 21996 - protein, 256 aa, Unknown
  Obtained from environmental sample
  DOMAIN (1)...(149): Respiratory-chain NADH dehydrogenase 51 Kd subunit
  misc_feature (1)..(256): Xaa is any amino acid
MKITGVKRAFIGIEDNKKNLIPMLEQEIRLEEETLGESGGEIFIRLCRTLYPQGGEKLLITALTGREVPSGGLPMDAGCIVHNVGSIIAIAEAFYLGKPLIDRDLTVSGGACKTPKNIRAPIGASLNDMPVEFMDIDHDRIAKILYGGPMMGSAVSSLDVPIQKNTSGIILMTKEETRGDAEGPCIRCGRCIRCCSCRLSPVIMNNSLEAGDFDYAVKAGLLDCMECGSCTYNCPARIKLVQRFRVGKQKLKMLKK

SEQ ID NO: 21997 - DNA, 669 bp, Unknown
  Obtained from environmental sample
  misc_feature (1)..(669): n is a, c, g, or t
atgctgtttccgtggtggaagcgttttttgcctgatatatctgcggcgctgctcctgctattcagtatgggtattggaatgaccgccatgcccgttatctgttttttggcggcggagggcgcgtaccatacaaaaaattggaagaaatatttgctgagggtatcgttgtgggctgttccggcgcatatcgcgttcacggtggcaacacgtaaaccgctaaacccatttgctgctccctttatcatgcacacaggcgtattatggacgataagctgcggcataggcgctttctttgcgctgaagcatctcaagaaattcaaggtggagcttatgctgttattgctggcgctgggcatgtacggcgattgggggatatgcgcggcggttgcgattctgtgcatggcattgacgcggaatgattttaacaggcaaatgttggcaatgtcattatgtttttgtattgggcttgtttatacgtatatccggcagggcttcgctctggccctggtacaggccagctttttattcgcaataccagtgttgaaacggtataacggcaaattgtacaatgaaggctcaaagccgctgccgaggtttgctttttactggtattatccggcgcatttgcttctgcttgcggcattaaagcaaataacaattaacaattaa

SEQ ID NO: 21998 - protein, 222 aa, Unknown
  Obtained from environmental sample
  SIGNAL (1)...(28)
  misc_feature (1)..(222): Xaa is any amino acid
MLFPWWKRFLPDISAALLLLFSMGIGMTAMPVICFLAAEGAYHTKNWKKYLLRVSLWAVPAHIAFTVATRKPLNPFAAPFIMHTGVLWTISCGIGAFFALKHLKKFKVELMLLLLALGMYGDWGICAAVAILCMALTRNDFNRQMLAMSLCFCIGLVYTYIRQGFALALVQASFLFAIPVLKRYNGKLYNEGSKPLPRFAFYWYYPAHLLLLAALKQITINN

SEQ ID NO: 21999 - DNA, 684 bp, Unknown
  Obtained from environmental sample
  misc_feature (1)..(684): n is a, c, g, or t
ttgaaaaacgaatacatcgaaacctcctttggttttgataccgcgtgcaaaacctacagcgagctaatcgggaacattcaaagggacgccaagagcgcgaaaaaatactggcactttataaaacttatgggccgttccgcaagccacattgcccttgaatgcgcccttcaaacccagcccaacatctgtttgatttcggaggaagtcgaagaaaagaaaatgtcccttgatcaggttgtagaagacatctgcgcttccattgcaaagagggccgaaaacaaagaaaacttcggagtggtgctgattccggagggattgattgaatttattccggagattaagcgtcttatcgaagagctgaacgacgttatggccctgaacgaaaaggagttttccaaatttacttcgctaatcgatcagctctattggctgagccatgaattaacgccggagtcatacaagcttcttcagagcctgcccccggaaatttccagggaactgttaatgggcagggacccgcacgggaacgttcaggtttcccgtatcgaaacggaaaagcttttaattgagatggtggaaaagcgtcttgccaaattaaaagaagaaggcatctaccaaggaagcttctcggccctggggcatttcttcgttacgaaggccgctgcgcttttccttcccacttga

SEQ ID NO: 22000 - protein, 227 aa, Unknown
  Obtained from environmental sample
  misc_feature (1)..(227): Xaa is any amino acid
MKNEYIETSFGFDTACKTYSELIGNIQRDAKSAKKYWHFIKLMGRSASHIALECALQTQPNICLISEEVEEKKMSLDQVVEDICASIAKRAENKENFGVVLIPEGLIEFIPEIKRLIEELNDVMALNEKEFSKFTSLIDQLYWLSHELTPESYKLLQSLPPEISRELLMGRDPHGNVQVSRIETEKLLIEMVEKRLAKLKEEGIYQGSFSALGHFFVTKAAALFLPT

SEQ ID NO: 22001 - DNA, 339 bp, Unknown
  Obtained from environmental sample
  misc_feature (1)..(339): n is a, c, g, or t
ttgctgacactatcggggatttttatttctttgccgcagcagaccaaaactccccgtctttttgaacaagcgcagatgatgtggaacagggcaaaaagcgctttagaagccgtggggcttgatgtaattgaagcggaaaatgagccttttgattttcgccttcattcggcggaaagcgctgaacaaaacatggaaataccaaacggctatgtaatcaaaaccctgaaattcggctatatttatcaggataaagtaatccggcgggcggctgtcgtcatcaataagatcgaaaggaccgaaaggcttgataacgaaccgcctaatattatttatttgtaa

SEQ ID NO: 22002 - protein, 112 aa, Unknown
  Obtained from environmental sample
  misc_feature (1)..(112): Xaa is any amino acid
MLTLSGIFISLPQQTKTPRLFEQAQMMWNRAKSALEAVGLDVIEAENEPFDFRLHSAESAEQNMEIPNGYVIKTLKFGYIYQDKVIRRAAVVINKIERTERLDNEPPNIIYL

SEQ ID NO: 22003 - DNA, 468 bp, Unknown
  Obtained from environmental sample
  misc_feature (1)..(468): n is a, c, g, or t
gtgcatattancgcgtatcagggcgaaagccccgttcctgaagaaaattacctgttgaattgttttgaacttagcggcatacctaaagccaaagcaggaaaagaaaagataaatatccgctttgaatatgatttgaacggtattttgacggttcaggcggaaatagtctcaacgggcaaatcggcgacggtaacggtgaacacatcgcagatgggcaaaaatcttgatctttcaaaatggaaggacattcccgccgctcgaaaataccggcagataattaatagggcggaaaggcttgtaaagattcatggcgatgaagcctcaagtaatcttaatgccgccgccaatgaattgaaaaaagcgcttgtcatggattgggatgacgcgattatcgaaagactgaagaatatccttgccaacgcgattgacgacctggaggacgacctggaagaggaaaacaaggagtga

SEQ ID NO: 22004 - protein, 155 aa, Unknown
  Obtained from environmental sample
  misc_feature (1)..(155): Xaa is any amino acid
MHIXAYQGESPVPEENYLLNCFELSGIPKAKAGKEKINIRFEYDLNGILTVQAEIVSTGKSATVTVNTSQMGKNLDLSKWKDIPAARKYRQIINRAERLVKIHGDEASSNLNAAANELKKALVMDWDDAIIERLKNILANAIDDLEDDLEEENKE

SEQ ID NO: 22005 - DNA, 486 bp, Unknown
  Obtained from environmental sample
  misc_feature (1)..(486): n is a, c, g, or t
ttgatggccgagttcttcgatattattttactggttgcctattgcggacggccttttggttttgtcgctaaaaaagagttagcttatgtgccgtttttaaatatatggattcccatgctgggaggctcttttattgaccgaggcaatgtcagaaaagcaatcgctacgataaacaaaggcgtgaagcggataaaagcgggcggcggcatgataatttttcctgaagggcatcgttccaaaggacaagggcttcttccctttcatccgggttcgcttaaacttgccactcaagctaatgccgtaattgttcctatcgctattaaaggcagttacgatgtttttgaaaaaaacaaccgcgttgtcagcgccgctgcaaaaatagcgtttttaaaacctattgataccgcaaaaataccattagaagatcgcaagcaaatactctgcgacaaaattttcacggcaattaaagaagaattaggcgagtga

SEQ ID NO: 22006 - protein, 161 aa, Unknown
  Obtained from environmental sample
  DOMAIN (5)...(108): Acyltransferase
  misc_feature (1)..(161): Xaa is any amino acid
MMAEFFDIILLVAYCGRPFGFVAKKELAYVPFLNIWIPMLGGSFIDRGNVRKAIATINKGVKRIKAGGGMIIFPEGHRSKGQGLLPFHPGSLKLATQANAVIVPIAIKGSYDVFEKNNRVVSAAAKIAFLKPIDTAKIPLEDRKQILCDKIFTAIKEELGE

SEQ ID NO: 22007 - DNA, 915 bp, Unknown
  Obtained from environmental sample
  misc_feature (1)..(915): n is a, c, g, or t
atgggaaaaatcatcaccgctcttcgcagaatgggctttgatcgcgtttatgatacctgcttcggcgcggatttcaccgtaacggaagagggaaaggaattccttgaacgcaaaaaaagcggcgaaaacctgccgatgttcacatcgtgctgtccagcgtgggttaaatttgccgagcaatattaccccgacttcttaaacaatttatccacatgccgctcacctcagcagatgttcggctctttgtgcaaggaatatctttgcaaggacttaaaaatcccccgtgaaaaattggtggtagtgtcggtaatgccctgtactgcgaaaaaattcgaagcaagccgcgacgaattcaaagtcaacggaaacccggatgtggattttgtaataaccagcagtgaacttgcgttgatgatgaaagaaaacggcatagagtttaacaacatggaactcggctcttttgatatgccgttcggctactcaaccggcggagctgttattttcggttcatcgggcggcgtaagcgaggcggttctcagatttgcgggcgaagtccttgaaaaaggttccgcaaaagaattcaaacagttacgcggagaagacggaatcaaaacatctgaaatcacggtcggcggccaaaaacttcaactggctgttgtcagcggtctttcaaacgcaagaaacttgattgatcgcattcgtaagggagaagtccattacgatttagtggaagtcatggcttgctgcggcggatgcgtcaacggcggaggtcagccgattacggaagacagagaagctgtgcaaaaacgcgcgaaaggactttacgaaaacgataaaatgctgcaattccatatttcctccgagaatccgtaccttcagcaaattacgcggaaaattctcggccgatctgtctag

SEQ ID NO: 22008 - protein, 304 aa, Unknown
  Obtained from environmental sample
  DOMAIN (1)...(259): Iron only hydrogenase large subunit, C-terminal domain
  misc_feature (1)..(304): Xaa is any amino acid
MGKIITALRRMGFDRVYDTCFGADFTVTEEGKEFLERKKSGENLPMFTSCCPAWVKFAEQYYPDFLNNLSTCRSPQQMFGSLCKEYLCKDLKIPREKLVVVSVMPCTAKKFEASRDEFKVNGNPDVDFVITSSELALMMKENGIEFNNMELGSFDMPFGYSTGGAVIFGSSGGVSEAVLRFAGEVLEKGSAKEFKQLRGEDGIKTSEITVGGQKLQLAVVSGLSNARNLIDRIRKGEVHYDLVEVMACCGGCVNGGGQPITEDREAVQKRAKGLYENDKMLQFHISSENPYLQQITRKILGRSV

SEQ ID NO: 22009 - DNA, 696 bp, Unknown
  Obtained from environmental sample
  misc_feature (1)..(696): n is a, c, g, or t
atgatagggcccgaccctgattttcctttcctcagtgaaaaccagcgctttaaatttccgccgcccgaaaaagcaaagcaccacagcattgttgcctggggaggaaatctttcacccggtatgcttctctcggcttatgaacagggtcttttcccctggtacggcgaagacgaccctgtaatctggcattcccccgatcccagatttgttatctttccggaaaaactccatgtatcaaggtcaatggaaaaaatactaaggcaaaatgtctttactgttaccatagaccgggatttctccggcgtaattgcttcctgctctcaggcaaaaaggacaggccagaacggcacatggatcacttctgacataatagaagcctacacggaacttcaccgtctgggctgggcacactcggcggaggcgtatcttgacggggaattgttgggcggttgctatggcattctgatggggaaagttttttttggcgaatccatgttcagcctaaagcccaacgcaagcaaggccgctttcattacctttgcgcgtatgctctttgaaaaaggcatccgccttattgactgccagcagcacacctcccacctagaaggcctggggggtgaggatattggcagaaaagaatttctcgctttgcttagagatgcggtaagggacagggcaacagaatttactgattag

SEQ ID NO: 22010 - protein, 231 aa, Unknown
  Obtained from environmental sample
  DOMAIN (38)...(211): Leucyl/phenylalanyl-tRNA protein transferase
  misc_feature (1)..(231): Xaa is any amino acid
MIGPDPDFPFLSENQRFKFPPPEKAKHHSIVAWGGNLSPGMLLSAYEQGLFPWYGEDDPVIWHSPDPRFVIFPEKLHVSRSMEKILRQNVFTVTIDRDFSGVIASCSQAKRTGQNGTWITSDIIEAYTELHRLGWAHSAEAYLDGELLGGCYGILMGKVFFGESMFSLKPNASKAAFITFARMLFEKGIRLIDCQQHTSHLEGLGGEDIGRKEFLALLRDAVRDRATEFTD

SEQ ID NO: 22011 - DNA, 882 bp, Unknown
  Obtained from environmental sample
  misc_feature (1)..(882): n is a, c, g, or t
atgcaagaccagatttacaaaaccgcagatgcaaaatggaagtcaataattgcagacataacagagagacacgcaaaaggccaacccattctagttggaacaatatctgtggaaaaatcggaaaagctctcaaagatgctccgcatagctaatattccccacgatgttttgaatgcaaaaaatcacggacgagaagcggaaattatccaatatgccggacacaagggaaaggtgacggttgccacaaatatggcaggtcgcggaacagatattgcacttggtcccggcgttgttgagcttggcggtttgcacgttctaggcacagaaaggcacgagagccgccgcatagacaaccagctgagaggccgctccggcaggcagggagaccctggctcttcgcaatattatttatccctagacgatgatttgatgagaatttttggcggtgaaaatgttaagaaaataatggacaggttcggtttcaaagatgacgatgttattgaacatccgtgggttaccaagagcgttcgcaatgctcaacgcagaattgaagggcaaaacttcgatgcccgtaaacacttgttggattacgataatgttatgaatgaacagagaagggttatttactctttgcgccgcagtattttaatgggcgaagatattaaaaccgaaatttcaaaccgtatagaagattccgcagatatcaaggttagcaaatatgtaattccaaattcatacccagaaacttgggatatggagggtttggaaaacgatttgaaaatgagcatgggtattgaatacaaaccagaacccgaaaaactcacaggcatgaccgccgagcaggttttagacgaggttattaactttaccaagagcgtataa

SEQ ID NO: 22012 - protein, 293 aa, Unknown
  Obtained from environmental sample
  DOMAIN (46)...(128): Helicase conserved C-terminal domain
  misc_feature (1)..(293): Xaa is any amino acid
MQDQIYKTADAKWKSIIADITERHAKGQPILVGTISVEKSEKLSKMLRIANIPHDVLNAKNHGREAEIIQYAGHKGKVTVATNMAGRGTDIALGPGVVELGGLHVLGTERHESRRIDNQLRGRSGRQGDPGSSQYYLSLDDDLMRIFGGENVKKIMDRFGFKDDDVIEHPWVTKSVRNAQRRIEGQNFDARKHLLDYDNVMNEQRRVIYSLRRSILMGEDIKTEISNRIEDSADIKVSKYVIPNSYPETWDMEGLENDLKMSMGIEYKPEPEKLTGMTAEQVLDEVINFTKSV

SEQ ID NO: 22013 - DNA, 450 bp, Unknown
  Obtained from environmental sample
  misc_feature (1)..(450): n is a, c, g, or t
atgcagaaaactgatagtcaaattggtaaactcagcaaacgaatgggcgaagttgttgaatatatggtcgtacccaatcttagggagaaatttagggaattaggatatgatttcccaaaagctaatcccaattctgatgtttcggatcgtaaaaataatatattccttgaaattgatgttatgcttgaaaatggcgataaagcaatgcttgtcgaagtaaaaactaaacccaccaccgaagatgtacaggatcatattaaacgtcttgaaaaaatgcgtgtatatgccgatctgcacagcgaaaagcgtacatttttgggtgctgttgcaggggtggtaatgtcggacaatgaaaaagaatatatattaaaacaaggcttttttgttatagaaccttctggagaaacttttaatattattccgccaaataataaacctaaagaatggtaa

SEQ ID NO: 22014 - protein, 149 aa, Unknown
  Obtained from environmental sample
  misc_feature (1)..(149): Xaa is any amino acid
MQKTDSQIGKLSKRMGEVVEYMVVPNLREKFRELGYDFPKANPNSDVSDRKNNIFLEIDVMLENGDKAMLVEVKTKPTTEDVQDHIKRLEKMRVYADLHSEKRTFLGAVAGVVMSDNEKEYILKQGFFVIEPSGETFNIIPPNNKPKEW

SEQ ID NO: 22015 - DNA, 714 bp, Unknown
  Obtained from environmental sample
  misc_feature (1)..(714): n is a, c, g, or t
gtgatcttcagaaacagcagccaccaggacatagccgaatccttaaaggagctggcagcaatttttagcgaggcgcagataatcgcattttcaggcggctttagcgcaggggacgagccggatgggtccggcaagttcattgccaatgtgctacgttcgcctgtcattgccgccgcaatttcagaatttcttgagaagcgaggcggccttatgcttgggatctgtaacggattccaggcttttattaaaaccgggctggtgccttatggccgcatcatcccttcaattgacgaaatgaaaaccgcccccactctaactttcaacgccattggccgccatgtctcccgaatggtacgtaccagggtaatgccgaatatttccccctggctaagcctggaagagcccggcagcgtccatgtcatccccgtaagccacggtgaaggccgcatagcgattcgaaacgaagaagccgtatcattgttcgccgccggacaagttcccttctgctacgccaatgcggacggaaaagcgacaatggctgaaccggataaccccaatggctccgcattcgccatagaaggccttaccagccccgatggcaggatcctcggcaaaatggcgcactccgaacgttgtggtgattttgtacatatcaatattccggggaacaaacgccagaaaatattcgaagcgggagtcaggtattttagataa

SEQ ID NO: 22016 - protein, 237 aa, Unknown
  Obtained from environmental sample
  misc_feature (1)..(237): Xaa is any amino acid
MIFRNSSHQDIAESLKELAAIFSEAQIIAFSGGFSAGDEPDGSGKFIANVLRSPVIAAAISEFLEKRGGLMLGICNGFQAFIKTGLVPYGRIIPSIDEMKTAPTLTFNAIGRHVSRMVRTRVMPNISPWLSLEEPGSVHVIPVSHGEGRIAIRNEEAVSLFAAGQVPFCYANADGKATMAEPDNPNGSAFAIEGLTSPDGRILGKMAHSERCGDFVHINIPGNKRQKIFEAGVRYFR

SEQ ID NO: 22017 - DNA, 300 bp, Unknown
  Obtained from environmental sample
  misc_feature (1)..(300): n is a, c, g, or t
ttggacgcttcttcggcgcagtcccagaccgccgtaaactgcggcactccgattcccgcgacaacccgcgtggtgcagattgatcccggtcctatgcccaccttaaccgcgtccgctcccgcgtcgattaatttttttgttccttcttttgtggcgacatttccgccgattaccggaatattgaattctttttttattttactgatcgcttccattacgttttttgaatcgccgtgcgccgtatcaagaacgacaaaatcaacttttgcctttacaagcaggggaaggcgcacggtataa

SEQ ID NO: 22018 - protein, 99 aa, Unknown
  Obtained from environmental sample
  misc_feature (1)..(99): Xaa is any amino acid
MDASSAQSQTAVNCGTPIPATTRVVQIDPGPMPTLTASAPASINFFVPSFVATFPPITGILNSFFILLIASITFFESPCAVSRTTKSTFAFTSRGRRTV

SEQ ID NO: 22019 - DNA, 396 bp, Unknown
  Obtained from environmental sample
  misc_feature (1)..(396): n is a, c, g, or t
ttgagaaaaaccggcgtgtcggttcatctgcaaaaatttgttatacgaataaataaatcagctgccggatttgaattagccctgagcgggtctggcggcattgaaaagctttttacaaaagcactcgtcctttccaccggctgccgggaaaggacagcgcggcaagccggcatttacggtatttgttcctccggggttataactgccggatcagcccagcactacaccaacatcctgggacagctcccctgccgccgctgcgtggttctcggctctggggacatcgggcttattcatggtacggcgcttaacactggaaaggtgcggaagtgctgggtgtttatgaggctaagcccaccccgtcgggactatcgcgaaatatctcccaatgcctga

SEQ ID NO: 22020 - protein, 131 aa, Unknown
  Obtained from environmental sample
  misc_feature (1)..(131): Xaa is any amino acid
MRKTGVSVHLQKFVIRINKSAAGFELALSGSGGIEKLFTKALVLSTGCRERTARQAGIYGICSSGVITAGSAQHYTNILGQLPCRRCVVLGSGDIGLIHGTALNTGKVRKCWVFMRLSPPRRDYREISPNA

SEQ ID NO: 22021 - DNA, 303 bp, Unknown
  Obtained from environmental sample
  misc_feature (1)..(303): n is a, c, g, or t
atgtgttggtactgtggtgaagctattaccgatcccgagccaatcgggcgttctctgcgctgtgtaacttgcggtaaagatctgcgatcatgcaaaaattgccgtttttttcttcccggctcacgcggcgactgccatgaaacaagcgccgagcctcaagcagataaagaacgcgcgaatttctgcgattggttttcactcgatcaaaagtaccgtgttaaaagtcaaagaaaccgaaatgaaaaatccggcgcttccaaagctgacaaagccaaattggcgtttgataatttatttaaataa

SEQ ID NO: 22022 - protein, 100 aa, Unknown
  Obtained from environmental sample
  misc_feature (1)..(100): Xaa is any amino acid
MCWYCGEAITDPEPIGRSLRCVTCGKDLRSCKNCRFFLPGSRGDCHETSAEPQADKERANFCDWFSLDQKYRVKSQRNRNEKSGASKADKAKLAFDNLFK

SEQ ID NO: 22023 - DNA, 396 bp, Unknown
  Obtained from environmental sample
  misc_feature (1)..(396): n is a, c, g, or t
atgtttaccgtaaatccatgcgccgcgggctgtgggaggccggcaattacaggttataatctttgctttattcatcaggcgaatcctgaacaggaatacagccgtatttgcgcttacattgaagagaatctgactataaaagatcttgtcgtatccgggatgcgttttgaaaacaccgatttttccaatcatcatttatatggctgtaactttaaggaaactacatttataaattgtaatttttcaggcgttaaatgcagaatggatttttttgactttgccaatttaattaactgcgatttttcaaaagctgacattcaatttgtttcatttgccggagccagttttcagaattgcagttttgaaggcaccgaacttgtacttgataatttttga

SEQ ID NO: 22024 - protein, 131 aa, Unknown
  Obtained from environmental sample
  misc_feature (1)..(131): Xaa is any amino acid
MFTVNPCAAGCGRPAITGYNLCFIHQANPEQEYSRICAYIEENLTIKDLVVSGMRFENTDFSNHHLYGCNFKETTFINCNFSGVKCRMDFFDFANLINCDFSKADIQFVSFAGASFQNCSFEGTELVLDNF

SEQ ID NO: 22025 - DNA, 387 bp, Unknown
  Obtained from environmental sample
  misc_feature (1)..(387): n is a, c, g, or t
ttggaaggaactttaatggaagatatgtcattggaaattgacgagcaggcggccggttttagcaaacttttgcaggagcataaaggacagcgagtttgcgtactggatctgcgtgggataaacaactggactgatttttttattattgcgaccgcgacaagcaaaacccatattgacggacttgaaaggcacatcaaagaattttgccgtgaaaagagaatagatatacttggcagttcccgtaaggacgcggacgacgaatggcggctgatagaccttgggttaataatcattcatttgatgacacaagaggcacgggaattttacgaactggaaaaactttgggcaccgataccggcatctaaagaaacgccggttattaaataa

SEQ ID NO: 22026 - protein, 128 aa, Unknown
  Obtained from environmental sample
  DOMAIN (15)...(116): Domain of unknown function DUF143
  misc_feature (1)..(128): Xaa is any amino acid
MEGTLMEDMSLEIDEQAAGFSKLLQEHKGQRVCVLDLRGINNWTDFFIIATATSKTHIDGLERHIKEFCREKRIDILGSSRKDADDEWRLIDLGLIIIHLMTQEAREFYELEKLWAPIPASKETPVIK

SEQ ID NO: 22027 - DNA, 897 bp, Unknown
  Obtained from environmental sample
  misc_feature (1)..(897): n is a, c, g, or t
atgataaagaaggttattctatttaccattttagcaatcttgtttttttgtgttgaaataaacgcgcagtcccgttaccctcaaacagtaaatatctcctatataactacgccatttaatttgcaaattatggtgatgaaagagcagcatatgctggagcaggcctttgccccgttgggggtaaatatccattggcttaatatgaataacggtgcgactcaacctatggccatggccgccggttccctggatattgcccctgtgataaattccgcatcggtgatccttgcgaacgcggcggggaacccggtggagattgccgctctggtaagtagaccgaagcaaacctttgcacttatggtcggtcccaatggtcctcgtaatatacgtgaattgcgtgggaaaaccgtagcgggcgccaagggatcggttctccatcaaatgttgatagccgctttggttaaggaaggaatgaaggcatctgatattaaatttattcaaatggacataaatgaagcccggagtgcgcttttggcgaatcgtgtggatgccgcgctgcagacatcaagccttatcatccgtaatgaagaagctggaatgcgtactctttttactgcggacggttatattactccattgcttttaactgcggtacgcccggcttttgcaaagaataatccggaactgttgcggatttatttagatactcaggaaaaagcttatgattggatcaacgctaatccaacagaagctgtcgaaatcgcttcccgtattcttcaggtttcaatagaaagagggaatgaaacttttcccatggagcggacttacccaagtgatggaaacggaggaagtaaactctcttggaacggatgtggattttctttaccgccgatatga

SEQ ID NO: 22028 - protein, 298 aa, Unknown
  Obtained from environmental sample
  SIGNAL (1)...(22)
  misc_feature (1)..(298): Xaa is any amino acid
MIKKVILFTILAILFFCVEINAQSRYPQTVNISYITTPFNLQIMVMKEQHMLEQAFAPLGVNIHWLNMNNGATQPMAMAAGSLDIAPVINSASVILANAAGNPVEIAALVSRPKQTFALMVGPNGPRNIRELRGKTVAGAKGSVLHQMLIAALVKEGMKASDIKFIQMDINEARSALLANRVDAALQTSSLIIRNEEAGMRTLFTADGYITPLLLTAVRPAFAKNNPELLRIYLDTQEKAYDWINANPTEAVEIASRILQVSIERGNETFPMERTYPSDGNGGSKLSWNGCGFSLPPI

SEQ ID NO: 22029 - DNA, 540 bp, Unknown
  Obtained from environmental sample
  misc_feature (1)..(540): n is a, c, g, or t
atgaggggaaacagattgaaacggtttgtatttttatcaatgctgatgttatcggggttgttttgcgcttgtacggcatcaaacaaaaaagttgctgagttgcttgaaagcggtaaaaaagcttttgacaggggcgattacgataaagctattgctgattataccgaagcaatacggattgaaccggaaaacgcggaagcatactttaggcacggtgattcctattaccgcaagggcaacgaatggaagggtatacatattccccggtgggatgatgaggcgatgccgcctcccttgcggtatgtacaagcgatacagcttgaaccgaacaatataagagcatggaaatggcgtggtttcgcttacgatatgattagcaacaatgacagagcgattgcggactacagcaaggcgatccggttaaatccaaagttagatgaagcctactataaccgcggaaatgcgtacaataaaaaaggagacaatgatagggctattgaggatttcaacaggccgatcttgcttaaaaaaaataagtaa

SEQ ID NO: 22030 - protein, 179 aa, Unknown
  Obtained from environmental sample
  SIGNAL (1)...(26)
  DOMAIN (112)...(145): Tetratricopeptide repeat
  misc_feature (1)..(179): Xaa is any amino acid
MRGNRLKRFVFLSMLMLSGLFCACTASNKKVAELLESGKKAFDRGDYDKAIADYTEAIRIEPENAEAYFRHGDSYYRKGNEWKGIHIPRWDDEAMPPPLRYVQAIQLEPNNIRAWKWRGFAYDMISNNDRAIADYSKAIRLNPKLDEAYYNRGNAYNKKGDNDRAIEDFNRPILLKKNK

SEQ ID NO: 22031 - DNA, 678 bp, Unknown
  Obtained from environmental sample
  misc_feature (1)..(678): n is a, c, g, or t
ttgcacctgccgctcggcgcgatcatctatttcctggttgcgggctatactccgctcatggcggctttttggggcatcctcgtcagtattcccttgtcctggctcgacaagacaacgcgcctgacgcccaaaagattgctggaagccttcgagtccggcgcccgttcctcgttgagcgtggcctgcgcctgcgcctgcgtgggcatcatcgtgggcaccggcaccctgactggtcttgccctgcgtattgccgggggcatagtggatctggcgggcggcatgctgctgtctattctgttgctgaccgccgccgcaagtattctgctcggcacgggcctgcccaccacggccaacttcatcgtcaccagcaccatggccgcgccggcgctcaagcttttgggcgtgccggacatcgccgcgtacatgttcgtcttctatttcggcatcgccgccgacctgacgccgcctgtggcccttgcggcctacgccgcggcaggcattgccggagtggaccccatgcattcaggcttcgcctccgtgaaactcgcggtggcgggctttcccattcccttcatttacgtgtacaatcccattctgctctttgtgggtcccggatcctgtggccatgatccaggttattgtctcctcccttgtcggggtggaacctgctgtccatga

SEQ ID NO: 22032 - protein, 225 aa, Unknown
  Obtained from environmental sample
  SIGNAL (1)...(21)
  misc_feature (1)..(225): Xaa is any amino acid
MHLPLGAIIYFLVAGYTPLMAAFWGILVSIPLSWLDKTTRLTPKRLLEAFESGARSSLSVACACACVGIIVGTGTLTGLALRIAGGIVDLAGGMLLSILLLTAAASILLGTGLPTTANFIVTSTMAAPALKLLGVPDIAAYMFVFYFGIAADLTPPVALAAYAAAGIAGVDPMHSGFASVKLAVAGFPIPFIYVYNPILLFVGPGSCGHDPGYCLLPCRGGTCCP

SEQ ID NO: 22033 - DNA, 561 bp, Unknown
  Obtained from environmental sample
  misc_feature (1)..(561): n is a, c, g, or t
ttggggcatcctcgtcagtattcccttgtcctggctcgacaagacaacgcgcctgacgcccaaaagattgctggaagccttcgagtccggcgcccgttcctcgttgagcgtggcctgcgcctgcgcctgcgtgggcatcatcgtgggcaccggcaccctgactggtcttgccctgcgtattgccgggggcatagtggatctggcgggcggcatgctgctgtctattctgttgctgaccgccgccgcaagtattctgctcggcacgggcctgcccaccacggccaacttcatcgtcaccagcaccatggccgcgccggcgctcaagcttttgggcgtgccggacatcgccgcgtacatgttcgtcttctatttcggcatcgccgccgacctgacgccgcctgtggcccttgcggcctacgccgcggcaggcattgccggagtggaccccatgcattcaggcttcgcctccgtgaaactcgcggtggcgggctttcccattcccttcatttacgtgtacaatcccattctgctctttgtgggtcccggatcctgtggccatga

SEQ ID NO: 22034 - protein, 186 aa, Unknown
  Obtained from environmental sample
  misc_feature (1)..(186): Xaa is any amino acid
MGHPRQYSLVLARQDNAPDAQKIAGSLRVRRPFLVERGLRLRLRGHHRGHRHPDWSCPAYCRGHSGSGGRHAAVYSVADRRRKYSARHGPAHHGQLHRHQHHGRAGAQAFGRAGHRRVHVRLLFRHRRRPDAACGPCGLRRGRHCRSGPHAFRLRLRETRGGGLSHSLHLRVQSHSALCGSRILWP

SEQ ID NO: 22035 - DNA, 513 bp, Unknown
  Obtained from environmental sample
  misc_feature (1)..(513): n is a, c, g, or t
atggcttttgaaaaaaatgaaagatggaagaccaattatgaaacaatttaccaatggatatacaacgacaggaaagatttaataccatttcttacaaaaagccatagaatcaggcggaaaagagggtctgcaaagcaaaaacggtgcccaaaaataccaaaccgcattacaatcgagaacaggcccgattatgtaaacctaagatcggaaataggccattgggaaatagatacggcaatatccagaaagagcaaagcggcaataatggttttagtggaaaggaaaacaaggtatgtaattatcaaaaaactcgcagcaaaaacagcatgttttatgcatgatgcaacagtaaaaagcctaaaagattatccagcaaatataaggcagactattacttatgacaatggaactgaaaatactttacacgaactcactaataaagtcatcggaactaaatcatatttttgtaacccataccacacttgggaaaaaggcactgtgaaaatatcatag

SEQ ID NO: 22036 - protein, 170 aa, Unknown
  Obtained from environmental sample
  misc_feature (1)..(170): Xaa is any amino acid
MAFEKNERWKTNYETIYQWIYNDRKDLIPFLTKSHRIRRKRGSAKQKRCPKIPNRITIENRPDYVNLRSEIGHWEIDTAISRKSKAAIMVLVERKTRYVIIKKLAAKTACFMHDATVKSLKDYPANIRQTITYDNGTENTLHELTNKVIGTKSYFCNPYHTWEKGTVKIS

SEQ ID NO: 22037 - DNA, 558 bp, Unknown
  Obtained from environmental sample
  misc_feature (1)..(558): n is a, c, g, or t
atgcccgatgacaaagaaccgtggaaacataagatcgacgaaagtccaaaaggtttttttttttccatcgatcctgcccagggcatagctgaaatacctcccacaagcgagatgggcgacctgggtttccctatgtttggctttgcgaagcttttcaaaaagagccctgcccaaatagcgcagatggtcgcggcgaaattgccgccttccatagcggacgggccttacgtaaacgtgcgcctgaaccgcagcgagctttccagagatattctttcagagttgctggacagcgctgacgacacaagcggagcgcaggtgggcaggccccctacccctgctggcaaacgggtaatggacgaggcttccagtcccaataccaataaatccccctccatcttgggcaccctcgcaacacaccagcttggcgaatgcaccccccgcagctctccggctgccggtgctaaagtccgcaggggttgcacaacacaagacaggggccacccgactatccactccacgggtgacaacaaggaccgcggcgatgttcaccccccctga

SEQ ID NO: 22038 - protein, 185 aa, Unknown
  Obtained from environmental sample
  DOMAIN (6)...(81): Arginyl tRNA synthetase N terminal domain
  misc_feature (1)..(185): Xaa is any amino acid
MPDDKEPWKHKIDESPKGFFFSIDPAQGIAEIPPTSEMGDLGFPMFGFAKLFKKSPAQIAQMVAAKLPPSIADGPYVNVRLNRSELSRDILSELLDSADDTSGAQVGRPPTPAGKRVMDEASSPNTNKSPSILGTLATHQLGECTPRSSPAAGAKVRRGCTTQDRGHPTIHSTGDNKDRGDVHPP

SEQ ID NO: 22039 - DNA, 945 bp, Unknown
  Obtained from environmental sample
  misc_feature (1)..(945): n is a, c, g, or t
ttgctgctttttgaaaaagccataaaagcccaacttggcataagcatagctcaatacagggaaaaactgatggagcgtttcagggaagaaatgcaactctcgcgcattaggcaaaaacacgtgggcataataacccccacaagaaaagaagtggaagaattttatgcaacttataaagatagcattccccgccaatacgattgccttttattcagctccataagcatacccgtagaacccagcaagtttgtaacagattctgttaaaaatgtagctttggcaattatagattccttagacagaggaatacatttttctttgcttgcaaaaaaccacagccaaaacgcttcggcagatacctcttcatatttgcgcaggggttctggcgaaccagattacgaaagggcagccctgaggcttggtgtgggcgagtggacagataaccctgttttaacgaaagaagggtggaatataattcggcttatgggaaaaaaagaagatggcataaaaacagcgagcattcttttgagagtggagccggccgcaaccgattctctgctagttttgcgcaaattagattctttaaaacgcgaaattgaaaagggcaaaataaatttttcaaaagccgccataacattcagcaaagatagagaaacatctttcaagggcggcagctttggctggcaagagagaaaggctatagacccagcttatgcaaaaataatatcttccttaaaagtaggcgagatttctagcccagaaattatagatggctcgtatagaattctgcgcttagacaacgaagcgcaagttcgcgaatataacttggaagaagattatcccataattgaaagcatggccgccaactatatgtctaacctcaaactcaagtctttgataacccaatggagaaatgaggtttatattgaaatacaaggtttatag

SEQ ID NO: 22040 - protein, 314 aa, Unknown
  Obtained from environmental sample
  DOMAIN (87)...(163): PPIC-type PPIASE domain
  misc_feature (1)..(314): Xaa is any amino acid
MLLFEKAIKAQLGISIAQYREKLMERFREEMQLSRIRQKHVGIITPTRKEVEEFYATYKDSIPRQYDCLLFSSISIPVEPSKFVTDSVKNVALAIIDSLDRGIHFSLLAKNHSQNASADTSSYLRRGSGEPDYERAALRLGVGEWTDNPVLTKEGWNIIRLMGKKEDGIKTASILLRVEPAATDSLLVLRKLDSLKREIEKGKINFSKAAITFSKDRETSFKGGSFGWQERKAIDPAYAKIISSLKVGEISSPEIIDGSYRILRLDNEAQVREYNLEEDYPIIESMAANYMSNLKLKSLITQWRNEVYIEIQGL

SEQ ID NO: 22041 - DNA, 711 bp, Unknown
  Obtained from environmental sample
  misc_feature (1)..(711): n is a, c, g, or t
ttgccgcgcgttgcggaattgtttgaagctcgcgagccaaagaactcggcaatacttgcgccgaccaatggcgtggttgcttttggagcagaaaagaattccggtcaaatagtgttaattaaaaacgcagataccgaagaggaaattgtggttccgcacggaaagcatctctctgttcacgatggcgatagagttcgcaaagggcaggcaatagccgaaggttctgtgaacttgatggatattctgcgaattttgggcgaagaggaattgcaaagacatttggttgacgaaattcaggcggtttatcgcttgcaggcagttaccatttccgataaacacatagagtgcatagttcggcaaatgatgagaaaggtggttataacagagcctggcgattccaaattcctaactggcgaagatgtttccagaatagagcttcgtttggaaaacgtgcgtttgcaagaagaaggtaagcaaattgcccactttgccccattgctcctcggaataacaaaagccgctcttgcaatggatagcttcatagccgccgcttctttccaagaaactacgaaagtgctcaccagagccaccatatcgggttcaaaagacaagctgctcggtttaaaggaaaatgtgattatggggcgtttaataccgtccggcacaggctccaggcatttgcgccagcttgaaataaagattcggatgtaa

SEQ ID NO: 22042 - protein, 236 aa, Unknown
  Obtained from environmental sample
  DOMAIN (15)...(90): Apocytochrome F, C-terminal
  misc_feature (1)..(236): Xaa is any amino acid
MPRVAELFEAREPKNSAILAPTNGVVAFGAEKNSGQIVLIKNADTEEEIVVPHGKHLSVHDGDRVRKGQAIAEGSVNLMDILRILGEEELQRHLVDEIQAVYRLQAVTISDKHIECIVRQMMRKVVITEPGDSKFLTGEDVSRIELRLENVRLQEEGKQIAHFAPLLLGITKAALAMDSFIAAASFQETTKVLTRATISGSKDKLLGLKENVIMGRLIPSGTGSRHLRQLEIKIRM

SEQ ID NO: 22043 - DNA, 519 bp, Unknown
  Obtained from environmental sample
  misc_feature (1)..(519): n is a, c, g, or t
ttggtttctttcgcttacggaaaaattttcgggccaaaatttcttggcctttttccgttgggcggaatcaatattcatcccagcttgctccccaaataccggggaccgaccccagtcccggcggcaatcatcaaccgggatacggaaaccggcataacgattcaacggctcgcggcggagatggacatcggcgacattcttgttcaggagaaactgccgctggatggcagagaaaccaccgcaagcctaagcgaaacaatagcgcaaaaagccgcggaattgctgcctgtcgcgctcaggggtattagtgccggaactttgcaagcgagggtgcaagatcatagcatggctacgtactgctccttaatcgaaaaggaagactggcttataaactggaaacggaacgtcctggaaatccatgccgggattcgggcttttgatccatggccgctttcctggacaacgcacggggagttgcgtctgttcatccacaaagctgtaccgtttcccattgattag

SEQ ID NO: 22044 - protein, 172 aa, Unknown
  Obtained from environmental sample
  DOMAIN (2)...(99): Formyl transferase
  misc_feature (1)..(172): Xaa is any amino acid
MVSFAYGKIFGPKFLGLFPLGGINIHPSLLPKYRGPTPVPAAIINRDTETGITIQRLAAEMDIGDILVQEKLPLDGRETTASLSETIAQKAAELLPVALRGISAGTLQARVQDHSMATYCSLIEKEDWLINWKRNVLEIHAGIRAFDPWPLSWTTHGELRLFIHKAVPFPID

SEQ ID NO: 22045 - DNA, 864 bp, Unknown
  Obtained from environmental sample
  misc_feature (1)..(864): n is a, c, g, or t
ttggttggtgttggttcgtggttaatttcttggttttttgtacgtgcttgctttgatacgccttgcctgagggaaagaaaaaaaggtaaaataaaggggatggagatttcccctagcgaaaacccggcaaattttagcgggtttcgcagtttcagactaaataaattcgaaggtcccctggatcttcttttgtttttgattgagaaaaacgaggtaaatatctacgacatacctatcgcgaaaattaccgaacagtatctggattatctgaccgatttatccgaattcgatcttgacgaaatttccgaattccaggcaatggcggccagactgcttcttaccaaatccaggatgctgcttccaattgaaatagcttccgacgacgaggacgaggatcccaggcaggaactggtggagcacctcattgaataccagaaatttaagaaactttccggccttatggaggaaagggtaagggataccgaatgggtttttgagcggaaaaggctagagcggccgcttccctttaacgatgaggcgatgtgggaaaaagtcgatgtctgggatttgctgaaaatttttgccgaatacacccgcggtctttccagggaaaggatcgttgacctgtacgaagagattactgtgaacgaaaaaaaggcccttctttgtgaaattcttgaggatcgaaaggaatgccggtttacggatctgctcgttcgtaccaattcaattttggaatttgtctgcgcgtttctcgcccttcttgagatggcaaaacagcacattgtcttggttttttcaaaaccgaatgtttggagatatagtaatccaatgggcatgactaatcctccatctaacgaatga

SEQ ID NO: 22046 - protein, 287 aa, Unknown
  Obtained from environmental sample
  DOMAIN (66)...(273): ScpA/B protein
  misc_feature (1)..(287): Xaa is any amino acid
MVGVGSWLISWFFVRACFDTPCLRERKKGKIKGMEISPSENPANFSGFRSFRLNKFEGPLDLLLFLIEKNEVNIYDIPIAKITEQYLDYLTDLSEFDLDEISEFQAMAARLLLTKSRMLLPIEIASDDEDEDPRQELVEHLIEYQKFKKLSGLMEERVRDTEWVFERKRLERPLPFNDEAMWEKVDVWDLLKIFAEYTRGLSRERIVDLYEEITVNEKKALLCEILEDRKECRFTDLLVRTNSILEFVCAFLALLEMAKQHIVLVFSKPNVWRYSNPMGMTNPPSNE

SEQ ID NO: 22047 - DNA, 831 bp, Unknown
  Obtained from environmental sample
  misc_feature (1)..(831): n is a, c, g, or t
ttgcatnnnnnnnnnnnnnnnnnnnnnnnnnncacaacccggagaatcgctaaaaactggcagtcgattgaaacaattctcaagtttgccggcgacgcgcaaattggaagggacggaatttttatcggcattggcggcggggtcataaccgatatcagcgcttttgccgcttcaatctatatgagaggctgcgctgtcgcccttatatcgactacattgcttggcatggtagacgcaagcgttggcggtaaaaccggttttgacctctttggcataaagaacctcgccggcactttttatccggccgcgcatgtgtatattcctctggaaagcctggcaagcctgccgcccgccgaatggaaatccggcatttctgaaattataaagaccgcggttctggagggtgatgatttcctcgctttgattgagaagatgaagggcggttttacagatggggcagtcgcgccctgtatagaccgcgcggtccggtttaagggccgtattgtcgaggaagatccttttgagacgggaagcaggcgtatgctgcttaaccttgggcatacctttggtcatgcgctggaagccgccgttgggctgggacgcgtatcgcacggggaagcggtcgcatggggtattgcccgctcctgcgaattgggtctggctttgggcatctgcccgccggccagggcagaaaggattatgtcgcttctaagggcttttgattatgagaccgcagccccccatccccttgccgcgggcgcggaattaatacaggctctgggcagcgataaaaagaaacgccgggggaaagcttgtttttatcgtccctga

SEQ ID NO: 22048 - protein, 276 aa, Unknown
  Obtained from environmental sample
  DOMAIN (1)...(267): 3-dehydroquinate synthase
  misc_feature (1)..(276): Xaa is any amino acid
MHXXXXXXXXXTTRRIAKNWQSIETILKFAGDAQIGRDGIFIGIGGGVITDISAFAASIYMRGCAVALISTTLLGMVDASVGGKTGFDLFGIKNLAGTFYPAAHVYIPLESLASLPPAEWKSGISEIIKTAVLEGDDFLALIEKMKGGFTDGAVAPCIDRAVRFKGRIVEEDPFETGSRRMLLNLGHTFGHALEAAVGLGRVSHGEAVAWGIARSCELGLALGICPPARAERIMSLLRAFDYETAAPHPLAAGAELIQALGSDKKKRRGKACFYRP

SEQ ID NO: 22049 - DNA, 732 bp, Unknown
  Obtained from environmental sample
  misc_feature (1)..(732): n is a, c, g, or t
ttgccaaataaagatgaggttgttgaacttgtgaacaaactccataacctgctattcccaggttactttggtaatcacaaaacaagtatgatattcaagaaagcccaccatctgctgaataggcaactgaatttgctcaactgcaaaaaagaactgggaaccgaatttttgaacaaactcccaaagatacgggcaagccttgcaacagatgtggaagccacttttgaaggagaccctgctgccaaagataggcaggagataataatttcctatcccggaatttacgccatttcaacttacaggctggctcacgagcttgaactgctgaaaatcccaaagctaccaagaataatgaccgaacacgttcactccgtgacaggcatagacattcaccctggggcgcaaataggcgattacttttttatagaccacggaacaggcattgtaataggcgaaaccacggttataggcgagcacgtgaaaatttaccaaggggtgacgctcggtgctctttcaacaaaaggcggcaacacattgaaggggcaaaaacgccacccaacggtagaggataatgttactatatattccggtgcttccatttttggtggcaatacggtgataggcaaagattccgtgcttggcagcaatgtgtttgtaaccagctcggttcctcctggctcaaaactgagcattcacacgtcaaaatcggtttctgctggtgctatgctttga

SEQ ID NO: 22050 - protein, 243 aa, Unknown
  Obtained from environmental sample
  misc_feature (1)..(243): Xaa is any amino acid
MPNKDEVVELVNKLHNLLFPGYFGNHKTSMIFKKAHHLLNRQLNLLNCKKELGTEFLNKLPKIRASLATDVEATFEGDPAAKDRQEIIISYPGIYAISTYRLAHELELLKIPKLPRIMTEHVHSVTGIDIHPGAQIGDYFFIDHGTGIVIGETTVIGEHVKIYQGVTLGALSTKGGNTLKGQKRHPTVEDNVTIYSGASIFGGNTVIGKDSVLGSNVFVTSSVPPGSKLSIHTSKSVSAGAML

SEQ ID NO: 22051 - DNA, 822 bp, Unknown
  Obtained from environmental sample
  misc_feature (1)..(822): n is a, c, g, or t
gtgttaaacgggttagataccatgatatatgtgaccattccatctaccgatgaaattctatttataaacgacaatatgaaaaaacattacggcttggacgataatgtagctgggcaaacttgttataaaatattccagaaaggactaaacaaaaaatgcgatttttgcccctgtttccaactcaataaggaaccatacaaccctgttatatgggaagaacgcagtaccttaacagaacgcgtatatcgaaatacagatagatacataaaatggcacgatggcagaactgttcatatacaacattccgtggatgtaactgaattagttattgcaagggaattggctgaacagagcagccgtttcaaaaaccgcttcttatcgcgcataagccatgaaataagaactcctatgaatacaataatgggtattaccgaaattcaattgcaaaacgaaattctagcccaagatttgaaaaaagcatttattgaaatttataactcaagtgatttgcttttagatattataaacaacatacttgatatatataaaatagaggcaaacaaaatagaaattgcgtttgtggaatatgatgttgctagtttgataaatgatattgtgcaacttaacattatgcgaatgaaaaataaaagcattgaatttgaatttcacgtggacgaagacctgccccttatattgtttggtgatgtgattcacattaagcagattttaaacaatttgctctccaatgcctttaaatatacaattgcctggaagagtcaaattatcggcgcatgcagaatactgcgaaaaagatcactttga

SEQ ID NO: 22052 - protein, 273 aa, Unknown
  Obtained from environmental sample
  DOMAIN (121)...(187): His Kinase A (phosphoacceptor) domain
  misc_feature (1)..(273): Xaa is any amino acid
MLNGLDTMIYVTIPSTDEILFINDNMKKHYGLDDNVAGQTCYKIFQKGLNKKCDFCPCFQLNKEPYNPVIWEERSTLTERVYRNTDRYIKWHDGRTVHIQHSVDVTELVIARELAEQSSRFKNRFLSRISHEIRTPMNTIMGITEIQLQNEILAQDLKKAFIEIYNSSDLLLDIINNILDIYKIEANKIEIAFVEYDVASLINDIVQLNIMRMKNKSIEFEFHVDEDLPLILFGDVIHIKQILNNLLSNAFKYTIAWKSQIIGACRILRKRSL

SEQ ID NO: 22053 - DNA, 675 bp, Unknown
  Obtained from environmental sample
  misc_feature (1)..(675): n is a, c, g, or t
ttggtggctgtttcttgggcttctggaaatggagggcgttcttgttgcgggccttgcttttaccgttgtaatatcgctgggcatatcgctgtttaccgccattttccttgttcccatactcgcaagccattacctgccgcttgttacgcgaaaggggaaccgcttacgggcatttttgtcggaatagacaaaataatgggaaacttttttatctggctggaagaaaaataccgcaacgcggttcgcaaagttcttaaccataaacttattgtcattatctttttgcttgtattgtttgccgtaagcatgtttttagttccggtaatcgggtttttatttatgccccagcagaatgatgacaacgtgagcataacccccacattgccaatggggacgcctttacaggaaacggaagctgtattaaggcaggtgcagctaatcgtagaaaaagaaattaaaggttacgaaagattgattttacgcgcgggcggcggcggcatgttcggcgttggcggaggaagcaactcaagttctttgcgcatcaaccttcccccgtataaaaaaagaatagaaagcgcgaatgaaatgaaagacatattacgccctcttgtaaatcagattcccggcgtaattttctctctcggcggcggcggcatgaaaggcatgggcggttaa

SEQ ID NO: 22054 - protein, 224 aa, Unknown
  Obtained from environmental sample
  misc_feature (1)..(224): Xaa is any amino acid
MVAVSWASGNGGRSCCGPCFYRCNIAGHIAVYRHFPCSHTRKPLPAACYAKGEPLTGIFVGIDKIMGNFFIWLEEKYRNAVRKVLNHKLIVIIFLLVLFAVSMFLVPVIGFLFMPQQNDDNVSITPTLPMGTPLQETEAVLRQVQLIVEKEIKGYERLILRAGGGGMFGVGGGSNSSSLRINLPPYKKRIESANEMKDILRPLVNQIPGVIFSLGGGGMKGMGG

SEQ ID NO: 22055 - DNA, 663 bp, Unknown
  Obtained from environmental sample
  misc_feature (1)..(663): n is a, c, g, or t
atgtcnttagtgccttttttttccagcgttaacggaattaaaatgcatcaaaacaaggaacttcttacggatctgttaaaagatgaaatgaaattcaagggctttgtcgtatcggactggtcggcaatcaaacagctgacaggcggcagttacaaaatgcagattgcaaacgcgattaacgcgggagtggatatgtgcatggcgacagacggccgcgacaactggataaattttatcagtaaccttaccaagctggttgaagaaggaactgtcccaatgtcgcgtattaacgacgccgttattcgaattttactgtttaaacaaagtataggcttatttgagaatcctttaacaccgcacgccggtgaaatcggcacggaggaaaacagagccgccgcgcgcgctcttgtttcagactcgctcgttcttttgcgtaacgaaggcaacgcgatgaaaaaactttctgaaagcaaaaaaattttagtcgcgggtcagggagccaacgatttgggaatgcaatgcggcggatggacaatatcatggcagggcgggaatggcagaattacaaaaggaacaacaatactggaaggaatacaggcggcgacaaagggcaaagcttcaattacttatgccgaaaacggcgaaatgggcggcgctttttga

SEQ ID NO: 22056 - protein, 220 aa, Unknown
  Obtained from environmental sample
  misc_feature (1)..(220): Xaa is any amino acid
MSLVPFFSSVNGIKMHQNKELLTDLLKDEMKFKGFVVSDWSAIKQLTGGSYKMQIANAINAGVDMCMATDGRDNWINFISNLTKLVEEGTVPMSRINDAVIRILLFKQSIGLFENPLTPHAGEIGTEENRAAARALVSDSLVLLRNEGNAMKKLSESKKILVAGQGANDLGMQCGGWTISWQGGNGRITKGTTILEGIQAATKGKASITYAENGEMGGAF

SEQ ID NO: 22057 - DNA, 597 bp, Unknown
  Obtained from environmental sample
  misc_feature (1)..(597): n is a, c, g, or t
ttggcggacatggttgaaacacgcgacaaggggaccggatgccatattgaacgcacgtccgtgtacatcaagattctaatacaggaaatgagagagcgcggattgtatgccgatgaaatgcaaggctgggatattgataaaatggtatcgtcggcgcgtatgcatgatctgggaaaaattaccatcacggatactatcattaacaagccgggcaagcttactgacaatgaatttgacataatgaaaggccataccagtgaaggcgagcgcataatagatgaaattatttcgcgcaccggcgaaggcgaattcttgaacaacgcgagattgttcgcgggaactcatcatgaaagatgggatggtaaaggttacccacgccggcttaaaggggatgaaattccccttcaagggcggataatggcgattgttgacgtatatgacgcgcttgtttccgagcgtccatataaaaaggcgttctcggatgaagaagcgctagatattattatgaaaaattccggtacgctttttgacccgaaaatagccgaactgtttaatgaagttaaagatcgcataaaaatggcaagggcggactgttaa

SEQ ID NO: 22058 - protein, 198 aa, Unknown
  Obtained from environmental sample
  DOMAIN (12)...(149): HD domain
  misc_feature (1)..(198): Xaa is any amino acid
MADMVETRDKGTGCHIERTSVYIKILIQEMRERGLYADEMQGWDIDKMVSSARMHDLGKITITDTIINKPGKLTDNEFDIMKGHTSEGERIIDEIISRTGEGEFLNNARLFAGTHHERWDGKGYPRRLKGDEIPLQGRIMAIVDVYDALVSERPYKKAFSDEEALDIIMKNSGTLFDPKIAELFNEVKDRIKMARADC

SEQ ID NO: 22059 - DNA, 441 bp, Unknown
  Obtained from environmental sample
  misc_feature (1)..(441): n is a, c, g, or t
ttgacttgtgcaaacaacgggcccgatattcgcattgctatttctcttaccacggcgcgagaggaactcaggcagcgcctaatgcccgcaagcagggaaaacccccttcccgttttaaaggaaacgctcttggaataccagaaaaaaaagaaacgcagaatcactttggaaatggtgctattaagagggcttaacaccggcgcttccgacgcaaaggccgcgcgggaatttgcccgcgggcttgacacggtagtcaacctcatcccctggaatccggtggaaggtctggaatttgacggcctgcctttatacgcgccaacccaaaaggaaattagagattacgccagcgcccttgaaaaagaaggcctaaaagttacaatgcggataaaaaaaggacgcggcatttccggcgcttgcgggcaattggggcgcacaacgtga

SEQ ID NO: 22060 - protein, 146 aa, Unknown
  Obtained from environmental sample
  misc_feature (1)..(146): Xaa is any amino acid
MTCANNGPDIRIAISLTTAREELRQRLMPASRENPLPVLKETLLEYQKKKKRRITLEMVLLRGLNTGASDAKAAREFARGLDTVVNLIPWNPVEGLEFDGLPLYAPTQKEIRDYASALEKEGLKVTMRIKKGRGISGACGQLGRTT

SEQ ID NO: 22061 - DNA, 546 bp, Unknown
  Obtained from environmental sample
  misc_feature (1)..(546): n is a, c, g, or t
atgaaagaaattttgtcacaggtggatcttatccgcgaagcgtttcattacaagagccgctttgagggatccactatggtgtttaagatcgactgccccgtgatcgaggagccgggttttccctggctggtgaaggatctggctttgctggcgcagaccggcttcagggttgttatagtgccgggggcaaaagaagcgatagaccgtgtcttacaggggcaaaatatagcttcatctttcatcgccgattcgggagaaccagttcgaatcaccgaagcgcgggcgatgccgtttgtggaaatggcggcgttccatgtggccacgcgttttatgcccttcctttccggcagccgggtagacgcgatcatcgggaattttgtccgggcgaggggattgggggtcgtggacggcgttgacatggagcataccggggccgttgacaaaattttcaccgattcgataagccgcgttcttgatttgggcgcggttcccatactgccctgcatgtgnnnnnnnnnnnnnnnnnnnnnnnnnnatgcaagctga

SEQ ID NO: 22062 - protein, 181 aa, Unknown
  Obtained from environmental sample
  misc_feature (1)..(181): Xaa is any amino acid
MKEILSQVDLIREAFHYKSRFEGSTMVFKIDCPVIEEPGFPWLVKDLALLAQTGFRVVIVPGAKEAIDRVLQGQNIASSFIADSGEPVRITEARAMPFVEMAAFHVATRFMPFLSGSRVDAIIGNFVRARGLGVVDGVDMEHTGAVDKIFTDSISRVLDLGAVPILPCMXXXXXXXXXXAS

SEQ ID NO: 22063 - DNA, 558 bp, Unknown
  Obtained from environmental sample
  misc_feature (1)..(558): n is a, c, g, or t
atgcgttatgcaaaagcccattattcaggcgaatttgaagctgattttgttacgttaaatccgtatatgggaatggactctcttgaaccgtggattaaaaaagcgcaggagcgcggcaagggcgcttttgtcctgatgagaacaagcaacccgggaatgaaggattttgaatatctaaaacttgcggacggaaagcgcctttacaatgctgtaggagaaaaattgtcggaacttgcgcagcgttacatgggtgagaagggatatggacttttcggttccgtgatcggctgtactgaaagagaggaagccgctgatctcagaaaggattatcccgcccttttttttctgataccaggttacggcgcacaaggcggaagcgcggcggatgccgctcttctacttcaaaacggaaacggaggcgtagtaaacgcttcccgctcgattattgccgcatggcagaaagaaaaacctgaaaacacaaacaatatttttgccgcagaagccgcccgtcgtgcggcaatcaaaatgaggaacgagattctgggggcaataggataa

SEQ ID NO: 22064 - protein, 185 aa, Unknown
  Obtained from environmental sample
  misc_feature (1)..(185): Xaa is any amino acid
MRYAKAHYSGEFEADFVTLNPYMGMDSLEPWIKKAQERGKGAFVLMRTSNPGMKDFEYLKLADGKRLYNAVGEKLSELAQRYMGEKGYGLFGSVIGCTEREEAADLRKDYPALFFLIPGYGAQGGSAADAALLLQNGNGGVVNASRSIIAAWQKEKPENTNNIFAAEAARRAAIKMRNEILGAIG

SEQ ID NO: 22065 - DNA, 324 bp, Unknown
  Obtained from environmental sample
  misc_feature (1)..(324): n is a, c, g, or t
atgctaaaaatcacgggcgctaaggggagattatcctgtttgctgggcatgagggaaaggttacctgttgctacaaacatgtctggtcgcggaacggacatagctcttgggcctggcgttgttgagcttggtggcttgcacgttcttggtaccgaaaggcacgaaagccgccgcatacataaccagctcagagggcgttccggtaggcaaggagaccccggctcttctcaatactatttatcgctagacgatgatttgatgcgaatttttggccgagaaaatgtcataaaaataatggacaggttcgggttcaaagatgcatga

SEQ ID NO: 22066 - protein, 107 aa, Unknown
  Obtained from environmental sample
  misc_feature (1)..(107): Xaa is any amino acid
MLKITGAKGRLSCLLGMRERLPVATNMSGRGTDIALGPGVVELGGLHVLGTERHESRRIHNQLRGRSGRQGDPGSSQYYLSLDDDLMRIFGRENVIKIMDRFGFKDA

SEQ ID NO: 22067 - DNA, 717 bp, Unknown
  Obtained from environmental sample
  misc_feature (1)..(717): n is a, c, g, or t
atgaacaagcttgcctcttcgatacttgccctgtatccttatgatgatgacccggaaaaccagtctccagaaaatgttctgcgccagtgcatagaattaatcgcgcgtttcccggcaattgccgcatattcctatatgtcaaaaaaacaccattttgaccgcgaaagtttaataattcacccctcagatccgtcattatcaagcgcggaaaccgttctttcgcttataagaccggataaaaaatacaccccttatgaagctatgttattagaccttgctttagtgcttcatgcggaacacggcggcggaaacaactctacatttacggtgcatgttgtttcatcttcggaaacagacacctactccgcgattgccgccggtatcgcttcgctaaaaggctacaaacacggcggagcaaacgcgaaagtaatcggcatgatggatgaaatcatgaagaatgttaaaaactgggaaagtgaagaagaagtgtccgcctaccttgaaaaaattcttaaaggacacgcttatgacaaaacaaaaaagatatacggtcagggacacgcggtttatacattatcggatccacgcgcaatcttgttacgcgataaagcaagagctctggcggaagaaaaaggaatgttaaaagaatttaatctttattgcctgatagaaaaacttactcccatagtgtttaaaaaagttaaaggctccatataa

SEQ ID NO: 22068 - protein, 238 aa, Unknown
  Obtained from environmental sample
  DOMAIN (1)...(236): Citrate synthase
  misc_feature (1)..(238): Xaa is any amino acid
MNKLASSILALYPYDDDPENQSPENVLRQCIELIARFPAIAAYSYMSKKHHFDRESLIIHPSDPSLSSAETVLSLIRPDKKYTPYEAMLLDLALVLHAEHGGGNNSTFTVHVVSSSETDTYSAIAAGIASLKGYKHGGANAKVIGMMDEIMKNVKNWESEEEVSAYLEKILKGHAYDKTKKIYGQGHAVYTLSDPRAILLRDKARALAEEKGMLKEFNLYCLIEKLTPIVFKKVKGSI

SEQ ID NO: 22069 - DNA, 777 bp, Unknown
  Obtained from environmental sample
  misc_feature (1)..(777): n is a, c, g, or t
atggtgactggggcaatggaaaaaagccaaaagcgaggggaaacccagcactttgagatccgcaagcacctgcttaaatacgacgacgtgatgaacaagcagaggatattcttttatggactccgaactgaaatactgaaaggcaacacaaaagaatacgtgcttagggtggcggctgagattgccgaggggcttgtccatgaccacctgtctcaaaagggcgagaaagacatcgaaggcttcaaagagagggtcgaacagctattcgccatgtacaatctggatttcaactcatttggcgcaatgacccaagccgaagccacttccagcctgaccaagatcgtccacgacgcttacctagacaaagagcgcaggcttggctccgaagaaatcctgcgctggcacgagcgcgtggcaaccctgcaaatcattgattcggcttggaagaggcacctgctggtcatggatcacctcaaagaagccatcggctttaggggctatgggcaaaaagacccgctggtcgaatacaagcgcgaaagctacgaatactttgagacaatgcgctttggatacgaggacgaaatcatttcgtacctgtaccgcgtagagccgcagccagcatttatcccagaagaatacgccccgcagggcgaaatcgcaaaccggccggacccggacgaccagacgcccaatgaaacctttaccgacaaatcggccacgggcaacatccagcgtgtcatgaggttccaagtaggcggccacagcgacgatgactag

SEQ ID NO: 22070 - protein, 258 aa, Unknown
  Obtained from environmental sample
  DOMAIN (1)...(204): SecA Wing and Scaffold domain
  misc_feature (1)..(258): Xaa is any amino acid
MVTGAMEKSQKRGETQHFEIRKHLLKYDDVMNKQRIFFYGLRTEILKGNTKEYVLRVAAEIAEGLVHDHLSQKGEKDIEGFKERVEQLFAMYNLDFNSFGAMTQAEATSSLTKIVHDAYLDKERRLGSEEILRWHERVATLQIIDSAWKRHLLVMDHLKEAIGFRGYGQKDPLVEYKRESYEYFETMRFGYEDEIISYLYRVEPQPAFIPEEYAPQGEIANRPDPDDQTPNETFTDKSATGNIQRVMRFQVGGHSDDD

SEQ ID NO: 22071 - DNA, 552 bp, Unknown
  Obtained from environmental sample
  misc_feature (1)..(552): n is a, c, g, or t
atggcggaaaaaacaatcgcggctattaataaaaccgatattcccggtgcgagtgttgccctcatgtcagaatttatttcgtcgcgtcttccatcccgtatctttcagatttccgctaaaaccggggaaggtgttgaggaactgttgctcacgcttttcgcgcaagccccggagggcgagcctctttatgaaggagattactataccgatcaggaaacaggatttcgcatttcagaaattatccgcgagcaggcgattagccgtttgcgtcaggaattaccccactgtctttacgtggaaatcgccgacgcggaatttttggaggctgagcaaagactctgggttcgggcgttcatcgttgtggaacgcgaatcgcaaaaaggcatggtcgtcggcgcgggcggtgaaatgattaaggcgattcgtctttcttctcttaaagaactgaaaaaaatttttgactggaaaattgatcttgacctgcgcgtaaaaaccggaaaagactggcggcgcaacgacaacattcttcgcaaggttattcaaggtcaatga

SEQ ID NO: 22072 - protein, 183 aa, Unknown
  Obtained from environmental sample
  DOMAIN (117)...(181): KH domain
  misc_feature (1)..(183): Xaa is any amino acid
MAEKTIAAINKTDIPGASVALMSEFISSRLPSRIFQISAKTGEGVEELLLTLFAQAPEGEPLYEGDYYTDQETGFRISEIIREQAISRLRQELPHCLYVEIADAEFLEAEQRLWVRAFIVVERESQKGMVVGAGGEMIKAIRLSSLKELKKIFDWKIDLDLRVKTGKDWRRNDNILRKVIQGQ

SEQ ID NO: 22073 - DNA, 816 bp, Unknown
  Obtained from environmental sample
  misc_feature (1)..(816): n is a, c, g, or t
atgaatattattaacgcgataatactgggtattgttcaaggattgactgaatttctgccggtcagcagttcgggacatcttgtacttttacaaaaaatatttaaaatagacgagccttctttattttttgatacaatgcttcatgttggaacattaatcgccgttatgacggtcctatggaaagatatttttgaaatcttaaaaaaaccgattcaaaaactgacaggtttccttattttagcgacaattccagccgtaattgccgctcttctttttaaagacgctatcgaagatatttttaaatcaggaaaatggttaggcgtttgttttttaataacggccacgcttttagttatggcggaaatactttcaaggcgcaataaaaacgaaaatcacgccggtgagagacgggacggaaacggcgtaaagatgaattggcttcacgctttttttattggcgtaatgcaggcgcttgccattcctccgggtatttcgcgctcaggagcgacaatcagcggttctcttttttgtaaacttgaccgtgattttgccgcgcgtttttcgttcttaatgtccatcccggccattcttggcgccgttgttatgcaaactaaagatttggttaagcatggcgcggcggaaagtaccggctttgggacttccgctattatcgccgggacaattacctcggcggttgtgggggttttcgcggttaaatttatgttgaagattattagggaaaaaatcactttttggattcgcggtttatactggaatgcttggggtggttgttttgattttacagggaaacattag

SEQ ID NO: 22074 - protein, 271 aa, Unknown
  Obtained from environmental sample
  DOMAIN (5)...(265): Bacitracin resistance protein BacA
  misc_feature (1)..(271): Xaa is any amino acid
MNIINAIILGIVQGLTEFLPVSSSGHLVLLQKIFKIDEPSLFFDTMLHVGTLIAVMTVLWKDIFEILKKPIQKLTGFLILATIPAVIAALLFKDAIEDIFKSGKWLGVCFLITATLLVMAEILSRRNKNENHAGERRDGNGVKMNWLHAFFIGVMQALAIPPGISRSGATISGSLFCKLDRDFAARFSFLMSIPAILGAVVMQTKDLVKHGAAESTGFGTSAIIAGTITSAVVGVFAVKFMLKIIREKITFWIRGLYWNAWGGCFDFTGKH

SEQ ID NO: 22075 - DNA, 354 bp, Unknown
  Obtained from environmental sample
  misc_feature (1)..(354): n is a, c, g, or t
atggctggatcgccgccgccggattgccgccggaaagctggagccattcaaatgaccatgcccaactataattccccggacgatctgcgggcattcctggacaataacggaatgggcatgagaaaaaaattcggacagaattttttaatcaatccggctatacggaaaacccttattgaggctctggaagcgcggacgggggaatccgtctgggaaatcggggccggacttggggccatgaccggcccgcttctgaaacaaggcctgctcgtccgggcttttgagatagaccggggctttatcggcgtccttaaggaattcttttcaactaaacgtaattttaccctgatttaa

SEQ ID NO: 22076 - protein, 117 aa, Unknown
  Obtained from environmental sample
  misc_feature (1)..(117): Xaa is any amino acid
MAGSPPPDCRRKAGAIQMTMPNYNSPDDLRAFLDNNGMGMRKKFGQNFLINPAIRKTLIEALEARTGESVWEIGAGLGAMTGPLLKQGLLVRAFEIDRGFIGVLKEFFSTKRNFTLI

SEQ ID NO: 22077 - DNA, 432 bp, Unknown
  Obtained from environmental sample
  misc_feature (1)..(432): n is a, c, g, or t
gtgatgacgcaggcgatcttcgcccttaggggcaaagttgaaaacgtccacggtaaaaaacgcgcagcaatttacaaaaacgaagaactttttaacatgatgatgactttaggcatagacaacgatattgacggccttcgttacgccagaatcgtaatcgccacagacgccgattttgacggttttcatattcgcaacctgcttcttacgttttttctctcttattttgaggaacttgttaccgcaggccatgtttttattctggaaacgccccttttccgcgtgcgtacaaaaaaagaaacccgctactgctatacggaaaaagaacgcgatgcggcatccgccgcgcttggacagcagagcgaaataacccgttttaaagggctagccgagataagtcccaagagaagtcggtcagtttattggctctga

SEQ ID NO: 22078 - protein, 143 aa, Unknown
  Obtained from environmental sample
  misc_feature (1)..(143): Xaa is any amino acid
MMTQAIFALRGKVENVHGKKRAAIYKNEELFNMMMTLGIDNDIDGLRYARIVIATDADFDGFHIRNLLLTFFLSYFEELVTAGHVFILETPLFRVRTKKETRYCYTEKERDAASAALGQQSEITRFKGLAEISPKRSRSVYWL

SEQ ID NO: 22079 - DNA, 435 bp, Unknown
  Obtained from environmental sample
  misc_feature (1)..(435): n is a, c, g, or t
atggcaagatacaccggtcctgtttgcagaatgtgccgtgtagaacagaaaaagttaatgctgaaaggcaatcgctgcaagagcgataaatgcccgatgaataaaaaaagagccgctcccggaaaggatccaaagtcgcggcccggtaaaaggtctgattacggcgttcagctcacggaaaaacaaaaacttaatagaatctacggaatgcttgaaaagcagttcagtcttttcttccagcgcgctttacgtatgagcggtattacaggtgaaaatctttttgtattgcttgaacgccgtcttgaccatgttgtataccgtctgcgcttttccacgtcaagaagtcacgcgcgtcagtttgtactgcccggtcatgtccgtgtaaacggaaaaaagataacaattccttcctatcttgtaaacgcggaagactag

SEQ ID NO: 22080 - protein, 144 aa, Unknown
  Obtained from environmental sample
  DOMAIN (99)...(144): S4 domain
  misc_feature (1)..(144): Xaa is any amino acid
MARYTGPVCRMCRVEQKKLMLKGNRCKSDKCPMNKKRAAPGKDPKSRPGKRSDYGVQLTEKQKLNRIYGMLEKQFSLFFQRALRMSGITGENLFVLLERRLDHVVYRLRFSTSRSHARQFVLPGHVRVNGKKITIPSYLVNAED

SEQ ID NO: 22081 - DNA, 495 bp, Unknown
  Obtained from environmental sample
  misc_feature (1)..(495): n is a, c, g, or t
gtgcggcagccgtcatacccacagtgtacggatgggaattcggcgctgaaaaagccgtgcggcgcttttgtaaccctgcacattcaggacgcttcgggaaaccgcaatttacgcggctgcatcggcagaatgatggcaaacctgcccatggaagagacggtccgtaccatggcaagagaagctgcgtttggcgaccctcgttttcctcccctcagaaaggaagagctggcccgctgccatatcgaaatatccgcgctttcccccatgtcggcctgtcccaatccccggcaggtcaaggtcggcgttcacggcctgtacctgatcaggggaggacgctcaggggtgctgctgccccaggttccggttgaacagggctggaatctggacgaatatttggactacatttgcgttaaggcgggacttcctcccggttcttatgacgccccggacgcgcaattatatacttttaccgctatagttttcggcgaggaatga

SEQ ID NO: 22082 - protein, 164 aa, Unknown
  Obtained from environmental sample
  DOMAIN (10)...(164): AMMECR1
  misc_feature (1)..(164): Xaa is any amino acid
MRQPSYPQCTDGNSALKKPCGAFVTLHIQDASGNRNLRGCIGRMMANLPMEETVRTMAREAAFGDPRFPPLRKEELARCHIEISALSPMSACPNPRQVKVGVHGLYLIRGGRSGVLLPQVPVEQGWNLDEYLDYICVKAGLPPGSYDAPDAQLYTFTAIVFGEE

SEQ ID NO: 22083 - DNA, 537 bp, Unknown
  Obtained from environmental sample
  misc_feature (1)..(537): n is a, c, g, or t
atgatcgtgtttaaaggcttaactcagcgggttcaacggatactttccaccaaagcccaggaagaagcccagcgctttaattcggatcaacttttgcctgaacatatcatcatcgctttgctcaaggatggggatggaaccgcctgcaaagcgctggtgtttttgcggatagatttacaggaattcaagaattccctggaaagcgccatccccaggattccggggcttacgatacacagcgatgtacctccctcaaaacgtaccaagaatatgctggacattgccacagaagaagcccggataatgggaagcgagtttttgggtacggaacatctgctgtttgccgccatgcgggaacagaattccagcgtgcaggtgtaccttaaccagagggctgtggataccgatatgatgcgggttgttgtgcatacaactttttaccagtccggttccaaaaccgggaatgagtatgttcctgccgacaattatccgtcgtattttattcactgtgtaacgcccgatacttctgcactataa

SEQ ID NO: 22084 - protein, 178 aa, Unknown
  Obtained from environmental sample
  DOMAIN (95)...(139): Clp amino terminal domain
  misc_feature (1)..(178): Xaa is any amino acid
MIVFKGLTQRVQRILSTKAQEEAQRFNSDQLLPEHIIIALLKDGDGTACKALVFLRIDLQEFKNSLESAIPRIPGLTIHSDVPPSKRTKNMLDIATEEARIMGSEFLGTEHLLFAAMREQNSSVQVYLNQRAVDTDMMRVVVHTTFYQSGSKTGNEYVPADNYPSYFIHCVTPDTSAL

SEQ ID NO: 22085 - DNA, 891 bp, Unknown
  Obtained from environmental sample
  misc_feature (1)..(891): n is a, c, g, or t
gtgcttatatacaaagttacccaaaacagcatcaccattcagaataaaattacggtgaacatatctagcaagcttccatctgtaccagaattagaccctatccccgttagtcgcaaagttccaaccactttgaatattaagagcgatctatttgtgtcagacccaagcgcaaaagggcttcaaataacatcggtttctgtggatccgtctagtgctggaacagcttctattgcctcagataacatcactttcactccggctgcttctctaagtaatgcaagtggcactactgaagcaacgcttaaatacacaatcaaaaatgaaagtggtagcagaacaggaaacgttattttgaggattcagaattttgcacccacaattaaaaacctaaccaatacattttcaccatctgtgccaaacacagatcctgtgattattgacatagaaagatttagcggcaaagatgcagacggagaccctataaaattcgttacggtgtatttagacccgcagtatcctggaaagttagaaaaggtaagtgacgatacctataaatataccccagaagctggcaaaataggcaaagttacatttttggctataataacagatggttctttgaattcacctacgggcagggcaaacataacgctcacgggttctggcacagacataggcaatttaacaccgccaacatcaataccaggcaatatacccgaaccacccgaaccacccgaaccacctgatgccgtgcatcaagttggcattgcaaagggcatgggcattgctcccattggttttggcaaaatagaactttattttgcacatagcggcattgcaaaactgggatgttatcccctttctgggaaaaaactgggggagctttgctaa

SEQ ID NO: 22086 - protein, 296 aa, Unknown
  Obtained from environmental sample
  misc_feature (1)..(296): Xaa is any amino acid
MLIYKVTQNSITIQNKITVNISSKLPSVPELDPIPVSRKVPTTLNIKSDLFVSDPSAKGLQITSVSVDPSSAGTASIASDNITFTPAASLSNASGTTEATLKYTIKNESGSRTGNVILRIQNFAPTIKNLTNTFSPSVPNTDPVIIDIERFSGKDADGDPIKFVTVYLDPQYPGKLEKVSDDTYKYTPEAGKIGKVTFLAIITDGSLNSPTGRANITLTGSGTDIGNLTPPTSIPGNIPEPPEPPEPPDAVHQVGIAKGMGIAPIGFGKIELYFAHSGIAKLGCYPLSGKKLGELC

SEQ ID NO: 22087 - DNA, 330 bp, Unknown
  Obtained from environmental sample
  misc_feature (1)..(330): n is a, c, g, or t
gtgctaaacggaaaaacaggaacagtggtaagtgggtcaaacgttcaaatagacgaagttgccgtttctcacggaagcatcaccattcaggttgccaacacgcaaacagcagctactccaacttttatagggcaagcaactgctataaacaatcagcaattgaatgtgcaggaacctcgcacggaaacacgggttttgccagcggtcacaaatgcaggtcagttagcgcaagccttgaacggccttggcgtttcgccacttgatataatctcaattttccaagcgattaagaaggctggggcattacacgcggaattggtggttatgtaa

SEQ ID NO: 22088 - protein, 109 aa, Unknown
  Obtained from environmental sample
  misc_feature (1)..(109): Xaa is any amino acid
MLNGKTGTVVSGSNVQIDEVAVSHGSITIQVANTQTAATPTFIGQATAINNQQLNVQEPRTETRVLPAVTNAGQLAQALNGLGVSPLDIISIFQAIKKAGALHAELVVM

SEQ ID NO: 22089 - DNA, 468 bp, Unknown
  Obtained from environmental sample
  misc_feature (1)..(468): n is a, c, g, or t
atgacccagcaagaaaaatggttggcagtgtttttgaagttgttgaaaacgggaaaattcaatatggaactctgcattaaaaaatttatgcagcattactatgaaatttaccacaagaaagattcaaaatttttggagcgtgagtgtagattattgtttttgacatatttgcgacctctgataaacggtgctggcttttaccatattgaaagcgaaacccgaaacggcaatagaacggatttgattgttgatttcaacgatgagcagtttattattgagctgaaaatttggaaaggcgagcaaaagcacgaaaaagcttatgaacagttgataaaatacttagattcaaaaaacaagagcgagggctatctgctcacctttgactttagaaagaggcgagcgaaaaaacccagtgcaaaatgggtgataaaaagcagaaagaaattttatgattgcctagcggtgtga

SEQ ID NO: 22090 - protein, 155 aa, Unknown
  Obtained from environmental sample
  misc_feature (1)..(155): Xaa is any amino acid
MTQQEKWLAVFLKLLKTGKFNMELCIKKFMQHYYEIYHKKDSKFLERECRLLFLTYLRPLINGAGFYHIESETRNGNRTDLIVDFNDEQFIIELKIWKGEQKHEKAYEQLIKYLDSKNKSEGYLLTFDFRKRRAKKPSAKWVIKSRKKFYDCLAV

SEQ ID NO: 22091 - DNA, 408 bp, Unknown
  Obtained from environmental sample
  misc_feature (1)..(408): n is a, c, g, or t
atgagtataaaagacggcagatcattaagccatgaatcattggaagaacggcggcggataataatcagtatgaaaatgaaagggtacagtactaaagaaatagcagagataaccggatgttccagaataactgtatacttgttatggcacaaatggaacaaagctaaagggaagaaagagaaagaaaatgttatcgcgttaaaaaaaacgggaaggaaaacagggtccggcaggaccttaacggagaaacaggaaaatattattaaaaaaacgataataaagaaatatcctgaccagatcgatctagattacgcgttatggacacgggaaggcatacagcaactgatacaaaagatatttgatataaaaaggccgatacgcaccgtaggcgaatacttgaggcggtaa

SEQ ID NO: 22092 - protein, 135 aa, Unknown
  Obtained from environmental sample
  misc_feature (1)..(135): Xaa is any amino acid
MSIKDGRSLSHESLEERRRIIISMKMKGYSTKEIAEITGCSRITVYLLWHKWNKAKGKKEKENVIALKKTGRKTGSGRTLTEKQENIIKKTIIKKYPDQIDLDYALWTREGIQQLIQKIFDIKRPIRTVGEYLRR

SEQ ID NO: 22093 - DNA, 555 bp, Unknown
  Obtained from environmental sample
  misc_feature (1)..(555): n is a, c, g, or t
atgagaagtcgaaaaatgtacaagcaggcggtatttaactgctattacgggcttaattatattgatgaaaatgaaaggacagaagagttgtgcaaaatggcggtagaacaatccggaaaagcccttggttttgtacccgaacatttcaaaactccgaagctctgccttaatgcggtaaagaaggactgttatgcccttgagtttgttcccgaaaaacttaaaaccacgcagttatgcgccgatgccgtaaaagaagatcccagactgttaaaatttgtgccggaagatttgagaaccaaagaaatgtgccttctcgcgctgtctcccgcatcgggagacatctcgcttatactactaacctggaaagataactgcgttattgccaatgtaccgcaggagtttattacaaaagaactttgtctcgacgcggttaccagcgatgagcagtctcttaaattcattcctgataaatttaaatttcctgaagtttatcttgcggctgtaacagaatacgggcgggcaaagaactatgtacctgaagaattaaaaacgtag

SEQ ID NO: 22094 - protein, 184 aa, Unknown
  Obtained from environmental sample
  misc_feature (1)..(184): Xaa is any amino acid
MRSRKMYKQAVFNCYYGLNYIDENERTEELCKMAVEQSGKALGFVPEHFKTPKLCLNAVKKDCYALEFVPEKLKTTQLCADAVKEDPRLLKFVPEDLRTKEMCLLALSPASGDISLILLTWKDNCVIANVPQEFITKELCLDAVTSDEQSLKFIPDKFKFPEVYLAAVTEYGRAKNYVPEELKT

SEQ ID NO: 22095 - DNA, 705 bp, Unknown
  Obtained from environmental sample
  misc_feature (1)..(705): n is a, c, g, or t
atgagaataaagatatgcgcgagagatagggtgagagacgtagagagagcaggagaacatggaggtagtgcaagagacaggtcgatagagagacagaggaaaaaaggtaggcataaagagagcgccaacgcagagaatatgagtaaccgcgaagcaaaggagaaagagggaaaaagaaaagagagaaggagtgggagaaggatagcagaggtgcaagaagaaaagaggggagaaggagaaaagaagggaacggaagaaggagggagaaggaagaaagagagggggagagagaggggagaaaaaaaaagagggaaaggagaggagagaagagaggaggagaagaaaggggaaaaggaagggaggaggggaagaaaaaaaaaaaggaaaaggagaggggngaagaaagaggagagaagaagaggaaggaagaggagaagggaagagagaaggaggaagaagggggaaagaagaaannggaagggagggggggggaagaaagagaaagggaaggaaaaaagaaggaaaagggaggaagaaaaaaggggaaaaagaaggaaagaaggggagggagagaggagggaggaaaagggaaggaaaaagggaagaggaaaagacaggggagagaggggagggagggagaaagagaaaaaaagagtaacacctctcccccacccacattcttccaatcatcaaaagactcaataa

SEQ ID NO: 22096 - protein, 234 aa, Unknown
  Obtained from environmental sample
  misc_feature (1)..(234): Xaa is any amino acid
MRIKICARDRVRDVERAGEHGGSARDRSIERQRKKGRHKESANAENMSNREAKEKEGKRKERRSGRRIAEVQEEKRGEGEKKGTEEGGRRKKERGRERGEKKRGKGEERREEEKKGEKEGRRGRKKKRKRRGXKKEERRRGRKRRREERRRKKGERRXXKGGGGKKEKGKEKRRKREEEKRGKRRKEGEGERREEKGRKKGRGKDRGERGGREKEKKRVTPLPHPHSSNHQKTQ

SEQ ID NO: 22097 - DNA, 759 bp, Unknown
  Obtained from environmental sample
  misc_feature (1)..(759): n is a, c, g, or t
ttgagtcttttgatgattggaagaatgtgggtgggggagaggtgttactctttttttctctttctccctccctcccctctctcccctgtcttttcctcttccctttttccttcccttttcctccctcctctctccctccccttctttccttctttttccccttttttcttcctcccttttccttcttttttccttccctttctctttcttccccccccctcccttccnntttcttctttcccccttcttcctccttctctcttcccttctcctcttccttcctcttcttctctcctctttcttcncccctctccttttcctttttttttttcttcccctcctcccttccttttcccctttcttctcctcctctcttctctcctctcctttccctctttttttttctcccctctctctccccctctctttcttccttctccctccttcttccgttcccttcttttctccttctcccctcttttcttcttgcacctctgctatccttctcccactccttctctcttttctttttccctctttctcctttgcttcgcggttactcatattctctgcgttggcgctctctttatgcctaccttttttcctctgtctctctatcgacctgtctcttgcactacctccatgttctcctgctctctctacgtctctcaccctatctctcgcgcatatctttattctcatctctctattttctcctcctctctttcctcatctccctctcttatctttctttcctaa

SEQ ID NO: 22098 - protein, 252 aa, Unknown
  Obtained from environmental sample
  misc_feature (1)..(252): Xaa is any amino acid
MSLLMIGRMWVGERCYSFFLFLPPSPLSPVFSSSLFPSLFLPPLSLPFFPSFSPFFFLPFPSFFLPFLFLPPPSLPXSSFPLLPPSLFPSPLPSSSSLLFLXPSPFPFFFSSPPPFLFPFLLLLSSLLSFPSFFFSPLSPPLFLPSPSFFRSLLFSFSPLFFLHLCYPSPTPSLFSFSLFLLCFAVTHILCVGALFMPTFFPLSLYRPVSCTTSMFSCSLYVSHPISRAYLYSHLSIFSSSLSSSPSLIFLS

SEQ ID NO: 22099 - DNA, 900 bp, Unknown
  Obtained from environmental sample
  misc_feature (1)..(900): n is a, c, g, or t
ttggccaaggaccgaaatgggctaaaaaagaacgagcgttcattttttcaccaaaatgatgaggtggtgaaaaccccagtgggggaacgggcaatggggccattggctatgctgacggaagaaggcataaaaccccggtatgcgaggaatgccgcagggctctatgcggacgatgtttccctgaccttgggggccgaagattttaccattcacgcgaggaagggcgagtatttccttatggacaagaagaccaggaccagaccaagccgggtagtgtttccggtacctactgcggtttccaaaggaatgctggtgatccccacggtggaagggaccgtgttggtgggccccactgccgatgccatggaggacaagacggatttttcgaccacaacagaaaaactggaacagatactggattccggtaagaggatgattccatctttaagccggaatggcgtaatcgccagttttgccgggattcgtccctgtctggaagaagatttctatattgatgtttcaaaaaaagcacctgcctttgtacaggtcgcgggtattcagtcccctggtctcaccgcttcaccggctatcggggagtacgtaaagaacctccttaaagagactggtctggaactggtggagaagcccggttgggatccctttgtgcaggatcggccccgttccagggagctttcgccttacaagctggatgaactcattgccaaagatcctgcctggggaaacctggtctgccgttgcgaaaacgtaagcgaggcggaaatagtcgaggcggtaaggctcggtcactataccctggacggggttaagtactttaccagaggccccaaaatggggcgtgggatcactctagagtcgagcctgcagtgcatgcacgcttga

SEQ ID NO: 22100 - protein, 299 aa, Unknown
  Obtained from environmental sample
  misc_feature (1)..(299): Xaa is any amino acid
MAKDRNGLKKNERSFFHQNDEVVKTPVGERAMGPLAMLTEEGIKPRYARNAAGLYADDVSLTLGAEDFTIHARKGEYFLMDKKTRTRPSRVVFPVPTAVSKGMLVIPTVEGTVLVGPTADAMEDKTDFSTTTEKLEQILDSGKRMIPSLSRNGVIASFAGIRPCLEEDFYIDVSKKAPAFVQVAGIQSPGLTASPAIGEYVKNLLKETGLELVEKPGWDPFVQDRPRSRELSPYKLDELIAKDPAWGNLVCRCENVSEAEIVEAVRLGHYTLDGVKYFTRGPKMGRGITLESSLQCMHA

SEQ ID NO: 22101 - DNA, 426 bp, Unknown
  Obtained from environmental sample
  misc_feature (1)..(426): n is a, c, g, or t
ttgcgcggcggcagtacgcattttatcactggagaaagattcgtgggaactgaaacaagcgaaatccgacagagaataagcctgcttaaagtcccggttgacattatagcgccggagaatcttggctctgttgtgtatgatcttctaaaagaaaaaaaggaacataacattgttcttctgtctttgtgggatctactgcgcgcaagaagaagcggcgagtaccgctcttatgttacaagggcgtctttaattattcccatttccaaaagcataatccgcggaataaagttccttacgggacaaaaagcataccgttttatgccgttcgatttttatttaaagcatactttccattctgggaaaaccgccaatttttccctggtaccctgcctgggccggccgcaaagaaaaaatttctccttttaa

SEQ ID NO: 22102 - protein, 141 aa, Unknown
  Obtained from environmental sample
  misc_feature (1)..(141): Xaa is any amino acid
MRGGSTHFITGERFVGTETSEIRQRISLLKVPVDIIAPENLGSVVYDLLKEKKEHNIVLLSLWDLLRARRSGEYRSYVTRASLIIPISKSIIRGIKFLTGQKAYRFMPFDFYLKHTFHSGKTANFSLVPCLGRPQRKNFSF

SEQ ID NO: 22103 - DNA, 312 bp, Unknown
  Obtained from environmental sample
  misc_feature (1)..(312): n is a, c, g, or t
gtgatttccggcgaagaannnaatgtcgtccttgggtctgcctcgtttgcgaacgcgacggttggcaacaacaagaccgttacattcagcggatattcgcttggcggaacggacgcgggtaattacactctttctgcacaacccgcaagcgttacggctaatatattggaggactgcaattctgtgaccatcggtggcgtatcataccctgccgttaaaatcggcacgcaatgctggctggcgaagaatgtgaacaataatattagtggtagcaaatgcctccctaatagcaatggtcgtcaagaatggtaa

SEQ ID NO: 22104 - protein, 103 aa, Unknown
  Obtained from environmental sample
  misc_feature (1)..(103): Xaa is any amino acid
MISGEEXNVVLGSASFANATVGNNKTVTFSGYSLGGTDAGNYTLSAQPASVTANILEDCNSVTIGGVSYPAVKIGTQCWLAKNVNNNISGSKCLPNSNGRQEW

SEQ ID NO: 22105 - DNA, 717 bp, Unknown
  Obtained from environmental sample
  misc_feature (1)..(717): n is a, c, g, or t
atggtaaaagttctcgcaaacccaaggttcacggtgtttatcatcatcaccagcgggttctactttatctacaaccaagtttataatctgctgccgctgtacacccgcaagaccgtagagctgaccccggccatggacatctacacagccgccaatccatttgtcatagtcacctgccagttgttgatcacaaaaatattcggcaagctgccgccggtcaagagcatcctagtcggcatcatcatcattgctttctctatgctgatcaacatcttccccctgtacatggacgggggcgtgacgaggatcatcggcagtgacctcattccgctgggaagcctattcgtcattctgaccgttgcaatgatagcgtttggcgagctgttcaagagcgccaagatgtacgagtacattgcctcttttgcgccaaagggccaagaggggctgtaccaagggtattcaaacttgccgatggccttgggcgccatcttgggtggcttcggcggggcctacatattcaacgagataatgtgcaagaacgccactgagcttcccaacaagctgctgcagctcgaccccaaacaggccacgattgggtgggtgttgctggcctgctgcggattcatcgccgcgctgtgcatgtttgcctacaacgggtggataaagagccaggacgcaaaaacaataggatttcccaaaaacttttcccgcatgtga

SEQ ID NO: 22106 - protein, 238 aa, Unknown
  Obtained from environmental sample
  misc_feature (1)..(238): Xaa is any amino acid
MVKVLANPRFTVFIIITSGFYFIYNQVYNLLPLYTRKTVELTPAMDIYTAANPFVIVTCQLLITKIFGKLPPVKSILVGIIIIAFSMLINIFPLYMDGGVTRIIGSDLIPLGSLFVILTVAMIAFGELFKSAKMYEYIASFAPKGQEGLYQGYSNLPMALGAILGGFGGAYIFNEIMCKNATELPNKLLQLDPKQATIGWVLLACCGFIAALCMFAYNGWIKSQDAKTIGFPKNFSRM

SEQ ID NO: 22107 - DNA, 519 bp, Unknown
  Obtained from environmental sample
  misc_feature (1)..(519): n is a, c, g, or t
gtggcattaaccgccgcaggggcttttatagccattccgattgggccggttcctatagtcctacagaaccttttagcccttttgtccggccttgtgctgggtccgctgatgggcagcgccgctataggcctttacttgcttgcagggctgcttggctttccggttttctcaggaggcggcggaggcatagcccgtttcgcaggcccaaccggcggctatcttatcggataccttcttgcggctctcacagcggggctaatagctggcaggctaaaagccaacgcgagcgttaaggtttttcaaatacgcgtcattatcgcggtaattgccggctttcttgttatttatgtccccggcttaatctggctaaaaacaaggctgaacctggactggcaaaaaacatttctggcagggttcattccctttttaattggggacgctctaaagggaattgcagctattatcataaccccaaggcttagaagaatcgcggcggattttctggatgacagaaactga

SEQ ID NO: 22108 - protein, 172 aa, Unknown
  Obtained from environmental sample
  DOMAIN (10)...(164): BioY family
  misc_feature (1)..(172): Xaa is any amino acid
MALTAAGAFIAIPIGPVPIVLQNLLALLSGLVLGPLMGSAAIGLYLLAGLLGFPVFSGGGGGIARFAGPTGGYLIGYLLAALTAGLIAGRLKANASVKVFQIRVIIAVIAGFLVIYVPGLIWLKTRLNLDWQKTFLAGFIPFLIGDALKGIAAIIITPRLRRIAADFLDDRN

SEQ ID NO: 22109 - DNA, 489 bp, Unknown
  Obtained from environmental sample
  misc_feature (1)..(489): n is a, c, g, or t
gtgcgtattattcaggaagttcagcctgacgagatttacaaccttggcgcacaaagccatgttcaggtatggtgggaagttccagaatataccgcagatacagatggaataggaacattaagacttttggaagccatcagaattttaggcctggagaaaaaggtaaagttttatcaggcttccaccagcgaattattcggcaaagttcaggaaattccgcaaaaagagactactccattctatccgcgaagtccttatgctgtggcaaaattatatgcttattggatagttgtaaattatcgtgaatccttcggtatgtatgcgtgtaacggtatactttttaatcatgaaagcccaatccgcggagaaacttttgtaacacgaaaaatttcccgcgctgccactcgtataaaatcgggattacaggataaactttatatgggtaataacctccgaagcgcgactggggatatgccggcgattatgtga

SEQ ID NO: 22110 - protein, 162 aa, Unknown
  Obtained from environmental sample
  DOMAIN (1)...(160): NAD dependent epimerase/dehydratase family
  misc_feature (1)..(162): Xaa is any amino acid
MRIIQEVQPDEIYNLGAQSHVQVWWEVPEYTADTDGIGTLRLLEAIRILGLEKKVKFYQASTSELFGKVQEIPQKETTPFYPRSPYAVAKLYAYWIVVNYRESFGMYACNGILFNHESPIRGETFVTRKISRAATRIKSGLQDKLYMGNNLRSATGDMPAIM

SEQ ID NO: 22111 - DNA, 546 bp, Unknown
  Obtained from environmental sample
  misc_feature (1)..(546): n is a, c, g, or t
ttgtccagtgattttttgataggaggcacacacatgtccgcaaaatgcgtaatctacgctgaagaagcccgccaggccatcctgaggggcgtgaacaaattggcagacgccgtccaggtgaccctcggacccaagggccgcaacgtcctcatcgaaaagaagttcggctccccgctaatgaccaaggacggcgtgaccgttgccaaggaagtcgagctcaaggacaagcacgaaaacatcggcgcgcagcttgtgcgcgaggtggcttccaaaacttccgacgtggccggcgacgggaccaccaccgcgacggtgctggcccgctccatatacaaagagggcatcaaggccgtcgtctccggcgccaacgtcatggagatcaagcgcggcattgacatggccgtcagcgaagtggtcaaggccatagacgaaattcaaaaagcccgtcgaaggcaacgcgatagcccaagtgggcaccatctccgccaacggcgactaagagattggcaagaccattgccgatgccatggccaaagtgggcaatga

SEQ ID NO: 22112 - protein, 181 aa, Unknown
  Obtained from environmental sample
  misc_feature (1)..(181): Xaa is any amino acid
MSSDFLIGGTHMSAKCVIYAEEARQAILRGVNKLADAVQVTLGPKGRNVLIEKKFGSPLMTKDGVTVAKEVELKDKHENIGAQLVREVASKTSDVAGDGTTTATVLARSIYKEGIKAVVSGANVMEIKRGIDMAVSEVVKAIDEIQKARRRQRDSPSGHHLRQRRLRDWQDHCRCHGQSGQ

SEQ ID NO: 22113 - DNA, 372 bp, Unknown
  Obtained from environmental sample
  misc_feature (1)..(372): n is a, c, g, or t
atggccttgaccacttcgctgacggccatgtcaatgccgcgcttgatctccatgacgttggcgccggagacgacggccttgatgccctctttgtatatggagcgggccagcaccgtcgcggtggtggtcccgtcgccggccacgtcggaagttttggaagccacctcgcgcacaagctgcgcgccgatgttttcgtgcttgtccttgagctcgacttccttggcaacggtcacgccgtccttggtcattagcggggagccgaacttcttttcgatgaggacgttgcggcccttgggtccgagggtcacctggacggcgtctgccaatttgttcacgcccctcaggatggcctggcgggcttcttcagcgtag

SEQ ID NO: 22114 - protein, 123 aa, Unknown
  Obtained from environmental sample
  SIGNAL (1)...(21)
  misc_feature (1)..(123): Xaa is any amino acid
MALTTSLTAMSMPRLISMTLAPETTALMPSLYMERASTVAVVVPSPATSEVLEATSRTSCAPMFSCLSLSSTSLATVTPSLVISGEPNFFSMRTLRPLGPRVTWTASANLFTPLRMAWRASSA

SEQ ID NO: 22115 - DNA, 681 bp, Unknown
  Obtained from environmental sample
  misc_feature (1)..(681): n is a, c, g, or t
atgacaacaacagtttcttcctcgaacagtgaaaaatttgtaagaatgaccaccggttccgttgaaaaacttgtattcagcttggcgcttcccagtattgccattatgataatatccgctctttacaacatggcggatacttactttgtaagttctctgggaacaagccaggttgccgctgtgggtatagcttttcccttgatggcgattattcaggccatggggttcttttttggccagggatcgggaaattacatggcacgggcgcttggcgcccaggatagcgagaatgcctcccgcatggccgccacgggctttgtaagcggttttatctttatggcccttcttgcggcaacaggactcgcagtccttggccctcttatcaacggcctgggggcaacggagaccataaagccccatgccagggaatacatcctgtatattcttatagcctccccatggatggtggcggcaacggtgcttaaccagcagctccggttccagggaagcgctgccattgccatggtgggaaagctctcaagcgcaatcttgaatattttcctggacccgctttttatctttgtttttcgcatgggcgttaaaggcgcggccatcgccaccatggttcagccagataagggagcttttttaatttggctcctcctacggctgaacgcctaa

SEQ ID NO: 22116 - protein, 226 aa, Unknown
  Obtained from environmental sample
  DOMAIN (31)...(191): MatE
  misc_feature (1)..(226): Xaa is any amino acid
MTTTVSSSNSEKFVRMTTGSVEKLVFSLALPSIAIMIISALYNMADTYFVSSLGTSQVAAVGIAFPLMAIIQAMGFFFGQGSGNYMARALGAQDSENASRMAATGFVSGFIFMALLAATGLAVLGPLINGLGATETIKPHAREYILYILIASPWMVAATVLNQQLRFQGSAAIAMVGKLSSAILNIFLDPLFIFVFRMGVKGAAIATMVQPDKGAFLIWLLLRLNA

SEQ ID NO: 22117 - DNA, 780 bp, Unknown
  Obtained from environmental sample
  misc_feature (1)..(780): n is a, c, g, or t
ttggtgaaagcatttgttgcgataatttttgttgtcgtttctattgcaaattcacatgatttggattctgctgggagcgacaatgaaataaaaccgatgcggcttgtgattataggttctggaattgcagcttcgtacacggcaatttattttgcccttctcaaagatggatggtgggataaagtggaaccttttcgttttgaaccacttaattccgatatgaattatgcctcaaatttagataaatttgggcatttttatacaggtatttttattggcgaattgcttgcaatgagctatgactgggcaggactcagtccttttgcttctactctttgggctggcataacggttggtgctacgcaaattattatagaattcaaagatggcttttctccttatggttatagcgtttgggatgctgttgctggtactttaggcggtttttacgctatgggaaaaatgtatatccctgcgatgcaatatgttgattataaatttacatattggccaaattcaagtggatattgggactggcataaaaagaagaaagaaacaggagtttggtttgatgattattatggagggaatcaaagtcactggctttcctttaagattgccaaaatatctccgcttgctcttgcctttggctggggattgtacgatccatacgttggtagcgaacctggatgggataaaattcgttatgaatactatatctctattgattatgattttaatgctatttttcaccctcaaaagactggagcaagaatttaa

SEQ ID NO: 22118 - protein, 259 aa, Unknown
  Obtained from environmental sample
  SIGNAL (1)...(18)
  misc_feature (1)..(259): Xaa is any amino acid
MVKAFVAIIFVVVSIANSHDLDSAGSDNEIKPMRLVIIGSGIAASYTAIYFALLKDGWWDKVEPFRFEPLNSDMNYASNLDKFGHFYTGIFIGELLAMSYDWAGLSPFASTLWAGITVGATQIIIEFKDGFSPYGYSVWDAVAGTLGGFYAMGKMYIPAMQYVDYKFTYWPNSSGYWDWHKKKKETGVWFDDYYGGNQSHWLSFKIAKISPLALAFGWGLYDPYVGSEPGWDKIRYEYYISIDYDFNAIFHPQKTGARI

SEQ ID NO: 22119 - DNA, 678 bp, Unknown
  Obtained from environmental sample
  misc_feature (1)..(678): n is a, c, g, or t
atgaaaataaaattcattaatttagtagcaggctctttgcttgctatggtattcactttttcttgctctggcgaaaacgagccattgacagactctcgtgatggcaaagtgtataaaaccgttaaaataggtgaacagatttggatggctgaaaatttgaattatagtgatgctggtcgcataggtaaatgttatgataataagtcttctaactgcgaaatatatggaaggctttatgattgggaggcggcaatgaaagcctgccctaacggctggaacttgccaagcgatgatgaatggggtactttatataagtatatcggcggcaataatacttttagaatggtagagaaaaaactaaaatcaaaaagtggctggaaagaggataaaaatgatgattcctctggaaacggtacagatgattatgatttttcagctttaccaggagggctttattggtgtgatcctcgttttgatgatacgggtaataaactaatagactgtactgaagaaagtaatttcaattttttaggttccttaggtttttggtggactgctacggaagatgatatctcctcttctataaaagcaaggttccagtatatttcggaaggagtattagatgaaatgtataaaccttcattcttgtcaattcgttgtgtaaaacataggttttaa

SEQ ID NO: 22120 - protein, 225 aa, Unknown
  Obtained from environmental sample
  SIGNAL (1)...(24)
  misc_feature (1)..(225): Xaa is any amino acid
MKIKFINLVAGSLLAMVFTFSCSGENEPLTDSRDGKVYKTVKIGEQIWMAENLNYSDAGRIGKCYDNKSSNCEIYGRLYDWEAAMKACPNGWNLPSDDEWGTLYKYIGGNNTFRMVEKKLKSKSGWKEDKNDDSSGNGTDDYDFSALPGGLYWCDPRFDDTGNKLIDCTEESNFNFLGSLGFWWTATEDDISSSIKARFQYISEGVLDEMYKPSFLSIRCVKHRF

SEQ ID NO: 22121 - DNA, 771 bp, Unknown
  Obtained from environmental sample
  misc_feature (1)..(771): n is a, c, g, or t
ttgagggaacttaaacggctggcaaaggaaaatgcggggcaggacaaacccctctgcattatggacaacatagtcttcaaggctatgctcacttcagattccgaggcctcccgcgaagccctcagatttttactttccgcttgtaccagacgcgaagtgtcaggcgtccgggttaaaaacagcgaactgctgccggcccatcttggcgggaagtcgccgcgccttgatgtcaatgtcacctttaacgatggcgaggccgccgacctggaaatgcaaataaaaaagacggaggatgacatcagagacagggccgccttctataccgccatgcttcagtcagcccagtcgcgcaaaggccacgcctataaagagataaagcgggcgccccaggtattcttcctcaactgcatcctgtacccgcacagcggcaaactgccccggcggtatttctacatggaagaggaggagcatgatcggctcaccgagataagcgaaatcattttttacgagatgccgaaactcgaacagcggttacaggacctgcttgcaggaaaagcggatatagagaccttgtcgaaagaggaaggatggtgtatttatatgaggtacaggcaccaggaacgcgcggcgaaattgacagaggaactattgcgtaaggaggaaggcattatgtgggcggaaagggcagcagcaaaaatagaccgtgattatgacagagcgattcggaagatgaatgaaattcataacatcatgcatggaggcgcaacctaa

SEQ ID NO: 22122 - protein, 256 aa, Unknown
  Obtained from environmental sample
  misc_feature (1)..(256): Xaa is any amino acid
MRELKRLAKENAGQDKPLCIMDNIVFKAMLTSDSEASREALRFLLSACTRREVSGVRVKNSELLPAHLGGKSPRLDVNVTFNDGEAADLEMQIKKTEDDIRDRAAFYTAMLQSAQSRKGHAYKEIKRAPQVFFLNCILYPHSGKLPRRYFYMEEEEHDRLTEISEIIFYEMPKLEQRLQDLLAGKADIETLSKEEGWCIYMRYRHQERAAKLTEELLRKEEGIMWAERAAAKIDRDYDRAIRKMNEIHNIMHGGAT

SEQ ID NO: 22123 - DNA, 486 bp, Unknown
  Obtained from environmental sample
  misc_feature (1)..(486): n is a, c, g, or t
gtgctgttggcagccgggccttttgctctgggttttgccggttatttcttaaaaagaatccgcggcgaagaaattgcgacaaaaaatatttttgacggttttaaccgctttgccccaagccttctgttaatgttttttaccgggctttttaccgctttgtggagtctgttgctggtaatccccggaatagtaaagctgttcggatattcaatggcattttacataatgcatgacaatcctgaaataaaaccgcttgaagcgttaaaaaaaagccaaatcatgatgaaagggtataaagggaaactgtttctgcttgaattaagcttcatcggatggcttttgctctgtttattaacattctgcgtgggctttctatggttaagtccgtatatgtatctttcaatggcgaacttctatgaaaacctgaagataaatcagggaaacaaagcggcgaaaaccccggttgaccccttccgcggttcatga

SEQ ID NO: 22124 - protein, 161 aa, Unknown
  Obtained from environmental sample
  DOMAIN (1)...(146): Protein of unknown function (DUF975)
  misc_feature (1)..(161): Xaa is any amino acid
MLLAAGPFALGFAGYFLKRIRGEEIATKNIFDGFNRFAPSLLLMFFTGLFTALWSLLLVIPGIVKLFGYSMAFYIMHDNPEIKPLEALKKSQIMMKGYKGKLFLLELSFIGWLLLCLLTFCVGFLWLSPYMYLSMANFYENLKINQGNKAAKTPVDPFRGS

SEQ ID NO: 22125 - DNA, 570 bp, Unknown
  Obtained from environmental sample
  misc_feature (1)..(570): n is a, c, g, or t
ttgtttgcaaaagtcactttttttggaaaaatttccgtttttttacgtctaataggtgacaaaggaaaaacggaggattcaaaaatgacccagacccaacccaaccgcaaagatagcgttttcacattgctattcagcgagccacccgccgcattggaactctacaatgctgtaacagggcaaaattacccaccagacaccaaaatagagatagtgacgctttcaaatgccatattcaaagggcaattgaacgacgtagctttcgtagtggatgacaggcttgtagtcctgatggaacatcaatcgaccatcaataacaacataccgcttaggatgctcatgtatttaggaagggaatacgagcgaataactaaaggcaaagatttgtacagagaaaagttgataaaaatccctgcaccggagttcatagttctgtacaacggcaaggacgagtttcccgatttcaaggagcttagactttccgattcttttaaaaccaaagggcagggcaatcttgagcttgtggcaagcgttttacaacatcaacaagggtcgccaatgcggaaatag

SEQ ID NO: 22126 - protein, 189 aa, Unknown
  Obtained from environmental sample
  misc_feature (1)..(189): Xaa is any amino acid
MFAKVTFFGKISVFLRLIGDKGKTEDSKMTQTQPNRKDSVFTLLFSEPPAALELYNAVTGQNYPPDTKIEIVTLSNAIFKGQLNDVAFVVDDRLVVLMEHQSTINNNIPLRMLMYLGREYERITKGKDLYREKLIKIPAPEFIVLYNGKDEFPDFKELRLSDSFKTKGQGNLELVASVLQHQQGSPMRK

SEQ ID NO: 22127 - DNA, 915 bp, Unknown
  Obtained from environmental sample
  misc_feature (1)..(915): n is a, c, g, or t
atgaacggagtgtgcgctggcggaactggagcttttatagaccaaattgcggagctcttgaaaataaaaaccgaagagttcgagaactatgcctccagaggcgaaaaggtgtacgaaatttctggcagatgcggagtttttgcaaaaacagatattcaacctcttttgaaccaaggagttgccaaagaagatattgcgctttccagttttcacgccattgcaaaacagacaataggtgggcttgcgcaaggaatggaaattaaaccgccagtgctttttgaaggcggccctttaacgttcaatccatcgcttgtcggggtatttcagcaacgacttggaattttgagttcacaggttttggtgcccgaacattcagaaattttggtcgcttggggagcggctctctctgctggcgcaatatacaacggcaaaaaatgcaactatgtaaaagaaaaaagtttgaatgcgcttgaatatttttctgcaaacagaaaaagcaaaagtgataacgaagccactctaccattttttaaaagcgaaaaagaaaaaagcgaattcatgcgcaagcattcgctatttgacgggaactaccctgctccaaaaaaaggcgaaactgtgcaagcatacctcggcatagatgctggcagcacaacaacaaaattcgtgttgttgaatgaaaatgaagaggttatagatagtttttattctggaaatcaaggcgaccctcttgttgtgctaaaaagtgcgcttattcaattgaatgaacgctataaagaagctggagcaaaacttgaaattttgggtgttggaacaacaggatatggtgaattgctttttatcgcgcgcttcacgccgattatcacacagttgaaactgtgggcgcacgcaaaggctgcaaaaaaagttttgcaatga

SEQ ID NO: 22128 - protein, 304 aa, Unknown
  Obtained from environmental sample
  misc_feature (1)..(304): Xaa is any amino acid
MNGVCAGGTGAFIDQIAELLKIKTEEFENYASRGEKVYEISGRCGVFAKTDIQPLLNQGVAKEDIALSSFHAIAKQTIGGLAQGMEIKPPVLFEGGPLTFNPSLVGVFQQRLGILSSQVLVPEHSEILVAWGAALSAGAIYNGKKCNYVKEKSLNALEYFSANRKSKSDNEATLPFFKSEKEKSEFMRKHSLFDGNYPAPKKGETVQAYLGIDAGSTTTKFVLLNENEEVIDSFYSGNQGDPLVVLKSALIQLNERYKEAGAKLEILGVGTTGYGELLFIARFTPIITQLKLWAHAKAAKKVLQ

SEQ ID NO: 22129 - DNA, 357 bp, Unknown
  Obtained from environmental sample
  misc_feature (1)..(357): n is a, c, g, or t
ttggattggacaccctattcaggaaaaaaagccccagtatctttaacaatgagggccctgttccggcgaaacgaaggggtaaggaaagcgctttccggcatgaaagcttgcggtccggagggggataaaaaatattccttacgaaggaatgttgtacaggtgcgcgtacctgtcgttataaacttggtcccagcccatattgaagaagaaagaaaaatgtctcttgtagacgcgcgcagaacaatcgcaaaactattcggcatgggcaaggcgtccaaagacaaaccgggcgcgtttcttgaactggctagaaaactctatgacacaataaataaggatctttccgaaaacgagtga

SEQ ID NO: 22130 - protein, 118 aa, Unknown
  Obtained from environmental sample
  misc_feature (1)..(118): Xaa is any amino acid
MDWTPYSGKKAPVSLTMRALFRRNEGVRKALSGMKACGPEGDKKYSLRRNVVQVRVPVVINLVPAHIEEERKMSLVDARRTIAKLFGMGKASKDKPGAFLELARKLYDTINKDLSENE

SEQ ID NO: 22131 - DNA, 879 bp, Unknown
  Obtained from environmental sample
  misc_feature (1)..(879): n is a, c, g, or t
ttggacggatgcgggttcaacggaaaatggcgagttcagaatcatccagagtacttacgctacactggggcgcgacatagaagatttcaaaaaattcattttttgtatatcatccttgacgaatcccagagcattaaaaacctgaccactcaaacaacgacggctgtactctctctgaaaggagaacaccggcttgccataagcggcactccgatagaaaacaatttggcggaactgtacagcctgttccgctttctcaaccgttcgttcttcggttccgaaaggctttttattcagcgctaccttcatcccattcaggacgacaacgacgaagacgcccttaaagacctaaaggcaaggatatatccctttatgctcaggcgtttaaagcgggacgtgctaaaagagcttccagcaaaaaccgaagagaccgcgtacatcgagctggaagaaagccacctggctgtttaccaccgcaggcggcaggggtgcaaacagctcatcgacaacatcatcgcaaggggggaggcggcaaaatcgtcgtttattattttcaaggcgttaggcgaactgcgcctccttgccagcgttcccgaagcggacggcgaatacgccgggctgtcggcaaagcgccagtacctgctcgatcggatagcggagcttaccgaaaacaaccacaaatgccttatctttaccaacttccttgcgacggtggacatagtaagcgaagaccttgccggacttggaattcaaaaccttaccatgacaggcgcgacggtggatcgccaggcgctggttagccgctttcaaacagacgacaaagtaaaagcttttgttatgaccttgaaaaccggaggaaccggaaaaaatttcaggtag

SEQ ID NO: 22132 - protein, 292 aa, Unknown
  Obtained from environmental sample
  DOMAIN (10)...(201): SNF2 family N-terminal domain
  misc_feature (1)..(292): Xaa is any amino acid
MDGCGFNGKWRVQNHPEYLRYTGARHRRFQKIHFLYIILDESQSIKNLTTQTTTAVLSLKGEHRLAISGTPIENNLAELYSLFRFLNRSFFGSERLFIQRYLHPIQDDNDEDALKDLKARIYPFMLRRLKRDVLKELPAKTEETAYIELEESHLAVYHRRRQGCKQLIDNIIARGEAAKSSFIIFKALGELRLLASVPEADGEYAGLSAKRQYLLDRIAELTENNHKCLIFTNFLATVDIVSEDLAGLGIQNLTMTGATVDRQALVSRFQTDDKVKAFVMTLKTGGTGKNFR

SEQ ID NO: 22133 - DNA, 600 bp, Unknown
  Obtained from environmental sample
  misc_feature (1)..(600): n is a, c, g, or t
atgattgaatcttcaggcggctataaagttcaaaccctcaaagtagaaaagggcgacattctgctgctctacactgacggtattgaagaagcaaaaaggaaattcagaacccgcgattttaaggaaataacctgcgaagaaggggaaatcggcacacagcatgaaaatcatctttgcggacaggccgacgaggaaatgtcccctgaacgcgtagaggcgattatcaacgcggtaatggcgcgcgaagtttatactttgcataaatatcacaatcctgaggaagatgccggcgatttacaattcgacttttcaagctgtgaaggaaaagtggaagaaataatcatggcgatggtttccgtggaaaaaatgttccgctgttacaagcccgccaacgcaggggaagactctcgcgtactggtagacaaaaaagtagacgaatttcttaagcaccattttgtacaatacaggcgttattgcgctaacacgagggaacactctgaaaatccctcgtatatgtattatactcatattaaggaagatgaacagtacgacgatttaactatacttggaatcaaaagaaaacgaggagatgaaaaatga

SEQ ID NO: 22134 - protein, 199 aa, Unknown
  Obtained from environmental sample
  misc_feature (1)..(199): Xaa is any amino acid
MIESSGGYKVQTLKVEKGDILLLYTDGIEEAKRKFRTRDFKEITCEEGEIGTQHENHLCGQADEEMSPERVEAIINAVMAREVYTLHKYHNPEEDAGDLQFDFSSCEGKVEEIIMAMVSVEKMFRCYKPANAGEDSRVLVDKKVDEFLKHHFVQYRRYCANTREHSENPSYMYYTHIKEDEQYDDLTILGIKRKRGDEK

SEQ ID NO: 22135 - DNA, 795 bp, Unknown
  Obtained from environmental sample
  misc_feature (1)..(795): n is a, c, g, or t
atgacagggactattggcataaaaatcgctaatggtgatttttaccccatactggaggaagattccaccgtaaaaaagcggcttattctcaccactgtccatgacgggcagaagagtgtgcaaatagaccttttcagaagcatctcaaaaaccatggacgatgcccaatatatcggcagcctcctgatagaaaatatcagcccccggccacggggagaaccttccatcgaaatgattatttcctccgatcaggatggtcatattactgcggatgcctgtgatcttgacgccagcacaggcggcaaacatcagatactgaatgtttcacataaaacggcggactcaatcagccagaaaaccgattttgctgattttgaccttgaacgcaaaccgggtacttctgacggtcggaccgaaatttttgaggaggaaaaacgaagatccccctggcttatcatggtttttgccctgatttttgttattattgcgattggtttgctgtggctcttcttttttggcagcaaggattcaaaccctttcaaagatgcggttccctttttcaaagacaaaccgggttatgagcaaaccacgccgccaccgcagccggcatcaccgccccccccggcagaaaaaattcagccggttgaacccccgccgccaccgcctccccctccccccccgccgccggaacccgtggaagcagcgccggttattcaggcgccgactgctccgcctccggcacgtttcccaacagtcacacggaatcgcccacccgcaccggtttcttcatattaa

SEQ ID NO: 22136 - protein, 264 aa, Unknown
  Obtained from environmental sample
  misc_feature (1)..(264): Xaa is any amino acid
MTGTIGIKIANGDFYPILEEDSTVKKRLILTTVHDGQKSVQIDLFRSISKTMDDAQYIGSLLIENISPRPRGEPSIEMIISSDQDGHITADACDLDASTGGKHQILNVSHKTADSISQKTDFADFDLERKPGTSDGRTEIFEEEKRRSPWLIMVFALIFVIIAIGLLWLFFFGSKDSNPFKDAVPFFKDKPGYEQTTPPPQPASPPPPAEKIQPVEPPPPPPPPPPPPPEPVEAAPVIQAPTAPPPARFPTVTRNRPPAPVSSY

SEQ ID NO: 22137 - DNA, 633 bp, Unknown
  Obtained from environmental sample
  misc_feature (1)..(633): n is a, c, g, or t
ttgggccgatggcgcggactttgcgaatccgcgattcattcgtttacgctggttggggctactaccaaggcggggattgtttcaggcccgctgatcagccgttttggtataacctgccgattttcgttttatgaacagaaggatatggaggccattgtccgccgttcggcagggttgcttaatgtcaaaataaacgccgacgccgcggcgctgctggcaaagtcatcgcggggaacaccgcgggtggtcaatcgcctgctgcggcgtatgcgggattttgctcagttctccggcgctgaaaccataacactgacggtggtgaaggacggccttatgcggctggaaattgacgcgctggggctggaaaaacaggaccgggacattcttaaaatcatcattgaacgataccggggcgggccggtgggggcggaaaccctcgctatttccatcggagagtccgttgaaacactggaagattactatgagccttatttgattcaggcgggccttttacagcgcagcccccgcggcagaatggtgacatcccttggctacggccacctggggcttacgccgcctgagtctgcgtcacgcaacggcgaatacggcgcggcctctctgtttaacgaataa

SEQ ID NO: 22138 - protein, 210 aa, Unknown
  Obtained from environmental sample
  DOMAIN (113)...(191): Holliday junction DNA helicase ruvB C-terminus
  misc_feature (1)..(210): Xaa is any amino acid
MGRWRGLCESAIHSFTLVGATTKAGIVSGPLISRFGITCRFSFYEQKDMEAIVRRSAGLLNVKINADAAALLAKSSRGTPRVVNRLLRRMRDFAQFSGAETITLTVVKDGLMRLEIDALGLEKQDRDILKIIIERYRGGPVGAETLAISIGESVETLEDYYEPYLIQAGLLQRSPRGRMVTSLGYGHLGLTPPESASRNGEYGAASLFNE

SEQ ID NO: 22139 - DNA, 468 bp, Unknown
  Obtained from environmental sample
  misc_feature (1)..(468): n is a, c, g, or t
gtgaaagccgcttttccgggttcgtttgaccccgcgacatcgggtcatattaatgtaattagccgcgccgcgtccatttttaaggaacttgtagtggttgtagccgaaaacaagcgtaaaaagtaccttttttccgctgaagaacgggcttctatgatacgggaacttgtaaaagaccataaaaatgtgacagtagccgtatgcgactgccttattgtggattttcttaagaaaatggaaataaaattgctggttcggggagttcgaggaatagaggatttttcctatgaatttgaactttcaatgatgaacagaacccttgaccctgatatagaaacaatttttatgacgaccgatcccgaatattttgtaatccggtcatcatcaattaaagaattggcttcttttaacaaaaatcttcacggaatgtgnnnnnnnnnnnnnnnnnnnnnnnnnnatgcaagctga

SEQ ID NO: 22140 - protein, 155 aa, Unknown
  Obtained from environmental sample
  DOMAIN (4)...(133): Cytidylyltransferase
  misc_feature (1)..(155): Xaa is any amino acid
MKAAFPGSFDPATSGHINVISRAASIFKELVVVVAENKRKKYLFSAEERASMIRELVKDHKNVTVAVCDCLIVDFLKKMEIKLLVRGVRGIEDFSYEFELSMMNRTLDPDIETIFMTTDPEYFVIRSSSIKELASFNKNLHGMXXXXXXXXXXAS

SEQ ID NO: 22141 - DNA, 342 bp, Unknown
  Obtained from environmental sample
  misc_feature (1)..(342): n is a, c, g, or t
gtgacgcacttgccaacaaacacagtggtgcagtgccaagatgagcgcagcaagctaaagaacttggcaaaggccatgacagtcttgcgctcgcgcctgctggaaaaagcgatggatgaacagaccgccagcagcgcggctctaagaaaatcccaagtcggcagcggagaccgctcagaaaaaataaggacgtacaactttccccagagccgcgtgacagaccaccgcataaacatgaccacgcaccaactggaaaccttcatgcagggccaattagagccaattttggaaccgctgagagccgcgtttgaggccgagaggcttcagcagttggacgactag

SEQ ID NO: 22142 - protein, 113 aa, Unknown
  Obtained from environmental sample
  DOMAIN (1)...(76): Peptidyl-tRNA hydrolase domain
  misc_feature (1)..(113): Xaa is any amino acid
MTHLPTNTVVQCQDERSKLKNLAKAMTVLRSRLLEKAMDEQTASSAALRKSQVGSGDRSEKIRTYNFPQSRVTDHRINMTTHQLETFMQGQLEPILEPLRAAFEAERLQQLDD

SEQ ID NO: 22143 - DNA, 516 bp, Unknown
  Obtained from environmental sample
  misc_feature (1)..(516): n is a, c, g, or t
gtggacttgaccaccacatcaaagacatttacgtatgtttttaaaatggaagaggcaagtgatgaagatggtcgttttgggtttaacttggggcaagcaactggaacagtcactataagcaatgtaaaacttaattatgtagatgattcctctggcagttccagctccaaagcgggcagttccagctccaaagcaggcagttccagctccaaagtgggcagttccagctccaaagcaggcagttctagctccaaagcaggcagttctagctccaaagcaggcagttctagctcaagcagttccaacggtgcaactcctataattcagccacaagataaagttttgcacatagaaataaattcaccctcagttgtagaaatttacgaccttaggggaaataaagtggaaagaattgaggtttctagtgcttcgcaaactattaaattatctctgccaaacggagtatattttgccaaagttcagggaaggaaaagctttagatttgtgttgaaataa

SEQ ID NO: 22144 - protein, 171 aa, Unknown
  Obtained from environmental sample
  misc_feature (1)..(171): Xaa is any amino acid
MDLTTTSKTFTYVFKMEEASDEDGRFGFNLGQATGTVTISNVKLNYVDDSSGSSSSKAGSSSSKAGSSSSKVGSSSSKAGSSSSKAGSSSSKAGSSSSSSSNGATPIIQPQDKVLHIEINSPSVVEIYDLRGNKVERIEVSSASQTIKLSLPNGVYFAKVQGRKSFRFVLK

SEQ ID NO: 22145 - DNA, 462 bp, Unknown
  Obtained from environmental sample
  misc_feature (1)..(462): n is a, c, g, or t
atgctggacatggaccctgaaaaaagcaagattgaacaggcccgaagcaacgcaataaaccgcgcggcgatgaaggcgcttatcaggcataaatacaaggggaaactgatacttgtttttccgtcaggaacccgttaccgcccctgggaccctgaaacaaaaaaagggttaagagaaatcgactcctatattcgttcatttgactatatgtgctgtgtcgccctaaacggtcaaattctgcatgtaaatgaaagtgatatgatgaatgactttgtaagcaaggatattgttcgggttacggtaggacctgttactaattgcaatgatttccgtgaaaaggcaagaaacgcagcatcggaagatgaagacaaaaaacaggctgtcgccgatgcaatcatgaatgaacttgaaactatgcacattgccgcagaagaaaagagaaaaaaactgttagagaaataa

SEQ ID NO: 22146 - protein, 153 aa, Unknown
  Obtained from environmental sample
  misc_feature (1)..(153): Xaa is any amino acid
MLDMDPEKSKIEQARSNAINRAAMKALIRHKYKGKLILVFPSGTRYRPWDPETKKGLREIDSYIRSFDYMCCVALNGQILHVNESDMMNDFVSKDIVRVTVGPVTNCNDFREKARNAASEDEDKKQAVADAIMNELETMHIAAEEKRKKLLEK

SEQ ID NO: 22147 - DNA, 390 bp, Unknown
  Obtained from environmental sample
  misc_feature (1)..(390): n is a, c, g, or t
atgaaacgtataataacttatggaactttcgaccttttgcattatggacatataaacctgttaaaacgggcaaaatctttaggagattatttaatagttgccctttctaccgatgaatttagtttaattgaaaagaataaaaaaacatattttaattatgatattcgcaaagaatttctggaagctattcgttatgtggatttagttataccggaaacatcatgggaacaaaaacaaaaagatataaataagtataatattgatatttttgttataggcgatgactggaaagaaaagtttgattttttgaaaaataaatgcgaagtaaaatattttgaacggacaccggatatttctactagtcaaattaaaaaagatataaagtgctaa

SEQ ID NO: 22148 - protein, 129 aa, Unknown
  Obtained from environmental sample
  DOMAIN (5)...(126): Cytidylyltransferase
  misc_feature (1)..(129): Xaa is any amino acid
MKRIITYGTFDLLHYGHINLLKRAKSLGDYLIVALSTDEFSLIEKNKKTYFNYDIRKEFLEAIRYVDLVIPETSWEQKQKDINKYNIDIFVIGDDWKEKFDFLKNKCEVKYFERTPDISTSQIKKDIKC

SEQ ID NO: 22149 - DNA, 549 bp, Unknown
  Obtained from environmental sample
  misc_feature (1)..(549): n is a, c, g, or t
atgggaatggaaatgatagagagacttcgtggggtgcttgtacataaggctcctttgtttgcagttgttgaatgtggtggagtgggatatggcgttaatgtaagcgctcgcacgggtgaaatgctacccagcgaaggttcagaagtggcgtttttaactcaccttgttgtgcgtgaagattctcttaccatttacggatttttggaaaaccgagaaaaagaattgtttttgaacatgatagaggtaaacggcattgggccaaaaatggcgcagagaattttgagttccgtttcgccaggagatttgctctctttgattgtgatgaatgatagcgcaggtctttctaaaataaagggcattggcaaaaaaacttctgaaatgcttgtgcttgccttgaaagacaaagcactttcaatttctgcaactgctggagaacgttcgtctgcgagtttgccttttgcagagcaagaaacagtgcttgccttgcccacccttggggtaaaagacccggagctaaaaaagcgggtggaaaagcctctgaaattttag

SEQ ID NO: 22150 - protein, 182 aa, Unknown
  Obtained from environmental sample
  DOMAIN (5)...(66): RuvA N terminal domain
  misc_feature (1)..(182): Xaa is any amino acid
MGMEMIERLRGVLVHKAPLFAVVECGGVGYGVNVSARTGEMLPSEGSEVAFLTHLVVREDSLTIYGFLENREKELFLNMIEVNGIGPKMAQRILSSVSPGDLLSLIVMNDSAGLSKIKGIGKKTSEMLVLALKDKALSISATAGERSSASLPFAEQETVLALPTLGVKDPELKKRVEKPLKF

SEQ ID NO: 22151 - DNA, 831 bp, Unknown
  Obtained from environmental sample
  misc_feature (1)..(831): n is a, c, g, or t
ttgccaaaatttaattctcaagcctgtgtatggccggtaatgcggctaaaggatgcaaggttaaggtacagccggattttacaaattaaacccaaacctcaagtggaacggtntaccggcttttcaaacaacacgtttatactgaaaccgtctaattctacgataacattcaccgtgcagataagcggcaatacaatttccaaaatcagcggaactatcacccttgaaggttcaggcgaaacagtgagaggccctgataccagtagcgggagtggtagcattggtggcggaagcggcggtggaggcaacggaggcagtagtgcaggcggtggtggaaacgttagcgggaatagtggcggaaacgtagtcggaaccgttaacaacattgacgagtcgtcagctttattgccttcccttccggacaacacgcttgcaaacccctatttaatagcattgaacacttccgatattaccggcatcgggacagcgcttaaaaatgaaccaaacagatacgttagtcttgacctttcaggcagtacctttaccagcattgagtcaaatgctttctactactgcaacagccttgcaagcgtaaccataccggacagagttacaagcattgtaagtcttgctttttcccactgcaacagccttacaagcgtaacatttaaaggaacgattgcttcgactaactttgaaagcaatgcttttatcggtatgggttacctgcgcgacaagttttacgcaacagacccagccaacggtacgccggggacatatacaacaacagcgcctgtgagcagtacttcagtgtggacattacagccgtga

SEQ ID NO: 22152 - protein, 276 aa, Unknown
  Obtained from environmental sample
  misc_feature (1)..(276): Xaa is any amino acid
MPKFNSQACVWPVMRLKDARLRYSRILQIKPKPQVERXTGFSNNTFILKPSNSTITFTVQISGNTISKISGTITLEGSGETVRGPDTSSGSGSIGGGSGGGGNGGSSAGGGGNVSGNSGGNVVGTVNNIDESSALLPSLPDNTLANPYLIALNTSDITGIGTALKNEPNRYVSLDLSGSTFTSIESNAFYYCNSLASVTIPDRVTSIVSLAFSHCNSLTSVTFKGTIASTNFESNAFIGMGYLRDKFYATDPANGTPGTYTTTAPVSSTSVWTLQP

SEQ ID NO: 22153 - DNA, 330 bp, Unknown
  Obtained from environmental sample
  misc_feature (1)..(330): n is a, c, g, or t
gtgttgtccggaagggaaggcaataaagctgacgactcgtcaatgttgttaacggttccgactacgtttccgccactattcccgctaacgtttccaccaccgcctgcactactgcctccgttgcctccaccgccgcttccgccaccaatgctaccactcccgctactggtatcagggcctctcactgtttcgcctgaaccttcaagggtgatagttccgctgattttggaaattgtattgccgcttatctgcacggtgaatgttatcgtagaattagacggtttcagtataaacgtgttgtttgaaaagccggtanaccgttccacttga

SEQ ID NO: 22154 - protein, 109 aa, Unknown
  Obtained from environmental sample
  misc_feature (1)..(109): Xaa is any amino acid
MLSGREGNKADDSSMLLTVPTTFPPLFPLTFPPPPALLPPLPPPPLPPPMLPLPLLVSGPLTVSPEPSRVIVPLILEIVLPLICTVNVIVELDGFSINVLFEKPVXRST

SEQ ID NO: 22155 - DNA, 351 bp, Unknown
  Obtained from environmental sample
  misc_feature (1)..(351): n is a, c, g, or t
atgcctttacacgggatcagcggcgaaataattggctaccatggtcttttcttccccattgcacgaacgtgctgtgcagctgctcatatgttctccccgccggggttgatgggacagaagctccttggctttgccgggcttggctgtattggggcgatggtttcaaactgcgctcagcttcttttggcgcgttctctaatcttcggccctgcgttacgttatctgatccccccgtttctcgcctccggcctgatcacgggtattggcttgggccttatctgcgagtgtttccgccgtcattccctctggtaccgctcaattaatggcaagaaggtaactggcaaccgataa

SEQ ID NO: 22156 - protein, 116 aa, Unknown
  Obtained from environmental sample
  misc_feature (1)..(116): Xaa is any amino acid
MPLHGISGEIIGYHGLFFPIARTCCAAAHMFSPPGLMGQKLLGFAGLGCIGAMVSNCAQLLLARSLIFGPALRYLIPPFLASGLITGIGLGLICECFRRHSLWYRSINGKKVTGNR

SEQ ID NO: 22157 - DNA, 360 bp, Unknown
  Obtained from environmental sample
  misc_feature (1)..(360): n is a, c, g, or t
atgcgcgacagtaaaaaccgccgcattgaattcaacctggttataagatcagaaagcacgatgactcaggatatagcgtctattatcagggacgagctgtcaaaaatcggaataaaagtaaatatccgcatagtggatttccagaaacaggtggaacagctgtttaccacttttgactgggactccacgttaatcggtcttacgggcagcaatatctttccaagtcagggaagcaatgtctggcctacaacgggaaaccttcacctttggtaccccaatcaggaaacgcccgctacggactgggaagcgcgcgttgattatctttacaacgagggaaaatttacaatgtatcatagataa

SEQ ID NO: 22158 - protein, 119 aa, Unknown
  Obtained from environmental sample
  misc_feature (1)..(119): Xaa is any amino acid
MRDSKNRRIEFNLVIRSESTMTQDIASIIRDELSKIGIKVNIRIVDFQKQVEQLFTTFDWDSTLIGLTGSNIFPSQGSNVWPTTGNLHLWYPNQETPATDWEARVDYLYNEGKFTMYHR

SEQ ID NO: 22159 - DNA, 654 bp, Unknown
  Obtained from environmental sample
  misc_feature (1)..(654): n is a, c, g, or t
gtgaattacctgaaaaaaagaaaaattacggacggtttctggtacgctcttatgactgccgcttccgtggcggtaggggcggcccttgtcggcatcatcgcttatatactaatccaggccctgggaatgtcaacggcagccgatcattccggcgcagcaagagccgaatttttcagaatacggagcctcgttccaatgattgtgtctaccgcctggacagtggtcgtgtccctggttatagccctgccggtgggagttatgactgccgtttacttgcgcgaatacgcggcaaaatcttccgtaagccgttttcttgggcttgccattgataccctggccggaattccttccattatatatggccttttcgggcttttgtttttttgccgttttatgaatctgggacagtccattatcgccggaggtcttactttaagcattatgattcttccggtaattatcagaaccacggaagaagcccttaaaacagtgcccgtttctttccgcgaaggttcgctctccctgggggcgaccaaattccagactatactccatgaggtctcccccccgccctgcccggcatccttaccgcggcgaatttggctgtgggacggtgnnnnnnnnnnnnnnnnnnnnnnnnnnatgcaagtctga

SEQ ID NO: 22160 - protein, 217 aa, Unknown
  Obtained from environmental sample
  SIGNAL (1)...(27)
  misc_feature (1)..(217): Xaa is any amino acid
MNYLKKRKITDGFWYALMTAASVAVGAALVGIIAYILIQALGMSTAADHSGAARAEFFRIRSLVPMIVSTAWTVVVSLVIALPVGVMTAVYLREYAAKSSVSRFLGLAIDTLAGIPSIIYGLFGLLFFCRFMNLGQSIIAGGLTLSIMILPVIIRTTEEALKTVPVSFREGSLSLGATKFQTILHEVSPPPCPASLPRRIWLWDGXXXXXXXXXMQV

SEQ ID NO: 22161 - DNA, 729 bp, Unknown
  Obtained from environmental sample
  misc_feature (1)..(729): n is a, c, g, or t
atgtcttcggcgaccaccatgtatgcgcagaccgcgcagacccgccttgataacggcaaacgccagcttgatcaaggaaactatgggggagcaattctggagttgaacgaagcaattaagcttgatcccaatatggcggaagcctacacataccgtgcaagggcatatagcggtataggagattttgaaaatgcgttttcagacgcgaacaagttgattcaacttaaccctcaacttccacttggatataatgtgcgaggaaatttgtatctcaactataaaaactatgaccgcgccatagcggactataccgaggtaatcaggcttgaccctcaatttgtaatggcgtaccgaaaccgcgcccttgcgtatttcgacaagaatgatattgaccgcgccataacagactatactgaggcaatcaagcttgcccccaataacgcaagtgcgtactacagccgcggcgttgtttatactgacaagaaagaatatgttcgcgcggtagcggactatgaagcagcaataaaaatcgattccaatcattccagtggcaaaaacaatttaccgatagtcaaaccgatggcagcatcacaatcggctaaaaaatatgatccttcaaaattcctcgntataatctccgattttgacccttcggaatatacctctgtagatttgattaaagcggcttccaatgcccaaaatttacaattagctttccaatccatatga

SEQ ID NO: 22162 - protein, 242 aa, Unknown
  Obtained from environmental sample
  DOMAIN (46)...(79): Tetratricopeptide repeat
  misc_feature (1)..(242): Xaa is any amino acid
MSSATTMYAQTAQTRLDNGKRQLDQGNYGGAILELNEAIKLDPNMAEAYTYRARAYSGIGDFENAFSDANKLIQLNPQLPLGYNVRGNLYLNYKNYDRAIADYTEVIRLDPQFVMAYRNRALAYFDKNDIDRAITDYTEAIKLAPNNASAYYSRGVVYTDKKEYVRAVADYEAAIKIDSNHSSGKNNLPIVKPMAASQSAKKYDPSKFLXIISDFDPSEYTSVDLIKAASNAQNLQLAFQSI

SEQ ID NO: 22163 - DNA, 618 bp, Unknown
  Obtained from environmental sample
  misc_feature (1)..(618): n is a, c, g, or t
gtgataaaaaatttgctaggcaaagctgtttctgcacccttcagaagcgtaatggctttggtgggttccgatgcagaccctgaaacaatagcatttgctccaggttccgaatatcctgcaaaggagaatatagatgctttgaaaaacttgtcgcaggcatggatgcaacgcccgcagttgcaagtggatgtatatggaaacgcagacaccattcaagacggcaaagccttgaaagaaactcagcttttaaaagccattgggcgcaaggtgcctgcaaaattgacacccactgcccttgaaaaacaccccttgcgcgatacactttttgcctattacggacgcacagagagaaaagattggcgcaccgcattgcaaaatccaaatgccgagaccatagacgaagcatcactcgtgcaagccgcccgcagaatttggagcgatttgctagctcgccaagcattgccacccaatactttgcagcagttagcgcatactcgcgcgcagaatatcaaagttgagttggtcaatataaacccaactttgggagagcgtatttttgtggtaaacgagaggtgcccttcccgaacctgtttcgcgtttgaaaatcagagaatatag

SEQ ID NO: 22164 - protein, 205 aa, Unknown
  Obtained from environmental sample
  SIGNAL (1)...(19)
  misc_feature (1)..(205): Xaa is any amino acid
MIKNLLGKAVSAPFRSVMALVGSDADPETIAFAPGSEYPAKENIDALKNLSQAWMQRPQLQVDVYGNADTIQDGKALKETQLLKAIGRKVPAKLTPTALEKHPLRDTLFAYYGRTERKDWRTALQNPNAETIDEASLVQAARRIWSDLLARQALPPNTLQQLAHTRAQNIKVELVNINPTLGERIFVVNERCPSRTCFAFENQRI

SEQ ID NO: 22165 - DNA, 501 bp, Unknown
  Obtained from environmental sample
  misc_feature (1)..(501): n is a, c, g, or t
atgttacgtttgattaaaaaaaaggtaaagcataaatacaccacaagctcttataacctaaaaacccctagctctccgcattttgcattagccaaagaaagggttaaattcgataagagaacaattaaaagttttttggagcaggcaaaaaaacaaaaaaatataatagttgtagagggagctggtggcgtaagggttccaataacgcataattatgatatggcagatttagcaaagctctccggctttccagttctgctggtcacgtacccagggcttggcaccataaaccacacgttgctctcaatagattacctgaagtcgaaaaatataaaaatcctcggttttatattttcttgggcagaaggcgcagattttggcggcgaaatgttcttggactccgcaagaacaatagagcgtatttcggggattcagttttgcggagcagtgccaaaaaaagctcctgtccattttccctnaannncttccccctcatgttag

SEQ ID NO: 22166 - protein, 166 aa, Unknown
  Obtained from environmental sample
  misc_feature (1)..(166): Xaa is any amino acid
MLRLIKKKVKHKYTTSSYNLKTPSSPHFALAKERVKFDKRTIKSFLEQAKKQKNIIVVEGAGGVRVPITHNYDMADLAKLSGFPVLLVTYPGLGTINHTLLSIDYLKSKNIKILGFIFSWAEGADFGGEMFLDSARTIERISGIQFCGAVPKKAPVHFPXXXSPSC

SEQ ID NO: 22167 - DNA, 717 bp, Unknown
  Obtained from environmental sample
  misc_feature (1)..(717): n is a, c, g, or t
atgattcgcaatatgcaggcaaccggaactttatcccttgtttcaagttatacggtaaataaatcttatactcttgggcgcaccatgcccatcgccgtttgttttgatctttacgacgacgatacggggttatcacaggtattagccgcattaagccgcttaaaaataaaagccacattctttttaaacggcgaatttattcgcaggagcccccaggcggcggcggctatcgttaaaggtgggcatgaaaccgcatctcttttttacactccgattgatctgtcggatacgcgctatcgcattaccaatgactttatcgcccgcgggcttgcgcgtaacgaggacgaattcaacaaagccacagggaaggaactctctatcctttggcaccctccgttctatcgcacctccgatgccgtaaacgccgcggcggcagccgcaggatacattacaattaacagaaacatcgatcccggagactggatgtcaagagaggacgcgctaaggctgaacctgcggcaaattccgccgtcagaaataatcgagcagattattcaaaaaagggaatcaggcgcaattatcccaatacggcttggactgcttcccggcggcagagacgaatatctgtttcagcggatagagacgctgctagacgcgctgctccgttcaggctccgaaatagtcatcgaattcccgcagcctcggaggatccaatag

SEQ ID NO: 22168 - protein, 238 aa, Unknown
  Obtained from environmental sample
  SIGNAL (1)...(20)
  DOMAIN (24)...(152): Polysaccharide deacetylase
  misc_feature (1)..(238): Xaa is any amino acid
MIRNMQATGTLSLVSSYTVNKSYTLGRTMPIAVCFDLYDDDTGLSQVLAALSRLKIKATFFLNGEFIRRSPQAAAAIVKGGHETASLFYTPIDLSDTRYRITNDFIARGLARNEDEFNKATGKELSILWHPPFYRTSDAVNAAAAAAGYITINRNIDPGDWMSREDALRLNLRQIPPSEIIEQIIQKRESGAIIPIRLGLLPGGRDEYLFQRIETLLDALLRSGSEIVIEFPQPRRIQ

SEQ ID NO: 22169 - DNA, 606 bp, Unknown
  Obtained from environmental sample
  misc_feature (1)..(606): n is a, c, g, or t
atgattaataaatatagattatcaattatagaccttcacaaaaatgtatatttacgcggcttatgtttaataatttttttattattcagcgttaaaaatatttacgccgacaaattttctttcagggcggacaaaatgtcaggctcaaaagcgcttggcagggaaacgacaattttgataggaaacgcggaagtccgctccgacaaccttttgttacgcgccgacagaatagaaatacaggggaaagataatcaatttatagtatgcacaggtaatgtgtggggacatgaagaagataaagatattttatttcttacggacaaactccgctatgatcgcaaattaaaaatcgcgcggttagaaggcaactcatctttagaggacagggaaaacgaaattgtggcaagagggcgttttcttgaatatgacgataaaaacgaaatcgctgtttttcaaatatccgtgcgtttattcaaagacgaaatggtctgccgttccgaatacgcaatttatcaccgtaatgaaaaattactcgatctttcaggttttccggtagtattcaaaaagaacgatgaattccgcgcggataaatccgtgtggatttag

SEQ ID NO: 22170 - protein, 201 aa, Unknown
  Obtained from environmental sample
  misc_feature (1)..(201): Xaa is any amino acid
MINKYRLSIIDLHKNVYLRGLCLIIFLLFSVKNIYADKFSFRADKMSGSKALGRETTILIGNAEVRSDNLLLRADRIEIQGKDNQFIVCTGNVWGHEEDKDILFLTDKLRYDRKLKIARLEGNSSLEDRENEIVARGRFLEYDDKNEIAVFQISVRLFKDEMVCRSEYAIYHRNEKLLDLSGFPVVFKKNDEFRADKSVWI

SEQ ID NO: 22171 - DNA, 330 bp, Unknown
  Obtained from environmental sample
  misc_feature (1)..(330): n is a, c, g, or t
ttgatcgcttgttccgggcgcaacgccgaagaatccggcttccggattgatagcgtaaagctgaccgtctttgccgaacttcatccacgcaatatcatcaccgattgtctcgactttccagccgggaagggtcgggatcaacatggcgaggtttgtctttccgcatgcggacggaagagcgcctgtaatgtacttaacttttccttgaggattggtaagtttaagaatcagcatgtgctctgcgagccagccttcgtctctcgcgagaacggacgcgatacggagagcgaggcactttttgccgagcagggcgtttccgccgtagcctga

SEQ ID NO: 22172 - protein, 109 aa, Unknown
  Obtained from environmental sample
  misc_feature (1)..(109): Xaa is any amino acid
MIACSGRNAEESGFRIDSVKLTVFAELHPRNIITDCLDFPAGKGRDQHGEVCLSACGRKSACNVLNFSLRIGKFKNQHVLCEPAFVSRENGRDTESEALFAEQGVSAVA

SEQ ID NO: 22173 - DNA, 657 bp, Unknown
  Obtained from environmental sample
  misc_feature (1)..(657): n is a, c, g, or t
ttggggtttatcgcagtgatgtttcaaattccaatcgggcttgaggacaatcttgtcggcgttattgaccttattactgtgaaggctgtttcctttgacggagatcagggtgagtcaatccgccatgcggaaatttccgttcaccttaaagccgatgcggacaaatnccgtgaagaattacttgatgcgctttcaatgttctccgacgagcttgcggaaatatttctgggcggcgaggcaattccggaagatttgattcattcggctatccgcagggccacgataggtgatcaatttgtgcctgttgtgctcaaaaaaaaaaacgcgttcgtngggtttcgctgcctgctgggcggggtttctctttcccttccgccttccggggtcgttgtgttttgcgctctcgtccttggcctngtcgggggttcgttcgtgctttccgccgttggnggctgtccttctgtcgctcttggttttgtgctggcngncggtcggtcccgcccgcttncgtgtgtgcgtctttctcngggccggctgcttttgaacggtgttctgcctnntcctcgtgcccgtcgtcggttcngngtnggccgccttgtgcgngcgcccccctttatgggncctttnngnnggtccccggcccccaaggcttcatga

SEQ ID NO: 22174 - protein, 218 aa, Unknown
  Obtained from environmental sample
  misc_feature (1)..(218): Xaa is any amino acid
MGFIAVMFQIPIGLEDNLVGVIDLITVKAVSFDGDQGESIRHAEISVHLKADADKXREELLDALSMFSDELAEIFLGGEAIPEDLIHSAIRRATIGDQFVPVVLKKKNAFVGFRCLLGGVSLSLPPSGVVVFCALVLGLVGGSFVLSAVGGCPSVALGFVLAXGRSRPLXCVRLSXGRLLLNGVLPXPRARRRFXVGRLVRAPPFMGPXXXSPAPKAS

SEQ ID NO: 22175 - DNA, 375 bp, Unknown
  Obtained from environmental sample
  misc_feature (1)..(375): n is a, c, g, or t
atggaattttgtcgatttcctcttagtgggttgaatatttttttggaaaagagcattgatcaatctatcattgatactattaaagatcccgacaatttgtatttcctggttataagtcttacggaagtatataaaaaatttttatctataggcgatagtgaaaaagcaaatattgcggttgctattatgcaaaatgccgctgttaatggtataaatccgcaactggcagtacttgccgcacaattaggcaaacaatatacgcttcctttggcggacagtatcatttacgctactgctgtatcgtgggatgctgaattatacactcaagacaaacattttgaaaatctggatcatgttcattatttctcaaaataa

SEQ ID NO: 22176 - protein, 124 aa, Unknown
  Obtained from environmental sample
  misc_feature (1)..(124): Xaa is any amino acid
MEFCRFPLSGLNIFLEKSIDQSIIDTIKDPDNLYFLVISLTEVYKKFLSIGDSEKANIAVAIMQNAAVNGINPQLAVLAAQLGKQYTLPLADSIIYATAVSWDAELYTQDKHFENLDHVHYFSK

SEQ ID NO: 22177 - DNA, 921 bp, Unknown
  Obtained from environmental sample
  misc_feature (1)..(921): n is a, c, g, or t
ttgggttcaaaggaaataacaggctgggcggctcctgccacgctttatagaggcaagctcacaaacagcacggctttaagaggcgataacatcgcggctcaaatgttcaaattcaaattggctccgaaaaaagttgggcgcgttgccacacagctagggcaagaaaagagcatagaagaggcaatgcccgcaattaaaaaatatcgcgaccttaaaaatgtggacaaggcattcacagacctcgcggatttttggaaacactatttgacagctttgcaggtaaaaacacccgatgcgagtttcaactctatgataaatgtgcataacccgcgccagtgccacaccacaaaaaattggagccgctatttaagcctttaccagctcggatttggcagcgaccgcggaataggctaccgcgattccagccaagatttgcttggcgttatgagccatatgccagaagaagcacgagtgcttgcagaaaatttgctctctgttcagctagaaggcggcaatgcaatgcaccaatatttccccagcacaatggaggcaaacgaaggagactcacgtgaaaaagaagaccgcccaaaatactatggcgatgaccatctttggattgttttaaccgttgcttcttatttaaaagaaactggaaatttggaattccttaaaaaagaaatcccattctataacaaaaagaaagaattagaggctagggaaaaaggcacggtgctggaacacttgaaacgcagccttgcattctcctggaacgatagaggcactcacggcattccacacttaggttttgcagattggaacgatacagttaatttgccaacaggagcggaatcccttttcaacgcaagccttttcgcaaaagccttgctagtaaagatcgatctgccgaagccttcaatatga

SEQ ID NO: 22178 - protein, 306 aa, Unknown
  Obtained from environmental sample
  misc_feature (1)..(306): Xaa is any amino acid
MGSKEITGWAAPATLYRGKLTNSTALRGDNIAAQMFKFKLAPKKVGRVATQLGQEKSIEEAMPAIKKYRDLKNVDKAFTDLADFWKHYLTALQVKTPDASFNSMINVHNPRQCHTTKNWSRYLSLYQLGFGSDRGIGYRDSSQDLLGVMSHMPEEARVLAENLLSVQLEGGNAMHQYFPSTMEANEGDSREKEDRPKYYGDDHLWIVLTVASYLKETGNLEFLKKEIPFYNKKKELEAREKGTVLEHLKRSLAFSWNDRGTHGIPHLGFADWNDTVNLPTGAESLFNASLFAKALLVKIDLPKPSI

SEQ ID NO: 22179 - DNA, 681 bp, Unknown
  Obtained from environmental sample
  misc_feature (1)..(681): n is a, c, g, or t
ttgattgggcaaacaatagctttggcagattttgtgtctgcaaagcctgcagcaattttaagctctcgtagcacgatagagttggagtttaagcaaaacgttgttttacaagacgctgttgggcaagagttgtctgcgaatccaattgattttgagccagcgataaaaggcaaggcaaaatggctaagtacctcgcttttgcaatttgtgccagaagcacccatgcaaggcgggcaaacattcaaggcaaaatttgacggcaaaaaggcgtttggaaaaaacgcaatcgtagatgattacgcttttgaattccaagttattccaaatgagattttagaaataaacggcggatttgaccccgtggaaggaaaagtaaatacggcaaaactcgctctggaactgagattcgcagacaaacccgatagcgtaaaactcaaaaaagaattaacgcttaatttcaattcgaaaagtatgcaatataaaatgttttttgacgggcagggaaataccgttagaatagaaagcgaacaggtgactcgcacaatcaaggcacagaatgcggaaataactttgccaaaaaactggacggctaatgatgatcctctcagtgtacctccccctctcctcccaatgaggaggtctgtaatggaagaatcagctgcgtccaaagcggccccctga

SEQ ID NO: 22180 - protein, 226 aa, Unknown
  Obtained from environmental sample
  misc_feature (1)..(226): Xaa is any amino acid
MIGQTIALADFVSAKPAAILSSRSTIELEFKQNVVLQDAVGQELSANPIDFEPAIKGKAKWLSTSLLQFVPEAPMQGGQTFKAKFDGKKAFGKNAIVDDYAFEFQVIPNEILEINGGFDPVEGKVNTAKLALELRFADKPDSVKLKKELTLNFNSKSMQYKMFFDGQGNTVRIESEQVTRTIKAQNAEITLPKNWTANDDPLSVPPPLLPMRRSVMEESAASKAAP

SEQ ID NO: 22181 - DNA, 354 bp, Unknown
  Obtained from environmental sample
  misc_feature (1)..(354): n is a, c, g, or t
atggtaaaaaaatcgggaattattgacggcgattttttcctcgctgacattctttcaaacgagaattatactctccaagataaactattcgttatcttaatgaataaccgatataagtttgatcaaagatttgatgacgctggtttttctttatataaggaagtaggttttaatgataatcaaaaagcccctaaagcattttgggataaatatgagcgtccacctttggaggagtattgggattatataataaatcgcagagatgttattagttccacaaaacataagacaacgcaaaggctcttaatttactccgcatcaatgggtagaattatctcaaaagtatattgctga

SEQ ID NO: 22182 - protein, 117 aa, Unknown
  Obtained from environmental sample
  misc_feature (1)..(117): Xaa is any amino acid
MVKKSGIIDGDFFLADILSNENYTLQDKLFVILMNNRYKFDQRFDDAGFSLYKEVGFNDNQKAPKAFWDKYERPPLEEYWDYIINRRDVISSTKHKTTQRLLIYSASMGRIISKVYC

SEQ ID NO: 22183 - DNA, 342 bp, Unknown
  Obtained from environmental sample
  misc_feature (1)..(342): n is a, c, g, or t
atgaggttagggcatactgcccctggaaaatggataacggcaaaggagaactacgccgcgacaatggaagtccatgaagactatacttactgccccgaacggaacctgttccggcaatactaccgtgacagcgcgaggcgctgtcttgccaagcttaaagacagggaaaggaaagttatttcctaccgctatcagcttgaagatgacaaacaatatacattcaaggaaatcggcgccaagatggacttgtcaccggaaatggtacgccagatagagttgaaagcccttgcgaagatccgccgccacgcaagcgagtttgaatattaccaggaagccatttaa

SEQ ID NO: 22184 - protein, 113 aa, Unknown
  Obtained from environmental sample
  DOMAIN (42)...(99): Sigma-70, region 4
  misc_feature (1)..(113): Xaa is any amino acid
MRLGHTAPGKWITAKENYAATMEVHEDYTYCPERNLFRQYYRDSARRCLAKLKDRERKVISYRYQLEDDKQYTFKEIGAKMDLSPEMVRQIELKALAKIRRHASEFEYYQEAI

SEQ ID NO: 22185 - DNA, 789 bp, Unknown
  Obtained from environmental sample
  misc_feature (1)..(789): n is a, c, g, or t
atgcgggggtttgcctcgtcgtccgggaaagggctccaattttccgggtcgagctgtttcggcccccaggaaccccttggaaaggaacatctttggtcgttgaccagaccatttcaggtattagccgccatcccaaaaaagggcccggtctttttcggttacgatgatgacgacaggcgggtttacattccgtttcccctttacaagaggaagttcatgtcggtctggaggaatgtcatccagatatacgtgaaggccaagagcattgaccttgtggaagatgccaaggacgaagtgaggacattcatcagggccatgcgccacacggacttccgcgcctccgatccatttgggatattctctcaggagaccataatggagttctgggcgatgctcactgcccccatgttcctgttcataaccttcatcaccagcgtaagcctcttcgtgggcggtgtcgtgatcatgaacatcatgctggtcagcgtggccgagaggacgcaggagataggcatcaggatggcgcttggggcaaggaagcgcgacgtactccgccaattcctgctggaggcggcgctgctgtcggtggcgggcgggggaataggcttcatggtgggggctgggctggcgctgggcgtcaggggcgcgacggggtttcccgcccaggtgacgctctccacggtcttcttggccattggtctgtcgagcctcgtgggcgtcctagctggctttttccccgccaggagggcggcgaacctcatagtcatagacgccatcagggcggagtga

SEQ ID NO: 22186 - protein, 262 aa, Unknown
  Obtained from environmental sample
  DOMAIN (79)...(255): Predicted permease
  misc_feature (1)..(262): Xaa is any amino acid
MRGFASSSGKGLQFSGSSCFGPQEPLGKEHLWSLTRPFQVLAAIPKKGPVFFGYDDDDRRVYIPFPLYKRKFMSVWRNVIQIYVKAKSIDLVEDAKDEVRTFIRAMRHTDFRASDPFGIFSQETIMEFWAMLTAPMFLFITFITSVSLFVGGVVIMNIMLVSVAERTQEIGIRMALGARKRDVLRQFLLEAALLSVAGGGIGFMVGAGLALGVRGATGFPAQVTLSTVFLAIGLSSLVGVLAGFFPARRAANLIVIDAIRAE

SEQ ID NO: 22187 - DNA, 618 bp, Unknown
  Obtained from environmental sample
  misc_feature (1)..(618): n is a, c, g, or t
atgaatattttttttgtaatgtcaattatttgtttagcagtttgttttataatgtttttttatttaaaagggtatgttaaaaaacgcacgtccacctcaggacttgatgaacatagggcggaagtcgccaaattaattgttgaaattaattcggtcacggatagaaatatacagcttatagaagacagtgtttccaaacttaaaaaatttctggaagacgcggaaaaacggattgccgaatataaggacgcgattgaaataaagccttcgggtgaggctctttatacaaatcttggccgcggcattcgcgccgcattgacaaatcccgccgaacaactgccgccgccgcggttgcagaacgagcatccgttaaaatcgcgccaactgtcactggagactcaaaagtcaggcgatttttttgaagcgccggttaaatctgaaaataaaacggctcaaggcgttcctcccgttcagaagcccccttcaaagaaacaactgcgcggcgccattgacctgcttgccaatgaggggctttccgctgaagaaatagcctcccgtcttgatattagcatcgcgcaggtaaaccttgcgatgaatttacgccgtacaaaacgctga

SEQ ID NO: 22188 - protein, 205 aa, Unknown
  Obtained from environmental sample
  SIGNAL (1)...(24)
  misc_feature (1)..(205): Xaa is any amino acid
MNIFFVMSIICLAVCFIMFFYLKGYVKKRTSTSGLDEHRAEVAKLIVEINSVTDRNIQLIEDSVSKLKKFLEDAEKRIAEYKDAIEIKPSGEALYTNLGRGIRAALTNPAEQLPPPRLQNEHPLKSRQLSLETQKSGDFFEAPVKSENKTAQGVPPVQKPPSKKQLRGAIDLLANEGLSAEEIASRLDISIAQVNLAMNLRRTKR

SEQ ID NO: 22189 - DNA, 399 bp, Unknown
  Obtained from environmental sample
  misc_feature (1)..(399): n is a, c, g, or t
atgtctcatgccgatcggagacgccgcatccaggaagtcctacaggaggtagggtataagaggagcattactatcaggccttcggagctttcaatgggcgagcaaaaactaatcgcttttgcgtgggctctgatgtgcaggccgaacctgctttttcttgacgagtggacagagtcgctggacgatgccggggcaaaccgccttatcaggcttgttgagcgccatcagaaagaaaaaaaaacggtggggggtgtgaaccatgatttcaagattataaggagcctttcagattatatcataatgattgtggatgggaaattatcatcccttttttcgcgcgaacaggttgagaaggatgaggatttggctcatcatattgaagaaggtatcacatcatga

SEQ ID NO: 22190 - protein, 132 aa, Unknown
  Obtained from environmental sample
  DOMAIN (1)...(105): ABC transporter
  misc_feature (1)..(132): Xaa is any amino acid
MSHADRRRRIQEVLQEVGYKRSITIRPSELSMGEQKLIAFAWALMCRPNLLFLDEWTESLDDAGANRLIRLVERHQKEKKTVGGVNHDFKIIRSLSDYIIMIVDGKLSSLFSREQVEKDEDLAHHIEEGITS

SEQ ID NO: 22191 - DNA, 414 bp, Unknown
  Obtained from environmental sample
  misc_feature (1)..(414): n is a, c, g, or t
ttgccccaaactttgcaggaaaaaggagggtttgccaaccgggattgcgtcggccatttctgtgattatacggataaagtaacggcgcatttcggcgacagaataaaaaactggatgacctttaatgaaccctgggtgtacgccttctgcggccatctctacgccgcccacgctcccggcttgaaagatctgccgacctgtctgtctgtcgggcataacgttcttttagcccacggaaaatcaatgcctgtcatcagaaaaaatgttccgggcgcaaaagccggtattgttaacaacctggcctggatagaaaacgcgacaaataaacaggaagatatcgaagcggcaaaacgctgggacatggcttttaaccgctggttcatggatcccctttttcggaagtggggaccctga

SEQ ID NO: 22192 - protein, 137 aa, Unknown
  Obtained from environmental sample
  DOMAIN (1)...(137): Glycosyl hydrolase family 1
  misc_feature (1)..(137): Xaa is any amino acid
MPQTLQEKGGFANRDCVGHFCDYTDKVTAHFGDRIKNWMTFNEPWVYAFCGHLYAAHAPGLKDLPTCLSVGHNVLLAHGKSMPVIRKNVPGAKAGIVNNLAWIENATNKQEDIEAAKRWDMAFNRWFMDPLFRKWGP

SEQ ID NO: 22193 - DNA, 402 bp, Unknown
  Obtained from environmental sample
  misc_feature (1)..(402): n is a, c, g, or t
atgattcttatctcttttttcataatcttatttatattgatttattcttcgctttttttattcttttatcattctcgtgcttatttgcattaccctattttatttttccttctactttctattcttatatttgattacacttcctttaatttatatttttattctttccctccaattagatcatctctttccattcaatattttttatttccttttatctttcactctatttcttcatctatttattttatctgttttacttttttcttttcatcatcttctattcttctttatatcctctatatactatttccttatatattttttttattctattcttctttcttttctctattattactttctttttatctcccttgctatttattcattcatttgtaa

SEQ ID NO: 22194 - protein, 133 aa, Unknown
  Obtained from environmental sample
  misc_feature (1)..(133): Xaa is any amino acid
MILISFFIILFILIYSSLFLFFYHSRAYLHYPILFFLLLSILIFDYTSFNLYFYSFPPIRSSLSIQYFLFPFIFHSISSSIYFICFTFFFSSSSILLYILYILFPYIFFLFYSSFFSLLLLSFYLPCYLFIHL

SEQ ID NO: 22195 - DNA, 354 bp, Unknown
  Obtained from environmental sample
  misc_feature (1)..(354): n is a, c, g, or t
gtgcttatttgcattaccctattttatttttccttctactttctattcttatatttgattacacttcctttaatttatatttttattctttccctccaattagatcatctctttccattcaatattttttatttccttttatctttcactctatttcttcatctatttattttatctgttttacttttttcttttcatcatcttctattcttctttatatcctctatatactatttccttatatattttttttattctattcttctttcttttctctattattactttctttttatctcccttgctatttattcattcatttgtaatagcttttatattcttttatctccataa

SEQ ID NO: 22196 - protein, 117 aa, Unknown
  Obtained from environmental sample
  misc_feature (1)..(117): Xaa is any amino acid
MLICITLFYFSFYFLFLYLITLPLIYIFILSLQLDHLFPFNIFYFLLSFTLFLHLFILSVLLFSFHHLLFFFISSIYYFLIYFFYSILLSFLYYYFLFISLAIYSFICNSFYILLSP

SEQ ID NO: 22197 - DNA, 747 bp, Unknown
  Obtained from environmental sample
  misc_feature (1)..(747): n is a, c, g, or t
atggcgcctggatcgcaaaaagggcagagcccattatttttcaattatgggagggtcattcaaaacttgttgcgcgaagggggggccgacccaaggaataatgaagaagcatatattcatgaaactttacaggattcaaaagagagaaagaacgacatctcttttctttccaaaacaggttaccagtatctgaaagaaaacaggacagatgacgctagggagtgtttcgcgaagatcctggcatctgctgagaacaacatctatgcccttgagggtatgggagactcatataggaagcaggggaatttcaggaacgcgatactgttttatcagcgctgtctctcgtaccacccagggaataactacgcgttattcggcctggccgactgttttaaggccctaaatcagtttcacaaagccatagaaatctgggagcagtatctggttcatgatgaaaataatataactgttctgaccagggtggctgacgcgtacagaaaagtccgtgattatatacattcaaaagaagtatatcaaaaggtgcttgaaatggacggccaaaatccatatgccattatcggcttgggccatgtgcattacgacttcaaggaataccgtgaagcgctttcctactgggaaaggatgatccagtcggattataacaacgttgatatcagggtattgactgcaatcgggaaccgccatagaaaattaaaaacctttaaggaaggcgttagtctattatga

SEQ ID NO: 22198 - protein, 248 aa, Unknown
  Obtained from environmental sample
  DOMAIN (87)...(120): Tetratricopeptide repeat
  misc_feature (1)..(248): Xaa is any amino acid
MAPGSQKGQSPLFFNYGRVIQNLLREGGADPRNNEEAYIHETLQDSKERKNDISFLSKTGYQYLKENRTDDARECFAKILASAENNIYALEGMGDSYRKQGNFRNAILFYQRCLSYHPGNNYALFGLADCFKALNQFHKAIEIWEQYLVHDENNITVLTRVADAYRKVRDYIHSKEVYQKVLEMDGQNPYAIIGLGHVHYDFKEYREALSYWERMIQSDYNNVDIRVLTAIGNRHRKLKTFKEGVSLL

SEQ ID NO: 22199 - DNA, 768 bp, Unknown
  Obtained from environmental sample
  misc_feature (1)..(768): n is a, c, g, or t
ttgacgccaatgaaggcgcagcacaaaccgctttgtggcggagacacccgtaagcccatagaagggcgcacggttacttcggtgttcaaatttatgaaacaaggaccgcattaccgtccaggaaatgtactcacaaccttattgttaatacgtttaatttggcaacttttgataagtttgccctctctttttaaactcagaaaagagtataaaaaaagaaaaagaaattcagaaaatttttctgtgattttttattccgacaatttagatgaagtgaacggcatagccaataacctacgctctgttgtgccttatctcaattcaaaaggcaaaaaagcgcatctttggggtagtgcattccacacgcgcacaaacggcgttgttgaaaatagttttgtggttctttttccccgcgctgcaagcatggaacaacttggttatgcagattccgaacttgcctttccttatcttgctcccgtgataaaatttttgaaacgctatccagcagatttaatggaacttgaaactccaagccccggagcatggttggttggcatagcgggaaaaataatgggtatgaaagttttgagccactatcgcactgatgtcccaagctacacactttcgctggtgaaagaagcctggatgcggcgctatgtgctttggcttatacgaactttttaccaaaataccatgcctgtaattagcccttgcgaagcatctcgtaaaattttagaaacagaaataaaagtcctacagaacatataa

SEQ ID NO: 22200 - protein, 255 aa, Unknown
  Obtained from environmental sample
  misc_feature (1)..(255): Xaa is any amino acid
MTPMKAQHKPLCGGDTRKPIEGRTVTSVFKFMKQGPHYRPGNVLTTLLLIRLIWQLLISLPSLFKLRKEYKKRKRNSENFSVIFYSDNLDEVNGIANNLRSVVPYLNSKGKKAHLWGSAFHTRTNGVVENSFVVLFPRAASMEQLGYADSELAFPYLAPVIKFLKRYPADLMELETPSPGAWLVGIAGKIMGMKVLSHYRTDVPSYTLSLVKEAWMRRYVLWLIRTFYQNTMPVISPCEASRKILETEIKVLQNI

SEQ ID NO: 22201 - DNA, 906 bp, Unknown
  Obtained from environmental sample
  misc_feature (1)..(906): n is a, c, g, or t
atggataaactcatcatcaagggagcgcgcgagcataacctaaaaaacatcgatttggagcttccacgcgacaaattaatcgtaatttcgggactttccggttccggcaaaagttcgctggcgttcgacacgattttcgcggaggggcaaaggcggtatgtggaaagcctttccgcctacgcgcgccagtttttggggcgcatggacaagcccgaccttgactacatcgaggggctttcccccgcaatttccatcgaacaaaaaacaacccacagaaacccgcgctccaccgtcgggacggttaccgaaatttacgattactaccgcctgctctacgcgcggattggaatcccccactgccccgtctgcggcaaggaaatccgcgaacagccggtcgattcaattatagagacaatcatgcagttcaaagaaggggcgaaaattcaactgctcgcgcccgttatccgcggtaaaaagggagaacaccagaaaataatcgaagacgctcgcaaggcggggttcgcgcgcgcgcggatagacggagttcccgttaaccttgacgaaagcatcaagctggacaaacaaaaaaaacactctatcgaaattatcgtagaccgccttgtgattggaaaggacattcgcccgcggctggcggaatccgttgaaaccgcggtgcagacggcggacggccttatgattgtgcttattaacgaagacggaaaaaacagcgagcatgttttttcgcagaaaaattcctgcccggactgcggcgtatcaattcctgaattgcagccgcgtcttttttcatttaacaccccttttcgcgcgtgcaccggctgttcgggaataggcagtaaaatggaatttaccccgacctttgtatccccgaccgtctctttcatttaa

SEQ ID NO: 22202 - protein, 301 aa, Unknown
  Obtained from environmental sample
  misc_feature (1)..(301): Xaa is any amino acid
MDKLIIKGAREHNLKNIDLELPRDKLIVISGLSGSGKSSLAFDTIFAEGQRRYVESLSAYARQFLGRMDKPDLDYIEGLSPAISIEQKTTHRNPRSTVGTVTEIYDYYRLLYARIGIPHCPVCGKEIREQPVDSIIETIMQFKEGAKIQLLAPVIRGKKGEHQKIIEDARKAGFARARIDGVPVNLDESIKLDKQKKHSIEIIVDRLVIGKDIRPRLAESVETAVQTADGLMIVLINEDGKNSEHVFSQKNSCPDCGVSIPELQPRLFSFNTPFRACTGCSGIGSKMEFTPTFVSPTVSFI

SEQ ID NO: 22203 - DNA, 531 bp, Unknown
  Obtained from environmental sample
  misc_feature (1)..(531): n is a, c, g, or t
gtgcaaggcacggggatgggcattccttccatttcgatttatgtgaaagaaatgttcaaagactacggtgtcagacgggccatacggatcggaaccgcgggttccctccaggaaaacctgaaactccgggacctggtaatcgccatgacggcctgtaccgattccggggccaaccggatccgttttggcggacgggacttctctcccgcggcgaccttcctgctgctaaaaaaagcctgggaaattgccgccgcccggggctggcaggcgtcggtgggcccggtaatttcttccgatatgttctacaccgaagaccccgaggaatggaggctctgggcaaagttcggcgtcctggccgtggaaatggaaacctgcgaactctacaccctggccgcgaaatacggcagggaatgtctgtccctccttaccagatcggacaaccttattactcacgaagttaccagcgccgaagaacggcagaccgcctttacccggatgatggaagtggccctggaaaccgctatttcctga

SEQ ID NO: 22204 - protein, 176 aa, Unknown
  Obtained from environmental sample
  DOMAIN (1)...(174): Phosphorylase family
  misc_feature (1)..(176): Xaa is any amino acid
MQGTGMGIPSISIYVKEMFKDYGVRRAIRIGTAGSLQENLKLRDLVIAMTACTDSGANRIRFGGRDFSPAATFLLLKKAWEIAAARGWQASVGPVISSDMFYTEDPEEWRLWAKFGVLAVEMETCELYTLAAKYGRECLSLLTRSDNLITHEVTSAEERQTAFTRMMEVALETAIS

SEQ ID NO: 22205 - DNA, 927 bp, Unknown
  Obtained from environmental sample
  misc_feature (1)..(927): n is a, c, g, or t
ttgcatnnnnnnnnnnnnnnnnnnnnnnnnnncacccagggcgatttgggtgatcgggaactggcggccgacctcctggcccgtcaccaagtgcgggcggtattgaatttcgccgcggaatcccatgtggaccgttccatcctcggcccggcggaattcatccgcaccaatatcgtgggcgtattcaaccttctggagacggtgagggcctactggggcggcttgccggccggggagaaggcggccttccgctttctccaaatctccaccgacgaagtcttcggcgccctgaccccggaggacccggccttcaccgaaaccaccccctatgcccccaacagcccctactcggcctccaaagccgccgccgaccacctggtgcgggcctatcaccacacttacggcctgcccaccctgaccaccaactgttccaacaattacggtcctttccagttcccggaaaaactcattcccctgaccatagtcaacgccctggaaggccggcccctgccggtctatggcgacggcctccagcggcgcgactggctccacgtgtccgaccatgtcgcggccctgcgccgggtgctggccgccggccggcccggcgagacctacaacatcggcggcggccaggaaaaggccaacctggaggtgctggaaagcctctgcaccctcctggaccagcggcggccccggccggacggccggccctaccgcgcccaggtgacccatgtggaggaccgcccggggcatgaccggcgctacgccgtcaacgcgggcaagcttcaggccgaacttggctggcgcccggtccacgattttaaaagcggcctggccgccaccgtggaatggtatttggcggaaaccgaatggctggccagtgtccgttccggcaactaccgccactgggataacaagctattatga

SEQ ID NO: 22206 - protein, 308 aa, Unknown
  Obtained from environmental sample
  DOMAIN (5)...(287): RmlD substrate binding domain
  misc_feature (1)..(308): Xaa is any amino acid
MHXXXXXXXXXTQGDLGDRELAADLLARHQVRAVLNFAAESHVDRSILGPAEFIRTNIVGVFNLLETVRAYWGGLPAGEKAAFRFLQISTDEVFGALTPEDPAFTETTPYAPNSPYSASKAAADHLVRAYHHTYGLPTLTTNCSNNYGPFQFPEKLIPLTIVNALEGRPLPVYGDGLQRRDWLHVSDHVAALRRVLAAGRPGETYNIGGGQEKANLEVLESLCTLLDQRRPRPDGRPYRAQVTHVEDRPGHDRRYAVNAGKLQAELGWRPVHDFKSGLAATVEWYLAETEWLASVRSGNYRHWDNKLL

SEQ ID NO: 22207 - DNA, 579 bp, Unknown
  Obtained from environmental sample
  misc_feature (1)..(579): n is a, c, g, or t
ttgctgcatactgcggcgcgtatattctctggcgcggttatcagagaggaaatgaaacgccgagggaaaatggaagcagcgctgaacagggccgctatcaggtttatctcgcaaaatgaagaaacatttgaagccaccatgacggctggcattagggaaatcgccgacgcgttcaatttggacagattttccatttggcgcaattcacttaggcctgacgcaatacatgtttcacaaatataccgctgggacagagaatccggcgggactaccatgccgacaaaaggcctggatgatgtaacctatgcccagcttgcgccgagatgggaaaaacttttggcatcgggcgaaacaattaacagtccggtaaagtttctgcccgaagcggctatgcttaaatcatttggctgtgtgacggcttttatcacgcctttgtttataaacaacattttttggggttttgcccttcttgaagatcgctacaatgaacgtttttttgaaaaggacgacattgatatgctccgctcggcttcgtttctgtgtgcgaacaccgtcatacgcgccgacttggaacgttga

SEQ ID NO: 22208 - protein, 192 aa, Unknown
  Obtained from environmental sample
  DOMAIN (42)...(185): GAF domain
  misc_feature (1)..(192): Xaa is any amino acid
MLHTAARIFSGAVIREEMKRRGKMEAALNRAAIRFISQNEETFEATMTAGIREIADAFNLDRFSIWRNSLRPDAIHVSQIYRWDRESGGTTMPTKGLDDVTYAQLAPRWEKLLASGETINSPVKFLPEAAMLKSFGCVTAFITPLFINNIFWGFALLEDRYNERFFEKDDIDMLRSASFLCANTVIRADLER

SEQ ID NO: 22209 - DNA, 696 bp, Unknown
  Obtained from environmental sample
  misc_feature (1)..(696): n is a, c, g, or t
ttgggcgacctcagaaactcattcctgtcagccagaacacagtcttggatagtggacggaaaattggtaatcgatcccgccatggaaaaatatatggacatttgtaaaacacttcatgacaacaaatgggaaggcagagttggtcagtggtcagaaggctggtttgccggtatgaaagacgaactcaaagatgaaaccggaagaaaagtagaagtattctcatacttcctccccacatggggtcttcactatgtactcaagaccaatgctcccggaacatcgggtgactgggcgatggttcaaggtccttcagcttatcgctggggcggcacttgggtcggcggttacaaaggtacaaagaacgtagccgcggttaaagaatttatccgctacgtaaccacagacgacggtttccttgaagcttgggcgaaagacaccggcgatatggtaagcaatatcaatgtcgttaataaaattaaagacacatacagcgagccgtatctcggcggacagaaccactatgccgaatttgccgaaatggcgaaaaatgttaatggtaaacttctccagggaagcgatgaagccattgaagccatgtttgacgaagctacagcagctttcgtaaacggcgaaaaaacaaaagctcatgctcttgctgatttcagatcacaggctgaagcgcagtttgcgaaataa

SEQ ID NO: 22210 - protein, 231 aa, Unknown
  Obtained from environmental sample
  misc_feature (1)..(231): Xaa is any amino acid
MGDLRNSFLSARTQSWIVDGKLVIDPAMEKYMDICKTLHDNKWEGRVGQWSEGWFAGMKDELKDETGRKVEVFSYFLPTWGLHYVLKTNAPGTSGDWAMVQGPSAYRWGGTWVGGYKGTKNVAAVKEFIRYVTTDDGFLEAWAKDTGDMVSNINVVNKIKDTYSEPYLGGQNHYAEFAEMAKNVNGKLLQGSDEAIEAMFDEATAAFVNGEKTKAHALADFRSQAEAQFAK

SEQ ID NO: 22211 - DNA, 474 bp, Unknown
  Obtained from environmental sample
  misc_feature (1)..(474): n is a, c, g, or t
atgcggttcattttcagcgcagttatttgtattttcctcagttcttttcccgtaaaggcccagactcccgacggggcggaagcgcagcccctttcggcaatggacaattaccgccgaggcagggaactggaataccagaaccgcatgaacgaggcaaacacccattacaacgaggcggtacgccaatgccttgatgaagtgtcaggcaataccgcctcgcgcactacgtatacggttttgacctggacattgcagcggcaaagaaggtattccgaagtcgtaacatggggagaacggggccttaggttgtttcccgacgaataccgcattatggaaacaatgggagaggcgtttttttatcttgatgattacacgcgttcgctttcctatatgcagcgttatacatacgcgttaccccaggggggaccgcgtttcccttcccgtttttttttgcccggtgaaattttaccgtaa

SEQ ID NO: 22212 - protein, 157 aa, Unknown
  Obtained from environmental sample
  SIGNAL (1)...(20)
  misc_feature (1)..(157): Xaa is any amino acid
MRFIFSAVICIFLSSFPVKAQTPDGAEAQPLSAMDNYRRGRELEYQNRMNEANTHYNEAVRQCLDEVSGNTASRTTYTVLTWTLQRQRRYSEVVTWGERGLRLFPDEYRIMETMGEAFFYLDDYTRSLSYMQRYTYALPQGGPRFPSRFFLPGEILP

SEQ ID NO: 22213 - DNA, 447 bp, Unknown
  Obtained from environmental sample
  misc_feature (1)..(447): n is a, c, g, or t
gtgggcaggattgcttttcaggaactttttaccgaagctcaaaatgaaggaaagaaagcgtcaagtgtagagaaatttttatgcaataaatacgtggcgactatctgtacgctttttgttggctatcttcttgccattctaggctacgctgccatctggcccctctttggttctgccaaccagcttctcgcagctttggctcttatttcttgctcggtatttcttaaaaaaacaaaacgccaaggagctatgctttacgctcccatgttcattatgcttgctgtaacctttacggctctttcttttaccattcactcaaagggaggcaagctctttgacggcacattcagctttgagcaggattttttgcaacttatttttgccttgttgcttctttgcctcggcactgtggttgcggttcagggagttaacaaattgagagattag

SEQ ID NO: 22214 - protein, 148 aa, Unknown
  Obtained from environmental sample
  misc_feature (1)..(148): Xaa is any amino acid
MGRIAFQELFTEAQNEGKKASSVEKFLCNKYVATICTLFVGYLLAILGYAAIWPLFGSANQLLAALALISCSVFLKKTKRQGAMLYAPMFIMLAVTFTALSFTIHSKGGKLFDGTFSFEQDFLQLIFALLLLCLGTVVAVQGVNKLRD

SEQ ID NO: 22215 - DNA, 564 bp, Unknown
  Obtained from environmental sample
  misc_feature (1)..(564): n is a, c, g, or t
ttgtgtgccagcatcccgtctttttgcggtagggcaaaactggcatatatcgggagttggggggcaaccatttatgctttttgtttaatatgctattcacattcagcaccatttaccccagcatacaaaatgcagaagcaaaaaaaaatactccgtacctttgaccacgtttcaatatattttttaatagccggtacatatacaccatttttgctaatctatatgctggattcctttggcataacattgctctcaatacaatggtcgcttgtattgctaggaattcttttcaagattttttttacggggcgttttaagtttgcaagcaccttagtctatgtggctatgggctggcttttgcttgttggcggcaatagattttttgttgtattgccaacacctgtgctggttatggttatgattggcggtgggctttacacgcttggttctgttttttatttgaacaaaaaaatttatcatcatcacgctatatggcatttgtttgttcttagtgcggctatttgccattatgtagcggtattgcttgcggttatattaaaatga

SEQ ID NO: 22216 - protein, 187 aa, Unknown
  Obtained from environmental sample
  DOMAIN (1)...(177): Haemolysin-III related
  misc_feature (1)..(187): Xaa is any amino acid
MCASIPSFCGRAKLAYIGSWGATIYAFCLICYSHSAPFTPAYKMQKQKKILRTFDHVSIYFLIAGTYTPFLLIYMLDSFGITLLSIQWSLVLLGILFKIFFTGRFKFASTLVYVAMGWLLLVGGNRFFVVLPTPVLVMVMIGGGLYTLGSVFYLNKKIYHHHAIWHLFVLSAAICHYVAVLLAVILK

SEQ ID NO: 22217 - DNA, 654 bp, Unknown
  Obtained from environmental sample
  misc_feature (1)..(654): n is a, c, g, or t
ttgggaccaagggcctttttccggttaagcccaaatgctccattcaaagctacaccacagcgctttattgcgctgataaaagcgggatacgaaatcaggcggctcatcgttaccaccttcagggctgtgtcaggcgctggctatcccggtgtacccagccttaacatgatcgataacatcgttccttacatcggtggggaagaagaaaagtcagaactggaaccgcttaagatacttggctcaatcgaaggaggcgttttcaaaaacgccgaattgccaaaaatttccgcccactgtaaccgcgtcccggtaaccgacgggcatacggcctgcgtcagcctggaattcggcgagaagaaaccttctatagaagaagtgaaaaaaatctgggccgattttacaagccttccgcaagagatgaatctcccgatggctccccggcagcctatcattgtccgggaagaaaatgaccgtccacagccgaggaaggacagggacgcggacaaggccatggcggttacaatcggacggatcaggccctgcaatgtttttgacctacgcttcgtgggcttatctcataacaccgcacgtggcgcagcgggaggcggcatacttaacgctgagcttttaaaacgcaaggggtatttggactga

SEQ ID NO: 22218 - protein, 217 aa, Unknown
  Obtained from environmental sample
  DOMAIN (22)...(197): Semialdehyde dehydrogenase, dimerisation domain
  misc_feature (1)..(217): Xaa is any amino acid
MGPRAFFRLSPNAPFKATPQRFIALIKAGYEIRRLIVTTFRAVSGAGYPGVPSLNMIDNIVPYIGGEEEKSELEPLKILGSIEGGVFKNAELPKISAHCNRVPVTDGHTACVSLEFGEKKPSIEEVKKIWADFTSLPQEMNLPMAPRQPIIVREENDRPQPRKDRDADKAMAVTIGRIRPCNVFDLRFVGLSHNTARGAAGGGILNAELLKRKGYLD

SEQ ID NO: 22219 - DNA, 552 bp, Unknown
  Obtained from environmental sample
  misc_feature (1)..(552): n is a, c, g, or t
ttgcgcgcggacgaacaggggcatgccgccgctcttgaggcaattatgacaaccgatgtccgcaaaaaggaaattgccgtagaagcggaaataggcggagagcttgtgcgtatcggggccatgacaaaaggctcgggaatgggtcatcccaacatggcgactatgcttgcctttatcactacggacgcggctgtagaaaataccgcccttgacagcgccctgcgcctagccgtgaaacgctcttttaaccgcctgactgtagacggggacacttccaccaacgacatggttgtcataatggcaaacggcgaggcggggaatacgcccgttaactcttcaaacaaatgttcccactgtaccgcggattacaacgctttttactccgcgcttgaatatgtgtgtgtttctctcgcgaaaaaaatggcgcgggacggggaaggcgctacaaaacttgtaacggttactgttgcaaatgcggcaagngaaaaagttgcctcttcgcttgccaaatcggtggcttcatccaaacccgaaaagcggctagataggtga

SEQ ID NO: 22220 - protein, 183 aa, Unknown
  Obtained from environmental sample
  DOMAIN (1)...(182): ArgJ family
  misc_feature (1)..(183): Xaa is any amino acid
MRADEQGHAAALEAIMTTDVRKKEIAVEAEIGGELVRIGAMTKGSGMGHPNMATMLAFITTDAAVENTALDSALRLAVKRSFNRLTVDGDTSTNDMVVIMANGEAGNTPVNSSNKCSHCTADYNAFYSALEYVCVSLAKKMARDGEGATKLVTVTVANAAXEKVASSLAKSVASSKPEKRLDR

SEQ ID NO: 22221 - DNA, 468 bp, Unknown
  Obtained from environmental sample
  misc_feature (1)..(468): n is a, c, g, or t
gtgcaaaaggcttttgtttcttatgtggataacggcggcgggcttttggttgtacatagcggtactgtggcaggcgagcggacggaaactctcaaccgtctgattggttgccgttttgtctatcaccctaactcctgtcctgtgaccgtccagcccgttaagcctcatcccgttaccgagggcgtaggaatgttttgcgaaaccgatgaacattaccggcttgaaattcttgccggtgatgcggatattataatagcgtcttattctccgcctcagggggggacggataaatatcaagaggatccctataacaacactcaggcgtggatatgtcctgcggggtatgttcgtactcagggcaagggacgggtatgcgttcttacaccgggacatcttttgcctgtatggcttaatccgcaataccaacggacgattgccaacgcgttaaaatggtgcggctcccgataa

SEQ ID NO: 22222 - protein, 155 aa, Unknown
  Obtained from environmental sample
  misc_feature (1)..(155): Xaa is any amino acid
MQKAFVSYVDNGGGLLVVHSGTVAGERTETLNRLIGCRFVYHPNSCPVTVQPVKPHPVTEGVGMFCETDEHYRLEILAGDADIIIASYSPPQGGTDKYQEDPYNNTQAWICPAGYVRTQGKGRVCVLTPGHLLPVWLNPQYQRTIANALKWCGSR

SEQ ID NO: 22223 - DNA, 315 bp, Unknown
  Obtained from environmental sample
  misc_feature (1)..(315): n is a, c, g, or t
ttggaggtttcgctttcggaaatcaatgcaaattttttgaatgaattaaaaaaattagaaccctttggtaacgaaaatccctacccagtatttttggcaaggcagattacggttaagaatttaaagctgttgaacgatagccatttgcgtttttacgcggttcaaggcaggagttctatttccgccatagcattccataaggcttatttgtctgattcgcttcaaaaagacgaagtcaatttaatttttgaggctcgtttcaatgtttatcaaggtgtggagaacgttcagttgatagtgttgggaactgtgtag

SEQ ID NO: 22224 - protein, 104 aa, Unknown
  Obtained from environmental sample
  misc_feature (1)..(104): Xaa is any amino acid
MEVSLSEINANFLNELKKLEPFGNENPYPVFLARQITVKNLKLLNDSHLRFYAVQGRSSISAIAFHKAYLSDSLQKDEVNLIFEARFNVYQGVENVQLIVLGTV

SEQ ID NO: 22225 - DNA, 669 bp, Unknown
  Obtained from environmental sample
  misc_feature (1)..(669): n is a, c, g, or t
atgcccacgcaagaacaaatgttttcctccgtattttccaaattcaattgggagatggtggaaaaaggaattgccactgctactcttcaatctgtggagcgggcgctttcaaaaaaagaaaatatgaatatagacgattttgccgctttaatttcgcgggctgcgactccttatttggagaatatggcaaaaaaaagcagagagataacgctacagcgttttggaaaagccattcaactttacttgccgctttacctctccaacgattgcacaaattcctgcgtgtattgcggatttaatactcgcaatgatattgagagaaaagttttgagtacaaacgaaatactagatgaaattgaagctataaaaaaactcggcgactttgaacatattctcttggtaacaggcgaaagccccaaaaatgcgggctttgattacttgctaaatgcagtgaaactctgccacgagcattttgccgcagtttcaatagaagttcaacctcttagtatggaagaatatgccgaacttgcgaaatgcggagttagtgcggtttttgtttatcaagaaacttacagggaagaaacttacaagcaacaccacccacacgggaaaaaaagcatttttgaatatcgcttgcattgccagatagaattggaattgcagggttag

SEQ ID NO: 22226 - protein, 222 aa, Unknown
  Obtained from environmental sample
  misc_feature (1)..(222): Xaa is any amino acid
MPTQEQMFSSVFSKFNWEMVEKGIATATLQSVERALSKKENMNIDDFAALISRAATPYLENMAKKSREITLQRFGKAIQLYLPLYLSNDCTNSCVYCGFNTRNDIERKVLSTNEILDEIEAIKKLGDFEHILLVTGESPKNAGFDYLLNAVKLCHEHFAAVSIEVQPLSMEEYAELAKCGVSAVFVYQETYREETYKQHHPHGKKSIFEYRLHCQIELELQG

SEQ ID NO: 22227 - DNA, 387 bp, Unknown
  Obtained from environmental sample
  misc_feature (1)..(387): n is a, c, g, or t
gtgaaaatctctacaaaagggcggtattctatccgtatgcttctggatttggcagagcatagaaacgatggctttgtttccttaaaagatatttcagaacggcagggcatttccaaaaaataccttgaacaaatcgttgccttgttaagccaacccgatattctgcgaaccaatcgcggcaacaagggcggatatatgctggcaaaggatcctgataaatacacggtaggtcaaattttaaggattaccgagagcggcttgtttccagtttcgtgtttagcagatgatacaaaccaatgcgagcgaaagcaattctgcaaaaacttatgggtatggagtggtcttgaaaaagttataaacaaattacctagatggcataacccttaa

SEQ ID NO: 22228 - protein, 128 aa, Unknown
  Obtained from environmental sample
  DOMAIN (1)...(122): Transcriptional regulator
  misc_feature (1)..(128): Xaa is any amino acid
MKISTKGRYSIRMLLDLAEHRNDGFVSLKDISERQGISKKYLEQIVALLSQPDILRTNRGNKGGYMLAKDPDKYTVGQILRITESGLFPVSCLADDTNQCERKQFCKNLWVWSGLEKVINKLPRWHNP

SEQ ID NO: 22229 - DNA, 777 bp, Unknown
  Obtained from environmental sample
  misc_feature (1)..(777): n is a, c, g, or t
ttggaaagcgtgtttactcacgtaacgagggttcgaatccctctccctcttcttgtgcatatagatagcaacttttttttggataatttaacgcttggcgaaaccactttaagccaaaccgaaagttcccatataaccaaatcttttagagcgcgcaatggcgattccttgactttatgcgatggaaagggaagatttgcagatgccgagcttgtagatatagctcaaaaaacttgcaaggtttatattaaaagcataagcaagcaagaaccccgtcctcaagttcatttggcaataggatgtttatcggacggcggtgaagaagaaattgtatttcacgcagcgcaaatgccgcttgcggcaattcacctgctgagaacggaaagaagccaggaaccgagggattccgaactaggtaggctacgccgcagaatggaatcaaaaagccttgtggcactcaaacagagccgcaaatcctggctaacagagataaaagcccctgttttcttaaatgaatttttggaaaatttcaaaggcaacctaatagtctgcgatcaaataggcagtgcttcattacctgctatcaattatccattatcaattataattggtcccgaaggcggcttttctgaaaccgaacttgaagttatgaaaaacaaaaatgcaacatttttatcgcttggtccccaaggctgcgcgccattagcgcccctattttcccccttggaaaaatgcacaataagccaagggctaaaccgccaaagccaaaccacataa

SEQ ID NO: 22230 - protein, 258 aa, Unknown
  Obtained from environmental sample
  DOMAIN (35)...(240): Protein of unknown function (DUF558)
  misc_feature (1)..(258): Xaa is any amino acid
MESVFTHVTRVRIPLPLLVHIDSNFFLDNLTLGETTLSQTESSHITKSFRARNGDSLTLCDGKGRFADAELVDIAQKTCKVYIKSISKQEPRPQVHLAIGCLSDGGEEEIVFHAAQMPLAAIHLLRTERSQEPRDSELGRLRRRMESKSLVALKQSRKSWLTEIKAPVFLNEFLENFKGNLIVCDQIGSASLPAINYPLSIIIGPEGGFSETELEVMKNKNATFLSLGPQGCAPLAPLFSPLEKCTISQGLNRQSQTT

SEQ ID NO: 22231 - DNA, 744 bp, Unknown
  Obtained from environmental sample
  misc_feature (1)..(744): n is a, c, g, or t
gtggacgaggttcttatcattgaggaaggccaaccgtttatagcgcaaaggatttttggcattacgggcgcggatttaaaaccaattattcaatgcggagaacttgatcctgataatgtccgcaaggctctaggtcttcctcccagaaaaagcgttaatgttgacgcgggagagcttccggcgcgtcctccccaactatgtcagggatgcccccatgcggacagttataacactattaataaagcggtcgcagagattgacccgcgcccgaatcatcccgatgttggaatcaactccgatatcggctgttattcacttggagcgactccgccattttccgcaatcgagagcgttatctgcatgggcgcctgcgtcggtatggcaaaaggcgcaagtgacgcgggtcttaaatacgcgctggcggtaattggcgattcaacattcattcactcaggcatcaccccactaattgacgccgcggaaactgatattccgatgactctaataattcttgacaactccacagtagcaatgacaggctgccagccgaccatagtcccctctgaaaacttaaaaaacctgttaacgggctgcggcgccaaacgcatccttgaacttgaagcaaaaccgtcccttgttgatgaaaacgccgcaaaactgaaggcggagattgaacacagaaggctttccgtagtcattttcaaacgtgagtgtctggaatcgtttaggaaaaataaaaaataa

SEQ ID NO: 22232 - protein, 247 aa, Unknown
  Obtained from environmental sample
  DOMAIN (100)...(234): Thiamine pyrophosphate enzyme, C-terminal TPP binding domain
  misc_feature (1)..(247): Xaa is any amino acid
MDEVLIIEEGQPFIAQRIFGITGADLKPIIQCGELDPDNVRKALGLPPRKSVNVDAGELPARPPQLCQGCPHADSYNTINKAVAEIDPRPNHPDVGINSDIGCYSLGATPPFSAIESVICMGACVGMAKGASDAGLKYALAVIGDSTFIHSGITPLIDAAETDIPMTLIILDNSTVAMTGCQPTIVPSENLKNLLTGCGAKRILELEAKPSLVDENAAKLKAEIEHRRLSVVIFKRECLESFRKNKK

SEQ ID NO: 22233 - DNA, 855 bp, Unknown
  Obtained from environmental sample
  misc_feature (1)..(855): n is a, c, g, or t
atgagtacgaaaaacaaacaaggcataaaggctaatgcaatctttcgtaaaacaatgccctttgtgtgggcgaagctgctgctcggcattctcactatcgtggtgtcagcgctaattctcgcgatccttttgggcatcgcctggctctttaagagcgagggcgtggggctcatattgattatcgtgtggctttctctgaccggaatcatccggttcatcatcaaccactacataggctttttgataaaggcggggcacatagcggtcatcacggaagcggttacaacaggaaaagtaccgaagaaccaggtcgcctatggcaaggagagggtgaaggaacgctttgttacagctaacgtctactttgtcatagataaactggttgccgccgcggtaaggcaaattcaaagagggataggcaaaatcacaggcatgatgagttccataccgggcatgggcgcggttacatccttggcgaaattctacgtcagtatatcgttaggctacattgacgaatgctgcctgggttatacattttataaaaagagccagtccgcgttcaagagcgcggcggacggcgtcgtgattttcgcgcagaacataaaaaccctgctggccggcgcggcaataaccatgctcattgtggtattcggccttgccggaatcactttgggactgttcctcgtttttgggatgctgatacggtttttacccctgtccgacttgataagaacatggataggaggcggggcaggagcttggataggagaccatataggatttataggatttctcatagcggttatcccttgcgcttacaataaaaaaccccgtttatggacagctttatcctga

SEQ ID NO: 22234 - protein, 284 aa, Unknown
  Obtained from environmental sample
  misc_feature (1)..(284): Xaa is any amino acid
MSTKNKQGIKANAIFRKTMPFVWAKLLLGILTIVVSALILAILLGIAWLFKSEGVGLILIIVWLSLTGIIRFIINHYIGFLIKAGHIAVITEAVTTGKVPKNQVAYGKERVKERFVTANVYFVIDKLVAAAVRQIQRGIGKITGMMSSIPGMGAVTSLAKFYVSISLGYIDECCLGYTFYKKSQSAFKSAADGVVIFAQNIKTLLAGAAITMLIVVFGLAGITLGLFLVFGMLIRFLPLSDLIRTWIGGGAGAWIGDHIGFIGFLIAVIPCAYNKKPRLWTALS

SEQ ID NO: 22235 - DNA, 429 bp, Unknown
  Obtained from environmental sample
  misc_feature (1)..(429): n is a, c, g, or t
atgaaagccggtattatcggcgctacaggttatgccggcgccgaattggtcaggctcctttcggggcacccaaaaattgaaaaattatacctttcctcggtaagttttgaaggggagaatatcgaagaagtctacccgaactttttgggcagaatctcatgtaaacttcagaaagccgaagaagttgtcgccgcatccgacgtggtttttgccgctttgccgcacggggtaggggaacagtttgcagccgcctgcatggagcggaaaattcattttatcgacttttccgccgatttccggtttgatgatgacgaggccgtttacgccgcatggtacggaaaatcatataaataccctgaattacacaaaaactcgatttacggtcttgttgagctaaacaggcaaaaaataaaaagccttgcagcataa

SEQ ID NO: 22236 - protein, 142 aa, Unknown
  Obtained from environmental sample
  DOMAIN (2)...(140): Semialdehyde dehydrogenase, NAD binding domain
  misc_feature (1)..(142): Xaa is any amino acid
MKAGIIGATGYAGAELVRLLSGHPKIEKLYLSSVSFEGENIEEVYPNFLGRISCKLQKAEEVVAASDVVFAALPHGVGEQFAAACMERKIHFIDFSADFRFDDDEAVYAAWYGKSYKYPELHKNSIYGLVELNRQKIKSLAA

SEQ ID NO: 22237 - DNA, 594 bp, Unknown
  Obtained from environmental sample
  misc_feature (1)..(594): n is a, c, g, or t
ttgactatcagagccacggattataaccagcaatatgcccagcgtaataaaaccatagtattaagaggttcaagaggaacccattttgaaacaactactaatgctagtggcatagcccgtgttcaaatttccgatggcgatacctattcgttttggtgcgatggcataaccggcgaatttgattgcggttttggcaatacactctatgttccaccaggttccggttctggaacttgggaaatttactatgacgatgaccgttttgaattgaaaggggttacttttgaaacgggaaaatccactattttgccgggttctaccaaaattttggaagcaactgtgaaaggcttgcaaaaatttgattcggttagtgttgaaatttccggccacacagataatgtggggggcgaagaattcaatatgaaattatctcaagcacgcgcagatgcggttcgcgactacctaattagaaagggaattgcagaaaacagaataagagccgtgggatatggcttcctgcgccccagaggagacaacagaaccccagagggtcgtgctaaaaatcggagaatagaaataagtattgtaaattga

SEQ ID NO: 22238 - protein, 197 aa, Unknown
  Obtained from environmental sample
  DOMAIN (94)...(189): OmpA family
  misc_feature (1)..(197): Xaa is any amino acid
MTIRATDYNQQYAQRNKTIVLRGSRGTHFETTTNASGIARVQISDGDTYSFWCDGITGEFDCGFGNTLYVPPGSGSGTWEIYYDDDRFELKGVTFETGKSTILPGSTKILEATVKGLQKFDSVSVEISGHTDNVGGEEFNMKLSQARADAVRDYLIRKGIAENRIRAVGYGFLRPRGDNRTPEGRAKNRRIEISIVN

SEQ ID NO: 22239 - DNA, 339 bp, Unknown
  Obtained from environmental sample
  misc_feature (1)..(339): n is a, c, g, or t
gtgacaaagcacttatcgctattgctgcaatgtatgaaaaatcatgtaaaaagagaaaccgattttgtcgctagatttggcggtgaagaatttgtttgccttataccatttcttgaaaaagatgaagcattggaatttgcaaaaacaatggtgcaaagcgttgaggatatgaaaataccgcatcccatgagtttacattctaaatatgtaacaatcagtgtaggcatggcaagcgttgtaccgaatgataataattcttatgctcaattattagatgaagcagataaagcgttatattcggcaaaagaatcgggaagaaattgggttgtaatgagttga

SEQ ID NO: 22240 - protein, 112 aa, Unknown
  Obtained from environmental sample
  DOMAIN (2)...(108): GGDEF domain
  misc_feature (1)..(112): Xaa is any amino acid
MTKHLSLLLQCMKNHVKRETDFVARFGGEEFVCLIPFLEKDEALEFAKTMVQSVEDMKIPHPMSLHSKYVTISVGMASVVPNDNNSYAQLLDEADKALYSAKESGRNWVVMS

SEQ ID NO: 22241 - DNA, 405 bp, Unknown
  Obtained from environmental sample
  misc_feature (1)..(405): n is a, c, g, or t
ttgcggtttattgttgaagcggcaagaaaattcgttgaaggggattttacattcagcaatcggccttcaggtaaaggcggcaaaaaagattatattgaggtcatgttcgatgattttaacactatgagggaagagtttgctactgcatatgaaaaattaaaaactctatcaacaatagatgaacttacaaaactggacaataggggttcatttttagaacatatagatttaatatggaggcaaaatcatcgcttgaatcttcccgtaaccgtattaatgatagatgtagattattttaaaaaatattacgactctttagggcatttggaaggtgacaaagcacttatcgctattgctgcaatgtatgaaaaatcatgtaaaaagagaaaccgattttgtcgctag

SEQ ID NO: 22242 - protein, 134 aa, Unknown
  Obtained from environmental sample
  DOMAIN (53)...(134): GGDEF domain
  misc_feature (1)..(134): Xaa is any amino acid
MRFIVEAARKFVEGDFTFSNRPSGKGGKKDYIEVMFDDFNTMREEFATAYEKLKTLSTIDELTKLDNRGSFLEHIDLIWRQNHRLNLPVTVLMIDVDYFKKYYDSLGHLEGDKALIAIAAMYEKSCKKRNRFCR

SEQ ID NO: 22243 - DNA, 723 bp, Unknown
  Obtained from environmental sample
  misc_feature (1)..(723): n is a, c, g, or t
gtgagcgtttccggggcgcgttttgccgccgcaataggcagaggaaggggatatttggcggttccgttaacatacgacagcgaagctacgttaatttttcttgaatcgctggacgtatcttccatgacgggaagaggtacaaatcttgagtccttagttgacgcggcggctgacgcttttcaggactcatccccggcgcggaaagtaattatccttgtttcggacggcgagtctcatgccggcattctaagaaatgcggttaaccgctgtatccgcgacggtattatactaaataccgtggcagtcggcagtgatgaaggccggcaaataacggcgcaaattaatgaccctgattccccgtccgtaatcagtcgaagggacgcttttgtaatgaaagcggccgctgaaagaacgggtggcatttacattgacggaggccgagaggactcaggcgcaatgctttcttcgcatcttctttcgcttgcgcaggaaatgatgagcggaaacaggaaacaggagccaaagcaaagaagaccgctatttatcatactcgcgattatttcttacggcgcgtctaaatttgttacgcgtcaatcggcaggggaaaccaatgcgccgtttatccgccgctttgaatataacgctctttttattctcttcctgttcccagggcaagcttcttcttctgctagccaactatttaaacgcgatgggcagaaatga

SEQ ID NO: 22244 - protein, 240 aa, Unknown
  Obtained from environmental sample
  misc_feature (1)..(240): Xaa is any amino acid
MSVSGARFAAAIGRGRGYLAVPLTYDSEATLIFLESLDVSSMTGRGTNLESLVDAAADAFQDSSPARKVIILVSDGESHAGILRNAVNRCIRDGIILNTVAVGSDEGRQITAQINDPDSPSVISRRDAFVMKAAAERTGGIYIDGGREDSGAMLSSHLLSLAQEMMSGNRKQEPKQRRPLFIILAIISYGASKFVTRQSAGETNAPFIRRFEYNALFILFLFPGQASSSASQLFKRDGQK

SEQ ID NO: 22245 - DNA, 606 bp, Unknown
  Obtained from environmental sample
  misc_feature (1)..(606): n is a, c, g, or t
ttggcaaaggccaagaacattaaaatgggcaaggacaatagcacaatcattaacgggggtggaaaagtcaaggatatcaaggaaagcatcgcccagatcaaaatccagatagaagacgggacaagcagctatgacaaggaaaaactccaggaaaggctcgcgaaactcgccggcggcgtagcggttatcaatgtaggcgaggccaccgaggttgagcttaaagagaaaaagcacagcgtggaagacgccgtgtgggccacccgcgccgcgatagacgaaggcattgtatccggcggaggcatcgccctgattcaagccgcccttgccctggagaaggcggacaccaaaggcctgaccgatgacgagaaagtcggcttcaaaatcgtaaaacgcgcccttgaggagccaatccgccagatagccgaaaacgcgggccttgacggcgccgttatcgctgagcgggcaaagactgaaaagaaaggtgtgggttttgangccgccaaaatggaatgggtggacatgatgaaggccggcctaatcgacccggcgaaagtgacccgttccgccgtgcagaacgnngngtccatngccagcatcnttttctaa

SEQ ID NO: 22246 - protein, 201 aa, Unknown
  Obtained from environmental sample
  misc_feature (1)..(201): Xaa is any amino acid
MAKAKNIKMGKDNSTIINGGGKVKDIKESIAQIKIQIEDGTSSYDKEKLQERLAKLAGGVAVINVGEATEVELKEKKHSVEDAVWATRAAIDEGIVSGGGIALIQAALALEKADTKGLTDDEKVGFKIVKRALEEPIRQIAENAGLDGAVIAERAKTEKKGVGFXAAKMEWVDMMKAGLIDPAKVTRSAVQNXXSXASIXF

SEQ ID NO: 22247 - DNA, 453 bp, Unknown
  Obtained from environmental sample
  misc_feature (1)..(453): n is a, c, g, or t
ttgcgttttggcagcgaccccattcacgccccatatttaattgaaccaaaccaagctgatttcatagcttgccaccacaccccgcacctttaccaagtaaatatgcttcgctatgcaaaacccggtgcagtgtttttgatcaatacgcagcacagtgcagacacagcttgggacactttcccaaaagaagttcacaagcagataatagacaaaaaactcaaagtttatgttatagacggctacaaagttgcccacgacactggaatgggcaggcgtataaataccattatgcaaacttgctattttgcaaattcaggcattttgccaaaacaagaggcaattaaccatattaaagactccattaaaaagagctatatgaaaaaaggcgaagatgttgttcaacagaattgggaagccgttgaccacactctcgcacatttaaactatgcataa

SEQ ID NO: 22248 - protein, 150 aa, Unknown
  Obtained from environmental sample
  DOMAIN (1)...(145): Pyruvate ferredoxin/flavodoxin oxidoreductase
  misc_feature (1)..(150): Xaa is any amino acid
MRFGSDPIHAPYLIEPNQADFIACHHTPHLYQVNMLRYAKPGAVFLINTQHSADTAWDTFPKEVHKQIIDKKLKVYVIDGYKVAHDTGMGRRINTIMQTCYFANSGILPKQEAINHIKDSIKKSYMKKGEDVVQQNWEAVDHTLAHLNYA

SEQ ID NO: 22249 - DNA, 816 bp, Unknown
  Obtained from environmental sample
  misc_feature (1)..(816): n is a, c, g, or t
ttggagcaaaaaaaatcgggacttagccacataataaaaatagagtcaatcccttggagcgattatatggctcttgacccagccacccaacgcaacctcgaactcactgccccgcttcaccccgaagactcaaattccacgcttctctccgttatggatttcacaaaaaccgctatgggcggtcgcactttgagggaatggatttcgcacccgctaatttccattgagcatattttaggcaggctttcttgcgtggaagaattggttgagaacccaatgtctatagacgaaataggagaggctttgaaaccaattcccgatatggaacgtgcaatgggtcgcgttggtagttcaagagcaaatgcacgtgatgtgcagagccttggaaaatcgcttttgcaggcagaacaaattgcaaggatgctgaaaaaattgaaaggcaaaaaatttggcgaaatagcgagcaaattggagcttgcaaaaggcaaagggcaagagatttgcgccttgctaaaagacgaactccccttgacaataaaagagggaaatttgataagagagggtgcaagcgatgaaattgaggattttagacaggagataaaaagcaaaaaaaattggcttgcgaatttagaatcaaaagaaaaagagaggctaggaattccctccttaaaagttggctacaacaaagtttttggctactacatagaaataacatccacccactctcacaaaaaaattcccccccgaatatatccngcaagcaaaacgctctccacagggcgaacgctacataacaccagaaatgaaagatgctga

SEQ ID NO: 22250 - protein, 271 aa, Unknown
  Obtained from environmental sample
  DOMAIN (188)...(269): MutS family domain IV
  misc_feature (1)..(271): Xaa is any amino acid
MEQKKSGLSHIIKIESIPWSDYMALDPATQRNLELTAPLHPEDSNSTLLSVMDFTKTAMGGRTLREWISHPLISIEHILGRLSCVEELVENPMSIDEIGEALKPIPDMERAMGRVGSSRANARDVQSLGKSLLQAEQIARMLKKLKGKKFGEIASKLELAKGKGQEICALLKDELPLTIKEGNLIREGASDEIEDFRQEIKSKKNWLANLESKEKERLGIPSLKVGYNKVFGYYIEITSTHSHKKIPPRIYPASKTLSTGRTLHNTRNERC

SEQ ID NO: 22251 - DNA, 546 bp, Unknown
  Obtained from environmental sample
  misc_feature (1)..(546): n is a, c, g, or t
gtgctaaaggaaatatcagaaggcgaaggcgatttaaccaaatacctttcggtttccagtaacgatgaaattggcgatatggccaagtacttcaatagtactctggattccatcagcgctctcatcaaaaagattaagaccaaagttaccgctatgaccagtacaggccatgaactctccgcaaatatggataaaacttccaaagcggtagataatatctcggtgaatcttaatgatatgaaggccatgatgggcaaacaggaaaagagcgctaccgaggcggatagcgcggtaaagcatatccgggccaatattgaaagtttaaacactttgattgaagaccagagtgaaagcattgaaagatcatcctccgcaattgaggaaatgacagccaatattcaatcggtaaccaaaaccctggtagaaaacagcaggaatgttagcgaattgaagggggcgtctgaaaacggcaaaacaggggctccaaaaagttgcgcaaaaaatactggaaattgcccacagactccgaagggctttttggaataa

SEQ ID NO: 22252 - protein, 181 aa, Unknown
  Obtained from environmental sample
  misc_feature (1)..(181): Xaa is any amino acid
MLKEISEGEGDLTKYLSVSSNDEIGDMAKYFNSTLDSISALIKKIKTKVTAMTSTGHELSANMDKTSKAVDNISVNLNDMKAMMGKQEKSATEADSAVKHIRANIESLNTLIEDQSESIERSSSAIEEMTANIQSVTKTLVENSRNVSELKGASENGKTGAPKSCAKNTGNCPQTPKGFLE

SEQ ID NO: 22253 - DNA, 696 bp, Unknown
  Obtained from environmental sample
  misc_feature (1)..(696): n is a, c, g, or t
atgataaaggactgcatgaataccctcgccttttctccggttggaaagtaccttcaccttttgccgttatacggaaggctcggcaaggaagagcagggaaaagtcttcgatcccgccccaaaaggaaaagtaaaggcgattatctccaccaacatcgccgaaacttcagttacaatcgacgggataaccgcggttattgattcggggctttcaaaactgaattactacaacccgcggacttttacctcaagcctggtcgaagcgcccatctccaaagcttcggcaaaccagaggaagggccgcgccggacgcacacaagaagggacttgctaccggctttacggcagaaaggattttgaaaaccgccagctttttacaaccgaggaaatataccgcacagacctttccgaggttgtactccgcatggccgatcttgggatcacctcttttgaggaatttgatttcatctctcccccatcgaaagaagggctaatcgccgcgattgaaaccctggatcttcttgacgccctggaaagcgatcacagcctttctaacacagggcgcctgatgaccgaatttccactgccgccacgggattcaaggattattgtggaggcgaatcctcaaatacccgtatgttatcaaaggagacaattatcgcgggcggccttttcttttcaccccagaggcccctaa

SEQ ID NO: 22254 - protein, 231 aa, Unknown
  Obtained from environmental sample
  DOMAIN (17)...(106): Helicase conserved C-terminal domain
  misc_feature (1)..(231): Xaa is any amino acid
MIKDCMNTLAFSPVGKYLHLLPLYGRLGKEEQGKVFDPAPKGKVKAIISTNIAETSVTIDGITAVIDSGLSKLNYYNPRTFTSSLVEAPISKASANQRKGRAGRTQEGTCYRLYGRKDFENRQLFTTEEIYRTDLSEVVLRMADLGITSFEEFDFISPPSKEGLIAAIETLDLLDALESDHSLSNTGRLMTEFPLPPRDSRIIVEANPQIPVCYQRRQLSRAAFSFHPRGP

SEQ ID NO: 22255 - DNA, 714 bp, Unknown
  Obtained from environmental sample
  misc_feature (1)..(714): n is a, c, g, or t
atgcaggggtttttcacttgggaaggcgtttgctggtaccgcagggaatttttgctgtccggtatcgacggcaacgccgcttatgtctattttggcggagcataccgcagtacccaggtttatgtcaacggaacggaagcgggaggccgcgcgtcacgttactcaagttttgaagttgacataacggaatttgtaaaacagggaaaaaatctgattgccgtgcgtctggataacggttgtgaggctcccgaccgctggtattcaggctccggattgtacaggaatgcgtccttaaaaatacttcgtgtaactcatataaaaacatggggtgttcatgttgaggcaaagcagaatgacgttacggttactacaacggttgtaagccgagttcaatccgcgaagggcagtgcaatcttgctaatcttaaaaccggacggaagtcttgctgcaaaggataccgttacttttgatatgaacggtaaaagcgaaataaccgttaatcggaagattcgcgtccaaaacccagtgttgtggtcaagcgagaacccgaacctgtaccgagctgttgtaaatcttgaaacaggcgcagatggaattcccgaagaattaaacttttggttttcggacagtagacattgtatattaaaagggaatgcacgtttacccggaataaagttaaacttaaaggcttgtgtctggcccacgactgcctga

SEQ ID NO: 22256 - protein, 237 aa, Unknown
  Obtained from environmental sample
  DOMAIN (111)...(200): Glycosyl hydrolases family 2, immunoglobulin-like beta-sandwich domain
  misc_feature (1)..(237): Xaa is any amino acid
MQGFFTWEGVCWYRREFLLSGIDGNAAYVYFGGAYRSTQVYVNGTEAGGRASRYSSFEVDITEFVKQGKNLIAVRLDNGCEAPDRWYSGSGLYRNASLKILRVTHIKTWGVHVEAKQNDVTVTTTVVSRVQSAKGSAILLILKPDGSLAAKDTVTFDMNGKSEITVNRKIRVQNPVLWSSENPNLYRAVVNLETGADGIPEELNFWFSDSRHCILKGNARLPGIKLNLKACVWPTTA

SEQ ID NO: 22257 - DNA, 435 bp, Unknown
  Obtained from environmental sample
  misc_feature (1)..(435): n is a, c, g, or t
atggatgcggacgggagccacagcccgcaggttttgaacacttttttgaaagaatccgaggatgcggatttggttcttggaagcaggtatttaagcgggaaaatctccgttgtgaactgggactggaaaaggctgattttgagctatggcgcaaacttttacacaaagttcataaccagaatgcccatttcggatgcaaccggaggttttaaatgctttagccgcgcagctttgcaaagcctagacctgagcaaacttaaaagcgatggttattgttttcaaatagaaacaactcataaactctggaaaaaaggtctaaaaataaaggaaatacccataattttcaccgaccgcactaaaggttcttcaaaaatgagcggcggaataatatcggaggcattttttttggtgctaaaactgaggcttaaggcttaa

SEQ ID NO: 22258 - protein, 144 aa, Unknown
  Obtained from environmental sample
  misc_feature (1)..(144): Xaa is any amino acid
MDADGSHSPQVLNTFLKESEDADLVLGSRYLSGKISVVNWDWKRLILSYGANFYTKFITRMPISDATGGFKCFSRAALQSLDLSKLKSDGYCFQIETTHKLWKKGLKIKEIPIIFTDRTKGSSKMSGGIISEAFFLVLKLRLKA

SEQ ID NO: 22259 - DNA, 360 bp, Unknown
  Obtained from environmental sample
  misc_feature (1)..(360): n is a, c, g, or t
ttgatggagctgctaatgaaaaccctcaaagccggagccgatgttcactgtacggacagttacaatggagcagggcttatccgtgctgccgaccgcgggcacgttgaaattataagagaacttttaaaaacagatgttcgcgttaatcatattaacagaattggatggactgcattgcttgaggcaataatacttggcgatggaggagaacggcatacagaggttgtgcgtatgttggttgatgccggagcggatgtcaatttgccggataaagatggggttacgccgctctcacacgctaagagcagggggtttagtgagattattggaatattggaaaattcaggggggaaagtgtaa

SEQ ID NO: 22260 - protein, 119 aa, Unknown
  Obtained from environmental sample
  DOMAIN (54)...(91): Ankyrin repeat
  misc_feature (1)..(119): Xaa is any amino acid
MMELLMKTLKAGADVHCTDSYNGAGLIRAADRGHVEIIRELLKTDVRVNHINRIGWTALLEAIILGDGGERHTEVVRMLVDAGADVNLPDKDGVTPLSHAKSRGFSEIIGILENSGGKV

SEQ ID NO: 22261 - DNA, 354 bp, Unknown
  Obtained from environmental sample
  misc_feature (1)..(354): n is a, c, g, or t
atgttcgtagacggcggcggtgttccccttgcgatggtaataaccggggctaaccggcatgacctttcccaacttgaaaccttgctggactccatcatcatagaaaggcctgacccgtttgagcgccctcaaagtctctgtcttgataaaggctatgcgggcgagcccgcgttggaagccgttgttttgcgggggtttatacctcacatcaaaagccggggcgaggagaaaggggcaataaaaaagaatccaacatgcaaggcccgccgttgggtagtcgaagtgacccattcgtggatgaaccggtttcggaaactgctggtgagatttcgagaaacttaccgctttctataa

SEQ ID NO: 22262 - protein, 117 aa, Unknown
  Obtained from environmental sample
  misc_feature (1)..(117): Xaa is any amino acid
MFVDGGGVPLAMVITGANRHDLSQLETLLDSIIIERPDPFERPQSLCLDKGYAGEPALEAVVLRGFIPHIKSRGEEKGAIKKNPTCKARRWVVEVTHSWMNRFRKLLVRFRETYRFL

SEQ ID NO: 22263 - DNA, 903 bp, Unknown
  Obtained from environmental sample
  misc_feature (1)..(903): n is a, c, g, or t
ttgtggggcaggaacatgcctcctcagggcgatgaggatatggttatcgcatggtgcgccgagtccctgagacggggcctttaccaatccgcggcatccgtaataccgctcggtttcagccgcagccccggacggacatgggaatccgccgtataccagtttgatcggaggatcggccactgggaaagggaaatcaggactgtccacactctggaacgtgagaaagcaaaccgcataacacggcagattattgagaaagatattggcatttttgcggaaaaccgcatcattgaattcctggccgtccgggacaataaccgcctgcttgaagatcttctttccattgttaaggacattaacctttccgccgtaagccttgaaacagacgcggggattattgaagcctgcgttgatatgggcaaatggcatcccaatattgcgaatccttttgaagcgcttacagaccagattttccagcttgtcgttaacggcctttacagaaacgaagaccgcgttttcattctttcgtcagaacaggcggatatagcgcttaatctgcgtctggggatggctctctttgaatggggggaaaaatccggccaaagcgtctgggcggggctgggacgatccatagcgctttccgttatttcattggcggatgagaacggatgggttccggcattcctgacagtgggcgaaaataatgaatataccgccgccgctgaccggtttatttcggcgaaattgtaccgccagcttggaagaaatgaatatctcccccccgcgggcggcgacccgttgcggaacggcgttatgggcatgggaccgcccgccctcttcaataaacctttacgcaaaattgacgggcaaatgggacatttcccgccaggttttccgggttaa

SEQ ID NO: 22264 - protein, 300 aa, Unknown
  Obtained from environmental sample
  misc_feature (1)..(300): Xaa is any amino acid
MWGRNMPPQGDEDMVIAWCAESLRRGLYQSAASVIPLGFSRSPGRTWESAVYQFDRRIGHWEREIRTVHTLEREKANRITRQIIEKDIGIFAENRIIEFLAVRDNNRLLEDLLSIVKDINLSAVSLETDAGIIEACVDMGKWHPNIANPFEALTDQIFQLVVNGLYRNEDRVFILSSEQADIALNLRLGMALFEWGEKSGQSVWAGLGRSIALSVISLADENGWVPAFLTVGENNEYTAAADRFISAKLYRQLGRNEYLPPAGGDPLRNGVMGMGPPALFNKPLRKIDGQMGHFPPGFPG

SEQ ID NO: 22265 - DNA, 468 bp, Unknown
  Obtained from environmental sample
  misc_feature (1)..(468): n is a, c, g, or t
ttgacaacttgggcggcaatcaaagtagagctggaaggacgtaaaccaaaagattcaatacttgatgaagtaagctccggccttccacctgtggatcgcgcttttaaacttcagaaaaaagcggcgaaacttggttttgactggccggatacggaaggggtagccgctaagatacgggaagaacttgatgaagtgcgggaagcatacgaaaacggtatatcagctaacggagagaatgaaggcggcaataaacttgaagaagaactcggcgatttgcttttttctgtcgttaatctgtgccgtttcctgacagtggagccttctgttgctcttcgccgaaccaatgccaagtttgtcgatcggtttaaatatgtggaaaagaaaatgaaagaatcgggacaggaaatgaaaagcgaaaatcttaatgttatggaaaaattctggaatgaatcaaaaaccaacaggtaa

SEQ ID NO: 22266 - protein, 155 aa, Unknown
  Obtained from environmental sample
  DOMAIN (49)...(122): MazG nucleotide pyrophosphohydrolase domain
  misc_feature (1)..(155): Xaa is any amino acid
MTTWAAIKVELEGRKPKDSILDEVSSGLPPVDRAFKLQKKAAKLGFDWPDTEGVAAKIREELDEVREAYENGISANGENEGGNKLEEELGDLLFSVVNLCRFLTVEPSVALRRTNAKFVDRFKYVEKKMKESGQEMKSENLNVMEKFWNESKTNR

SEQ ID NO: 22267 - DNA, 438 bp, Unknown
  Obtained from environmental sample
  misc_feature (1)..(438): n is a, c, g, or t
ttgagaataatggaaagtgaacttaaaagcgtttgcgatgaaatgataatttgcacagacgatggctcttatggtcgcaaatgcttggtaacggagcctttaaaggaactctgcgaaaattgcaaaccgaactttgccatagccattggtcctcccataatgatgaaattctgcgcagaaacaacgcgcccttatggcgttaaaacttatgcaagccttaacagcattatggtggacggcactggaatgtgcggttgctgccgagtgacggttggcggcgaggttaagtttgtgtgcgtggatggtcctgaatttgatgcccataaagttgagtgggaaaacatgatgaaaagaatgggaacttacaagcaacgtgaagcccttgcaaaagaaagggcgcttgaaaagataaaaaattgcaggtgtggggacaaatga

SEQ ID NO: 22268 - protein, 145 aa, Unknown
  Obtained from environmental sample
  misc_feature (1)..(145): Xaa is any amino acid
MRIMESELKSVCDEMIICTDDGSYGRKCLVTEPLKELCENCKPNFAIAIGPPIMMKFCAETTRPYGVKTYASLNSIMVDGTGMCGCCRVTVGGEVKFVCVDGPEFDAHKVEWENMMKRMGTYKQREALAKERALEKIKNCRCGDK

SEQ ID NO: 22269 - DNA, 726 bp, Unknown
  Obtained from environmental sample
  misc_feature (1)..(726): n is a, c, g, or t
ttgcctcgatttttgaaacgcaacgagagcgaaaccgcttattatcttgcggattgtgaaaattttccgtacggaccgcgtaaaaaagaggaaattgcttctatattgacatcacttacagaaaaactattgaaaaaaacaaatccgaaacttgccgttatcgcctgtaataccgcgtccatttccgcccttgctctattacgccaaaaatttccgcaattcccgtttgtcgggactgtcccggcgataaagcccgcggcaaacgcctgcaaaaacggaaaagtcggcgtgcttggaacggaacgcaccattcaggacatacgcgccctaaaccttgatgccggcagttgtgaaattatcggggttgccgcgcctgatcttgtggaatttgtggaaaacagcattgacagcgcgagcgaaaaagaaaaaacacagatagtaagaaaatatataaacattttccgcgaaaaaggaatagatacccttgtactgggctgtacccattttctgtacctgcttgacgaattcaagcgggaggcggagtctgagataaaaatatttgattctctggaagggataaccaaccgcattgagtttttgctgaatgaaaactcaggcgcgcttcgcgcgcaggaagaatgctcgcacacccgcaagtttattcttacggggacacagccgcctgaaaaaacatggataaaccngcgcgaaagcgtacgggtctga

SEQ ID NO: 22270 - protein, 241 aa, Unknown
  Obtained from environmental sample
  DOMAIN (1)...(202): Asp/Glu/Hydantoin racemase
  misc_feature (1)..(241): Xaa is any amino acid
MPRFLKRNESETAYYLADCENFPYGPRKKEEIASILTSLTEKLLKKTNPKLAVIACNTASISALALLRQKFPQFPFVGTVPAIKPAANACKNGKVGVLGTERTIQDIRALNLDAGSCEIIGVAAPDLVEFVENSIDSASEKEKTQIVRKYINIFREKGIDTLVLGCTHFLYLLDEFKREAESEIKIFDSLEGITNRIEFLLNENSGALRAQEECSHTRKFILTGTQPPEKTWINXRESVRV

SEQ ID NO: 22271 - DNA, 474 bp, Unknown
  Obtained from environmental sample
  misc_feature (1)..(474): n is a, c, g, or t
ttgaaccgttacgagcttcgtcctgatgtagatttcgattatattgtcgggcgcagtattgaaaagcacggcgctgactggcttactcctccgctggtcgaggcgattaaaaagattaggcgttccgcgtccgggccttccgctctttctccgtccgctgaagcgtatcctgcctctttcgccctttaccgtgacggcaagcttgcggcgggagagttcggcgtggtttgcggcagggtttacacgagttattcgggtttttatgacgaagacaacgccggaactgtccagcttattcttgccgctcagtatttgcggaagcgggggttttcttttcttgactttggcatgccgctggactataaaacggacctcggcgctgttaatatcagtccgctggaatttatctctttattccgtgataggttggagcttcattcttacggaatgaaggctgactcgatgtcgctttag

SEQ ID NO: 22272 - protein, 157 aa, Unknown
  Obtained from environmental sample
  DOMAIN (1)...(132): Leucyl/phenylalanyl-tRNA protein transferase
  misc_feature (1)..(157): Xaa is any amino acid
MNRYELRPDVDFDYIVGRSIEKHGADWLTPPLVEAIKKIRRSASGPSALSPSAEAYPASFALYRDGKLAAGEFGVVCGRVYTSYSGFYDEDNAGTVQLILAAQYLRKRGFSFLDFGMPLDYKTDLGAVNISPLEFISLFRDRLELHSYGMKADSMSL

SEQ ID NO: 22273 - DNA, 663 bp, Unknown
  Obtained from environmental sample
  misc_feature (1)..(663): n is a, c, g, or t
atgaagtgggaaaaaaaagagattgaccctggcgaggtaaaggacattgccgccaagtacggctgcgatctgctcaccgcatcgatctttgcccgccggggactttgctcaggcgagtcgatccgtttcttccttgaagacgacacaaggcatctgcgcaacccctttgccctgcccggcatggaagacgcggtggagcgcatactggcggcaaaggaagagggcgaaaaagttctggtcttcggcgacagcgacgttgacggcataaccggaacggctctgcttgccaactacctcacgggcctgggcatggacgtaagctggcgcatcccggcgggcgacgagccctacgggctttcgcttgcggcggtagaggaattcgccgccgctgacggcactttgatcatcaccgtagactgcggcatttcccggcttgccgaaataaaacgcgccggtcagctttccgtggacgtgatcgtaaccgatcaccacgaaccccaggaagaactgcccgaggccctcgccatcatcgatccaaaactgaaagactcaacctacccgtttccgcgatctttccggctgcggggttccttttcagctggtgtgcggcctgcgctttgcggtaaaaagcgaactcttaggccaggccgatgggcctgttaa

SEQ ID NO: 22274 - protein, 220 aa, Unknown
  Obtained from environmental sample
  DOMAIN (71)...(203): DHH family
  misc_feature (1)..(220): Xaa is any amino acid
MKWEKKEIDPGEVKDIAAKYGCDLLTASIFARRGLCSGESIRFFLEDDTRHLRNPFALPGMEDAVERILAAKEEGEKVLVFGDSDVDGITGTALLANYLTGLGMDVSWRIPAGDEPYGLSLAAVEEFAAADGTLIITVDCGISRLAEIKRAGQLSVDVIVTDHHEPQEELPEALAIIDPKLKDSTYPFPRSFRLRGSFSAGVRPALCGKKRTLRPGRWAC

SEQ ID NO: 22275 - DNA, 531 bp, Unknown
  Obtained from environmental sample
  misc_feature (1)..(531): n is a, c, g, or t
atgatggacgcaaagctgaaaaaacgcaatatgccagaagatttggtttatttggcacttgtggagagcggttttaagatgaatgcttacagccgggcaaaagccgctggagtgtggcaatttataccttcaacgggcaaacgctacggcttgcctgtggatttttggttggatatgcgctacaatccagaagcggcaaccgatgcggctttgagttatttatccgatttgtacgatgaatttggcgactggtatttggcaatggcagcttataattgcggtgaaggcacaattaggcggcttgtcaactcggcagatacttccaaaaaagtttcttactgggatttgaagctgcctcgcgagacaatgctctatgttcctagaattttggcagctgccattatagggcatttcccagaaaattattcgttcacggttgaaaaacagagccgtgttccctatgacaccgttacgataaaagattgcattcctcttgacaaagctggttctgcagttggcgcatgcgtttaa

SEQ ID NO: 22276 - protein, 176 aa, Unknown
  Obtained from environmental sample
  DOMAIN (4)...(114): Transglycosylase SLT domain
  misc_feature (1)..(176): Xaa is any amino acid
MMDAKLKKRNMPEDLVYLALVESGFKMNAYSRAKAAGVWQFIPSTGKRYGLPVDFWLDMRYNPEAATDAALSYLSDLYDEFGDWYLAMAAYNCGEGTIRRLVNSADTSKKVSYWDLKLPRETMLYVPRILAAAIIGHFPENYSFTVEKQSRVPYDTVTIKDCIPLDKAGSAVGACV

SEQ ID NO: 22277 - DNA, 726 bp, Unknown
  Obtained from environmental sample
  misc_feature (1)..(726): n is a, c, g, or t
atgaaatccattaaatttttgccttttttaattgcctctggctttttagctgcctgtgcgccacccccaaaatccattcctgccggtgttgatatatacaaggtagagtcaacggcaaacgaagcccttaaacttgcaacctcagattctttgaaaatagtctccatttctcgttatttggaatatttgtccagacgaatagacctgctagatagcttatctttagcagcacctttggctatgacaaacgaaaaccaattgcaactagctcttttaagggaagaagttatatttttacgcaaatttttggaaaaccaaaataaagttccattgataaaccccagccgcgagcaagctcccacggcttcaagccccttgcctccagaatatgagcaggctcagtatttgttttctaaaaagaattacagcgaagccgcaaaaacctttgaaaaggtaaccgttctttacccaagaggcgattgggcagatgatgcatggtactgggcaggcgaatcgcaaatggcacttggcaactatgcgcaggcaatttccgcttttgaaaaagtattcttttacgcagaatcaattaagcatccagacgcgcaattccaaataggtatgtgtttgctcaaaatgggaagcaaagacctagcaaaggcagctctacgtaaagttcaggaattttatccaaaaacccaagagccttgcaagcccaatctgaattaa

SEQ ID NO: 22278 - protein, 241 aa, Unknown
  Obtained from environmental sample
  SIGNAL (1)...(18)
  DOMAIN (163)...(196): Tetratricopeptide repeat
  misc_feature (1)..(241): Xaa is any amino acid
MKSIKFLPFLIASGFLAACAPPPKSIPAGVDIYKVESTANEALKLATSDSLKIVSISRYLEYLSRRIDLLDSLSLAAPLAMTNENQLQLALLREEVIFLRKFLENQNKVPLINPSREQAPTASSPLPPEYEQAQYLFSKKNYSEAAKTFEKVTVLYPRGDWADDAWYWAGESQMALGNYAQAISAFEKVFFYAESIKHPDAQFQIGMCLLKMGSKDLAKAALRKVQEFYPKTQEPCKPNLN

SEQ ID NO: 22279 - DNA, 501 bp, Unknown
  Obtained from environmental sample
  misc_feature (1)..(501): n is a, c, g, or t
ttgaggaagccaaaaagaaaattcagaaaccgagaatttaaggaatttacttgcgaagaaggagcggtaggaacccagcatgaaaaccatctttgcgggcaggctgacgaggaaatgtcccccgagcgcgtagaagcgattatcaacgcggtaatggctcgcgaagtttataccttaaaaaaataccacaatccggaagataccggcgatttacaattcgatttctcaacctgtgagggacaggtagaagagataattatggctatggtttccgtagaaaaaatgttcagatgctgcaggcgtgccgacgcgggggaagattcccgcgtattggtggataaaaaagtggacgaatttcttaagcaccattttgtacaatataggcgttattgcgcacatacgcgggaacaccctgaaaatcccgcgtatatgtattatactcatattaaggaagatgagcagtacgatgacttgacgatactggggattaaacgaaaatga

SEQ ID NO: 22280 - protein, 166 aa, Unknown
  Obtained from environmental sample
  misc_feature (1)..(166): Xaa is any amino acid
MRKPKRKFRNREFKEFTCEEGAVGTQHENHLCGQADEEMSPERVEAIINAVMAREVYTLKKYHNPEDTGDLQFDFSTCEGQVEEIIMAMVSVEKMFRCCRRADAGEDSRVLVDKKVDEFLKHHFVQYRRYCAHTREHPENPAYMYYTHIKEDEQYDDLTILGIKRK

SEQ ID NO: 22281 - DNA, 390 bp, Unknown
  Obtained from environmental sample
  misc_feature (1)..(390): n is a, c, g, or t
atgggacagcgcattttagacctttggcaaactcattccgcctttatagtgtcgctttctaaagatttggcccccgccgcggttattatcgtattgggcataatcctttccaaaggggtgcggaaacttgtaaaaaaagccaattcaagctggtctgaaagcgacgggacggcggttcccctcttacaagcggttatccactacgcaatcatcattatctgtatcattatgatactcaatatcttcggggtaagcacagcgagccttatcgccctgctgggagcggcgggcgtaactatcgcccttgcgctgaaagatacccttggaaacctcgcgtctgggataagggcttcttattatggtgacttttcgcaagggctagtactttga

SEQ ID NO: 22282 - protein, 129 aa, Unknown
  Obtained from environmental sample
  misc_feature (1)..(129): Xaa is any amino acid
MGQRILDLWQTHSAFIVSLSKDLAPAAVIIVLGIILSKGVRKLVKKANSSWSESDGTAVPLLQAVIHYAIIIICIIMILNIFGVSTASLIALLGAAGVTIALALKDTLGNLASGIRASYYGDFSQGLVL

SEQ ID NO: 22283 - DNA, 354 bp, Unknown
  Obtained from environmental sample
  misc_feature (1)..(354): n is a, c, g, or t
atgaaaataattacccttggagacgatttacttaggcaaaaagcgaaaaaaatagataaaattgacggtgatatacttaatatctcccgtcagatgctggaaattcttaaaagagataagggcgtagggctcgcccgaccgcaaatcgggattatgaagcgtatttttgtcgtccatgtcgagggcgatgaagaacggatatttataaacccgtcaatattgaaaacatcccataagacttccaaatatgaagaaggctgcctttctgttccggaaatttacgccaatgtgatttcgtcagaggctattaaactgcaagcgtggaatgaaaaagggcgtccgtttaccatatag

SEQ ID NO: 22284 - protein, 117 aa, Unknown
  Obtained from environmental sample
  DOMAIN (2)...(117): Polypeptide deformylase
  misc_feature (1)..(117): Xaa is any amino acid
MKIITLGDDLLRQKAKKIDKIDGDILNISRQMLEILKRDKGVGLARPQIGIMKRIFVVHVEGDEERIFINPSILKTSHKTSKYEEGCLSVPEIYANVISSEAIKLQAWNEKGRPFTI

SEQ ID NO: 22285 - DNA, 717 bp, Unknown
  Obtained from environmental sample
  misc_feature (1)..(717): n is a, c, g, or t
atgcttacccgtatatacggaaccgcctgggaaacccccaaagatttgaaagcctacctcgccttactcgaagaaattgaaaaacgcgaccaccgccgtcttggaaaagaacttgacctttactcggttcacgaggaagcgggcgcgggccttatctactggcatcccaacggcgggcgtatccgcgtcgccatcgaggatttctggcgcaaagaacattaccgcaacggctacgagattctctttaccccgcatatcggcaaaagctggctctgggagacttccggccacctggggttttacaaggacaatatgtacagccccatgcagatcgacgaacagaattacatcatcaaaccgatgaactgtcccttccatattttaatctataaatcaaagggccgcagttaccgcgacctgcccctgcgctgggccgagcttggaacggtgtaccgttatgagcgcagcggcgtactccacggcctgctgcgggtaaggggctttacccaggacgacgcccacatcttctgcacgccggatcagatggaagcggagattctcgaagtgctccgcttcagcctttcgctgtggaaggtgttcggcttcaaggacataaaggcgtatctggcgaccaagccaaaggaaagcgtgggcgaacaggctcgctgggatgccgcgctggaagcctccgcagggggtagaggcagaggggcttga

SEQ ID NO: 22286 - protein, 238 aa, Unknown
  Obtained from environmental sample
  DOMAIN (61)...(234): tRNA synthetase class II core domain (G, H, P, S and T)
  misc_feature (1)..(238): Xaa is any amino acid
MLTRIYGTAWETPKDLKAYLALLEEIEKRDHRRLGKELDLYSVHEEAGAGLIYWHPNGGRIRVAIEDFWRKEHYRNGYEILFTPHIGKSWLWETSGHLGFYKDNMYSPMQIDEQNYIIKPMNCPFHILIYKSKGRSYRDLPLRWAELGTVYRYERSGVLHGLLRVRGFTQDDAHIFCTPDQMEAEILEVLRFSLSLWKVFGFKDIKAYLATKPKESVGEQARWDAALEASAGGRGRGA

SEQ ID NO: 22287 - DNA, 726 bp, Unknown
  Obtained from environmental sample
  misc_feature (1)..(726): n is a, c, g, or t
ttggtcctagtcgggaagaaagtaacatggtacgaatatcctctgacccgagccggatatcacgcgaaagcgtttctggaaggatattcaggatacttgcaaacagacgggtataaaggatatgacagcgcgttaaaagacatgcccgatataacccatgtaggatgtttcgctcacgcgagacggaagttttttgaagcggaaaaagcaaacaagaattccaaatccgcgcaggaagggataaagcatattcgaaagttgtacgacattgagaatgagttacgggataaaattgcggataacaatgacatgttcctatctgaacggaaagctcgcaccgggcctgtgcttgaaaagttcaaggcgtggcttgagaaacgaaaagaagaagttcctccaagcctgctcttggggaaggcaatatattacagtcttacacagtgggacaagatgacatcgtatcttgaaagcccttatcttacgcctgacaacaacgcttgtgaaaacgcgatacggccgtttgtacttggtaggaagaactggctgttttgtcagagtatcggcggggttgaaagttcctgcggtatgtacactcttattgaaacggccaaacaaaacggtcttgttccatttaattatctcatggttcttttcgaaaaggcacctcttgcttcttcactcgataactgggaaaagctgcttccttggaacattttcactgcttaa

SEQ ID NO: 22288 - protein, 241 aa, Unknown
  Obtained from environmental sample
  misc_feature (1)..(241): Xaa is any amino acid
MVLVGKKVTWYEYPLTRAGYHAKAFLEGYSGYLQTDGYKGYDSALKDMPDITHVGCFAHARRKFFEAEKANKNSKSAQEGIKHIRKLYDIENELRDKIADNNDMFLSERKARTGPVLEKFKAWLEKRKEEVPPSLLLGKAIYYSLTQWDKMTSYLESPYLTPDNNACENAIRPFVLGRKNWLFCQSIGGVESSCGMYTLIETAKQNGLVPFNYLMVLFEKAPLASSLDNWEKLLPWNIFTA

SEQ ID NO: 22289 - DNA, 543 bp, Unknown
  Obtained from environmental sample
  misc_feature (1)..(543): n is a, c, g, or t
ttggggtgtaccggccttaccagcataactttaccggacagctttaccagcattgagaatggagctttttccgattgcaaaagcctaaccgcaataattgttgatgctaataatcctgtttatatttcagatggcggtgtcttgtttaacaaaaataaaacttcattgatcctgtgtccggcaggaaaaacaggtacctatatcataccgaacagcgttaccaacattggggaagacgctttttgtggatgcactactcttaccagtgtaatcataccaaacagtgttaccaaaattggttggaatgctttctttagatgcaccgggcttaccagcataaccatacccgacagcgttactggtattgctagtacagcttttgactattgtgaaaacctatccgcaataaatgttaatgctaataatactgtatatagttcagatgacggtatcttggttaacaaaacaaaaacctcattaataatatttccggcaggaaaaacagatacatatattcgtaccaagcaacattataagcattga

SEQ ID NO: 22290 - protein, 180 aa, Unknown
  Obtained from environmental sample
  misc_feature (1)..(180): Xaa is any amino acid
MGCTGLTSITLPDSFTSIENGAFSDCKSLTAIIVDANNPVYISDGGVLFNKNKTSLILCPAGKTGTYIIPNSVTNIGEDAFCGCTTLTSVIIPNSVTKIGWNAFFRCTGLTSITIPDSVTGIASTAFDYCENLSAINVNANNTVYSSDDGILVNKTKTSLIIFPAGKTDTYIRTKQHYKH

SEQ ID NO: 22291 - DNA, 306 bp, Unknown
  Obtained from environmental sample
  misc_feature (1)..(306): n is a, c, g, or t
ttgaatgatcatcgtcatctttccggcatcttcataaccaacagcatggcgcatcgtgtggcggaagcggcggaacaacggagagaaaaagagccttttattttggtaggttacgatcttactcctttaaacaggcagctgcttcttcaggggcgcattaacgccatcatttcacagcgtcccgaggaacagggccgggaagcgcttttaacattgttccgctcaatcgtattggaacagacgattgaaaccagatgggaaataccattggatgtttatattcaggagaatactcccgtaaaataa

SEQ ID NO: 22292 - protein, 101 aa, Unknown
  Obtained from environmental sample
  misc_feature (1)..(101): Xaa is any amino acid
MNDHRHLSGIFITNSMAHRVAEAAEQRREKEPFILVGYDLTPLNRQLLLQGRINAIISQRPEEQGREALLTLFRSIVLEQTIETRWEIPLDVYIQENTPVK

SEQ ID NO: 22293 - DNA, 324 bp, Unknown
  Obtained from environmental sample
  misc_feature (1)..(324): n is a, c, g, or t
gtggcagaaagaacgagaaacactaggagaaaaaaaatgaaaatctacggcataatcggggcaatagcaggagatgtgacaggttcctgctatgagatcaacaatataaaacacatggattttgaaaatgccataaggcttgcggtttcactaggcggcgacagcgacacaatagcctgcatagctggagcaatatccgaagcctattacaaaaaaatccccgattacatagcaacaacagnattgaaaaactacctttggaaatnttggagaaaatataaaaattttccccaaagggccaaaagccggccaaacacgggntaa

SEQ ID NO: 22294 - protein, 107 aa, Unknown
  Obtained from environmental sample
  misc_feature (1)..(107): Xaa is any amino acid
MAERTRNTRRKKMKIYGIIGAIAGDVTGSCYEINNIKHMDFENAIRLAVSLGGDSDTIACIAGAISEAYYKKIPDYIATTXLKNYLWKXWRKYKNFPQRAKSRPNTG

SEQ ID NO: 22295 - DNA, 456 bp, Unknown
  Obtained from environmental sample
  misc_feature (1)..(456): n is a, c, g, or t
gtgcgggatgggctaaagacatacccagggttggcgcacaggctttcatactgcggcgaaagagatggggtcaaggcgtacaagaattacaaggcgacaagcgtggattcaacgatgacagccatccgcgccatgcctggccccttggtgctgatcttggggggagaggacaagggaagcagctatggaccgcttcgatccgtgctggggggtaaactgcggcacctagtttttttgggcgatgcgatacccatgctggagagggacttgggcgacttgtcccatacgaccatcaagagcttagacgaggcagtggcaaaagccctagccatcgccgcgccaggtgaccaagtactgctgagccccgcctgcgccagttttgaccaattcaaaaattttgaggaaaggggccgtaggtttgaggagatagtcctggagtggagagatcgggactag

SEQ ID NO: 22296 - protein, 151 aa, Unknown
  Obtained from environmental sample
  misc_feature (1)..(151): Xaa is any amino acid
MRDGLKTYPGLAHRLSYCGERDGVKAYKNYKATSVDSTMTAIRAMPGPLVLILGGEDKGSSYGPLRSVLGGKLRHLVFLGDAIPMLERDLGDLSHTTIKSLDEAVAKALAIAAPGDQVLLSPACASFDQFKNFEERGRRFEEIVLEWRDRD

SEQ ID NO: 22297 - DNA, 411 bp, Unknown
  Obtained from environmental sample
  misc_feature (1)..(411): n is a, c, g, or t
atgaagaaacagatgattcggcaggtaatcggatttgacaacttaaaagcgtcggaaatatgcacgccgcgcatggatgttcaagcggtgcctgttacaagcgtcgtagaggaagttgacattaaatttacagagacaggcttttcaaggcttccggtatttcaggattcggttgacaatattttgggaattatccatgtgggggatttctacaacgatgtaatgaagggtcttaaatcgcttaatgaaataattaagccggtagtttttgtcgcaaaaacaataaaaataggcaaactcctgcggacattgcaggaaaagcaggcgcacatggcggtagtaatcgacgagcatggcggtactttaggaattatcacaatagaggatattgtagaagagtctggtaggtga

SEQ ID NO: 22298 - protein, 136 aa, Unknown
  Obtained from environmental sample
  DOMAIN (21)...(135): CBS domain pair
  misc_feature (1)..(136): Xaa is any amino acid
MKKQMIRQVIGFDNLKASEICTPRMDVQAVPVTSVVEEVDIKFTETGFSRLPVFQDSVDNILGIIHVGDFYNDVMKGLKSLNEIIKPVVFVAKTIKIGKLLRTLQEKQAHMAVVIDEHGGTLGIITIEDIVEESGR

SEQ ID NO: 22299 - DNA, 306 bp, Unknown
  Obtained from environmental sample
  misc_feature (1)..(306): n is a, c, g, or t
ttggtgcctggccgcccctccaggacgatggtatcgataagctgtgataggcttgatacgtttacccgcctccatctaagaaatgaactggaaaaattgcggcagcatcttggtcttaccgtaatccttgttacccacgatatagaggatgccgtgttttttggtgaccggatttttctcttgaatgaaggaaaactggacggagaaatccccatccccttgaaacgtccccgggattaccggagcgcggagtttcaggaatattgccgtaaaatagaaagcactattttttcgacagttctttaa

SEQ ID NO: 22300 - protein, 101 aa, Unknown
  Obtained from environmental sample
  misc_feature (1)..(101): Xaa is any amino acid
MVPGRPSRTMVSISCDRLDTFTRLHLRNELEKLRQHLGLTVILVTHDIEDAVFFGDRIFLLNEGKLDGEIPIPLKRPRDYRSAEFQEYCRKIESTIFSTVL

SEQ ID NO: 22301 - DNA, 825 bp, Unknown
  Obtained from environmental sample
  misc_feature (1)..(825): n is a, c, g, or t
atgataccggaagaaaacctggccgccaaagaatgccccgaatgtggcggcgaactgacagacacccgcaaattcaacctgatgttcaaaacacatatcggccccgcggaggacactgccagcataatctacctgcggcctgaaaccgcccaggggatatacgtcaactataaaaatatcatccagtcaaaccggatgaagatacccttcggcattgcccagataggcaaggctttccgcaacgagattgtcaccaagaacttcattttccgcacctgcgaatttgagcagatggaaatgcagttttttgtaaagccgggcagcgacgatgaatggttcaatgaatggagaaaacggcgctgggcctattacgagaaactgggggtcaaaatggatcatctccgctggcaccagcatgggccggacgagttggcccattacgcaaaggacgcctacgatatcgaatacctgtttcccatgggttggcgggaactggaaggcgtgcataaccgcaccaattacgaccttaaccgccacacccagttttccggcaaggatatgcagtatatagaccaggacaataacaacgaacgctacatcccttacatcattgaaacttcggcgggacttacgcgtaacgtgctgatgatcctctgcgacgcctatgatgaggagcaggtcgctgacaaggggaatgatgacgattggcgtaccgtgctgcgcttttccccaagccttgcccctgtcactgtcgcggtgctgccccttgataaaaaaagacggtccttgccggaacttgccccaagacatacggccgcggaataa

SEQ ID NO: 22302 - protein, 274 aa, Unknown
  Obtained from environmental sample
  DOMAIN (5)...(161): tRNA synthetase class II core domain (G, H, P, S and T)
  misc_feature (1)..(274): Xaa is any amino acid
MIPEENLAAKECPECGGELTDTRKFNLMFKTHIGPAEDTASIIYLRPETAQGIYVNYKNIIQSNRMKIPFGIAQIGKAFRNEIVTKNFIFRTCEFEQMEMQFFVKPGSDDEWFNEWRKRRWAYYEKLGVKMDHLRWHQHGPDELAHYAKDAYDIEYLFPMGWRELEGVHNRTNYDLNRHTQFSGKDMQYIDQDNNNERYIPYIIETSAGLTRNVLMILCDAYDEEQVADKGNDDDWRTVLRFSPSLAPVTVAVLPLDKKRRSLPELAPRHTAAE

SEQ ID NO: 22303 - DNA, 456 bp, Unknown
  Obtained from environmental sample
  misc_feature (1)..(456): n is a, c, g, or t
gtgccgggccgcccctccaggacgatggcatctatcagcttgatcggcgaagaggtgcgcccgctgcgcaagatcgcctcgggcggcgagatgtcccgcatcatgctcgccctgaaggccgtactcacaaagggcggcgcctgcgagacgcttgtctttgacgaggtagacgccggcatcggcggagtgaccgcaaccgccgttggaaaaaaattgcgccaggtagccgccgcgaatcaggtgctctgcatcacgcacctcccgcagatcgccgcgatggccgatcagcacatcctcgtgtccaagcaggtcagcgatgagcgcaccaaaaccatggtgcggcgcctctccttcgaggagcgccagagcgaactcgcgcgtatgctcggcggcgaagtcgtctccgccacgacgctgcagcaagcgcgggagatgctggccgctcacaggacgtga

SEQ ID NO: 22304 - protein, 151 aa, Unknown
  Obtained from environmental sample
  misc_feature (1)..(151): Xaa is any amino acid
MPGRPSRTMASISLIGEEVRPLRKIASGGEMSRIMLALKAVLTKGGACETLVFDEVDAGIGGVTATAVGKKLRQVAAANQVLCITHLPQIAAMADQHILVSKQVSDERTKTMVRRLSFEERQSELARMLGGEVVSATTLQQAREMLAAHRT

SEQ ID NO: 22305 - DNA, 525 bp, Unknown
  Obtained from environmental sample
  misc_feature (1)..(525): n is a, c, g, or t
atgaacaaaagctttttggatctagccaaaagccggtattcagtacggaagtacgagaataaggaagttgaagcggaaaaattaaccgctattttggaagctggacgcatagcgcctacggctgccaataaacagccttgtatattccttgtactcaacaacgaggaatcaatcgaaaaactttgtaaggcttgtaatccgcacggcgctccccttgccattgttgtttgcacggaaaaaactaccgcatgggtacgcccttttgacaaagccaatatgagtgagattgacactacaatagccgctgaccacatgatgttgtgctcccaggatttaggtctttcttcctgttggatcacctattttgaccctaaaatcgtccgcaaggaatttaaaattcccgataatgttgtacccataaatatacttgctattggttatggggcagatgagccgcaatctcctgatcgtttttcagaaacaaggaagccacttgatacaatggtaaaatattcatcattttga

SEQ ID NO: 22306 - protein, 174 aa, Unknown
  Obtained from environmental sample
  DOMAIN (9)...(147): Nitroreductase family
  misc_feature (1)..(174): Xaa is any amino acid
MNKSFLDLAKSRYSVRKYENKEVEAEKLTAILEAGRIAPTAANKQPCIFLVLNNEESIEKLCKACNPHGAPLAIVVCTEKTTAWVRPFDKANMSEIDTTIAADHMMLCSQDLGLSSCWITYFDPKIVRKEFKIPDNVVPINILAIGYGADEPQSPDRFSETRKPLDTMVKYSSF

SEQ ID NO: 22307 - DNA, 444 bp, Unknown
  Obtained from environmental sample
  misc_feature (1)..(444): n is a, c, g, or t
atgcgaatcggtaagggagatatcaatatggcaatcccaaaagaaatgcaaggcaaatacaatgaaattgctgcaatgatcattgaattttgcgataaaaaacttgacgatgactataaaaggttatgcttgggattgttggaaaaactctgccacaagcgtccatcgccattgctttcagggcgcgctaatacatgggcggccggaatagagtatgccatagtctcaaacaattttatttttgacaaaacgcagaaaatccatttaacggccaacgagcttgttgccccttttggcgtttcttccagtacagccagcggtaaagcggctgaaataaagaaaatgtttaagattgattttttccattccgaatggctgctaccggaacatatagaagataacccgattatttggatggtccaggtacaacgggtttttcgttga

SEQ ID NO: 22308 - protein, 147 aa, Unknown
  Obtained from environmental sample
  misc_feature (1)..(147): Xaa is any amino acid
MRIGKGDINMAIPKEMQGKYNEIAAMIIEFCDKKLDDDYKRLCLGLLEKLCHKRPSPLLSGRANTWAAGIEYAIVSNNFIFDKTQKIHLTANELVAPFGVSSSTASGKAAEIKKMFKIDFFHSEWLLPEHIEDNPIIWMVQVQRVFR

SEQ ID NO: 22309 - DNA, 645 bp, Unknown
  Obtained from environmental sample
  misc_feature (1)..(645): n is a, c, g, or t
atggcagataaattgcgattgcttatccccaagggtaggatttatgacaaaattgccggcctcctgaccgaggccgggtttcccgtagctctggcggagcgtacctacaggccgtctatgggcgcggactggattgacgctaaaattatgaagccgcagaacgtagccgatcttctggaactgggcagccacgacgcgggttttacaggcatagactgggtaaaggaaagcggcgccgatgtcgccgaggtcatggatctgggctttgacaaagttaaaatcgtggcggcggttccgcaggaatccagcgatgaaagccttagggcgaaaaaactggttgtcgccacggagtatgtaaatcttgcgaaatcatggcttgagaaatcaggttatcagtaccggattctccgcacctacggggctacggaggttttcccgcccgatgacgccgatatgatcattgacaatacatcgtcaggccagacgcttaaagataacggtctgaaaattatcggcacgatccttgagtcatccacccgtttttgtcgctttcgcataccgcgcttgacgatccctgagaaacggaaccgtattgaggaagcttgccatgctggtccacccctgtccttaacggcccgcgaataa

SEQ ID NO: 22310 - protein, 214 aa, Unknown
  Obtained from environmental sample
  DOMAIN (50)...(202): ATP phosphoribosyltransferase
  misc_feature (1)..(214): Xaa is any amino acid
MADKLRLLIPKGRIYDKIAGLLTEAGFPVALAERTYRPSMGADWIDAKIMKPQNVADLLELGSHDAGFTGIDWVKESGADVAEVMDLGFDKVKIVAAVPQESSDESLRAKKLVVATEYVNLAKSWLEKSGYQYRILRTYGATEVFPPDDADMIIDNTSSGQTLKDNGLKIIGTILESSTRFCRFRIPRLTIPEKRNRIEEACHAGPPLSLTARE

SEQ ID NO: 22311 - DNA, 555 bp, Unknown
  Obtained from environmental sample
  misc_feature (1)..(555): n is a, c, g, or t
gtggccccgcatggaagaaaaagagggcggagatttttaatactgtcaaaaggattcccaatttgggacagacgctttttccgcgcttcaaaaccgatgaagacgcaatctggatttattacacctttgacgggtatcactgcggaagcaagaaacatagggattaactatattgatttgggagcggttgacagcatacttgatttttatacgcccgtgttagttgcaaatacgcagtggctttccgccaattcacagatcgccaaaaagtttctcggcgcggtaagccgggggtactattttgcaatgtataatcccgcagaagcggcggagattcttttaaagtacgcgcctgaaacggatcggcagaccgctgtgctaagtcagcaataccttgcgtcccgctacaagggcgacgcgcctcgctggggagaaattgatcctgtgcgctggggcgctttttaccgatggatgttcgagcagggacttcttgaaataaacatcggtgccggcggttttacaaatgaatatctaccggataatacggggcgctga

SEQ ID NO: 22312 - protein, 184 aa, Unknown
  Obtained from environmental sample
  misc_feature (1)..(184): Xaa is any amino acid
MAPHGRKRGRRFLILSKGFPIWDRRFFRASKPMKTQSGFITPLTGITAEARNIGINYIDLGAVDSILDFYTPVLVANTQWLSANSQIAKKFLGAVSRGYYFAMYNPAEAAEILLKYAPETDRQTAVLSQQYLASRYKGDAPRWGEIDPVRWGAFYRWMFEQGLLEINIGAGGFTNEYLPDNTGR

SEQ ID NO: 22313 - DNA, 459 bp, Unknown
  Obtained from environmental sample
  misc_feature (1)..(459): n is a, c, g, or t
atggtgtacaataaagccatgaatgtccagaagaagattttaatcgcggacgatgaaacaattaatcttgatttctttgaagtaatgttgtccaaactcggttttgttgtggaaaaatgcgataacggtcctgaagttctggaaaaagttaaaaaatttttgccggacttggtcattattgacaacataatgccgggcttgaccggtcgcgaagtgacaaaaatcctaaaaagcgatccaaatttcgcgaatatttccataattatgctttccgcgcttgacgatgtaaaagacaaggtcgccggttttgaggcgggcgccgatgattatataacaaaaccgttcaatttttctgaagtcctggcgcgaataaacccggtcttccgcaaccgctcgttatttgaccaaaacacgagcccgagatcgaattcctgcagcccgggggatccactactgtag

SEQ ID NO: 22314 - protein, 152 aa, Unknown
  Obtained from environmental sample
  DOMAIN (11)...(125): Response regulator receiver domain
  misc_feature (1)..(152): Xaa is any amino acid
MVYNKAMNVQKKILIADDETINLDFFEVMLSKLGFVVEKCDNGPEVLEKVKKFLPDLVIIDNIMPGLTGREVTKILKSDPNFANISIIMLSALDDVKDKVAGFEAGADDYITKPFNFSEVLARINPVFRNRSLFDQNTSPRSNSCSPGDPLL

SEQ ID NO: 22315 - DNA, 480 bp, Unknown
  Obtained from environmental sample
  misc_feature (1)..(480): n is a, c, g, or t
gtgggaaaaaagcccgcccacccttttttgggaaaaagggtgatgagcagaccattttttaaaggaccaaggatttactttttcccgcgccaatttgttttgaagaacacattgggttacccgtcaaggaattatgtacgacacggggcggacgtacttgtaaacatttcaaaagaggcttggtcaaaaagctttcccgcgcagtatcaacattttacaatggcggtctttagggcggtggaaaattaccgtcccatggtcaggtcaacatcaacggggcaaacctgcgccatagacccaaacggcagaataacggcaatgtccgccccattaacggaaacttatcttaatgtaaccgttccgcttgtgaataagaccgcaatttacacgctttacggcgattatttggcaattttctttgtttttctggcggccgccttgttgattttcaaagcggtatggtgtacaataaagccatga

SEQ ID NO: 22316 - protein, 159 aa, Unknown
  Obtained from environmental sample
  misc_feature (1)..(159): Xaa is any amino acid
MGKKPAHPFLGKRVMSRPFFKGPRIYFFPRQFVLKNTLGYPSRNYVRHGADVLVNISKEAWSKSFPAQYQHFTMAVFRAVENYRPMVRSTSTGQTCAIDPNGRITAMSAPLTETYLNVTVPLVNKTAIYTLYGDYLAIFFVFLAAALLIFKAVWCTIKP

SEQ ID NO: 22317 - DNA, 609 bp, Unknown
  Obtained from environmental sample
  misc_feature (1)..(609): n is a, c, g, or t
ttgcgatgggggctggaattaagcgcgtctgagcttgaggaagaacgcaataaatatgaagatcaaagtattacggacgagttgacacaacttagaaacaaacgtgactttgcaattacttttcaaagatatatttcaaattatcggtcttccgatgactggttatgcgtcgctatagcggatattgattattttaaatattacaacgaccactatggacaccttaaaggtgatgattgtctgcgtgttataggtgaagtattaaacggtataaaagacgatttgggagtttatacggcaagagtcggcggcgaggaatttggcgcgttgtggtttgagcaggaaatcacccatgttgatgatgtcattacccattggatgaagtcgatagatgcaaaaaagattacacatgaaaaatccaaagtttacgattttatatctatgagtattggcgtgtatgtttcacggtgcggcgcttaccatgacaccaaaatcctgtacgacctggctgataaggcgctttatacggcaaagcagggcggacgtaattgtgccgttattaacggcgataatgttaaagaatacagaatcagtttaaaagatgactga

SEQ ID NO: 22318 - protein, 202 aa, Unknown
  Obtained from environmental sample
  DOMAIN (19)...(184): GGDEF domain
  misc_feature (1)..(202): Xaa is any amino acid
MRWGLELSASELEEERNKYEDQSITDELTQLRNKRDFAITFQRYISNYRSSDDWLCVAIADIDYFKYYNDHYGHLKGDDCLRVIGEVLNGIKDDLGVYTARVGGEEFGALWFEQEITHVDDVITHWMKSIDAKKITHEKSKVYDFISMSIGVYVSRCGAYHDTKILYDLADKALYTAKQGGRNCAVINGDNVKEYRISLKDD

SEQ ID NO: 22319 - DNA, 540 bp, Unknown
  Obtained from environmental sample
  misc_feature (1)..(540): n is a, c, g, or t
ttgatacagatacaaaacgacgccattcccgcaccgccggactggcgggattttatcgcttcaatagacacggttatcgcggctccggacgcgcggaaattgtatgtcaaagtagattattacagggaaatttttgacaaatctacaaatacccgtgtaagcaccgaacccctgagcacgcttatctggatattgaacgtagacagcggcaattatgaaagctatatagaagcgcccttttacgagtacagatattctgaaaacggccggacaaccaatgtacgccttttgtactcaatgctggggctgacgcgtaatggcgggatcttgctttattttcccattgaagccggttatgccgtcctgcgtatggattccagcgggcatggccagcgccgcggctttatcgaactggagcccggggaagcgcgtttccccagttttcacctttccccggaaggaatactctccgccctgctggcggatgaatggaaagtaagagccgtatggtggcgcatggaccggtttatggcggattaa

SEQ ID NO: 22320 - protein, 179 aa, Unknown
  Obtained from environmental sample
  misc_feature (1)..(179): Xaa is any amino acid
MIQIQNDAIPAPPDWRDFIASIDTVIAAPDARKLYVKVDYYREIFDKSTNTRVSTEPLSTLIWILNVDSGNYESYIEAPFYEYRYSENGRTTNVRLLYSMLGLTRNGGILLYFPIEAGYAVLRMDSSGHGQRRGFIELEPGEARFPSFHLSPEGILSALLADEWKVRAVWWRMDRFMAD

SEQ ID NO: 22321 - DNA, 825 bp, Unknown
  Obtained from environmental sample
  misc_feature (1)..(825): n is a, c, g, or t
atgggccgtccgctccatccaaggaagaggtgcccaaatttttccgaaattggccctccccgggcgtcttccatgggcctagcgaaggaaaaaaccgcgggcatgatcctggtaacaggcacacccggaagcgccaagtcccccctgctcgcctccatgatagaccacataaactccagcacctccgtaaacattgtaacaatagaagaccccatagagttcctccaccgcgacaaacgcagcataatcgcccaaagggagataggcaccgacgccccctccttcaacaacgccctgcgcgcctgcttccgccaagacccggacatcatccttataggcgaaatgcgcgactgcgaaaccatagaaaccgccatgagcgccgccgacaccggccatctggtaatgagcaccctccacaccatgaacgcaaccgagaccataacgcgcataatctccttcttccccccccaccagcacgaccagatacgccttgtcctctcaaacgtcctggtggctataatatccctgcgcctcataaacagaatggacggccggggccgcatccccgcctgcgaaatcctgataaaccacgccgccgtggccgaatacatcctgaaccccgaaaaaagccacctgatcctccccgccataagcgaaggccgcacccaatacggctcccagtccttcgaccagtcgctcctgcaaatgtacaccgacgaactgatctcgctggacgtggcgaaacagagcgcgtcgaacccggacgactttgaattggccgttaaaggggtgtcggggacttcggataggagatggatgacgtaa

SEQ ID NO: 22322 - protein, 274 aa, Unknown
  Obtained from environmental sample
  DOMAIN (1)...(182): Type II/IV secretion system protein
  misc_feature (1)..(274): Xaa is any amino acid
MGRPLHPRKRCPNFSEIGPPRASSMGLAKEKTAGMILVTGTPGSAKSPLLASMIDHINSSTSVNIVTIEDPIEFLHRDKRSIIAQREIGTDAPSFNNALRACFRQDPDIILIGEMRDCETIETAMSAADTGHLVMSTLHTMNATETITRIISFFPPHQHDQIRLVLSNVLVAIISLRLINRMDGRGRIPACEILINHAAVAEYILNPEKSHLILPAISEGRTQYGSQSFDQSLLQMYTDELISLDVAKQSASNPDDFELAVKGVSGTSDRRWMT

SEQ ID NO: 22323 - DNA, 744 bp, Unknown
  Obtained from environmental sample
  misc_feature (1)..(744): n is a, c, g, or t
gtgcccaaatttttccgaaattggccctccccgggcgtcttccatgggcctagcgaaggaaaaaaccgcgggcatgatcctggtaacaggcacacccggaagcgccaagtcccccctgctcgcctccatgatagaccacataaactccagcacctccgtaaacattgtaacaatagaagaccccatagagttcctccaccgcgacaaacgcagcataatcgcccaaagggagataggcaccgacgccccctccttcaacaacgccctgcgcgcctgcttccgccaagacccggacatcatccttataggcgaaatgcgcgactgcgaaaccatagaaaccgccatgagcgccgccgacaccggccatctggtaatgagcaccctccacaccatgaacgcaaccgagaccataacgcgcataatctccttcttccccccccaccagcacgaccagatacgccttgtcctctcaaacgtcctggtggctataatatccctgcgcctcataaacagaatggacggccggggccgcatccccgcctgcgaaatcctgataaaccacgccgccgtggccgaatacatcctgaaccccgaaaaaagccacctgatcctccccgccataagcgaaggccgcacccaatacggctcccagtccttcgaccagtcgctcctgcaaatgtacaccgacgaactgatctcgctggacgtggcgaaacagagcgcgtcgaacccggacgactttga

SEQ ID NO: 22324 - protein, 247 aa, Unknown
  Obtained from environmental sample
  misc_feature (1)..(247): Xaa is any amino acid
MPKFFRNWPSPGVFHGPSEGKNRGHDPGNRHTRKRQVPPARLHDRPHKLQHLRKHCNNRRPHRVPPPRQTQHNRPKGDRHRRPLLQQRPARLLPPRPGHHPYRRNARLRNHRNRHERRRHRPSGNEHPPHHERNRDHNAHNLLLPPPPARPDTPCPLKRPGGYNIPAPHKQNGRPGPHPRLRNPDKPRRRGRIHPEPRKKPPDPPRHKRRPHPIRLPVLRPVAPANVHRRTDLAGRGETERVEPGRL

SEQ ID NO: 22325 - DNA, 585 bp, Unknown
  Obtained from environmental sample
  misc_feature (1)..(585): n is a, c, g, or t
ttgcgcgagcaaataaggttgcattctggcgaacctcttttgctgcgaaaagaaagcattagaacagaaggctctgttatagccgtgaatgtggatgctatggatccttacagcaatttctccgcagcacctggcaaaatagagagaatgttcgttccctttggtgagggaatagtggttcaaagcccctttgtttctggcgacactgtttctgccaactatgaatctgttttggcaaaaattatggcatattccagcacaagggaaaaggcaatttcaaatatggagtctgctcttgccaactttcgcatagagggcataagcacaacgcttccctttttgcgtggtgtgttaaagcatccagattttataaacctcaaatggactggtatgcaccttgcttacgaaaatcgcattcaagaagttttggaaaatattcacgtgcctgacgaagaggaacaagcagcacttatagctgctcttgccctcagcaccgatagcaatgcctctgccattatggctaatgccgaacacggaggtttattatgggcgatgttcaggcctaaaaggaaaatggaatattga

SEQ ID NO: 22326 - protein, 194 aa, Unknown
  Obtained from environmental sample
  DOMAIN (35)...(134): Biotin carboxylase C-terminal domain
  misc_feature (1)..(194): Xaa is any amino acid
MREQIRLHSGEPLLLRKESIRTEGSVIAVNVDAMDPYSNFSAAPGKIERMFVPFGEGIVVQSPFVSGDTVSANYESVLAKIMAYSSTREKAISNMESALANFRIEGISTTLPFLRGVLKHPDFINLKWTGMHLAYENRIQEVLENIHVPDEEEQAALIAALALSTDSNASAIMANAEHGGLLWAMFRPKRKMEY

SEQ ID NO: 22327 - DNA, 624 bp, Unknown
  Obtained from environmental sample
  misc_feature (1)..(624): n is a, c, g, or t
atgcttgaaagaaatcccgctcctgatgatttgcgggtaaatgcaggccgttcagcgcctgtggcttacaagacaggcacttcaatcggttttaaggacgcgtggtctatcgccgtttttgaccgttatgtgctatgcgtgtggctgggaaatttctccggcgagggaaacagcgcgtttatcggcaggctcagcgccgcccctttgggtttcagcataatagacgcgatatttgcggaaattcccaacgaaaaactttttgcgcagcgccccctgccgccggaagtaaaagctgtgcaagtgtgcgccgtctccggcgatattccctccgacgactgccttcaacttaaagaaactctttttatccccggcgtctccccgattaaccgctgccgtattcaccgcaaagtttacatcgacacccgcaccggataccgcacaaacgaaaccgaaggctcatatatcagaagtgaagtccgcgaattctggccatcggacatattggaaatttttgaagccgccggtcttccgcgtttttcaccgccgccctacccgcccgattccgcaagcggcgctctatccaagcggtttcccgccttcgataatttcgcccctggcgaataa

SEQ ID NO: 22328 - protein, 207 aa, Unknown
  Obtained from environmental sample
  misc_feature (1)..(207): Xaa is any amino acid
MLERNPAPDDLRVNAGRSAPVAYKTGTSIGFKDAWSIAVFDRYVLCVWLGNFSGEGNSAFIGRLSAAPLGFSIIDAIFAEIPNEKLFAQRPLPPEVKAVQVCAVSGDIPSDDCLQLKETLFIPGVSPINRCRIHRKVYIDTRTGYRTNETEGSYIRSEVREFWPSDILEIFEAAGLPRFSPPPYPPDSASGALSKRFPAFDNFAPGE

SEQ ID NO: 22329 - DNA, 327 bp, Unknown
  Obtained from environmental sample
  misc_feature (1)..(327): n is a, c, g, or t
ttgaccccctttgtcatttacatggcgtcagagtcgctgggcgtaagcggcatattggccgtgttcgcatctgggatagcccattcatttgcacgggacaagctgaaccccgacacggtaagcctgaacattgcgctggacagcgtttggtcgctgctgtcattcacctttgagggcattgttttcgtcatgctgggcactcagttgcccaagattttgaagaccatcggggaacattccatcggcgcgcgggaaatagttgcatgcatcntgntgctcccgcaaaaaagtctctccatcngatttttctggtggacattcccttaa

SEQ ID NO: 22330 - protein, 108 aa, Unknown
  Obtained from environmental sample
  SIGNAL (1)...(29)
  misc_feature (1)..(108): Xaa is any amino acid
MTPFVIYMASESLGVSGILAVFASGIAHSFARDKLNPDTVSLNIALDSVWSLLSFTFEGIVFVMLGTQLPKILKTIGEHSIGAREIVACIXXLPQKSLSIXFFWWTFP

SEQ ID NO: 22331 - DNA, 429 bp, Unknown
  Obtained from environmental sample
  misc_feature (1)..(429): n is a, c, g, or t
atgaagggcggccattgtagggttttgcttgtggcattgttcgccatcatggtgcttgcggcgggccccatcgtccacgcgttgattccagccatcccattggcggcggcctacacgctcatagccgcccttgggccgacggacgacgtggcgttggcggctgtgggcaagcgggcaaaggtgccaagcaagataatgtgcatcttgtctggcgagtccatcatcaacgacgcatctggcatagtgtgcttccaattcgctgtggcctccgtggtcactggctctttttcgatggctggggccgcctggcgctttgccttggtcggctttggcggcatattggcgggcctgatgatgaccttggtgaaatactccatcgtaaagtggctgcgctcgctaggcatagagaatgtcacccttaaaaaataa

SEQ ID NO: 22332 - protein, 142 aa, Unknown
  Obtained from environmental sample
  SIGNAL (1)...(27)
  misc_feature (1)..(142): Xaa is any amino acid
MKGGHCRVLLVALFAIMVLAAGPIVHALIPAIPLAAAYTLIAALGPTDDVALAAVGKRAKVPSKIMCILSGESIINDASGIVCFQFAVASVVTGSFSMAGAAWRFALVGFGGILAGLMMTLVKYSIVKWLRSLGIENVTLKK

SEQ ID NO: 22333 - DNA, 324 bp, Unknown
  Obtained from environmental sample
  misc_feature (1)..(324): n is a, c, g, or t
atgagcgatcatttaccgcttgaaaataaagcggaaaaacctttttttgaaaagaatgaatatcttacccggcagctaataacatacataggaaataaacgggcgttattgggatttatcggaggcggaataaaaaaagttcaaaagaaattaaataaagaaaaattaaaaatgtttgatgttttcagcggctccggcattgtagcgaggtattttaagcaattctcggaattattaattgtgaatgatcttgaaaagtattccgctgtaataaatcgaatgttatttgtcaaactgataatgaaagaaatgaatttactttaa

SEQ ID NO: 22334 - protein, 107 aa, Unknown
  Obtained from environmental sample
  misc_feature (1)..(107): Xaa is any amino acid
MSDHLPLENKAEKPFFEKNEYLTRQLITYIGNKRALLGFIGGGIKKVQKKLNKEKLKMFDVFSGSGIVARYFKQFSELLIVNDLEKYSAVINRMLFVKLIMKEMNLL

SEQ ID NO: 22335 - DNA, 744 bp, Unknown
  Obtained from environmental sample
  misc_feature (1)..(744): n is a, c, g, or t
ttggaaacctgtattcgttccgtagtaaacgccgtccgcatgtccggggacagcgaggatccggcaattcaggattttctttcaaggctgtttgattactgtaaacagcttgggataaaaaacgccgaaaaaaaatcaaacattacaacttcccgtcaaataagcgaaggtcaggcgttaaaaattttggttcccggcacgggggtgttcaagtcccaggtaattaaaaatttcgggaattatattaccatttctcgcccgacaaatcaaaagatgacgactcacatgcaatgggacggtttaagattatctgtatatttctggcgggaagacgacgcgggctatgtatttgatacggaagtattggacgaggttttttccatggggctttccgccttaaaaattaaccataatgattcgcttttcagaacacagaaaagatcgtctttgcgcgttaaacttaacaaagcggcgtttgtttaccttgttaatgaaacggaccctcacaagatggaaaggtcgccgggtttaagatgtatgatggaagatgtttccgatacgggctgcgctttcagggtaacgggcacggctcccgtcggacaacgccttaaagtgcagttttcccttgatcgtattcctgtttgtataccgggtacggttcgttctgttgattatcaaaaccagtctaatatatcggttatacacctggaagcggatgaccttccgaattcgacaagaacctaa

SEQ ID NO: 22336 - protein, 247 aa, Unknown
  Obtained from environmental sample
  DOMAIN (145)...(240): PilZ domain
  misc_feature (1)..(247): Xaa is any amino acid
METCIRSVVNAVRMSGDSEDPAIQDFLSRLFDYCKQLGIKNAEKKSNITTSRQISEGQALKILVPGTGVFKSQVIKNFGNYITISRPTNQKMTTHMQWDGLRLSVYFWREDDAGYVFDTEVLDEVFSMGLSALKINHNDSLFRTQKRSSLRVKLNKAAFVYLVNETDPHKMERSPGLRCMMEDVSDTGCAFRVTGTAPVGQRLKVQFSLDRIPVCIPGTVRSVDYQNQSNISVIHLEADDLPNSTRT

SEQ ID NO: 22337 - DNA, 639 bp, Unknown
  Obtained from environmental sample
  misc_feature (1)..(639): n is a, c, g, or t
atggcggaggcgttctgcgtttgccaccgaacttccgccgaatttcatcacaatcattgcgatagtatatggaaaagggcctatccttgcaattattggcttgatcaccaaacgaatctggtgtattctaatagtataatgagtgactatcttgatcccaataacgaagaacttctcaaagactttttttccgaagcacaaatgcaggtggatactttggagcaaaacattcttgtcttggagaatgaaggggcaaataaggacgcggtagacgagattttccgcgccgctcataccctgaaaggcggctcggccacggtggaaatgatggagctttcccattttacccacctggttgaagatgtactggatgccatacgttcagatcagcttgcgatcaatgaagatgtggtagatattcttctttcggccattgacgtgatcaaggcgatgcttgaacagcggatgaatggtcaggtctatcaggagaacacatccgaaattgaaggcaagctgtccgctctgcttcctgaaggaagcaagagcaaaaagggatctgccgctgcggccaaacctaaacctgctccaacaaacacgtggctccagcgccagttctcaagcaccggcggccaaacttga

SEQ ID NO: 22338 - protein, 212 aa, Unknown
  Obtained from environmental sample
  DOMAIN (57)...(158): Hpt domain
  misc_feature (1)..(212): Xaa is any amino acid
MAEAFCVCHRTSAEFHHNHCDSIWKRAYPCNYWLDHQTNLVYSNSIMSDYLDPNNEELLKDFFSEAQMQVDTLEQNILVLENEGANKDAVDEIFRAAHTLKGGSATVEMMELSHFTHLVEDVLDAIRSDQLAINEDVVDILLSAIDVIKAMLEQRMNGQVYQENTSEIEGKLSALLPEGSKSKKGSAAAAKPKPAPTNTWLQRQFSSTGGQT

SEQ ID NO: 22339 - DNA, 504 bp, Unknown
  Obtained from environmental sample
  misc_feature (1)..(504): n is a, c, g, or t
gtgggtaaaatgggaaagctccatcatttccaccgtggccgagccgcctttcagggtatgagcggcgcggaaaatctcgtctaccgcgtccttatttgccccttcattctccaagacaagaatgttttgctccaaagtatccacctgcatttgtgcttcggaaaaaaagtctttgagaagttcttcgttattgggatcaagatagtcactcattatactattagaatacaccagattcgtttggtgatcaagccaataattgcaaggataggcccttttccatatactatcgcaatgattgtgatgaaattcggcggaagttcggtggcaaacgcagaacgcctccgccatgtggcagaaatcgtaaaaaccagccttgaccggaagccaattcttgttatatccgcgatgggggacacgaccgactatcttcttgaagcgggggacgcggtcttgaggaatggcatcgttcagtgtccaaaaaatcgaaaatattccccttaa

SEQ ID NO: 22340 - protein, 167 aa, Unknown
  Obtained from environmental sample
  misc_feature (1)..(167): Xaa is any amino acid
MGKMGKLHHFHRGRAAFQGMSGAENLVYRVLICPFILQDKNVLLQSIHLHLCFGKKVFEKFFVIGIKIVTHYTIRIHQIRLVIKPIIARIGPFPYTIAMIVMKFGGSSVANAERLRHVAEIVKTSLDRKPILVISAMGDTTDYLLEAGDAVLRNGIVQCPKNRKYSP

SEQ ID NO: 22341 - DNA, 453 bp, Unknown
  Obtained from environmental sample
  misc_feature (1)..(453): n is a, c, g, or t
ttgtgcgacggcacaaaagtttggcatttttgccatatcatgggcggcgcaaaaataggaaaaaaatgctcaattggtcaaaatgtaaacgtaggttcgcgcgcagtaataggagacggagtaaaaatacaaaataatgtttcagtttacgatgatgtaattatagaagatgatgttttctgcggaccgtcatgcgtatttacaaacgtaataaatccgcgagcttttgttgagcgtaaacatgaatacaaaaaaactacggtaaaaaaaggtgcatctataggcgctaacgctacaatagtctgcgccgttacaatcggagaatatgcgctaataggagccggcagtgttgttacaaaagatatccctgattattctcttgcctacggcaatccggcctgtatacacggaaaagtagacaaaaacggatataaaggaaaagcatatgaatga

SEQ ID NO: 22342 - protein, 150 aa, Unknown
  Obtained from environmental sample
  misc_feature (1)..(150): Xaa is any amino acid
MCDGTKVWHFCHIMGGAKIGKKCSIGQNVNVGSRAVIGDGVKIQNNVSVYDDVIIEDDVFCGPSCVFTNVINPRAFVERKHEYKKTTVKKGASIGANATIVCAVTIGEYALIGAGSVVTKDIPDYSLAYGNPACIHGKVDKNGYKGKAYE

SEQ ID NO: 22343 - DNA, 822 bp, Unknown
  Obtained from environmental sample
  misc_feature (1)..(822): n is a, c, g, or t
atgtttgaacttacagtgggcttaaacggcggtaactcgactgattcttttagtttccggggggcggcttatactcttgtctttggtccgcagattgggcccgggtttgaaaagcttgaccagcgttacgaatatcgcaggtacatgacctataaggcaaagttaaaaacagaaaaggtaaacgaaagggagcctttaatcattgaaaaccagcctgcctgggcggccattacaggaaagtattttgcccttattgctttgccctataccaatcaatattcgcttgcgttttacgcttcgcctgaaagcggaattccaaatgcatcaaggcttttcatttcccgccctgctattaactcttcccggctggaagacaagtaccacttttacttggggcccaaaaaccaggaaactctcagcgcttacaaccgcggagataacggctttaagctccttgataccgacctttacgaaattgccaacaccaagggcttccttgccccattggaaaaagtgctgaaatggcttctgcaaatcttctatatggttattcccaattacggggttgccattattcttcttacgttggttgtcagactcctgatgtttcctcttactaaaaagggatccgaatcaactttgcgcatgcaggccttgtctccaaagatcaaggagatacaaacaaagtataaggacaacccccagaagatgaacgccgaaatgggggagttttacaagaaagaaggctacaaccccctttccggctgcctgcctatgatcattcagattcccatcttttttgccctgtacaatctcttttaa

SEQ ID NO: 22344 - protein, 273 aa, Unknown
  Obtained from environmental sample
  DOMAIN (185)...(273): 60Kd inner membrane protein
  misc_feature (1)..(273): Xaa is any amino acid
MFELTVGLNGGNSTDSFSFRGAAYTLVFGPQIGPGFEKLDQRYEYRRYMTYKAKLKTEKVNEREPLIIENQPAWAAITGKYFALIALPYTNQYSLAFYASPESGIPNASRLFISRPAINSSRLEDKYHFYLGPKNQETLSAYNRGDNGFKLLDTDLYEIANTKGFLAPLEKVLKWLLQIFYMVIPNYGVAIILLTLVVRLLMFPLTKKGSESTLRMQALSPKIKEIQTKYKDNPQKMNAEMGEFYKKEGYNPLSGCLPMIIQIPIFFALYNLF

SEQ ID NO: 22345 - DNA, 792 bp, Unknown
  Obtained from environmental sample
  misc_feature (1)..(792): n is a, c, g, or t
gtgcaggagttcaatgccttcgggggcgtggacgcggttcccctgtgcatccgctcaaaggaagttgatgtaattgtagacaccggcgccctgctggcggggagtttcggcggcataaatctggaagacatttccgccccccgctgttttgaaattgaacggaaactgaaagcgcgctgcgacatcccgatttttcacgacgaccagcacggcacggcggtagtaacattggcggccctgctcaacgcgctgaaactgaccggaaaaaaactggagaatatcagcgttgttacatcgggggcgggagcggcaggcacggcggttattcgtctgctgctggcgctcgggctttctgatgtggtgatgtgcgaccgcgagggggcgctttataaaggcagtccgggcatgaacagcgagaaggcggaaatggcggagctaaccaataagcaaatgaagaagggaagccttgccgatgtgatacgcggcgcggacgtgtttatcggtctttctgttcccggcacggtgactactgatatggtgaagtcaatggcgcctaacgcgatactgttccctatggccaaccccgtgacggagatcatgcccgatgaggctttagccgccggggccgcgatattggggacaggcctcactgattctgcccaccagatcatcaatgtcctcgccgttccccggtcttttccctcggcgcgcttggaagtccgcccccgtctacatcaatctactcatgaatatttgccccctctttctcctcttgcaaacattatttactga

SEQ ID NO: 22346 - protein, 263 aa, Unknown
  Obtained from environmental sample
  DOMAIN (2)...(67): Malic enzyme, N-terminal domain
  misc_feature (1)..(263): Xaa is any amino acid
MQEFNAFGGVDAVPLCIRSKEVDVIVDTGALLAGSFGGINLEDISAPRCFEIERKLKARCDIPIFHDDQHGTAVVTLAALLNALKLTGKKLENISVVTSGAGAAGTAVIRLLLALGLSDVVMCDREGALYKGSPGMNSEKAEMAELTNKQMKKGSLADVIRGADVFIGLSVPGTVTTDMVKSMAPNAILFPMANPVTEIMPDEALAAGAAILGTGLTDSAHQIINVLAVPRSFPSARLEVRPRLHQSTHEYLPPLSPLANIIY

SEQ ID NO: 22347 - DNA, 462 bp, Unknown
  Obtained from environmental sample
  misc_feature (1)..(462): n is a, c, g, or t
ttgaagattgccgagattatccgcaaagacttgcaggagttgggaataaaggtgcactttcaggcgctcgagttcaacgcgcttatccaaaaattagacaacccgccgtttgattgggagtgcatcctgctgggtctgaccggcggcgacgaaccgcacttcgggcgcaacgtttggcattcaggcggtcagttgcacatgtggtacccgcgtcaaaaaacgccggccacgccgtgggaggcgaggatcgacacgatctacaactttggttcgcgggagttagacagagccaaacgcaaggagttgtacgacgagtggcagcgcatcgccgcggacaagcagccgttcatatacacggtgttgtcggagcggatagagtgcatatcgaataaattcgggaatgtcaaccctaccatcaacagcggactattgcacaacttggagatgttatacgtcaagtag

SEQ ID NO: 22348 - protein, 153 aa, Unknown
  Obtained from environmental sample
  misc_feature (1)..(153): Xaa is any amino acid
MKIAEIIRKDLQELGIKVHFQALEFNALIQKLDNPPFDWECILLGLTGGDEPHFGRNVWHSGGQLHMWYPRQKTPATPWEARIDTIYNFGSRELDRAKRKELYDEWQRIAADKQPFIYTVLSERIECISNKFGNVNPTINSGLLHNLEMLYVK

SEQ ID NO: 22349 - DNA, 465 bp, Unknown
  Obtained from environmental sample
  misc_feature (1)..(465): n is a, c, g, or t
atgaacctggctcaaaaaataatcaaggcgcatttgagggccggggagatggttcccggccgggagataggcctggccgtggaccagaccctggtccacgacgccaccggccagatggccctcttgcagttcgaggccctgggcttcccccgggtcaggacccgccgttccctggtctataccgatcacaacaccctccaggcgggctttgagaacgccgacgaccacgccttcctggcctcggcggcccggaagttcggcctgcattactccaaggccggaggcggcatctgccaccaggtcaacctggaacgtttcgccgtgcccggggaggtgctcctgggggccgacagccacaccaccaccggcggcgcggtgggggaactggacatcggggccggcgggctggatgttgtccgctgccatggtctgacggtcgtttttccctgcccatgcctgatgtga

SEQ ID NO: 22350 - protein, 154 aa, Unknown
  Obtained from environmental sample
  misc_feature (1)..(154): Xaa is any amino acid
MNLAQKIIKAHLRAGEMVPGREIGLAVDQTLVHDATGQMALLQFEALGFPRVRTRRSLVYTDHNTLQAGFENADDHAFLASAARKFGLHYSKAGGGICHQVNLERFAVPGEVLLGADSHTTTGGAVGELDIGAGGLDVVRCHGLTVVFPCPCLM

SEQ ID NO: 22351 - DNA, 450 bp, Unknown
  Obtained from environmental sample
  misc_feature (1)..(450): n is a, c, g, or t
ttggcatggaggcataatatgttcaggaaattgtttttcttatgtgtttcgtttttggttgttgaaagtctttttgcggacaatatttatacaaccatagagattaacggagtaaccgttaacggcggtttggtatatgtgtctgtatactcaaatgaaaatgattataaaaacgagacggcttttacacaatttatcttacagccggagaatacaaccttaacatattttttggatttaccagaaggtgaatatgcagtttctgtatttcaggataaaaatggcgatgaagaactcaattccggcctttttggaataccatccgagcctgtcggtaaaacaaactacaacctaaaaggagcgccgggcggctttaataaattgaaagcgcttgtaaatagtggttcgacaaaactaattgtaaacatggggaaagtaagactcctttag

SEQ ID NO: 22352 - protein, 149 aa, Unknown
  Obtained from environmental sample
  SIGNAL (1)...(26)
  misc_feature (1)..(149): Xaa is any amino acid
MAWRHNMFRKLFFLCVSFLVVESLFADNIYTTIEINGVTVNGGLVYVSVYSNENDYKNETAFTQFILQPENTTLTYFLDLPEGEYAVSVFQDKNGDEELNSGLFGIPSEPVGKTNYNLKGAPGGFNKLKALVNSGSTKLIVNMGKVRLL

SEQ ID NO: 22353 - DNA, 918 bp, Unknown
  Obtained from environmental sample
  misc_feature (1)..(918): n is a, c, g, or t
ttgagcacgatgatgcaaaccgcgcaggttatgggctccaatatgcaaaggcaagccgtgccgcttctccgttccgaggctcctgttgtgggaaccggtttggagaaaaaagttgcacttgattctggaactttggtaagggcaaagagcgatggcgaggttgtttttgttgatgcaacttgcataaaggttttaagagacaaaacaaacctgaattatgaaactcttggacttccacctcacgatatttacgaactccgcaaatttgaacgctcaaaccaagattcctgcataaaccagaaaccagtttgtaaagttggagataaagtgaaagccggcgatgttttggcagatggcacatccaccgataacggcgaacttgcccttggcaaaaatattcgcgttgcattcttgccatggcagggctacaactacgaagacgcaataataatctccgaagaactcgcaattaaagatacattcacttccatacatattgaggaatacgaaattgaggttagagaaaccaagcgcggaaaagaagagataaccaaagatgttccgaatgtgagtgaaaaagaccgcagcttgctagacgaagaaggcattgttcgcattggcatggaagttagacccggcgatattttggttggaaaggtcacgccaaaaggcgaatctgaactaaccccagaagagaaattgctccgcgctattttcggttcaaaatccggcgatgttagcgattcatctctgcgtgttccaagcggtgtaaaaggcattgttgtggacacacgcatattccagcgcagagaaaaccatgcgacccaaaaagaagatgagttaagggcccgggaagaaacagcgggccaaaattcgcgcagtagccacagactttgccaaaaaaacccccctttataa

SEQ ID NO: 22354 - protein, 305 aa, Unknown
  Obtained from environmental sample
  DOMAIN (45)...(296): RNA polymerase Rpb2, domain 6
  misc_feature (1)..(305): Xaa is any amino acid
MSTMMQTAQVMGSNMQRQAVPLLRSEAPVVGTGLEKKVALDSGTLVRAKSDGEVVFVDATCIKVLRDKTNLNYETLGLPPHDIYELRKFERSNQDSCINQKPVCKVGDKVKAGDVLADGTSTDNGELALGKNIRVAFLPWQGYNYEDAIIISEELAIKDTFTSIHIEEYEIEVRETKRGKEEITKDVPNVSEKDRSLLDEEGIVRIGMEVRPGDILVGKVTPKGESELTPEEKLLRAIFGSKSGDVSDSSLRVPSGVKGIVVDTRIFQRRENHATQKEDELRAREETAGQNSRSSHRLCQKNPPL

SEQ ID NO: 22355 - DNA, 504 bp, Unknown
  Obtained from environmental sample
  misc_feature (1)..(504): n is a, c, g, or t
ttggcttgcggggttttttataaaggggggtttttttggcaaagtctgtggctactgcgcgaattttggcccgctgtttcttcccgggcccttaactcatcttctttttgggtcgcatggttttctctgcgctggaatatgcgtgtgtccacaacaatgccttttacaccgcttggaacacgcagagatgaatcgctaacatcgccggattttgaaccgaaaatagcgcggagcaatttctcttctggggttagttcagattcgccttttggcgtgacctttccaaccaaaatatcgccgggtctaacttccatgccaatgcgaacaatgccttcttcgtctagcaagctgcggtctttttcactcacattcggaacatctttggttatctcttcttttccgcgcttggtttctctaacctcaatttcgtattcctcaatatgtatggaagtgaatgtatctttaattgcgagttcttcggagattattattgcgtcttcgtag

SEQ ID NO: 22356 - protein, 167 aa, Unknown
  Obtained from environmental sample
  misc_feature (1)..(167): Xaa is any amino acid
MACGVFYKGGFFWQSLWLLREFWPAVSSRALNSSSFWVAWFSLRWNMRVSTTMPFTPLGTRRDESLTSPDFEPKIARSNFSSGVSSDSPFGVTFPTKISPGLTSMPMRTMPSSSSKLRSFSLTFGTSLVISSFPRLVSLTSISYSSICMEVNVSLIASSSEIIIASS

SEQ ID NO: 22357 - DNA, 741 bp, Unknown
  Obtained from environmental sample
  misc_feature (1)..(741): n is a, c, g, or t
ttgtttcagggaactacaggaaattttcatgcggttgagtctttatactttgaaaccgcgggggttattatcgccctgattcttctgggtaaatctcttgaagcggtatcaaaaggccgcacaagcgaagcgataaaaaaacttatgggactggctcccaaaacggctattgttatcgtcaacggcgaagagaaagaaatccccattaacgaagtaataccaggcgacattatagtggtaaaacccggcgcaaaaatccccgtggacggagttgtaattgacggacacagcgcggttgacgagtccatgctcacgggggaaagtatgcctgttgataaaaaagcgggcgatcccgtttaccgagcgtgtattaacagcaacggcgttatccgttgtaaagcggaaaaggtcggtaacgaaaccgcgcttgctcagatcatcaaactggttgaagacgcgcagggatcaaaagcgccgatagcgcagctggcggatattgtttcagggtactttgttcccgttgtctgcgccattgcgcttgtcgccggtatcgcatggttcgccgcagcttctttcggagttgtcaatttaccggccggaaaatccgtgacggaattcgccctgacgatttttatttccgtactggtcatagcctgcccctgccctctctgtcttgtcccgcctacagcgatcattggtggcgactgggcaaaggcccggaaatacgcctttttaatctaa

SEQ ID NO: 22358 - protein, 246 aa, Unknown
  Obtained from environmental sample
  DOMAIN (22)...(234): E1-E2 ATPase
  misc_feature (1)..(246): Xaa is any amino acid
MFQGTTGNFHAVESLYFETAGVIIALILLGKSLEAVSKGRTSEAIKKLMGLAPKTAIVIVNGEEKEIPINEVIPGDIIVVKPGAKIPVDGVVIDGHSAVDESMLTGESMPVDKKAGDPVYRACINSNGVIRCKAEKVGNETALAQIIKLVEDAQGSKAPIAQLADIVSGYFVPVVCAIALVAGIAWFAAASFGVVNLPAGKSVTEFALTIFISVLVIACPCPLCLVPPTAIIGGDWAKARKYAFLI

SEQ ID NO: 22359 - DNA, 354 bp, Unknown
  Obtained from environmental sample
  misc_feature (1)..(354): n is a, c, g, or t
atgccttactccaagcaaaaagagcccgaaaaatacaaaaaacggagttataattggaaaacagccataggtttgcaagctgttgatggcttggtgccttcgcagtatttgctggaagtagccaattcaaatataaagggagagatttcattaagagaaacccagagaaaaattcagaattattatgaaagcaaacccataaaaacgaaaaaagaagaaaggcaaagagaggcagatttagtatctttgaggataacaaaactactttccaatgattctttcagtttatccccagttcagtttctttccattcacaaaaatttatttaaggatatatacaattttgccggataa

SEQ ID NO: 22360 - protein, 117 aa, Unknown
  Obtained from environmental sample
  misc_feature (1)..(117): Xaa is any amino acid
MPYSKQKEPEKYKKRSYNWKTAIGLQAVDGLVPSQYLLEVANSNIKGEISLRETQRKIQNYYESKPIKTKKEERQREADLVSLRITKLLSNDSFSLSPVQFLSIHKNLFKDIYNFAG

SEQ ID NO: 22361 - DNA, 465 bp, Unknown
  Obtained from environmental sample
  misc_feature (1)..(465): n is a, c, g, or t
ttgaaaaaaacgggctcaaaaaaaaccaggttaagtacaatcagggaatccctgctttacattgccaatggttacgcaagggaagccggggtaaggaattttgaaaagaacctggacaaaattcaccggaaaatagcgaagcagattgttgacgccgaagaatcgtctattaggccaaagcctgaacctgaccccaaatcaaaccaaagcgacggcaaggataacgcgaaagatagtgcgaatgaaaagaaagaaccgcaaaagtctacacccttaaagtttacaatagacaaaaaagtcattgaagaacaccttggcaaaccgattttccccgagggggaaataaaaaaggccgaccgtccggggatgtccgtgggcttagcctggacgagcatgggcggtgacacgttggtaatcgaagctacctcggtgccgggaaaagagggcctgactctcaccggctaa

SEQ ID NO: 22362 - protein, 154 aa, Unknown
  Obtained from environmental sample
  DOMAIN (95)...(154): Lon protease (S16) C-terminal proteolytic domain
  misc_feature (1)..(154): Xaa is any amino acid
MKKTGSKKTRLSTIRESLLYIANGYAREAGVRNFEKNLDKIHRKIAKQIVDAEESSIRPKPEPDPKSNQSDGKDNAKDSANEKKEPQKSTPLKFTIDKKVIEEHLGKPIFPEGEIKKADRPGMSVGLAWTSMGGDTLVIEATSVPGKEGLTLTG

SEQ ID NO: 22363 - DNA, 822 bp, Unknown
  Obtained from environmental sample
  misc_feature (1)..(822): n is a, c, g, or t
ttggacattgattttgcgtgggatgagcgggatgagttaatcaaggcggttattgaaaagtttggtcccgcttattgcgcccgtgtcgccaatcacaatatgttccggtatcgttccgcaatgagggaaacggcgaaggcttacggctttggagacgctgaaattacccaaacggaacggcggctttttcagacgggggataaatccgttgcggctgatccgttgtggcgggaaatttttaccgttgcgaaaaagattgagggtttaccccgtgggcttggtatgcactgcggggggctggtgataacgcctgaaccgataagccgttatgcgccgatagaaaaatcatcagagggctttccgcttctggcgtgggaaaaagagggaaccgaagcggcggggtttgtgaaaattgatttgctcggcaatagaagtctggcggttatcagagacgttttgaaaaatcttgaagaacaggggattattattgaccgtaatgtatggcggcctgtagacgataaggcaacgattgaagcgttggcaaggggagacagcataggggttttttacattgaaagcccggcaatgaggcaactacagaaaaaaactaacgccggggattttgaacacattgttattcatccttcgataatacgccctgcggcaaataaatttatcgccgaatatgtaaggcggcttaaaggggggaaatgggaaccgccacaccccccgcctggaaaagatactcgattgaaccctacgggattttatgctatccagaggacgtatctaaaaccgcccctagcctctggcggggtttaa

SEQ ID NO: 22364 - protein, 273 aa, Unknown
  Obtained from environmental sample
  DOMAIN (1)...(271): Bacterial DNA polymerase III alpha subunit
  misc_feature (1)..(273): Xaa is any amino acid
MDIDFAWDERDELIKAVIEKFGPAYCARVANHNMFRYRSAMRETAKAYGFGDAEITQTERRLFQTGDKSVAADPLWREIFTVAKKIEGLPRGLGMHCGGLVITPEPISRYAPIEKSSEGFPLLAWEKEGTEAAGFVKIDLLGNRSLAVIRDVLKNLEEQGIIIDRNVWRPVDDKATIEALARGDSIGVFYIESPAMRQLQKKTNAGDFEHIVIHPSIIRPAANKFIAEYVRRLKGGKWEPPHPPPGKDTRLNPTGFYAIQRTYLKPPLASGGV

SEQ ID NO: 22365 - DNA, 591 bp, Unknown
  Obtained from environmental sample
  misc_feature (1)..(591): n is a, c, g, or t
atgggcagctacaaactgaataaaataatcgccgaccgaaagcacaagaaaatttaccttgacggtgacagggtgataaaactcatgggcgaggaataccccgcgcccgacgtcctttccgaagcgcataaccttaccgcggtgggagaaaccgccctcaaggttccccgcctggtggaggtaacgaaaatagacggcaagtgggcggtagtgtgggaatatgtcgcgggaaccactcttgcccagcttatggagaaaaacaaggacaaggaactgcaatatcttgaacgctttgttgacatccagcttgacatgcaccgccatagcgcgacaaggcttccacggcttaccgaaaagatggagcgcaagataaaagcctccagccttgacgcgaccgcccgctatgaaattttgggaaggctggcaagcatgcccaaacataccaaactatgccacggcgattttaacccaagcaacattgtgattaccgacaaggacgaggcgtacatcatcgactggtcccatgccacccagggccaacgcctccgcggacgcggcgcacacttatatgttattctggctttccggtaa

SEQ ID NO: 22366 - protein, 196 aa, Unknown
  Obtained from environmental sample
  DOMAIN (60)...(193): RIO1 family
  misc_feature (1)..(196): Xaa is any amino acid
MGSYKLNKIIADRKHKKIYLDGDRVIKLMGEEYPAPDVLSEAHNLTAVGETALKVPRLVEVTKIDGKWAVVWEYVAGTTLAQLMEKNKDKELQYLERFVDIQLDMHRHSATRLPRLTEKMERKIKASSLDATARYEILGRLASMPKHTKLCHGDFNPSNIVITDKDEAYIIDWSHATQGQRLRGRGAHLYVILAFR

SEQ ID NO: 22367 - DNA, 744 bp, Unknown
  Obtained from environmental sample
  misc_feature (1)..(744): n is a, c, g, or t
ttgtatatcatccttgatgaatcccagaatattaaaaatctgacaacccaaactacagcggcggtactttccctgaaaagcgaataccggcttgccctgagcggcactccaatcgaaaataatcttggagaactgtacagcctgttccgttttctcaacccctcgttcttcggctccgaaaggcttttcgttcagcgctacctgcatcccattcaggatgataatgatgaagacgccctaaaagacctaaaagcaaggatatatccttttatgctcaggcgtctaaagcgcgatgtcctaaaagagcttcctgccaaaaccgaggaaaccgcctacatcgagctggaagaaagccatcttgctgtttaccaccgcaggcggcaggaatacaaacagctcatcgacaacatcatcgcaaggggcgaagcagcgaaatcccagtttgtaattttcaaggcgttaggcgaactgcgccgcctcgccagcgttcccgaagcggacggcgaatacgctgggccttcagcaaagcgccagtacctgcttgaccggatcgcggagcttgttgagaacaaccacaagtgccttatctttaccaactttctggcgacggtcgatataataagcgaggatctcgccggactgggaattcaaaacctcaccatgacaggggctacggttgatcgccaggcgctggttagccgcttccaaaccgatgacaacgtgaaggcatttataatgacctaa

SEQ ID NO: 22368 - protein, 247 aa, Unknown
  Obtained from environmental sample
  DOMAIN (1)...(167): SNF2 family N-terminal domain
  misc_feature (1)..(247): Xaa is any amino acid
MYIILDESQNIKNLTTQTTAAVLSLKSEYRLALSGTPIENNLGELYSLFRFLNPSFFGSERLFVQRYLHPIQDDNDEDALKDLKARIYPFMLRRLKRDVLKELPAKTEETAYIELEESHLAVYHRRRQEYKQLIDNIIARGEAAKSQFVIFKALGELRRLASVPEADGEYAGPSAKRQYLLDRIAELVENNHKCLIFTNFLATVDIISEDLAGLGIQNLTMTGATVDRQALVSRFQTDDNVKAFIMT

SEQ ID NO: 22369 - DNA, 690 bp, Unknown
  Obtained from environmental sample
  misc_feature (1)..(690): n is a, c, g, or t
atggtaaaaggaaatgcggctatggcaattaggcctgcggctatggcaggttttaaagtagctgattttgaagtaaatccagcagcaagagaaactgtagaagaccgtcttagaaacgaagtagccgccttgcaagggcaagtagccaatcttaacggagaaatagcacgcttaaaacagaaaaacgagcaagactcaaaagcgggatacgataaaggccttcaagaaggcaaggttttgggcgcaaaagaaggtgaaaaaaaagctacggaaaaattcgatgccaacataaaaagcttgcaagccagcactgagaaaacattaaaatctttggctttgcagcaaaaagaaaattttgaaaaaattgagaatgctaccgccgaaattgccatagcaatagcaaaaaaagttttttgcgaagaagcagctcaaaatccaaacataatagctaaagcaattaaagaagcctttacattccttgggcaagaagaaaaactgaaaattcgcctaaatcctggggatgtagctggtgcagaaaaaacagaatctgtatggaaacccatgttgaattcattgaaaagcattgagcttgttgttgataactcaatagaacaaggcggttgcttgcttgaatcggaaaatggctccttctatcgatatgcgattagaaacagtatgggggcatattga

SEQ ID NO: 22370 - protein, 229 aa, Unknown
  Obtained from environmental sample
  DOMAIN (1)...(227): Flagellar assembly protein FliH
  misc_feature (1)..(229): Xaa is any amino acid
MVKGNAAMAIRPAAMAGFKVADFEVNPAARETVEDRLRNEVAALQGQVANLNGEIARLKQKNEQDSKAGYDKGLQEGKVLGAKEGEKKATEKFDANIKSLQASTEKTLKSLALQQKENFEKIENATAEIAIAIAKKVFCEEAAQNPNIIAKAIKEAFTFLGQEEKLKIRLNPGDVAGAEKTESVWKPMLNSLKSIELVVDNSIEQGGCLLESENGSFYRYAIRNSMGAY

SEQ ID NO: 22371 - DNA, 735 bp, Unknown
  Obtained from environmental sample
  misc_feature (1)..(735): n is a, c, g, or t
atgaaaatgggggcggtctgcataccaagcacttatcagctaacggcaaaagacctggaataccgttgtaacaatgccgaagtaaagatgctcattactattagcgatgccggcctcctggcggatattgccgccgcccggcgtcaatgcggcacacttcaacaagtcgccgttgtgggtgaagtaccgcctgatggcgcttatattgatttatcgcgcgaaatggaaaaggcaagcgataattttcagcgcatatcaggcaaaaccgaagaccccatgctgatctacttttcatctggtacgactggaatgcccaaaatggtactgcacaacaacagccttcctctggggcatattgtcaccgccaaatactggcactgcgttgaagataacacggttcacatgacccagaccgattccggctgggcaaaatttgcctggggaaaaatttacggtcagtggatttgcggtgcggctatcggcgcatacgacacggaaaagtttacccccaagggaatgttagacgctattatcagactgcggcccgcgactttttgcgccccggcgacaattttccgttatcttattaaagaagacctgtcctcttacgatttcagttttattcaccatacttcagtagcgggggaacctttaagcccggaagtgtaccacaggctaaaagagaaaactggcctcgagcttcgagaaggtttcttcagtcggaaacgtcggtaa

SEQ ID NO: 22372 - protein, 244 aa, Unknown
  Obtained from environmental sample
  misc_feature (1)..(244): Xaa is any amino acid
MKMGAVCIPSTYQLTAKDLEYRCNNAEVKMLITISDAGLLADIAAARRQCGTLQQVAVVGEVPPDGAYIDLSREMEKASDNFQRISGKTEDPMLIYFSSGTTGMPKMVLHNNSLPLGHIVTAKYWHCVEDNTVHMTQTDSGWAKFAWGKIYGQWICGAAIGAYDTEKFTPKGMLDAIIRLRPATFCAPATIFRYLIKEDLSSYDFSFIHHTSVAGEPLSPEVYHRLKEKTGLELREGFFSRKRR

SEQ ID NO: 22373 - DNA, 777 bp, Unknown
  Obtained from environmental sample
  misc_feature (1)..(777): n is a, c, g, or t
atgtgtaatcgcaagaaagttttatctttaaataatggaaatttaaattctaaagtagtatttattgctgaagctccaggaagacttggtgctgaatgtactggtattcctttatgtggagataagacaggagaaaattttgagatgttgttaggaaatattggatggaagagagaggatgtatttattactaactctattctttgtaatccacaagatgaaaatggtaataattctactcctacacaagaagagattgaaaattgtagttattatcttgaaatgacattagagttgataaatccagatataattgttactttgggtgcaaaggctcttgaggcattaaaatgtattaaagatcataatttcgttttacgcgattgtgtagctcagaaattatcttggaataatagatatatatttcctgtatatcatatgggaccaagagcaattattcacagaggaattatcaagcaaagaagagattttattattttatcgcatattgttgatccaatgaaaggaataaaaaatcatcctactaaaataaaaagattaagtaaaagaaataaaaatttagatagtaggttactcgatatggttataataataatcaccgaattaaaaacagtctccttatttaaaattacgaaattactctatatgattgattataattattatattgattatggaaattcaatatctggtagtatttattttcgcatgcaagatggaccttggttaccagcattaaaaaaatattccaagtga

SEQ ID NO: 22374 - protein, 258 aa, Unknown
  Obtained from environmental sample
  DOMAIN (10)...(166): Uracil DNA glycosylase superfamily
  misc_feature (1)..(258): Xaa is any amino acid
MCNRKKVLSLNNGNLNSKVVFIAEAPGRLGAECTGIPLCGDKTGENFEMLLGNIGWKREDVFITNSILCNPQDENGNNSTPTQEEIENCSYYLEMTLELINPDIIVTLGAKALEALKCIKDHNFVLRDCVAQKLSWNNRYIFPVYHMGPRAIIHRGIIKQRRDFIILSHIVDPMKGIKNHPTKIKRLSKRNKNLDSRLLDMVIIIITELKTVSLFKITKLLYMIDYNYYIDYGNSISGSIYFRMQDGPWLPALKKYSK

SEQ ID NO: 22375 - DNA, 438 bp, Unknown
  Obtained from environmental sample
  misc_feature (1)..(438): n is a, c, g, or t
atgaatagaaaaatttttaccactattttcttaatattaattacagggtgcggcgcgaataaaggcaaagaaataattgaccgttcaggcagacaggtaaagttaaacggagcgattaaccgcgttgtgtccacttcgccctcaaatacggaaataataaccgatctgggcatggcgcgtaagcttgtcgccatagacgtccactcggcgaatgttacggggattcccgacggccttccccgactggattttttcttccccaacgccgaggtgattattaagcttgaacctgatataattatcgcaagcgggcataatcccacaggctcaggcgaagaccctttccggcttctgagcgagatgggaatccccgtggtgtatattcccatgcgtaaaagtattgatgatatttataaggatataacgtttgtcgcctaa

SEQ ID NO: 22376 - protein, 145 aa, Unknown
  Obtained from environmental sample
  SIGNAL (1)...(19)
  misc_feature (1)..(145): Xaa is any amino acid
MNRKIFTTIFLILITGCGANKGKEIIDRSGRQVKLNGAINRVVSTSPSNTEIITDLGMARKLVAIDVHSANVTGIPDGLPRLDFFFPNAEVIIKLEPDIIIASGHNPTGSGEDPFRLLSEMGIPVVYIPMRKSIDDIYKDITFVA

SEQ ID NO: 22377 - DNA, 549 bp, Unknown
  Obtained from environmental sample
  misc_feature (1)..(549): n is a, c, g, or t
gtgctttttgagattgctttggggatgaacctggtcaaaatacttccagagactgcgccctgtaaggacgatgaaccacgttttgttcttggcaagacaggatggtttctgctggaagatgaaatgaccaaagtgaattttaactttgccaatgatgtttgttataagggagcgtttgaacttaaacgctcaatagaggaaggaaaacctctgggacttgaggtttttggccgcggagggaaaaccatttacgaggttctttcgaccttgcccgaaaaggtaagagagagctggtttgcttttgatcatttttattcggatatagtttttgaagaagcccttcctgttgtatttttcaataacccaaaaaaaattatcgacataggcggaaataccgccaagtgggcaatttgctgctgccgccatgatccccatgtggaggtaaccattgtagaccttcccggtcagactcaagcagcggagctgataatcgcgcaagccggtttttcatacagaataaaaacccttggcttgcaatgttctgaataa

SEQ ID NO: 22378 - protein, 182 aa, Unknown
  Obtained from environmental sample
  misc_feature (1)..(182): Xaa is any amino acid
MLFEIALGMNLVKILPETAPCKDDEPRFVLGKTGWFLLEDEMTKVNFNFANDVCYKGAFELKRSIEEGKPLGLEVFGRGGKTIYEVLSTLPEKVRESWFAFDHFYSDIVFEEALPVVFFNNPKKIIDIGGNTAKWAICCCRHDPHVEVTIVDLPGQTQAAELIIAQAGFSYRIKTLGLQCSE

SEQ ID NO: 22379 - DNA, 621 bp, Unknown
  Obtained from environmental sample
  misc_feature (1)..(621): n is a, c, g, or t
atgggaaacggagcctttgtccgtggggattttgtttggacggggaaaagcccggaaccgagaggggacacattgtctcggccagttcagttgggaacacctggacgcgggcaggttccacgttgtccccataggagtcgcgcacaacggacgtttgggaggtttggggaaccccttttacaggctgacagacggagaagtgcccgaaaagggcgactgcccctttttgccgctggaaaggggcgccgaggcgttcagggcgcccgacgtggttttcaacgccatccacggcgccggcggggaagacggccagatactcggctatctggaactgctgaaaataccatgcacaggcgcgggccgccttggccttgcgttggcgatggacaagtggatggccaagcgcgtatgggaggccgagggtctgccagtggtgccgtaccgggcggtttcggaggaggcatggggcaggggggccaaggattttctcagccagtgtctttccctaggtctgcccctcttcgtcaaaccagccaacaccggctccagcattggcatagagaaggtcaaggaggcggacgctctatctgcggccatagaaaacgctttccgcttcgatag

SEQ ID NO: 22380 - protein, 206 aa, Unknown
  Obtained from environmental sample
  misc_feature (1)..(206): Xaa is any amino acid
MGNGAFVRGDFVWTGKSPEPRGDTLSRPVQLGTPGRGQVPRCPHRSRAQRTFGRFGEPLLQADRRRSARKGRLPLFAAGKGRRGVQGARRGFQRHPRRRRGRRPDTRLSGTAENTMHRRGPPWPCVGDGQVDGQARMGGRGSASGAVPGGFGGGMGQGGQGFSQPVSFPRSAPLRQTSQHRLQHWHREGQGGGRSICGHRKRFPLR

SEQ ID NO: 22381 - DNA, 579 bp, Unknown
  Obtained from environmental sample
  misc_feature (1)..(579): n is a, c, g, or t
ttgagggaatccccgtgggctgttaggaaaaccgataccgctattccagggaaagcggattatcaattttcggcgagcagcggtggaaagaaaaatactatcccgcttttttccgtaagctaccgtatggataaccgcccgcctgcagtacggggacggctttggccgcggcgtataacaggattgtttaatcagaaagtatattgggacagaactattggacaggcgattgcttacgaagaaactttccgtttaacttttgaaatgtccgacggtagaacaattgaattccgcggaaccgcgcaggtggaatttatagaagccgaagatttgaacagggaacaactggcggacgaaataaccggggaaattaaacgtcttgcgattcctgacgtttatgttaggaccgtagatgaaggcgtatccatcagtctggaagacattggcttttatcccgattccgccgacatgcttcccggcgaactgtcaaaacttgataaaattgccgaaattttaaaacgatatccggaaagggacattttagtcggaggtcacactgcccttgccggcacaagctaa

SEQ ID NO: 22382 - protein, 192 aa, Unknown
  Obtained from environmental sample
  misc_feature (1)..(192): Xaa is any amino acid
MRESPWAVRKTDTAIPGKADYQFSASSGGKKNTIPLFSVSYRMDNRPPAVRGRLWPRRITGLFNQKVYWDRTIGQAIAYEETFRLTFEMSDGRTIEFRGTAQVEFIEAEDLNREQLADEITGEIKRLAIPDVYVRTVDEGVSISLEDIGFYPDSADMLPGELSKLDKIAEILKRYPERDILVGGHTALAGTS

SEQ ID NO: 22383 - DNA, 771 bp, Unknown
  Obtained from environmental sample
  misc_feature (1)..(771): n is a, c, g, or t
ttgatgatagctggaatggacagatattaccaaatagcaagatgctttagagacgaagatttgcgcgcagaccgccagcccgaattcacgcagatagatttggaaatgtcttttgtaaatcaagacgatgttatggagcttttagatggttttgtaaaagaggttttggctcatatatgggaatttgagattggagaaattcctcgcataaaatatgcagatgcaatgctcacttatggctctgacaaaccggatttgcgttttgatttgccaatttttgatgtgagcgatattgcagcaaatgttgactttgctgtgtttaaaaatgccgttgcaaacaatggcgttgtgcgtgggcttgcggcaaaaggctgtgtggatttcactcgcaagcaaatagacgatttaaccgagtttgtcggtcgttatggttcaaagggcttggtgtggatgcgagttaaggataaccacgaagtggaaacacaggttgcaaaattctttacaaaagagcagttagaggcccttcgcaatgccattcaaggcaaaaccggggatatgcttttctttatcgctggttcagaaaaaattgctgcaactgcaatggggcatttgcgtttggagattgctcgcataaaaggtttaatggatccaaagctacgcaaattcgcttggataaccgagttcccaatgtttgaatacagcgaaacagataaacgctatatgtctatgcaccacccattcacaagccctctcccaaacacttggatatga

SEQ ID NO: 22384 - protein, 256 aa, Unknown
  Obtained from environmental sample
  DOMAIN (1)...(254): tRNA synthetases class II (D, K and N)
  misc_feature (1)..(256): Xaa is any amino acid
MMIAGMDRYYQIARCFRDEDLRADRQPEFTQIDLEMSFVNQDDVMELLDGFVKEVLAHIWEFEIGEIPRIKYADAMLTYGSDKPDLRFDLPIFDVSDIAANVDFAVFKNAVANNGVVRGLAAKGCVDFTRKQIDDLTEFVGRYGSKGLVWMRVKDNHEVETQVAKFFTKEQLEALRNAIQGKTGDMLFFIAGSEKIAATAMGHLRLEIARIKGLMDPKLRKFAWITEFPMFEYSETDKRYMSMHHPFTSPLPNTWI

SEQ ID NO: 22385 - DNA, 675 bp, Unknown
  Obtained from environmental sample
  misc_feature (1)..(675): n is a, c, g, or t
atgttgccgggaatcagcgctgtcgccttcgatctggacggaaccctctaccctaattacaggctgaacatgcggctgctgcctttcgcgttcaggcactggaggttccttctggcctttggcagggcaagaaatatcatccggcgcgagcaggcgcagtcgtccgcccttccaaacttttatgagcgccaggcgcagattacggccgatcagctcaaagaacggaatgaggaaatcagggaaaagatagaccgcctcatctaccggggctgggagcgtttttttttaaagataaaactgtttccccatgtaaaggaggttcttggagaactgagggcggcggggctgaaattggggctgctctccgacttcccgcccgagaccaagctggaataccttgggcttgcaagcgtctgggacacggtattatgcacggaaaatataggggcgcttaagccggccgtaaaaccttttgaagagctggcaaaagccctcgcgtgccaaccggaacagatactctatgtgggcaacaacagccgctacgatgttgagggagcaaaacaggcgggcatgaaagcggccctcctgaacaggggactccccgttataacggggattagagcggattttaccttccgcaactatcgccaattgcgtaactttatgttacaataa

SEQ ID NO: 22386 - protein, 224 aa, Unknown
  Obtained from environmental sample
  DOMAIN (5)...(199): haloacid dehalogenase-like hydrolase
  misc_feature (1)..(224): Xaa is any amino acid
MLPGISAVAFDLDGTLYPNYRLNMRLLPFAFRHWRFLLAFGRARNIIRREQAQSSALPNFYERQAQITADQLKERNEEIREKIDRLIYRGWERFFLKIKLFPHVKEVLGELRAAGLKLGLLSDFPPETKLEYLGLASVWDTVLCTENIGALKPAVKPFEELAKALACQPEQILYVGNNSRYDVEGAKQAGMKAALLNRGLPVITGIRADFTFRNYRQLRNFMLQ

SEQ ID NO: 22387 - DNA, 660 bp, Unknown
  Obtained from environmental sample
  misc_feature (1)..(660): n is a, c, g, or t
atgaatactgcattaatttttgctggtggttacggtgaaagaatgaattccaacgctatgcccaagcaatttttgcgagttcatgaaaaacccgtgcttatatacactctggaacattttgaaaatcacgatgaaatagataatatatgcgtggtgtgccttgccggctggataccaaagttaaaaaaaatgttaaaattatacgaaataacaaaagtaaagtggatagctaagggtggaagcaccgcacaagaatccgtattcaacggactatcggaaatatatgcaaatgttcccaaccaaaaagaaaccattgttttgattcatgacggagttagacccttgatagacggtgaattgatcacaaaatgcatagatggcgttaaaaaacatggatcggcagtaacaatagctccggtgaacgaaacaattataaacacaaatcaaaatgggaaagtagaaaccatagaagatataaaagaccgttccatacataaattcgcgagagctcctcaatgctttttcttagaagatatttatgcggctcataagaaaagcagagaaaatggaataaatggcattttagattcagcaactttaatgcagcaaaacggacaccctttgtttacaattgatggctccctcaaaaacattaaataa

SEQ ID NO: 22388 - protein, 219 aa, Unknown
  Obtained from environmental sample
  DOMAIN (3)...(219): Uncharacterized protein family UPF0007
  misc_feature (1)..(219): Xaa is any amino acid
MNTALIFAGGYGERMNSNAMPKQFLRVHEKPVLIYTLEHFENHDEIDNICVVCLAGWIPKLKKMLKLYEITKVKWIAKGGSTAQESVFNGLSEIYANVPNQKETIVLIHDGVRPLIDGELITKCIDGVKKHGSAVTIAPVNETIINTNQNGKVETIEDIKDRSIHKFARAPQCFFLEDIYAAHKKSRENGINGILDSATLMQQNGHPLFTIDGSLKNIK

SEQ ID NO: 22389 - DNA, 852 bp, Unknown
  Obtained from environmental sample
  misc_feature (1)..(852): n is a, c, g, or t
ttgccaccatttctgcaacacgatttaaattgggaaatgcttgcagatgcaatggaaaaagttggaaacgatggggttatcactcttgaagaatccaaaaccgcagacacaaccattgatgttgttgaaggaatgcaatttgaccgcggctacctaaccccgtattttgttactaacagcgaggcaatggaagttcagcttgaaaatccgagcattttgctctacgacaaaaaaatcagcacaatgaaagacttgctccccattttggagcaaatagcaaaatccggcaagtccctgctaatcatagccgaagacgttgatggcgaggctcttgcaactctaatcattaacaaaatgcgtggcaccttaaaggttgcagccgttaaagccccaggctttggcgaccgcagaaaagccatgctagaagacatagccattttaacaggcggtcagcttgttagcgaagaaaccggtgcaaagttagaggatgttcctctcagcgttcttggtcaagcaaaatctgtgaccatagacaaagacaataccactatagtagaaggcggtggaaaatctgctgacataaaggctcgcattgggcaaatcaaaaagcagatagaagacaccacaagcgactacgaccgtgaaaagttgcaggaacgcttggcaaaactctctggtggcgttgccgttattaaagttggcgcagataccgaagttgctatgaaagagaaaaaagaccgctttgacgatgctcttcacgcaacccgtgcagcaatagaagaaggcattgtcgccggtggggggagggcatttattcgcgccgcttctgcaatagattcctttgcattttga

SEQ ID NO: 22390 - protein, 283 aa, Unknown
  Obtained from environmental sample
  DOMAIN (1)...(282): TCP-1/cpn60 chaperonin family
  misc_feature (1)..(283): Xaa is any amino acid
MPPFLQHDLNWEMLADAMEKVGNDGVITLEESKTADTTIDVVEGMQFDRGYLTPYFVTNSEAMEVQLENPSILLYDKKISTMKDLLPILEQIAKSGKSLLIIAEDVDGEALATLIINKMRGTLKVAAVKAPGFGDRRKAMLEDIAILTGGQLVSEETGAKLEDVPLSVLGQAKSVTIDKDNTTIVEGGGKSADIKARIGQIKKQIEDTTSDYDREKLQERLAKLSGGVAVIKVGADTEVAMKEKKDRFDDALHATRAAIEEGIVAGGGRAFIRAASAIDSFAF

SEQ ID NO: 22391 - DNA, 399 bp, Unknown
  Obtained from environmental sample
  misc_feature (1)..(399): n is a, c, g, or t
atggaaatagaatctgttccttattcgctttccacccttcttaatgacgttattaccatgattcaggtaaaagtctcggagaaacccatcgtctttattgttgatgtggacgcttcccttcccaatatgcttaagggtgacgaagcgaggatacggcaggtactggtaaacctgctttccaacgcggttaaatacacccataaagggttggtccggctgacattgacataccatgtcgatccggtggacaacaatgtgattagactggtttatgaagtttcagattcgggcattggcataaaagaagaggatatacctactctgttcaattcatttacacgcctggacatgaaaaaaaacacagggcgtggaaggaactggtcttgggctcgcgattag

SEQ ID NO: 22392 - protein, 132 aa, Unknown
  Obtained from environmental sample
  DOMAIN (46)...(132): Histidine kinase-, DNA gyrase B-, and HSP90-like ATPase
  misc_feature (1)..(132): Xaa is any amino acid
MEIESVPYSLSTLLNDVITMIQVKVSEKPIVFIVDVDASLPNMLKGDEARIRQVLVNLLSNAVKYTHKGLVRLTLTYHVDPVDNNVIRLVYEVSDSGIGIKEEDIPTLFNSFTRLDMKKNTGRGRNWSWARD

SEQ ID NO: 22393 - DNA, 351 bp, Unknown
  Obtained from environmental sample
  misc_feature (1)..(351): n is a, c, g, or t
ttggttgataaaggaaggaaaaaattagtggatcaaggttttggccccccggggaagagaaaaaacaagttccggtccataccgggaattaaaatcgctccaaatgaggaatgcccaaagaagtggttggaaggctccattcacctgttccatgatcctgcggaaataaagactgccaaagaacaggctgaacaggccagcaaggcaaaatggatttttcttgcccagaccagtcatgaaatccgcacccccatgaataccgtgattggcatgagcggaacttgcccttcgcgcggataccctgccccaggtacaggagtacattggaagcatcaagcaggccgggcataa

SEQ ID NO: 22394 - protein, 116 aa, Unknown
  Obtained from environmental sample
  misc_feature (1)..(116): Xaa is any amino acid
MVDKGRKKLVDQGFGPPGKRKNKFRSIPGIKIAPNEECPKKWLEGSIHLFHDPAEIKTAKEQAEQASKAKWIFLAQTSHEIRTPMNTVIGMSGTCPSRGYPAPGTGVHWKHQAGRA

SEQ ID NO: 22395 - DNA, 399 bp, Unknown
  Obtained from environmental sample
  misc_feature (1)..(399): n is a, c, g, or t
atgcacgcctttgcccgaaagcgcgttcagcaccacgggcagggtggccgccagggttttgccttcgccggttttcatctcggcgatcttgccctcatgcagggccatgccgccgaccaactgcacgtcgaaatggcgcatgctcaagcggcggcgggaagtttcccgcaccagggcgaacacttcgggcaaaagatcgttcaggcggcggccttcttcatgctgcctgcggtactccgcaagccgcaggggcagttcggcatcctcaagcgcctgcatctgcgcttcaagatcgttgattttctgcacgatggggcggcatttcttcaaataccgctggttcttggagccgaagacttttttgaacagataggaaaacatggatgctccggtagctga

SEQ ID NO: 22396 - protein, 132 aa, Unknown
  Obtained from environmental sample
  misc_feature (1)..(132): Xaa is any amino acid
MHAFARKRVQHHGQGGRQGFAFAGFHLGDLALMQGHAADQLHVEMAHAQAAAGSFPHQGEHFGQKIVQAAAFFMLPAVLRKPQGQFGILKRLHLRFKIVDFLHDGAAFLQIPLVLGAEDFFEQIGKHGCSGS

SEQ ID NO: 22397 - DNA, 897 bp, Unknown
  Obtained from environmental sample
  misc_feature (1)..(897): n is a, c, g, or t
ttgaacgacgactgcgacgatccccaaatgctgaaggaaatggaaacagccctgtcccttagccagaaggaagatcattcggactttcgtccgttggactaccgtccgtcagactacagtccgttggacattcgtcagaacgaggaaaaaaataccgacaaggaaaacgaaggcctttccggctggatacacaatttcgcagcccaggtagccataaaaaaaggaaatcttgacgcggcggccaaacaccttgaaaaagccgctttagttttaggggatgtgcctgcggtacgcgtaaaccagggtgttttgttttaccttcaaggctcgctggataaagcccttgaaaccttgtccgtcgacaagaaggatgatccggaaggaatcatggcaaactgcgccgggaatctattggtcacctcgagccgttttgaggaagcggacgaaaagtaccgccaggcgctgagctgccaaagcgacaatgtcgagtacctttgcaatcgggcttcctgccttatggagataaagctttacggagaggcggatgatattctaaccagggctaaccaaaaagccccaaacccggtattgcttgaaatgataagctatgtgacagcaaaaaaaggtgattacccccgtgcggaacaggcttgcaatgccgcgcttagaattgatcccaaccacgctccgtcgcttatttcgcttggatggatatttgttgctcagggcaaaaacaaagaagcaattgacatactaagacgtctggacaaaatgaaccttaatgacagttccgccaaaaacacagaagaactccgctcccttttgccggaactcatctatatgaaaattgaatgtaccgtcttgcccaaggaactggatagttcaaaagaatgttag

SEQ ID NO: 22398 - protein, 298 aa, Unknown
  Obtained from environmental sample
  misc_feature (1)..(298): Xaa is any amino acid
MNDDCDDPQMLKEMETALSLSQKEDHSDFRPLDYRPSDYSPLDIRQNEEKNTDKENEGLSGWIHNFAAQVAIKKGNLDAAAKHLEKAALVLGDVPAVRVNQGVLFYLQGSLDKALETLSVDKKDDPEGIMANCAGNLLVTSSRFEEADEKYRQALSCQSDNVEYLCNRASCLMEIKLYGEADDILTRANQKAPNPVLLEMISYVTAKKGDYPRAEQACNAALRIDPNHAPSLISLGWIFVAQGKNKEAIDILRRLDKMNLNDSSAKNTEELRSLLPELIYMKIECTVLPKELDSSKEC

SEQ ID NO: 22399 - DNA, 396 bp, Unknown
  Obtained from environmental sample
  misc_feature (1)..(396): n is a, c, g, or t
gtgtccaaactaaatgacctaatcaaaggcatggcctccaaacaggtgggccgcatcaaggtgctagacgcatcgctggtggacgatgattctcccgaatcccaagagttcttggcggccctgcagggcgagaccagggccctaaaggaagaggaagtcgtcaaaggcgtggtggtagaaataaggggcaaggacgtcattgtagatattggctacaaaggctctggcaccatcaaccttgacgagtttaccagccccgaaggcgggggagtccaagtcggggacgttgctgaggtgctggtcgtagcacttacaggatcacaggggcaacgtgcgcctgagccgcgacagggcagaaaaaatgaagatatgggacgaggtggaaaaggcatatag

SEQ ID NO: 22400 - protein, 131 aa, Unknown
  Obtained from environmental sample
  misc_feature (1)..(131): Xaa is any amino acid
MSKLNDLIKGMASKQVGRIKVLDASLVDDDSPESQEFLAALQGETRALKEEEVVKGVVVEIRGKDVIVDIGYKGSGTINLDEFTSPEGGGVQVGDVAEVLVVALTGSQGQRAPEPRQGRKNEDMGRGGKGI

SEQ ID NO: 22401 - DNA, 765 bp, Unknown
  Obtained from environmental sample
  misc_feature (1)..(765): n is a, c, g, or t
ttgctgagtgtggagtatttgagggatgttcagcccggtgaatttttgactataaacaaagacggtatgcattctgagtccttaattaaaaaagagaggaaatctcattgcatatttgaatttatatattttgcccgccccgatagcaaaatttttgagcagagcgccgacaaaattcgcagaaaaatgggaaaaaaattggcagaagaaagccccgttgacgcggatataataattccctgccccgacagttcaacaaccgccgcgctcggctatgcacaggaaagcggaatacaatttgagataggtcttttgagaaatcattatgttggcagaacttttatagacccttcccaaaatgttagggaacagaaagtaaaactgaaattcaacaccataaaaggtgtgcttaaagacaaaaaagtgtgcttggttgacgattccattgtgcgcggaacaactttgaaaatcatctgcaaaatgataagggaagcatgcgcaaaagaggttcatattcgcatcgcaagcccacccgtaaaattcccgtgttattttggaatggatttcccataccccgaagaattggcggctaatttccttgaaccaagcgaaatagctaaaatgctctacgtggaaagcctatgttatttgagcatccagggaatgtttgattgccccggtgcgcccaatgactttctgcgtgcttgctttggatggatttaccccgtaggatttctgctgatcccgcctaataaccgtttctga

SEQ ID NO: 22402 - protein, 254 aa, Unknown
  Obtained from environmental sample
  DOMAIN (48)...(190): Phosphoribosyl transferase domain
  misc_feature (1)..(254): Xaa is any amino acid
MLSVEYLRDVQPGEFLTINKDGMHSESLIKKERKSHCIFEFIYFARPDSKIFEQSADKIRRKMGKKLAEESPVDADIIIPCPDSSTTAALGYAQESGIQFEIGLLRNHYVGRTFIDPSQNVREQKVKLKFNTIKGVLKDKKVCLVDDSIVRGTTLKIICKMIREACAKEVHIRIASPPVKFPCYFGMDFPYPEELAANFLEPSEIAKMLYVESLCYLSIQGMFDCPGAPNDFLRACFGWIYPVGFLLIPPNNRF

SEQ ID NO: 22403 - DNA, 633 bp, Unknown
  Obtained from environmental sample
  misc_feature (1)..(633): n is a, c, g, or t
atggatacctatgccatgtgcgcggacctttctaccgaaatactggacgcgataatttccagcaacggcgcaacttatgtggacaaagaccccagaaccggcaaatttgtcaacgccaccaatcggcccgaattcctggaagccctgcaatttgccatcaggctgaagagtgaaggcgtctcgaagcccaggccggacggaagcaactgggattggtacaaatccgaattcattgacggaagggttgcgatgcgggttgacgaatcgtacatcgctaacagtgattccgccgaattgcctaaaatgaaagacgactggggcatggttctgtttcccaagggaccgaaatcacctacctatcgcgtgtattcccgcgacaacctgatggtcatccccgctacttacaagcccaaggaagttgagcaaattctatgggcggtggcgttgtggtatactccgcccagtgacgattggaaatcaggacaatacaactggttccgtgatccccgcgccgttgatgaaaccctggtgcttgtccgcgatccgaaactcgccatgataaattatttttcctatttcaatggcctggaacgcggcgacttatcctgtgatatggggtggcatgaacggtaa

SEQ ID NO: 22404 - protein, 210 aa, Unknown
  Obtained from environmental sample
  misc_feature (1)..(210): Xaa is any amino acid
MDTYAMCADLSTEILDAIISSNGATYVDKDPRTGKFVNATNRPEFLEALQFAIRLKSEGVSKPRPDGSNWDWYKSEFIDGRVAMRVDESYIANSDSAELPKMKDDWGMVLFPKGPKSPTYRVYSRDNLMVIPATYKPKEVEQILWAVALWYTPPSDDWKSGQYNWFRDPRAVDETLVLVRDPKLAMINYFSYFNGLERGDLSCDMGWHER

SEQ ID NO: 22405 - DNA, 636 bp, Unknown
  Obtained from environmental sample
  misc_feature (1)..(636): n is a, c, g, or t
atgaaaattatttcatggaatgtaaacggcatccgctctgtggaaaaaaaaggattttttgaatggctaaaaaaagagaacgccgatatagtctgccttaacgaaaccaaagccgacccagggcagttatctccgatttttataaaccccgcaggaacagattattcttcatactgggcaagcgcgaaaaaaaagggatattcgggagtagctatttacacaaaaataaaacctgataacgtgcgttttttgggcaagcctgagtttgacgaagaagggcgcgtcctaatcgccgattataaagattttactttaatagcggcatattttcccaattctcaggacgagggcaggcggctggattacaaacttaaatttaacaacgcgattttaaaattgtgcaactctattgtaaaagacggaaggcattttttgctctgcggcgattataacgtggcgcacactccaatcgatcttgcgcgcccaaaagcaaacgaaaaaaatccgggctacctgccggaagaaagggcgtggatggataaatttcttgcggcggggcatatcgacaccttccggcattttcatccgggggaaatcggccaagacaaaatgtggtcggacaaaaagcaggtgtga

SEQ ID NO: 22406 - protein, 211 aa, Unknown
  Obtained from environmental sample
  DOMAIN (1)...(211): Endonuclease/Exonuclease/phosphatase family
  misc_feature (1)..(211): Xaa is any amino acid
MKIISWNVNGIRSVEKKGFFEWLKKENADIVCLNETKADPGQLSPIFINPAGTDYSSYWASAKKKGYSGVAIYTKIKPDNVRFLGKPEFDEEGRVLIADYKDFTLIAAYFPNSQDEGRRLDYKLKFNNAILKLCNSIVKDGRHFLLCGDYNVAHTPIDLARPKANEKNPGYLPEERAWMDKFLAAGHIDTFRHFHPGEIGQDKMWSDKKQV

SEQ ID NO: 22407 - DNA, 333 bp, Unknown
  Obtained from environmental sample
  misc_feature (1)..(333): n is a, c, g, or t
ttgcaggggcaaagagccccatattggaattcgatagacctccttaacaactggtacatacgccgatcccgcagaagtttctggagggcggtcgaaaaagacggaaatgacattgacaaggccgaagcctacggaaccctgtacgaggttcttaaaaaactgatcaccgtggcggccccctttatgcctttcactaaggacgcgatttggcaaaacctctgcaaagactctgatcatgtgtcggtgcatctggcggacttccccctgcccaaggaaagccggcgagaccgttcactggaattccgcatggcatcagtgcagagggccgtctag

SEQ ID NO: 22408 - protein, 110 aa, Unknown
  Obtained from environmental sample
  DOMAIN (5)...(106): Anticodon-binding domain
  misc_feature (1)..(110): Xaa is any amino acid
MQGQRAPYWNSIDLLNNWYIRRSRRSFWRAVEKDGNDIDKAEAYGTLYEVLKKLITVAAPFMPFTKDAIWQNLCKDSDHVSVHLADFPLPKESRRDRSLEFRMASVQRAV

SEQ ID NO: 22409 - DNA, 642 bp, Unknown
  Obtained from environmental sample
  misc_feature (1)..(642): n is a, c, g, or t
atgataacggcaacggtacggattattacgaattttcggctttgccgggtcggattccgcaaccacgttggcggcggttacggtcaagccggtaacatcggatattggtggacgaccgaaaaagcaggaaccggcgacaatttccacattcgaatgatggcttttaataaaaaaagcgtggaccaaaatagccgacacaaagacgacggagtttcggttcgttgcgtcaagggcgtgcgattcaatgcaacggtttcaagttcggggacgggcgcgacaggcagcggcggttacgcggccggggcgaaagtcagcatacacgcgggaacgccgccgacaggcatgcaattcaaaaactggacctcatcaaacaccggcgtaaccttttccgaagctcgcgcaccgattaccacgtttaccatgcctgcggcggcggtaacggtgacggcgaactttgaggcggcgcccgtatcctcgcccacatacgcggtaactgtttcaagcataggtgaagaggcttcatgtggcggctactttgcggctggtgcgatagtcggtataaactcgggactgccgccggcaggaatgcatttcaaaaattggaacaccgctagcgggtggcgtatcgcttgccgacgttaa

SEQ ID NO: 22410 - protein, 213 aa, Unknown
  Obtained from environmental sample
  misc_feature (1)..(213): Xaa is any amino acid
MITATVRIITNFRLCRVGFRNHVGGGYGQAGNIGYWWTTEKAGTGDNFHIRMMAFNKKSVDQNSRHKDDGVSVRCVKGVRFNATVSSSGTGATGSGGYAAGAKVSIHAGTPPTGMQFKNWTSSNTGVTFSEARAPITTFTMPAAAVTVTANFEAAPVSSPTYAVTVSSIGEEASCGGYFAAGAIVGINSGLPPAGMHFKNWNTASGWRIACRR

SEQ ID NO: 22411 - DNA, 402 bp, Unknown
  Obtained from environmental sample
  misc_feature (1)..(402): n is a, c, g, or t
atgcccaaaaattaccttgccatagattacggagaaaggcgagtaggaatagcttacgccagcgagcttattggcatagcattcccaagagaaactatagacctaaaagaaaaaaatttgtggacagaactggaaaggctctcaaaagagagcaaaataaccgattttgtcctcggaatgccaattcacccaaacaaccacccagacagcaagcaaaaaacagtagaagcattcgccaccgaactgcgcaaaaaattcccaaaaatagaattgcacatacaagacgaatcatacagcacccaagaggcgttggctgttatggataataaaaaaaataaaaacaaaatcgacaaagcagcagcagccataatcctgcaaagatttttagaaggaaatttctaa

SEQ ID NO: 22412 - protein, 133 aa, Unknown
  Obtained from environmental sample
  DOMAIN (3)...(131): Uncharacterised protein family (UPF0081)
  misc_feature (1)..(133): Xaa is any amino acid
MPKNYLAIDYGERRVGIAYASELIGIAFPRETIDLKEKNLWTELERLSKESKITDFVLGMPIHPNNHPDSKQKTVEAFATELRKKFPKIELHIQDESYSTQEALAVMDNKKNKNKIDKAAAAIILQRFLEGNF

SEQ ID NO: 22413 - DNA, 729 bp, Unknown
  Obtained from environmental sample
  misc_feature (1)..(729): n is a, c, g, or t
ttggaaaaaatctgcttgcccttgcaaaacaagataaaaaaaataataggcatttctgccgccatgctggatggttgcggattaagcatgttaaaagaagatcctgaaacctcagatagaatttttgatgttggcatagcggaagaacacgcggtgacatttgccgccggacttgcttgcgagggttttacacctattgtggctatatattccacattcctgcaaagagcctacgaccaaataatacacgatgttgcgcttcaaaatttgcccgttgtttttattttagacagagccggcttggttggctcagacggaccaactcaccacggagccttggatttgtcttatttgcgcacgattcccaatatggttattatggcaccctcagatgaaaacgaaatgcgcaatatgatttacacggcaactcaacataaagatggacccattgcgcttcgctaccccagagctgttacctacacaaacgagattcgcacggaattttcggcacttccaattggcaagtttcgcgttgttgccaaaggaaacaaagttttgattattggcgttggatttttgcttgccaaatgccttgatgccgccggggttttggaaaaaaacgggcataaaagccacaataatagatgcgcgttttgtaaagccgctcgatgtaaaagcatatcgtgctcttttcaaggagcaccaagttgttgcaactgtagaagataa

SEQ ID NO: 22414 - protein, 242 aa, Unknown
  Obtained from environmental sample
  DOMAIN (8)...(161): Transketolase, pyridine binding domain
  misc_feature (1)..(242): Xaa is any amino acid
MEKICLPLQNKIKKIIGISAAMLDGCGLSMLKEDPETSDRIFDVGIAEEHAVTFAAGLACEGFTPIVAIYSTFLQRAYDQIIHDVALQNLPVVFILDRAGLVGSDGPTHHGALDLSYLRTIPNMVIMAPSDENEMRNMIYTATQHKDGPIALRYPRAVTYTNEIRTEFSALPIGKFRVVAKGNKVLIIGVGFLLAKCLDAAGVLEKNGHKSHNNRCAFCKAARCKSISCSFQGAPSCCNCRR

SEQ ID NO: 22415 - DNA, 390 bp, Unknown
  Obtained from environmental sample
  misc_feature (1)..(390): n is a, c, g, or t
atggggcgcaaaaattttgaaagcattggcagagccttgccggagagaaccaatataattctaacccgaaatcaaaatttcaaagttccagaaggctgtgtgaaagttcactcgctaaaagcagcttttgagattgcagaaaaaaccgctacagatgaatgttttgttataggtggctcggaaatatacaaagaagccctgcccttttgccaaaaattatacataacaagggtgcacggtatttttgaaggcgatgcttttatgcccgaatttgaaaaagaattccgcagagttagctgcgaaacccatttcaaagatgaaaaaaacaaatgggattttgattttgaggttttagagcgccctaccccttctaaattcaaccaagtttga

SEQ ID NO: 22416 - protein, 129 aa, Unknown
  Obtained from environmental sample
  DOMAIN (1)...(120): Dihydrofolate reductase
  misc_feature (1)..(129): Xaa is any amino acid
MGRKNFESIGRALPERTNIILTRNQNFKVPEGCVKVHSLKAAFEIAEKTATDECFVIGGSEIYKEALPFCQKLYITRVHGIFEGDAFMPEFEKEFRRVSCETHFKDEKNKWDFDFEVLERPTPSKFNQV

SEQ ID NO: 22417 - DNA, 720 bp, Unknown
  Obtained from environmental sample
  misc_feature (1)..(720): n is a, c, g, or t
gtgataagcaaagtacaggaaaccattaacaaagagaaaaaaaacagttttgtttttgaccttataatctgcgatgaggcgcaccggacaacaggcgtagccctttcggaagatgataaatcatcgtttgtaaaagtccatgataataattttataaaaagtaaaaaacgtatctatatgacagccactccgagaatttacagcgcggacgcaaagaaaaaagcccaggaagccacagccgaaatttgctcaatggacgatattgcgttgtacggcgaagaaatgcaccgtataggtttcggccaagcggtaggagaaggattgttatccgattacaaagtcattgttctgacagtagaagaaaaccaattatccgataaaattaaaaaatctattgataacaagaaagataaaaacaaggagatagatactgaaaatacattaaaaatcataggctgtataaacgccctgtctaaaaaatcgctgacggacaaagaattatttgaaggttcagaccccgcgccaatgaaaagcgccgtcgctttctgccaaagcatagcagtatccaaagccaccgcggaggcttttaacttatgccgggacgcttactttgaaaccctaaccgaaaaacaacgccgtgaattagaagttgttgaggccgctcatggtaacggcactatgggcgctccaaacagggaaccaaaaactttactgggttaa

SEQ ID NO: 22418 - protein, 239 aa, Unknown
  Obtained from environmental sample
  misc_feature (1)..(239): Xaa is any amino acid
MISKVQETINKEKKNSFVFDLIICDEAHRTTGVALSEDDKSSFVKVHDNNFIKSKKRIYMTATPRIYSADAKKKAQEATAEICSMDDIALYGEEMHRIGFGQAVGEGLLSDYKVIVLTVEENQLSDKIKKSIDNKKDKNKEIDTENTLKIIGCINALSKKSLTDKELFEGSDPAPMKSAVAFCQSIAVSKATAEAFNLCRDAYFETLTEKQRRELEVVEAAHGNGTMGAPNREPKTLLG

SEQ ID NO: 22419 - DNA, 348 bp, Unknown
  Obtained from environmental sample
  misc_feature (1)..(348): n is a, c, g, or t
gtgcaggaagcttttgaagaagtaaacaaggcgatgcaagaccttgaacggcttatcaaccaaggacagcaagtttacaacgaggaaattcccaaagcaagaggcgaggcggaaaagacgattcaaatcgctcaaggttacgcgacagaacgcgtaaacaaagcaaacggcgatgttgcgcggtttaattccgtttacgaagaataccgccgcgctcccgaagttacgcgccagcggctttactatgaaatgatcgaagaagtttttaaagacgaaaaaaatatgacggttatcgaccgcaatttgcaaaacttcctgcctcttatgaacatgggaggtaacagataa

SEQ ID NO: 22420 - protein, 115 aa, Unknown
  Obtained from environmental sample
  misc_feature (1)..(115): Xaa is any amino acid
MQEAFEEVNKAMQDLERLINQGQQVYNEEIPKARGEAEKTIQIAQGYATERVNKANGDVARFNSVYEEYRRAPEVTRQRLYYEMIEEVFKDEKNMTVIDRNLQNFLPLMNMGGNR

SEQ ID NO: 22421 - DNA, 837 bp, Unknown
  Obtained from environmental sample
  misc_feature (1)..(837): n is a, c, g, or t
atggacagcatgaaaggagagatgcaaaatatcggaaaagtcaaccagctgcatatttttgacaatccggaagtaccctatgtccccccgccttatcctgaatctaaaaaactctacatagttgacattctaccctttgaacctcatgacggtttcacacaggcggatgctgatggcgtttcgagcttgtttgcccggtatttaggtgcagtctggggaataatgataccggaacgtggtaccatttatgaagcgtcgaacgtgaactgcgttatctccggcagtataggcaaactttcagagcaaatattaataagcatcaaaatgattgaaccaaacctgaacgaggagttaacaagtcaattaatagtagacagcctaaccggccttttgacgcccgtacaggcttatgttgaagaactcgttcctactctgccgggatcgtgcggttactatgctgtaggggatactggtcccggaggcggcactgtgttttattcgttctacgggcattacatggaagcaaagggtgaaattggcgtctattcctgggataacgcgttggcgcttgcaaaaaacaacagggcaggtggcttttccgactggttaatacctactgcatacgaactaaacatgatataccagaaccttaaaataaaaaatccgggcagttttttagacgattactactggtcttcttctcttgcgcatgaatatggttacatttacgcctgggaacaaaattttggcaacgggcttaaagatttattttgcttcttatacaagagtcagcaatgtagttcttataccgcattttacttgtggcaaataaactaa

SEQ ID NO: 22422 - protein, 278 aa, Unknown
  Obtained from environmental sample
  misc_feature (1)..(278): Xaa is any amino acid
MDSMKGEMQNIGKVNQLHIFDNPEVPYVPPPYPESKKLYIVDILPFEPHDGFTQADADGVSSLFARYLGAVWGIMIPERGTIYEASNVNCVISGSIGKLSEQILISIKMIEPNLNEELTSQLIVDSLTGLLTPVQAYVEELVPTLPGSCGYYAVGDTGPGGGTVFYSFYGHYMEAKGEIGVYSWDNALALAKNNRAGGFSDWLIPTAYELNMIYQNLKIKNPGSFLDDYYWSSSLAHEYGYIYAWEQNFGNGLKDLFCFLYKSQQCSSYTAFYLWQIN

SEQ ID NO: 22423 - DNA, 534 bp, Unknown
  Obtained from environmental sample
  misc_feature (1)..(534): n is a, c, g, or t
ttggacgattattacaagctactcggggtaaagccgggagcgagcgtggcggaaattataaaagccttccgtaagaaggcaaaaagacttcacccggatattgcaggcgcgtcccattccggggtaatgcggaaattaatcgcggcttatgaagcgttatctgatttaagcaggcgttttaattatgacagggcatattcttcttacgccaaaaaaaccggatttgattaccgcacatggctgaatgaacaggaaaaacctgaatataaagcaaaattaattttttatgagcttttacatcttcaggaagataaggcaatcgagatttggagaaaatacggcggacttgattttcaactggaaaaacacatggaaagggaagattggatggattgccagtacatacttgcggaagaattggacaggagacactttagttttgaagcctttaaactgctcgcagtcattcttgacgaagaacaccgcaaaccatactttaatcattttaccattgatataaaagaattatgttaa

SEQ ID NO: 22424 - protein, 177 aa, Unknown
  Obtained from environmental sample
  DOMAIN (3)...(63): DnaJ domain
  misc_feature (1)..(177): Xaa is any amino acid
MDDYYKLLGVKPGASVAEIIKAFRKKAKRLHPDIAGASHSGVMRKLIAAYEALSDLSRRFNYDRAYSSYAKKTGFDYRTWLNEQEKPEYKAKLIFYELLHLQEDKAIEIWRKYGGLDFQLEKHMEREDWMDCQYILAEELDRRHFSFEAFKLLAVILDEEHRKPYFNHFTIDIKELC

SEQ ID NO: 22425 - DNA, 657 bp, Unknown
  Obtained from environmental sample
  misc_feature (1)..(657): n is a, c, g, or t
gtgctcattgaggtgggagtaagcctcttccactacgaaaaaagcgggagggggttcagtttctccgcggcggagaaggtggacatgaggatagacacttcgaaaggtttttcggcggcggaaattttagcgcaaagaaccgagaaggaaattgccgatattctttataagaacgccggcgagcgatactcgcggcgtattgcgaaagcgatagtgcaggggcggcggaagggggcaatctccactgccgcggatctttcggaactgataatgcgggcggtaccggtctcgtacaggcatggcccgatacacccggcgacaagaacctttatggctctgcgtgtcgcggtaaacggggagttggaaaagcttcccggactccttgaaggcgcgttcaatgttttgaagcccgggggggtaatgggcgtaatcagcttccaatcactggaagacagggtggtcaagaatttcttcaaatcgaagaataagtcttgcacttgcccgccggaacaggcagtttgcaaatgctccggtctgcggtcggtaaatattctgaccccaaagggcgtgaccgcggacgcggatgaaattaaacgtatcccgccttcgcggagcgccaggctgagggttgctgaaaaaacagaaggagtccagtaa

SEQ ID NO: 22426 - protein, 218 aa, Unknown
  Obtained from environmental sample
  DOMAIN (1)...(214): MraW methylase family
  misc_feature (1)..(218): Xaa is any amino acid
MLIEVGVSLFHYEKSGRGFSFSAAEKVDMRIDTSKGFSAAEILAQRTEKEIADILYKNAGERYSRRIAKAIVQGRRKGAISTAADLSELIMRAVPVSYRHGPIHPATRTFMALRVAVNGELEKLPGLLEGAFNVLKPGGVMGVISFQSLEDRVVKNFFKSKNKSCTCPPEQAVCKCSGLRSVNILTPKGVTADADEIKRIPPSRSARLRVAEKTEGVQ

SEQ ID NO: 22427 - DNA, 651 bp, Unknown
  Obtained from environmental sample
  misc_feature (1)..(651): n is a, c, g, or t
gtggctttttatctgcaattgcatatgcttttgaccggccttcgaggttggcgccccagcatttttattctcatggccagtttattaggaatcgccatagtgctggattttatcaagcgggcgctttcgctgcagcaagttccgcctaaccaggtgatgatgggaattgccctcttcatgacgatttttattatgtggccgacttttgtaacgatctacgaaaattctttcagacccctggcagccggggaactaagcgtaggcggagcttacagggaagccgaagcccctttaagaatttttatgtacagccagatgcagggaagcaagaataacagtaccgagaatatccggctttttatggccatgcgcggactggacaggcccgatactctggcggatgtgccgacctacgtaaatattccggcttttatcctgaacgaactgaccattgcctttaaaataggaatatttctttttattccctttatagtaattgacatggtggtggccagcgccctcatgtctatgggcatgatcatgctgccccctgtgatgatctccatgccgtttaaactgattctctttattctgatagacgggtgggggcttttaacgaatcaactggttcaatcttttttacagaggtga

SEQ ID NO: 22428 - protein, 216 aa, Unknown
  Obtained from environmental sample
  DOMAIN (11)...(210): FliP family
  misc_feature (1)..(216): Xaa is any amino acid
MAFYLQLHMLLTGLRGWRPSIFILMASLLGIAIVLDFIKRALSLQQVPPNQVMMGIALFMTIFIMWPTFVTIYENSFRPLAAGELSVGGAYREAEAPLRIFMYSQMQGSKNNSTENIRLFMAMRGLDRPDTLADVPTYVNIPAFILNELTIAFKIGIFLFIPFIVIDMVVASALMSMGMIMLPPVMISMPFKLILFILIDGWGLLTNQLVQSFLQR

SEQ ID NO: 22429 - DNA, 873 bp, Unknown
  Obtained from environmental sample
  misc_feature (1)..(873): n is a, c, g, or t
gtggaacgtatgatatggtttatattgataataacggtttgccggaggtttgcattgatttcacaaaatgtctcattaaaaaaatacagcacctttaaaattggcggccctgcaaaattttttgctgaacctaaatccatcgctgaaattagggagttgttgatgttttgcaaaaaaaacaacgaaaaatttttcattttgggcaatggaagcaatatcctttttagcgacaatggttacgatggcttggttattaaaatagggaaaaatttagaagctggaaaatccctgcacgatgttattcaaactgctgcaaacaaaggcttaggcggaatagaaaaactggaaggcattccgggaaccattggaggcgcaatttttatgaatgccggtgcgcacggacagcaaatttctgattgcataaaaaacgttgtttccattacaacttatggtggaatagttacgaggacaaatgaagaatgtaaattttcttatagaaacagcgtattcagaatgttagacgaaattatcgtctctgtagaatttgattttactccaatgccaaaagaagctataaaaagcaacagaaaagaggttttgacttggcggcacgaaaagcaacctttaaaatatccaaatgcgggttccgtattcaaaaatccaaccagcaatttgccactcacggatagcaatttatctgcgggctatttgatagattcttgcggacttaaagggtacagggtaggggatgcagaggtttctgagcttcacgcgaattttattgtgaataggggaggtgcaacagcaagcgatgtaaaggcacttatggagaaaatagttcaagaggtgaaaaaaaaacacggcattggctga

SEQ ID NO: 22430 - protein, 290 aa, Unknown
  Obtained from environmental sample
  DOMAIN (38)...(158): FAD binding domain
  misc_feature (1)..(290): Xaa is any amino acid
MERMIWFILIITVCRRFALISQNVSLKKYSTFKIGGPAKFFAEPKSIAEIRELLMFCKKNNEKFFILGNGSNILFSDNGYDGLVIKIGKNLEAGKSLHDVIQTAANKGLGGIEKLEGIPGTIGGAIFMNAGAHGQQISDCIKNVVSITTYGGIVTRTNEECKFSYRNSVFRMLDEIIVSVEFDFTPMPKEAIKSNRKEVLTWRHEKQPLKYPNAGSVFKNPTSNLPLTDSNLSAGYLIDSCGLKGYRVGDAEVSELHANFIVNRGGATASDVKALMEKIVQEVKKKHGIG

SEQ ID NO: 22431 - DNA, 951 bp, Unknown
  Obtained from environmental sample
  misc_feature (1)..(951): n is a, c, g, or t
atgaacgtacgccttttgggttcttccccggaaacgattgacatggcggaagacaggcgcattttcaaggagaccatgcagagcatcggccagcctgtgatctcttcggcaatcgcgaacgacacagacactgcgcttaagttcgcgggcgaaatcggctacccgctaatcgtgcgcccggctttcacgctgggcggttcgggtggcggcatcgcagctgatgagagcgcccttcgcgatatcgccgcgaacggcctttccatttcgccgataaaccagattctggtggagagatcggtcgccgggtggaaggaaatcgaatacgaagttatgcgcgaccgcaatgggaacgtgattacagtctgctctatggaaaacttcgaccctgtgggcatacacaccggcgacagcatcgtaatcgcgccagccgtcacgctggcagacaaggagtaccaaatgctgcgccttgccgctttggatattatccgcgccctcggcgtcgaaggcggctgcaacgtccagttcgctcttcacccccacagctttgaatacgcggtaatcgaagtaaacccgcgcgtttcgcgctcttcggcgctggcaagcaaggcgaccggctacccaatagcgaaagtcgcgaccaaaattgccatcggctacaccctggacgaaataataaacgcggtcaccggcagcacgttcgcagcgtttgagcccacgattgactatgttgcggttaaattcccaaaatggccatttgacaaattcgtttacgctcagaaggatcttggcactcagatgaaagcgaccggcgaggtaatggcgctcgctgatactttcgaggaaacgcttttaaaagcgtgcgcggcgcggaaatcggccttaacagccttgacctgcccaggctgtcggcaaagacggacgaagaaatacccgcccttctcgtaccgttaa

SEQ ID NO: 22432 - protein, 316 aa, Unknown
  Obtained from environmental sample
  DOMAIN (18)...(217): D-ala D-ala ligase C-terminus
  misc_feature (1)..(316): Xaa is any amino acid
MNVRLLGSSPETIDMAEDRRIFKETMQSIGQPVISSAIANDTDTALKFAGEIGYPLIVRPAFTLGGSGGGIAADESALRDIAANGLSISPINQILVERSVAGWKEIEYEVMRDRNGNVITVCSMENFDPVGIHTGDSIVIAPAVTLADKEYQMLRLAALDIIRALGVEGGCNVQFALHPHSFEYAVIEVNPRVSRSSALASKATGYPIAKVATKIAIGYTLDEIINAVTGSTFAAFEPTIDYVAVKFPKWPFDKFVYAQKDLGTQMKATGEVMALADTFEETLLKACAARKSALTALTCPGCRQRRTKKYPPFSYR

SEQ ID NO: 22433 - DNA, 357 bp, Unknown
  Obtained from environmental sample
  misc_feature (1)..(357): n is a, c, g, or t
ttgcagccgccttcgacgccgagggcgcggataatatccaaagcggcaaggcgcagcatttggtactccttgtctgccagcgtgacggctggcgcgattacgatgctgtcgccggtgtgtatgcccacagggtcgaagttttccatagagcagactgtaatcacgttcccattgcggtcgcgcataacttcgtattcgatttccttccacccggcgaccgatctctccaccagaatctggtttatcggcgaaatggaaaggccgttcgcggcgatatcgcgaagggcgctctcatcagctgcgatgccgccacccgaaccgcccagcgtgaaagccgggcgcacgattagcgggtag

SEQ ID NO: 22434 - protein, 118 aa, Unknown
  Obtained from environmental sample
  misc_feature (1)..(118): Xaa is any amino acid
MQPPSTPRARIISKAARRSIWYSLSASVTAGAITMLSPVCMPTGSKFSIEQTVITFPLRSRITSYSISFHPATDLSTRIWFIGEMERPFAAISRRALSSAAMPPPEPPSVKAGRTISG

SEQ ID NO: 22435 - DNA, 786 bp, Unknown
  Obtained from environmental sample
  misc_feature (1)..(786): n is a, c, g, or t
atgttcaagagcaaacaagattttacagatgcttttagagattaccctaggggcactgccggtgcgaaaaacgcgaagctctgctacgatatgcctttcaagcaagacacacgaagcggaagtttttattttgatagcgattcaatgacgaacaataatggtaggcttgttggaggttttttcccacagattttggatgacccaacaatgcgcaatgcggctgttgtggatggtttctccaattacaccgactgcccaacctgcgcaaacaagagaaaggcagagagttttgcgccgatctaccccaccaccgctggagataacgctgtaaatccttggtgctttaatagagggtttgcgactggaaccaacaaaacttgcaacctccaaacttgtcaagcggcaaatcccaatgccgatatccaagcctgtatcaatagctgttgcggaactgcttacgctgcgggagcttttaaggacggcgataatccaagcaatgtttgggattggggtggaagaaataacgtacagtggtatttatggggttccacacaaatgaagggaagcgaatctggcacagccaatgagcatttctgctttgaaagccatgcggaatttttctatgaccccgatcaggaattcctattcagaggtgatgatgatatttgggtttatataaacaaccaacttgtcatagatttggggggtacccatttggcagctccgggttcagtgagactgaaagaccctagaccagcgctgaagaaggcaaactttacccaatag

SEQ ID NO: 22436 - protein, 261 aa, Unknown
  Obtained from environmental sample
  misc_feature (1)..(261): Xaa is any amino acid
MFKSKQDFTDAFRDYPRGTAGAKNAKLCYDMPFKQDTRSGSFYFDSDSMTNNNGRLVGGFFPQILDDPTMRNAAVVDGFSNYTDCPTCANKRKAESFAPIYPTTAGDNAVNPWCFNRGFATGTNKTCNLQTCQAANPNADIQACINSCCGTAYAAGAFKDGDNPSNVWDWGGRNNVQWYLWGSTQMKGSESGTANEHFCFESHAEFFYDPDQEFLFRGDDDIWVYINNQLVIDLGGTHLAAPGSVRLKDPRPALKKANFTQ

SEQ ID NO: 22437 - DNA, 525 bp, Unknown
  Obtained from environmental sample
  misc_feature (1)..(525): n is a, c, g, or t
atgttctatccggaagtcatagatccggacacgggcgatcctgttcctgacggcgagaagggagaattggtattcacgaccattaccagggagggaaccccgctcctgcgttaccgcacacgggacatcacttaccttatccgggagccgtgtacctgcgggcgcagcaccgtgcgcatgcaccggctctttggccgcactgatgatatgcttatcatccggggggtaaatgtattcccaagccagattgaaaacgccctgattgagattgagggagtcgaaccccagtacctgatcgtagtcagcaggggcaaggatcatctggacgaactggaactgcaggtagaagttaaaatggaattatttaccgatgaggtaaagaatcttgaaaaattgcgggaccgtattgaacatgtgatgaagtcaaaactgcagatatcggttagagtaaaactggtggaaccaaaaaccattgaaaggtcaattggcaaagccaaaagagttattgataagaggagtatataa

SEQ ID NO: 22438 - protein, 174 aa, Unknown
  Obtained from environmental sample
  misc_feature (1)..(174): Xaa is any amino acid
MFYPEVIDPDTGDPVPDGEKGELVFTTITREGTPLLRYRTRDITYLIREPCTCGRSTVRMHRLFGRTDDMLIIRGVNVFPSQIENALIEIEGVEPQYLIVVSRGKDHLDELELQVEVKMELFTDEVKNLEKLRDRIEHVMKSKLQISVRVKLVEPKTIERSIGKAKRVIDKRSI

SEQ ID NO: 22439 - DNA, 327 bp, Unknown
  Obtained from environmental sample
  misc_feature (1)..(327): n is a, c, g, or t
ttgattaccccgggtttgtcccgtggcctcgcaaaaatatcgcctacgggacaaaccgtagaacgctgggaattgtactgcaacggcatagaacttgcgaattgctattcggaagagaatgatccgcaagccgtaaaggaattttttataagcgaagaagcggaaaaaaacaaaaccgccgttgtaaaacacaatatagatcatgattattggaaaatatttgaaaaattcccgcgctgttccggcgtagcgataggactagacaggctgattatggcacttaccggaaaaacaactatagatggggtattgccgtttattgtttaa

SEQ ID NO: 22440 - protein, 108 aa, Unknown
  Obtained from environmental sample
  misc_feature (1)..(108): Xaa is any amino acid
MITPGLSRGLAKISPTGQTVERWELYCNGIELANCYSEENDPQAVKEFFISEEAEKNKTAVVKHNIDHDYWKIFEKFPRCSGVAIGLDRLIMALTGKTTIDGVLPFIV

SEQ ID NO: 22441 - DNA, 708 bp, Unknown
  Obtained from environmental sample
  misc_feature (1)..(708): n is a, c, g, or t
gtggatctcccccggactgcccgaattcaattgcggattggggtagataaagctaactggctggaaagcctgctaagaggtattgatattcccgcggatataatttccaattacctttacaaatatcaatggaaacttggcgattatttttgtctagtcaccttcactgcttctaccgatttgaagcttcccattgtatcccttttggatatcaaacagataaacgacctttttcccgacgcgcttgtttccgttcgcgatgagtatgttgtcatgattatacggtgtaccgacaaaaagccgttacatggaaaaaagaaacagcagttggaccagtttctaaaaaaagacattatgctgcgctgtggcgtcagcatggcatttaataattttttgcatgtgcgctattattatacccccaccaaattcgccgcttctcaatgcaagactcctctaatcccggcaatctgtttatatgaagattatcagatggatcatgtgctgcaaaccttatctcttgaatctgatccgcgctgcttctgccatccctgcattctctcgctttgggaaagcggaggtaaatcttaccacgatatggttaactgcctgtatcattatttcttaaatcgaatgaatctcaacataacggcggaatctattcatgttcaccgcaatacccttatttacccgctgtacaattcatattaa

SEQ ID NO: 22442 - protein, 235 aa, Unknown
  Obtained from environmental sample
  misc_feature (1)..(235): Xaa is any amino acid
MDLPRTARIQLRIGVDKANWLESLLRGIDIPADIISNYLYKYQWKLGDYFCLVTFTASTDLKLPIVSLLDIKQINDLFPDALVSVRDEYVVMIIRCTDKKPLHGKKKQQLDQFLKKDIMLRCGVSMAFNNFLHVRYYYTPTKFAASQCKTPLIPAICLYEDYQMDHVLQTLSLESDPRCFCHPCILSLWESGGKSYHDMVNCLYHYFLNRMNLNITAESIHVHRNTLIYPLYNSY

SEQ ID NO: 22443 - DNA, 585 bp, Unknown
  Obtained from environmental sample
  misc_feature (1)..(585): n is a, c, g, or t
atgtcggtgaagaggaccacacgcaccagccctgtagaacaccttgccgctctcagggccatgcccaatttaaagggtactgcgccccagcggacgctgaggaaaccgcagaagcctgggctatggcaatggaaaggacagacggcccgactgtgcataactcttacaaggcagaacacggtcgtctttgccaaagaagatcccgaatggaaggacaagctccgcacaggcgcttatatcgtcaaaaagcccgccggacctgtcgatgcggagctaatcgccaccggttcagaagtaaacaaaaaaaaggcggctgcggagctttcaggaaaaaatgtgcaggtggtaaccatgattagccgggagctctttaaaaaaaaaagggaagctgtcagaaaaagcgttgttccctcaggcgtgcggacaatcgtctgcgaggccggcgtccgccagggctgggaacgctgggcaaaacccgaagacatcctgtccatcgaccgcttcggcgaatcgggtccctacgaaaaagcggcggaacaccttgggcttacctctaaggcgctggcggggattattggccaatga

SEQ ID NO: 22444 - protein, 194 aa, Unknown
  Obtained from environmental sample
  DOMAIN (78)...(188): Transketolase, C-terminal domain
  misc_feature (1)..(194): Xaa is any amino acid
MSVKRTTRTSPVEHLAALRAMPNLKGTAPQRTLRKPQKPGLWQWKGQTARLCITLTRQNTVVFAKEDPEWKDKLRTGAYIVKKPAGPVDAELIATGSEVNKKKAAAELSGKNVQVVTMISRELFKKKREAVRKSVVPSGVRTIVCEAGVRQGWERWAKPEDILSIDRFGESGPYEKAAEHLGLTSKALAGIIGQ

SEQ ID NO: 22445 - DNA, 306 bp, Unknown
  Obtained from environmental sample
  misc_feature (1)..(306): n is a, c, g, or t
atgctttacacacagggaaaaacggattgcaagccaaacgatgttggctatgatgaaaaacggcttgacgtactgaaccgccatcttcagcgcgtcattgatgacggcgagatacaatgcgcaacctactgtttatcacgaaaaggtaaggttttcgcgcacggcggaatagggaaaaaatcatttcgtaaggacgataatactccggttcagcctgattctgtgcggtacatagcctctattaccaaagtatttaccgccgtggcaataatgaaacttgtagaagacggcgtttacacggcttga

SEQ ID NO: 22446 - protein, 101 aa, Unknown
  Obtained from environmental sample
  misc_feature (1)..(101): Xaa is any amino acid
MLYTQGKTDCKPNDVGYDEKRLDVLNRHLQRVIDDGEIQCATYCLSRKGKVFAHGGIGKKSFRKDDNTPVQPDSVRYIASITKVFTAVAIMKLVEDGVYTA

SEQ ID NO: 22447 - DNA, 510 bp, Unknown
  Obtained from environmental sample
  misc_feature (1)..(510): n is a, c, g, or t
ttgatgccccaaatatacataaaactccacaagccttttggctacgaatgtagccacgcgcccacaagtcacgaatcggtattcgccttgtttcctcgcgaacttgtaaaacaaggcttgcagtgcgctggcaggttggattacgatactaccggattacttttgctttctaacgatgggcagttcatacacaaaatagagcatcctaaaaaaggatttgcaaaaacttatgtagcaacacttgcgcagtctttgaccgaagaaatgcaaaaaaaacttttggaaggagttgaactcagaggagaaaaaaagccttgttcggcagttgaattaaaactcatagcggataatacggcggaaataactataaaaggcgggctttatcaccaagttaagagaatgtttgccgctgttgggaacaaggttgtagctttgcataggagcaaaataggggagtatgggttaggtgaacttaaagcaggggagtggagttatttttctatcttctaa

SEQ ID NO: 22448 - protein, 169 aa, Unknown
  Obtained from environmental sample
  DOMAIN (5)...(137): RNA pseudouridylate synthase
  misc_feature (1)..(169): Xaa is any amino acid
MMPQIYIKLHKPFGYECSHAPTSHESVFALFPRELVKQGLQCAGRLDYDTTGLLLLSNDGQFIHKIEHPKKGFAKTYVATLAQSLTEEMQKKLLEGVELRGEKKPCSAVELKLIADNTAEITIKGGLYHQVKRMFAAVGNKVVALHRSKIGEYGLGELKAGEWSYFSIF

SEQ ID NO: 22449 - DNA, 612 bp, Unknown
  Obtained from environmental sample
  misc_feature (1)..(612): n is a, c, g, or t
atggaaattcttaatccgtacatcgacaagggcgtactcaaggttgttggtccctatccgaagacttccaaggataaagctaattacatgcgtattgctaccgaaggttggtggcccaatgtcgccaaagccagaatggaaggactccttatcaacgatgccgcaaacgtaacgctggacgcggtgctttctccaaatgacaccattgctcgttcgcttattgaagccctcaaagctgatgccaaatacaggggcaaactccccgtcgtttccggacaggatgccgaattcctttccgtaatgtccataaagaacggcgaacagtatatgacagtctttaaagacacagcaaaacttgccgaagctgcggctttactggctgatcaactcctgaagggagtaaagccggctaatattaaaattcccggcgcagttcttgcggcaggcaatctcagggcaatcggcgataccacaaagcaaggtgagttcaaaaacggtaaagttgtaaccactttcctgttagacgttgttccgataaccaaggataacgtcagagttcctgcggacgcaggcttcttcactgatgcggaagctgcccagataagacagtaa

SEQ ID NO: 22450 - protein, 203 aa, Unknown
  Obtained from environmental sample
  misc_feature (1)..(203): Xaa is any amino acid
MEILNPYIDKGVLKVVGPYPKTSKDKANYMRIATEGWWPNVAKARMEGLLINDAANVTLDAVLSPNDTIARSLIEALKADAKYRGKLPVVSGQDAEFLSVMSIKNGEQYMTVFKDTAKLAEAAALLADQLLKGVKPANIKIPGAVLAAGNLRAIGDTTKQGEFKNGKVVTTFLLDVVPITKDNVRVPADAGFFTDAEAAQIRQ

SEQ ID NO: 22451 - DNA, 321 bp, Unknown
  Obtained from environmental sample
  misc_feature (1)..(321): n is a, c, g, or t
atgggtttggatgttggtccaaaatcttcggagctttttgtgaaggcaattttagattctaaaaccattgtttggaacggacctgctggagtatttgaatttccagcttttgaaaaagccaccaaagaaatggcagatgccatcgttaaagccactgagggcggtgcaatcaccgttataggcggaggcgacaccgcaactgccgcaaaaaagtacggagccgataaaaaggttacacacacgtccacaggcggcggagcctcgcttgaatttttggaaggcaaggaacttccgggggtagcagcgcttacggataaatga

SEQ ID NO: 22452 - protein, 106 aa, Unknown
  Obtained from environmental sample
  DOMAIN (1)...(103): Phosphoglycerate kinase
  misc_feature (1)..(106): Xaa is any amino acid
MGLDVGPKSSELFVKAILDSKTIVWNGPAGVFEFPAFEKATKEMADAIVKATEGGAITVIGGGDTATAAKKYGADKKVTHTSTGGGASLEFLEGKELPGVAALTDK

SEQ ID NO: 22453 - DNA, 375 bp, Unknown
  Obtained from environmental sample
  misc_feature (1)..(375): n is a, c, g, or t
atgtcacatcggtggttcgaggctttcaccttcaagggaaaagccgactatcgggggcaacgggcgacggccgcgcacgcgatcgcgtcaatcaggaacagcccggttatggtaggccagcttgcccccttggacgattacttcgccgattctgtcggacgtatggggcttctgggcgagcagagcgaaaggaccctggagacagaaaaccttaccatgaaggaacttaatgagatgaggcagtcaatttccggagtgaacatagacgaggaactagcgaacatgatccgttaccagcacggctacaacgcggcggcccgttttgtttccacggtaaattccatgctggatgtattaatgaggctcggagcttaa

SEQ ID NO: 22454 - protein, 124 aa, Unknown
  Obtained from environmental sample
  DOMAIN (84)...(122): Domain of unknown function (DUF1078)
  misc_feature (1)..(124): Xaa is any amino acid
MSHRWFEAFTFKGKADYRGQRATAAHAIASIRNSPVMVGQLAPLDDYFADSVGRMGLLGEQSERTLETENLTMKELNEMRQSISGVNIDEELANMIRYQHGYNAAARFVSTVNSMLDVLMRLGA

SEQ ID NO: 22455 - DNA, 459 bp, Unknown
  Obtained from environmental sample
  misc_feature (1)..(459): n is a, c, g, or t
atggttgattttgtgagcgtaggtacaaacgatttaattcagttcaccattgccgtagacagatctaacgggaaaatcgcttctctgtacgagcctcaccaccctgcggttttaaggtctataaagatgatagttgacgccgcccacaaagagggtattcaggttagcgtttgcggcgaaatggcttctgaccccatcagtgccttgcttttggttgggcttggcgtggacgaactatccatggcatcttggtgcattatggagtgcaaaaaaatcatacgttccgtaaattacgatgaagcaagggctatttccgcagaagcccttagattttccgactctgtgagcataaacgcttatttaaagggaaagtattacaataagataaaagggcttggaatttcaaatttcatcacccttccggactttttcagcaatggtaacgctttagagctgtag

SEQ ID NO: 22456 - protein, 152 aa, Unknown
  Obtained from environmental sample
  DOMAIN (1)...(98): PEP-utilising enzyme, TIM barrel domain
  misc_feature (1)..(152): Xaa is any amino acid
MVDFVSVGTNDLIQFTIAVDRSNGKIASLYEPHHPAVLRSIKMIVDAAHKEGIQVSVCGEMASDPISALLLVGLGVDELSMASWCIMECKKIIRSVNYDEARAISAEALRFSDSVSINAYLKGKYYNKIKGLGISNFITLPDFFSNGNALEL

SEQ ID NO: 22457 - DNA, 372 bp, Unknown
  Obtained from environmental sample
  misc_feature (1)..(372): n is a, c, g, or t
atgatttataatatcaacaaaggtcgcaatgcgaatatagccaataagagtcctgttttgaacggctacaacgagcttatagcagaagtgaacaaaaatcgtgagacgatggaaccagcagaagccatagtagcagcgataaagagctgtgtagaacgcaatattttagtatatttcttggagaagtacgcttcggaggttttgaatatgctttttacggaatggaacttggacgatgctattgcggttgctagggaagaggccttggaagatggcattgaaaaaggtcgcaacgagagaagcaaggaattatttgctttatgggaaagtggcgtttctctagaagaggcgaagcgaaaatttgggtattaa

SEQ ID NO: 22458 - protein, 123 aa, Unknown
  Obtained from environmental sample
  misc_feature (1)..(123): Xaa is any amino acid
MIYNINKGRNANIANKSPVLNGYNELIAEVNKNRETMEPAEAIVAAIKSCVERNILVYFLEKYASEVLNMLFTEWNLDDAIAVAREEALEDGIEKGRNERSKELFALWESGVSLEEAKRKFGY

SEQ ID NO: 22459 - DNA, 306 bp, Unknown
  Obtained from environmental sample
  misc_feature (1)..(306): n is a, c, g, or t
atgattaacgattgtcttattatggccggaggctcaggcacgcggttatggcccgcaagcaattcaaggaaaccaaaacagttcttaccggctgttaaaggcggaacggaaagttttttttccctgagccttgagcgggcatttcgcctggtcgaaaaaaatgacggcagggtgatcgtcataatgggaaaaccccacctgccttttgtcataactgcctgttccaaattaagcctcgcggataaaagacgccttgtgttaatccccgaacctgaagcaaaaaacacagcgcccgcgatagcctga

SEQ ID NO: 22460 - protein, 101 aa, Unknown
  Obtained from environmental sample
  misc_feature (1)..(101): Xaa is any amino acid
MINDCLIMAGGSGTRLWPASNSRKPKQFLPAVKGGTESFFSLSLERAFRLVEKNDGRVIVIMGKPHLPFVITACSKLSLADKRRLVLIPEPEAKNTAPAIA

SEQ ID NO: 22461 - DNA, 438 bp, Unknown
  Obtained from environmental sample
  misc_feature (1)..(438): n is a, c, g, or t
ttgatttattgccacgaaaacgatgtttatgacaacacacgtataataatagccgccgatcacggcggcggcgttgataatctattatcaaatgagcctttatccataaaaaatgaaacacgggaattatataaccctgtttttttatataaggattttaattcccatggaacattatacgtaaacaatgattttatgacaaacgctgacgttcccttttttattcttaatggactttcggataatccggttaatccgtttaccggtaaccagattaccacactaccgaaagaagaagggatattaattacgacacatcattcgccaatggccggcagtcatggaaagtatgtttttaatataaaaaataatgaatggatgtaccttcacgattcaatttatgaagcgtctaattgggaaagttttgaattacggtaa

SEQ ID NO: 22462 - protein, 145 aa, Unknown
  Obtained from environmental sample
  misc_feature (1)..(145): Xaa is any amino acid
MIYCHENDVYDNTRIIIAADHGGGVDNLLSNEPLSIKNETRELYNPVFLYKDFNSHGTLYVNNDFMTNADVPFFILNGLSDNPVNPFTGNQITTLPKEEGILITTHHSPMAGSHGKYVFNIKNNEWMYLHDSIYEASNWESFELR

SEQ ID NO: 22463 - DNA, 525 bp, Unknown
  Obtained from environmental sample
  misc_feature (1)..(525): n is a, c, g, or t
gtggacatcggaaaaatagaaggcatccttcccaagaaataccagtccccaagggaaatataccatgtaaatgacagaataaaatcgcttatcgcggaagtaaaaaaagattcttccggtcttcaaattgttctttcaagaacgcatacggaatttgtgcgcgctatttttgagcttgaagttcccgaaatctacgacaagacagtggaaatacacaagattgtccgcgaaccgggcttccgcacaaaactcgctgtttactcaaaccgcgaagacgttgatcctgtcggcgcgtgcgtcgggcttaagggtgtccgcattcaggcggtaatcaaagaattggaaggcgaaaaaatcgatattcttaaatacgatcccgaccctcggcgattcattaaaaacgccctatcccccgcggaagtgcgcgatgtgataattttagacgagggcaaacatcaggcgcttgcggtagtaagcgattcaatgctgtcgctcgcaatcggcaatcagggggcgatcctctga

SEQ ID NO: 22464 - protein, 174 aa, Unknown
  Obtained from environmental sample
  misc_feature (1)..(174): Xaa is any amino acid
MDIGKIEGILPKKYQSPREIYHVNDRIKSLIAEVKKDSSGLQIVLSRTHTEFVRAIFELEVPEIYDKTVEIHKIVREPGFRTKLAVYSNREDVDPVGACVGLKGVRIQAVIKELEGEKIDILKYDPDPRRFIKNALSPAEVRDVIILDEGKHQALAVVSDSMLSLAIGNQGAIL

SEQ ID NO: 22465 - DNA, 687 bp, Unknown
  Obtained from environmental sample
  misc_feature (1)..(687): n is a, c, g, or t
atgaccactcttttattatattcaggaagcgttattgttcttgacttcaaaggcgaaagttttcaatacacttccggcttcagaaaaattttcgggaaagtttaccggtgggagcccacaggcgataaaggccatcacttcaatcctatgatggaaataaggtccggcgaagacgctttcagcgacgctaaccttatcgcggatattttaacaacccccgcttctggcggcggtaacgccacgtcggaacatttccaggtcggcgcgaaagattttcttacggcggttattttacactgcctttgttccgactggaaagataaaagccttcccggatgccgcaggtttttagcccagggcgatcccgcgaacccagacaacaaaaactatatttacgatcttatgatcagttccgaccacggcgatgaaatgattcatcaggctgttgtcgaaggcgctatggcccagcgtaacaggccgaaggacgaaggaggctccatgctgtccaccgtcaataacgctctcgccgttttcgccgatcctaaaatagcccgtaatacatggaactcggagttctatatcaacgaatttgaggaaactaaaagacctatttccctggacctgactattcaatacaacgacgttcagcgtatttctccgtcaatttgtttgtgtgggatcctctag

SEQ ID NO: 22466 - protein, 228 aa, Unknown
  Obtained from environmental sample
  misc_feature (1)..(228): Xaa is any amino acid
MTTLLLYSGSVIVLDFKGESFQYTSGFRKIFGKVYRWEPTGDKGHHFNPMMEIRSGEDAFSDANLIADILTTPASGGGNATSEHFQVGAKDFLTAVILHCLCSDWKDKSLPGCRRFLAQGDPANPDNKNYIYDLMISSDHGDEMIHQAVVEGAMAQRNRPKDEGGSMLSTVNNALAVFADPKIARNTWNSEFYINEFEETKRPISLDLTIQYNDVQRISPSICLCGIL

SEQ ID NO: 22467 - DNA, 516 bp, Unknown
  Obtained from environmental sample
  misc_feature (1)..(516): n is a, c, g, or t
ttggcatcgtggtctgccacaaacaaggatctgatagcggagatcgaaaagggcaattttcgcgaggatctttatgtccgccttaaagttgtaaacatccatgttccccccttaagggaaagcaaggacgaccttcctcttcttataacagcctttctgaaagagttcgctgaagaaaacggcaagagcatagaaggcattaatgacaaagcccgatcctgcctttacgcgtacgactggcctggcaatatccgggagcttcgcaactgcgtggaaagcaccgtagtcatgtcccaggggaaactaatcaccgtggaagatcttcctcccggcatcagggccggcagcgacgaaggctggatacgcataccactgggaacaagcatggaagaagcggaaaagatcatcatccgcgaaacggtctccgcccaaaaaggcaaccaaagcaaagccgccgtcattttgggtataggccgcaagaccttgcaccgcaagctaaccggcgaagaggaatga

SEQ ID NO: 22468 - protein, 171 aa, Unknown
  Obtained from environmental sample
  DOMAIN (129)...(169): Bacterial regulatory protein, Fis family
  misc_feature (1)..(171): Xaa is any amino acid
MASWSATNKDLIAEIEKGNFREDLYVRLKVVNIHVPPLRESKDDLPLLITAFLKEFAEENGKSIEGINDKARSCLYAYDWPGNIRELRNCVESTVVMSQGKLITVEDLPPGIRAGSDEGWIRIPLGTSMEEAEKIIIRETVSAQKGNQSKAAVILGIGRKTLHRKLTGEEE

SEQ ID NO: 22469 - DNA, 780 bp, Unknown
  Obtained from environmental sample
  misc_feature (1)..(780): n is a, c, g, or t
atgctgatgtttaccctgggctatgaactggggttaaacggcgcgcttcttatgcaggatgtttcaagcattcctcttcgctgctcacaaaggacggaagaacatccgcttgtaattgccggaggacctgctgtttcaaatccgctgccttattctccgtttattgacgctttctggataggggaagctgaggcgggattttttgaacttgcgcaggaactggctcacttaaaaacaaaagggcagggcagggcggctctttatgaaaaaatgtcatcgcatccgaatatttgggtaaaaggaaaagaaaaggcaaaacgcgccgtatactcaaacttttcccgggatgatacacaggcggccgtttttcctgtaccaagcatgaagacaattcaacatcacggtactgtggaaataatgcgcggctgtcctaacggctgccgtttctgccatgccggcttttggtacagaccgatgaggcaaaaaaattgtcagataataatttctcatgttcaggatatggtaataaagggaggctggcaggaaataagcctgtcatccctttctacaggcgactacaacggcgtaggtgaactgatagaaaatttaaacgaactgttttctccttttcacatttcattccaaatgccttcgcttaaagtatcaagtttttcccttgatcttttggaacaaatatccgtaatcagaaaaagcggccctactttccctgttgaaactcctaaagatgtatggccagatgggcaattaacaaagaggtaa

SEQ ID NO: 22470 - protein, 259 aa, Unknown
  Obtained from environmental sample
  misc_feature (1)..(259): Xaa is any amino acid
MLMFTLGYELGLNGALLMQDVSSIPLRCSQRTEEHPLVIAGGPAVSNPLPYSPFIDAFWIGEAEAGFFELAQELAHLKTKGQGRAALYEKMSSHPNIWVKGKEKAKRAVYSNFSRDDTQAAVFPVPSMKTIQHHGTVEIMRGCPNGCRFCHAGFWYRPMRQKNCQIIISHVQDMVIKGGWQEISLSSLSTGDYNGVGELIENLNELFSPFHISFQMPSLKVSSFSLDLLEQISVIRKSGPTFPVETPKDVWPDGQLTKR

SEQ ID NO: 22471 - DNA, 777 bp, Unknown
  Obtained from environmental sample
  misc_feature (1)..(777): n is a, c, g, or t
atgtttgcccaggacgctgttgaagtttctgctcttttaaatcttacgcttacaagccgtaacgggcttccgatgtgcggcgtaccgtatcatgccgcaaagaactacattgcgcgccttttaaaacttggaaaaaaagtagcgatctgcgaacagctaacgccacccggaaaacagaaggtaatagagcgggatgtggtagaaataatcactcccgggactactgttgacgaggattttcttgacaagggaagctccaattacctgtgctgtcttgcccgctgcgatacctatctttctttttcttacatagatctgtccacaggcgattttttttctacaagtttttcagataacgaagaggaaatactcaggcaagaacttgaacggctttcaatccgggaaatgctgatacaggaatctcttttggaagaagaaaagaaaatagccgccgcagtctatgatcgaagcggccttgttctgaaccgctgggccgactggctgtttgacaaaacacaggcaaaagaaaggcttgaaaaacagtttggccttgcaaacttaaaaggtttcggtcttaacgaaaacagcgcggaaataatatcggcgggagcgctgcttgactatcttgatacgacttccaaaagcgctcttcttcacataagaacgctgaaaatttacaaagacaatgaatatctgggtattgacgaatcaagccagcgcaatcttgaacttttggtgaatcaaagagacggagacgtccgcttttcgcttttttga

SEQ ID NO: 22472 - protein, 258 aa, Unknown
  Obtained from environmental sample
  DOMAIN (1)...(79): MutS domain I
  misc_feature (1)..(258): Xaa is any amino acid
MFAQDAVEVSALLNLTLTSRNGLPMCGVPYHAAKNYIARLLKLGKKVAICEQLTPPGKQKVIERDVVEIITPGTTVDEDFLDKGSSNYLCCLARCDTYLSFSYIDLSTGDFFSTSFSDNEEEILRQELERLSIREMLIQESLLEEEKKIAAAVYDRSGLVLNRWADWLFDKTQAKERLEKQFGLANLKGFGLNENSAEIISAGALLDYLDTTSKSALLHIRTLKIYKDNEYLGIDESSQRNLELLVNQRDGDVRFSLF

SEQ ID NO: 22473 - DNA, 684 bp, Unknown
  Obtained from environmental sample
  misc_feature (1)..(684): n is a, c, g, or t
gtggcgcccggccagaacattatgtcgctccagcggacgggcgattcgaattactacaacatgtcgggcacttcgatgtcatgcccccacgtcacggggctggttggctacatgctcaccttcgcgcccgacctcaaggcagaccaggtcaggacctacctggagcagaacgccgaccccatcgatggccaaaaggggttctcgccactgaccggttggggccgcatcaacacctacaggaccatcggggccgtcataaacgacatcaggagcggaaacacaccgccctcgaactacgtgatgtcacccgtgaagataaccacgaagcgcgcctcgggtgcccccatcaacgatgtgctggtctatctatacaactgcgaccagggcggcaccataaccaactacgccacatgcacgatatcgggcacgtcatacgttgggatgaggggcgacaaggacgcagaggcggaagacggcgtggccaggttcaacggcctaaagccgggctactacaaggcaatggccagccgtagccttttcgacatcggcgaagagaagcaggtgtcatggagtgccgtcacaccggtcttcgaggtcaagcgcggcgcgacagtgccgccaatggcgctggtgttcgaggacctccagcgcttaccatccagacctgcaaaccatcaactctga

SEQ ID NO: 22474 - protein, 227 aa, Unknown
  Obtained from environmental sample
  misc_feature (1)..(227): Xaa is any amino acid
MAPGQNIMSLQRTGDSNYYNMSGTSMSCPHVTGLVGYMLTFAPDLKADQVRTYLEQNADPIDGQKGFSPLTGWGRINTYRTIGAVINDIRSGNTPPSNYVMSPVKITTKRASGAPINDVLVYLYNCDQGGTITNYATCTISGTSYVGMRGDKDAEAEDGVARFNGLKPGYYKAMASRSLFDIGEEKQVSWSAVTPVFEVKRGATVPPMALVFEDLQRLPSRPANHQL

SEQ ID NO: 22475 - DNA, 441 bp, Unknown
  Obtained from environmental sample
  misc_feature (1)..(441): n is a, c, g, or t
ttggtgcctggccgccccttcaggaggatcgcacttacgagacctgcatcagtggaaaataacctctgcccccttgcgattaatatgttttaccgcccgggcgcgactctggccgacggctatttcagccaggacgcccttccgattaacgcggctacgccgtcgatcaggaatatccgcatatcgggtatccgggcttcgggctgcagggcctccgccggctttatcgccggtttgcccgaatcgccggtggaaaacgtcagcatcaaccgctgcgaaatctccaccgacgagcactccggcgtaagccccaacgagtcggagatgttcctgggaatccccgcgattacggaaaagagtatacgccttcttaatgttaaaaatatccagtttaatgaggttaacgtacacggtccggcggaggctttcatttatcgctag

SEQ ID NO: 22476 - protein, 146 aa, Unknown
  Obtained from environmental sample
  misc_feature (1)..(146): Xaa is any amino acid
MVPGRPFRRIALTRPASVENNLCPLAINMFYRPGATLADGYFSQDALPINAATPSIRNIRISGIRASGCRASAGFIAGLPESPVENVSINRCEISTDEHSGVSPNESEMFLGIPAITEKSIRLLNVKNIQFNEVNVHGPAEAFIYR

SEQ ID NO: 22477 - DNA, 810 bp, Unknown
  Obtained from environmental sample
  misc_feature (1)..(810): n is a, c, g, or t
gtgagggaggaaaaagaagccgaaaaacgcttttacagcgaagctcaagctatgaaggaattaaaccatcaaaatttggcaacggtttatgactttggaaagcaagacgacaaaatattcatagcaatgacatttgtagagggagaatcgctttctgatattattaaaagagaaaaaaaattacccgtgaaaaaagccatttacatagcttggcaaatagcaagaggcttggaatatgcgcatgaacgcggcgttatacacagagacataaagccttcaaacataatgataaagaaaaataacgagatttgtataatagattttggaatttcaataacaacaaattcgcagaggctcacaaatccaggcatgacaatgggaacgcctgaatatatgtctcctgagcaatgccaaaacaaaaatgtaacccatcaaagcgatatttacagttttggaattgtcttttacgaaatgctcactggcgaccctccttttgtgggcggagcatcgctttctatcttaaacaggcatttgcacgaagcacccaaatctttaagcaaaaagaatgatgaagtttcagaagaattagaaaaaataattttcaaatgccttgaaaaaaaaaccgatcaacgttataaaaattttgcgatatttatagaagaattaaaagccattatgagcggtaccaccactcaagaagctccaaaatcccttatgggcaggctatcaaaagcagagcgcgtgatgtttttgattttgattatcttgccgttttttgatggttttaatggtgcttcttttatcttttaa

SEQ ID NO: 22478 - protein, 269 aa, Unknown
  Obtained from environmental sample
  DOMAIN (1)...(222): Protein tyrosine kinase
  misc_feature (1)..(269): Xaa is any amino acid
MREEKEAEKRFYSEAQAMKELNHQNLATVYDFGKQDDKIFIAMTFVEGESLSDIIKREKKLPVKKAIYIAWQIARGLEYAHERGVIHRDIKPSNIMIKKNNEICIIDFGISITTNSQRLTNPGMTMGTPEYMSPEQCQNKNVTHQSDIYSFGIVFYEMLTGDPPFVGGASLSILNRHLHEAPKSLSKKNDEVSEELEKIIFKCLEKKTDQRYKNFAIFIEELKAIMSGTTTQEAPKSLMGRLSKAERVMFLILIILPFFDGFNGASFIF

SEQ ID NO: 22479 - DNA, 498 bp, Unknown
  Obtained from environmental sample
  misc_feature (1)..(498): n is a, c, g, or t
atgaattttgccggaaaaataaaatcatttttttcaaaagcccccgctgtctcgcaggaattttttgaggaattatccgatcttctggtggaaggtgatcttggcgcccaggaagcttacgcggttgtcgaacgtttgcaggagcggtgcaaaaaagaaaattgttcttcgccgcagcaggcgcgggactgccttgccgtactgctggaagagatgctgcacaatgttaaagcccctgcttcaccggaagccgggccggcggtgattcttctcccgggcgttaacggcgtgggaaagacgacgaccgcggcaaaacttgccgcgttatatcagggtttcggttcaaagcccgttcttgcggcggcggatacctttcgggcggcggcaattgatcagctcacaatacacggcgaacggcttggactgccggtggttgcccatcccccgggcggagactccgccgccgtggtgtacgatgcgattgaaagccgccggtaa

SEQ ID NO: 22480 - protein, 165 aa, Unknown
  Obtained from environmental sample
  DOMAIN (85)...(163): SRP54-type protein, GTPase domain
  misc_feature (1)..(165): Xaa is any amino acid
MNFAGKIKSFFSKAPAVSQEFFEELSDLLVEGDLGAQEAYAVVERLQERCKKENCSSPQQARDCLAVLLEEMLHNVKAPASPEAGPAVILLPGVNGVGKTTTAAKLAALYQGFGSKPVLAAADTFRAAAIDQLTIHGERLGLPVVAHPPGGDSAAVVYDAIESRR

SEQ ID NO: 22481 - DNA, 582 bp, Unknown
  Obtained from environmental sample
  misc_feature (1)..(582): n is a, c, g, or t
ttgaagagtaccagatcgaagagggcaaaattttcgggcgcggacgcgatctatttgtccgccgcgatgctagagcctgaccgtctggccgctctgtcgtcactcgccgcatcaaaaaatctcgatgtggtagttgaggtcgccagcgaggaagacatagattcggccctagaggccgaagcgcagatcgtctgcgttgttgggcgcgaccttgaaagctgggaagcgtcatgggaaaaaacgattcagcttctaaaaaagatcccaaaaaaatgcctaaagatggccgaagcaggcatcgcatccctcaagcagatcaaggagcttgagtccattggcatacatggcgtaataatcggagacatactcttgaacgagttctatcccggcaaaagacttggtcagcttcttgctggtgtagagcctgcaaagaaacctgtcaaaaaggtgcccccgccaaccaccgaaccaccaaagacaaaaccaagcaaatccactgacaccaaaccctcaacctcttcaccttccaaacatccctcaaagggaaaaaaggagacatcaatgaaccaaatcaaggcttga

SEQ ID NO: 22482 - protein, 193 aa, Unknown
  Obtained from environmental sample
  DOMAIN (1)...(136): Indole-3-glycerol phosphate synthase
  misc_feature (1)..(193): Xaa is any amino acid
MKSTRSKRAKFSGADAIYLSAAMLEPDRLAALSSLAASKNLDVVVEVASEEDIDSALEAEAQIVCVVGRDLESWEASWEKTIQLLKKIPKKCLKMAEAGIASLKQIKELESIGIHGVIIGDILLNEFYPGKRLGQLLAGVEPAKKPVKKVPPPTTEPPKTKPSKSTDTKPSTSSPSKHPSKGKKETSMNQIKA

SEQ ID NO: 22483 - DNA, 528 bp, Unknown
  Obtained from environmental sample
  misc_feature (1)..(528): n is a, c, g, or t
ttgcttcgcaaactccagctaaagcattggaaacaccggcatccatgccggaaaggagagaatatgcggattgttgatttttttcttacggttaatccttttacgcgcccagggcgaaagctggcggtttgcaaggggattatatttcactatgtcgggaaaaataaccagaaggctatagacgtttggaaattttttgagaaaacctgtcctgttgacaagcactattccagcgcccactacatcatcaaccttgacggctatatctaccatgccgtgcctgatgaagaagtcgcctaccattgcgggagtgaaaaacctgaccctgtttcggggagaatatacacggattgggcgcggcaaaaatacgcctattacgcatccgaccctgtgaagacaagccctaactattgcactctcggaattgaattgtgcattgacgcgcagggaaattttaccgaggaaactctactggccgtcggggaactcgccgccaaattgttaaacgaaaacaaatttgtctgttga

SEQ ID NO: 22484 - protein, 175 aa, Unknown
  Obtained from environmental sample
  misc_feature (1)..(175): Xaa is any amino acid
MLRKLQLKHWKHRHPCRKGENMRIVDFFLTVNPFTRPGRKLAVCKGIIFHYVGKNNQKAIDVWKFFEKTCPVDKHYSSAHYIINLDGYIYHAVPDEEVAYHCGSEKPDPVSGRIYTDWARQKYAYYASDPVKTSPNYCTLGIELCIDAQGNFTEETLLAVGELAAKLLNENKFVC

SEQ ID NO: 22485 - DNA, 522 bp, Unknown
  Obtained from environmental sample
  misc_feature (1)..(522): n is a, c, g, or t
ttgttcttttacgtcccgccggatttgcagaaatttagcggacaccagaaggtggtggataatctgcgggtttttgtgaaggctgcccgtatacggggagaggcgttagatcatgtgttgcggcatggtccgccgggattgggaaagactacgctggcaaatatcgtttctaacgaactgggggggagtttgaaactgtcgtcaggtccggtacttgataagccgggcgaccttgccggaatacttactaatcttgagaagaatgatgttctgtttattgatgagatacaccgtctgagcccggttgtggaggagtatctgtattcggctatggaggattatactattgatatactgattgacaagggtccgagtgcgcgttcgatacagcttacgctaaatccgtttacgctcgttggtgcgactacgcggtcgggtttgctgacaagtcctttgcgtgcgcgatttggtatttcatgtcatctggaatattataataccgatatattgaggcagatgtaa

SEQ ID NO: 22486 - protein, 173 aa, Unknown
  Obtained from environmental sample
  DOMAIN (5)...(37): Holliday junction DNA helicase ruvB N-terminus
  misc_feature (1)..(173): Xaa is any amino acid
MFFYVPPDLQKFSGHQKVVDNLRVFVKAARIRGEALDHVLRHGPPGLGKTTLANIVSNELGGSLKLSSGPVLDKPGDLAGILTNLEKNDVLFIDEIHRLSPVVEEYLYSAMEDYTIDILIDKGPSARSIQLTLNPFTLVGATTRSGLLTSPLRARFGISCHLEYYNTDILRQM

SEQ ID NO: 22487 - DNA, 423 bp, Unknown
  Obtained from environmental sample
  misc_feature (1)..(423): n is a, c, g, or t
gtgaggatgaccacaaagggacgctacgcgctgcgcgcaataattgcccttgcgaaattgtatgaaagaaacaacctggtctccatcaacaccctttccgaagaggaggagatctcttctctgtttctggaacagatattttttaagctaagaaaagcggggatagtcaaatcaatacgggggcccggcggcggatttttattcaaccgcccgcttgattccataaatgtcaaggaagtgcttgaggcggcgggagaggaactgacagtgctgccttgtgacaggcagactaccggatgcgacaggataagcgaatgtattacccataaagttattatctcggtaacacataaagtcaacgaatatttagaaagtatcccattgcagatgctgctggaaagcccggaatgtgaaacaaaataa

SEQ ID NO: 22488 - protein, 140 aa, Unknown
  Obtained from environmental sample
  DOMAIN (1)...(123): Transcriptional regulator
  misc_feature (1)..(140): Xaa is any amino acid
MRMTTKGRYALRAIIALAKLYERNNLVSINTLSEEEEISSLFLEQIFFKLRKAGIVKSIRGPGGGFLFNRPLDSINVKEVLEAAGEELTVLPCDRQTTGCDRISECITHKVIISVTHKVNEYLESIPLQMLLESPECETK

SEQ ID NO: 22489 - DNA, 300 bp, Unknown
  Obtained from environmental sample
  misc_feature (1)..(300): n is a, c, g, or t
atgatggcgaggaactcgcctttttttgacgcacatatcgaaaaaggaataatcgaaaacctgcggcaggtaggcggagcgaaattttcgcatatcacatatacggacgcggttaaagaactggaaaaagcagtcgcttccaaagatgatctttttgaatttaaaccaggctggggctgtgatttgcaaagcgagcatgaaaggtttttaaccgaaaaaatagcctgcggtcccgtgattgttacggattatccgaaagaaataaaagccttttatatgaaattaaacgacgacggctag

SEQ ID NO: 22490 - protein, 99 aa, Unknown
  Obtained from environmental sample
  misc_feature (1)..(99): Xaa is any amino acid
MMARNSPFFDAHIEKGIIENLRQVGGAKFSHITYTDAVKELEKAVASKDDLFEFKPGWGCDLQSEHERFLTEKIACGPVIVTDYPKEIKAFYMKLNDDG

SEQ ID NO: 22491 - DNA, 633 bp, Unknown
  Obtained from environmental sample
  misc_feature (1)..(633): n is a, c, g, or t
ttgttccaggccgtgctgttacgcgcaaagggattgcgctttatcaaattctggcgcggcatttttatcctgccgtgggcggttccgggcatcgtgtccatgatgatattccgagtcatgttcaacaaggaaggcgcccttaaccagatactgcttaattttggcctggtaaaggaagcgatatcttttatgtccgatccaaattgggcaaaaacggtactggttctggtaaatatgtggctgggtttcccgtattttatggctcttatcgccggaattatgacgacgattcccgaagagcagtacgaggcggcgcagatcgacggcgcgaacgcctttcagcaattcagatcgataactctgccctttatactttcatcaacagcccctcaaattatgatgagccttactttcaattttaacaacttcaaccttatctatttcctgacaggcggcgggcctcccaattctacgctgcaaatggcgggttctaccgatatattgatttcctggatttttaagctcacgctggatcagcgtatgtacaattacgcggctgccatgagcatctttattttcgcgattgtcgcttcgatttccggctggaacctgatgcgtaccccgcgcgtttaa

SEQ ID NO: 22492 - protein, 210 aa, Unknown
  Obtained from environmental sample
  misc_feature (1)..(210): Xaa is any amino acid
MFQAVLLRAKGLRFIKFWRGIFILPWAVPGIVSMMIFRVMFNKEGALNQILLNFGLVKEAISFMSDPNWAKTVLVLVNMWLGFPYFMALIAGIMTTIPEEQYEAAQIDGANAFQQFRSITLPFILSSTAPQIMMSLTFNFNNFNLIYFLTGGGPPNSTLQMAGSTDILISWIFKLTLDQRMYNYAAAMSIFIFAIVASISGWNLMRTPRV

SEQ ID NO: 22493 - DNA, 588 bp, Unknown
  Obtained from environmental sample
  misc_feature (1)..(588): n is a, c, g, or t
ttgtgcatttcccatatagtagctataggagatacaggcatgaacgaagacccgtcacagattcccggcaggatcaaggaattgagggaaatcatggaaatcagcgcgatggatatagcggccgatattcatgttcctctcgcgacttacgaaaaatacgagagcggcgagcaggacattcccattagcgtattgtacaacatagcaaaccggctaggtaccgatgtgacagtgctgatgaccggagaagatccccgcatggacagcgccgccgtgtgccgcagggggaagggcgttcaggttgagcgttacccgggttatgaattctccagcctggcgtacaacttcaagagcagaactatggaaccgctgctggtgtcgctggattcgtcccggcctcctgcggctcaagtgtcacattccggacaggaatttaactatgtggtcgaaggtcaggtaaaagtgacggtaggccgggccgagtataccctcgcggttggcgattcgatttactttgacgcgacccttccccacagccagagcgcagtgaatggcagcgctcaatttatcaccatcatacagatataa

SEQ ID NO: 22494 - protein, 195 aa, Unknown
  Obtained from environmental sample
  DOMAIN (25)...(79): Helix-turn-helix
  misc_feature (1)..(195): Xaa is any amino acid
MCISHIVAIGDTGMNEDPSQIPGRIKELREIMEISAMDIAADIHVPLATYEKYESGEQDIPISVLYNIANRLGTDVTVLMTGEDPRMDSAAVCRRGKGVQVERYPGYEFSSLAYNFKSRTMEPLLVSLDSSRPPAAQVSHSGQEFNYVVEGQVKVTVGRAEYTLAVGDSIYFDATLPHSQSAVNGSAQFITIIQI

SEQ ID NO: 22495 - DNA, 561 bp, Unknown
  Obtained from environmental sample
  misc_feature (1)..(561): n is a, c, g, or t
atggcagcggcagaggagctggttgttgatgagtctaaagtaaaaaaagcagttcagtcggggattcccctgaccattaccacttttaccctcccccatgagatagaagtgtatattgaacgggtcattactatatttcttaaacagctggatcaggaaaaactcaaggattatgtggtttactgtgttcaggaactgactgtaaacgctaaaaaggcgaataccaagcgggtatattttacggaacgcgggttggatctctccaaccccagtgattacaaggaagggatgagcggatttaaagaaaataccctgaataacatcgcccattaccttcaactccagaaagagaagggtctctacatcaagcttatcctccagataaagaaaaatatcatttacattgaagtaagaaacaatgtagcggtaaccaagaccgagcttatccgtatccatgacaaactcgcccgatccaggcaatacaacaacctggaggaagcccttgcccaggttcttgatgattcggaaggaaaaggcctgggcttgtcatcctggtactga

SEQ ID NO: 22496 - protein, 186 aa, Unknown
  Obtained from environmental sample
  misc_feature (1)..(186): Xaa is any amino acid
MAAAEELVVDESKVKKAVQSGIPLTITTFTLPHEIEVYIERVITIFLKQLDQEKLKDYVVYCVQELTVNAKKANTKRVYFTERGLDLSNPSDYKEGMSGFKENTLNNIAHYLQLQKEKGLYIKLILQIKKNIIYIEVRNNVAVTKTELIRIHDKLARSRQYNNLEEALAQVLDDSEGKGLGLSSWY

SEQ ID NO: 22497 - DNA, 723 bp, Unknown
  Obtained from environmental sample
  misc_feature (1)..(723): n is a, c, g, or t
gtgcaatccccctccgcggtttcccagtccgagtatacgctgattgcccgttccaatgttgaaggctctctcctggtaagcatgaacggcggcgacgccctttcgtacaagggcgtatgggttaccgagaccaccaacgcgagcgcagagcctttctcgctttttgaaattcccgtagacgttctttccccgggtgataatgtattcagccttgtgtttaacccggataccaaccagttaaaatcaggttatcttatcggtaaagaatacctgatgaccaatattaagcccatttaccagagttttatggtaaattacagaaccctggatacgccggacggaaagatatgggtgtcgcctgaggggaagggcgcgaactcgggaagcagggacagtccgatggacattttcaccgccatatcttatgtcgctcccggccaaacgataatgcttatggacgggatctataccccctgcgaagccccgcaaatggtaaatggaaagcaacggatacccatccggttgattataccaaggtataattcgggcaagccgaaccttgccgttgtaagcgatcctgaaaaaccaaccgacgcggaacgggccaatcccgattattacaaatactataaagtcctgaaggcggaaaaccgcaacaaggctatttttgatttccgcaaagacccttgtaatgcgcggggtatgattccacgcggaagttga

SEQ ID NO: 22498 - protein, 240 aa, Unknown
  Obtained from environmental sample
  misc_feature (1)..(240): Xaa is any amino acid
MQSPSAVSQSEYTLIARSNVEGSLLVSMNGGDALSYKGVWVTETTNASAEPFSLFEIPVDVLSPGDNVFSLVFNPDTNQLKSGYLIGKEYLMTNIKPIYQSFMVNYRTLDTPDGKIWVSPEGKGANSGSRDSPMDIFTAISYVAPGQTIMLMDGIYTPCEAPQMVNGKQRIPIRLIIPRYNSGKPNLAVVSDPEKPTDAERANPDYYKYYKVLKAENRNKAIFDFRKDPCNARGMIPRGS

SEQ ID NO: 22499 - DNA, 654 bp, Unknown
  Obtained from environmental sample
  misc_feature (1)..(654): n is a, c, g, or t
atgaaacaatatttatttttaacaattttaattttaacaggaatgtgggtgtccgcgcaaaacgccgttattgaacatgttacaggcacggtagaaatcctgcagcccggcgaaaccgcttctaaaaacgccaacgccggggataaattatttcaagagacggttataatgacaggttttaagagtttcgccgttataaagattggcagcacaaccataacggcgcggcctttaacacatttaacattaacagagattcaggaaatgtccgacgcggaaactctaaatgttaatttacagacgggaagggttcgggtagaagttaagccgcctgccggaacgaaagcgcacacaacggtaaaagggcctatcgtaacggcgtcggttcgcggaacaagttttgaatttgatacggaaaatctttatgtaaacgagggcacagtcagtttcggcggaaacagagggcagggcattcttgtcagagccggagagaacagccggcttgatcaatccggagccgtaacaacacccaaagacgaaaaaatatcaaacttaatgccaccaagtcccgtaggaacaggagcaagagacggcgccgtttccgttcccgcctctgtcggagtgagttttactattgaattaagatttaaataa

SEQ ID NO: 22500 - protein, 217 aa, Unknown
  Obtained from environmental sample
  SIGNAL (1)...(21)
  misc_feature (1)..(217): Xaa is any amino acid
MKQYLFLTILILTGMWVSAQNAVIEHVTGTVEILQPGETASKNANAGDKLFQETVIMTGFKSFAVIKIGSTTITARPLTHLTLTEIQEMSDAETLNVNLQTGRVRVEVKPPAGTKAHTTVKGPIVTASVRGTSFEFDTENLYVNEGTVSFGGNRGQGILVRAGENSRLDQSGAVTTPKDEKISNLMPPSPVGTGARDGAVSVPASVGVSFTIELRFK

SEQ ID NO: 22501 - DNA, 348 bp, Unknown
  Obtained from environmental sample
  misc_feature (1)..(348): n is a, c, g, or t
ttgctggtttctgggagtataactattccaaacagcgttaccagcattggggagcgagctttttatcaatgggggatgcttgcaagcgagaccaccaaattaaccataggaaccggtattaccagctttagaggagatgcttttaaaggttgctcaaagcttaccagcgtaacatttcaaggcccgattaattcaagtgcgttccgctacaattatggtaattatgagatcctggtaagcccattcgatggcgatttgctcgacaagttttactcggcaaacttaatcaccggaacgccggggacgtataccaggacaagcggcggttcagtgtggacgaaacagtag

SEQ ID NO: 22502 - protein, 115 aa, Unknown
  Obtained from environmental sample
  misc_feature (1)..(115): Xaa is any amino acid
MLVSGSITIPNSVTSIGERAFYQWGMLASETTKLTIGTGITSFRGDAFKGCSKLTSVTFQGPINSSAFRYNYGNYEILVSPFDGDLLDKFYSANLITGTPGTYTRTSGGSVWTKQ

SEQ ID NO: 22503 - DNA, 534 bp, Unknown
  Obtained from environmental sample
  misc_feature (1)..(534): n is a, c, g, or t
gtgccaaacaccgccgtcgatatgaactcttgggcggtatcagcctgttatccccggagtaccttttatccgttgagcgatggcccttccattcataaccaccggatctctaagatctacttttgtacctgctctagcctttactctctgagtccagctagcttatgcctttgcgctaacctcacgatgtccgatcgtttattagcgaaccttcttgctcctccgctactctttttgaggagaccgtcctcttcaaactaccctatttacagtggtctcttcttcgattatggggttcgtaggttgacttcttatcctgcaaggggtggtctttcgtgggttgggttctctgcatactggcttctacgtcctcatgggcctccttttttttgtctatccatcgtggacttaactgtatatggagcaactttaggtaatttgttcccgtgtggcttttctccttcgtttctgccgtgcgctctttgttcctcgcttagtcgggtcgttttgcattctgctatttaccggttataa

SEQ ID NO: 22504 - protein, 177 aa, Unknown
  Obtained from environmental sample
  misc_feature (1)..(177): Xaa is any amino acid
MPNTAVDMNSWAVSACYPRSTFYPLSDGPSIHNHRISKIYFCTCSSLYSLSPASLCLCANLTMSDRLLANLLAPPLLFLRRPSSSNYPIYSGLFFDYGVRRLTSYPARGGLSWVGFSAYWLLRPHGPPFFCLSIVDLTVYGATLGNLFPCGFSPSFLPCALCSSLSRVVLHSAIYRL

SEQ ID NO: 22505 - DNA, 855 bp, Unknown
  Obtained from environmental sample
  misc_feature (1)..(855): n is a, c, g, or t
ttgcatnnnnnnnnnnnnnnnnnnnnnnnnnncacttaccgggtaccgctgattgcgacaggcatgcccaacgcgcccagggaaaaagcggcttaccctctggattttaacacaattatggcgataaacgtcctttatctttcggcaatgaccgatatccttaacgaaaaggaagccagttttcagtataaaaagcagtatttcgccttaaaaacgcggatcaactctattatgtgggataatgatgacggcttttaccatgatattgacaagcacgaaaagcgcctccctgtaaaaacgttggcgggttattggcccctgcttgccgagatccccaatgacgacaaggccgaacgaataattagcaggctttctgacccgaaatatttcggggcgccgcatcccttcccctgtgtggctataaacgaaaagtcttttgacgaaagcggcaatggctacaggggttctgttttcccgcaccttacatttatggttataaaaggccttgaaaggtaccagcgctgggatctctcaagggacagcgccataaggcacctgtattttatccttgactccatgagtcccgacggtaaccaccataaagacaggctttgggaggcctaccttccaatgaaagaagggcctgcacaatggccggggagagatgattttccccggccgcaataccttacctacgccgccctttccacaatctgccttaccatagaagacattataggtcttttaatatccctgccgccaaagactgttgactggatcatcccgaatctgggaataatggggatagaaaaactttcgctaaaaaagaatatgatcacaatcctgtcgaaataa

SEQ ID NO: 22506 - protein, 284 aa, Unknown
  Obtained from environmental sample
  misc_feature (1)..(284): Xaa is any amino acid
MHXXXXXXXXXTYRVPLIATGMPNAPREKAAYPLDFNTIMAINVLYLSAMTDILNEKEASFQYKKQYFALKTRINSIMWDNDDGFYHDIDKHEKRLPVKTLAGYWPLLAEIPNDDKAERIISRLSDPKYFGAPHPFPCVAINEKSFDESGNGYRGSVFPHLTFMVIKGLERYQRWDLSRDSAIRHLYFILDSMSPDGNHHKDRLWEAYLPMKEGPAQWPGRDDFPRPQYLTYAALSTICLTIEDIIGLLISLPPKTVDWIIPNLGIMGIEKLSLKKNMITILSK

SEQ ID NO: 22507 - DNA, 525 bp, Unknown
  Obtained from environmental sample
  misc_feature (1)..(525): n is a, c, g, or t
atgccgcttagcttaatcgccggcgccgatgactcagggcgcaggttggatcgcgttttaagaaaagccctgcgccaaacgcctctttcggccatccaccgtatgcttaggcagggccgagttcttgttaacggcttaaaagcgggggccgaccgccgtgtattggcgggggaaaccattacggtatcggttactgaaggcgcatcgaaaaaacagtcagcgccaaatggagaaaagccccaccttgttatgccggagatactttttgagggttcaggacttcttattcttaataaaccggcggggctttctgttcacggtaatgaaagcgttgataacctggttcagtcttaccttaccacgaaactgcgcccttccctttcgttcaagccgggccctttacacaggctggacaggcccagctcgggtattctggttttctcaaccagccttgagggggctcagcgtttccgcgcgatgatgccgggagggaaaaataaaaaaaacgtaccttgcagtagttga

SEQ ID NO: 22508 - protein, 174 aa, Unknown
  Obtained from environmental sample
  DOMAIN (93)...(174): RNA pseudouridylate synthase
  misc_feature (1)..(174): Xaa is any amino acid
MPLSLIAGADDSGRRLDRVLRKALRQTPLSAIHRMLRQGRVLVNGLKAGADRRVLAGETITVSVTEGASKKQSAPNGEKPHLVMPEILFEGSGLLILNKPAGLSVHGNESVDNLVQSYLTTKLRPSLSFKPGPLHRLDRPSSGILVFSTSLEGAQRFRAMMPGGKNKKNVPCSS

SEQ ID NO: 22509 - DNA, 417 bp, Unknown
  Obtained from environmental sample
  misc_feature (1)..(417): n is a, c, g, or t
gtgtatgttgtcatggagttgggtgtaagcctggcttgctataaattggcaaacacaagtttggagcaagaggccgtgtgtccccttttggagggagcctttactcaggcggataccgccgccgacatccattttaccgcagatggaacaaggctgtacgcttctgtaagggggaagaaccttatctcggtttttaataccgttgagagcgcttcaccgcgtttcatcggttcctacccgacttttggagacagccccaggaacttctgcttttccccaggggaggagtttgtccttatcgcccatcaggcttccggtcatgtaactgtctgtccaatagattccaaaaccggggcagtgggaaacgcgcttggttctgtgattctgccgggagcttcttgcgtaatcagggtatag

SEQ ID NO: 22510 - protein, 138 aa, Unknown
  Obtained from environmental sample
  misc_feature (1)..(138): Xaa is any amino acid
MYVVMELGVSLACYKLANTSLEQEAVCPLLEGAFTQADTAADIHFTADGTRLYASVRGKNLISVFNTVESASPRFIGSYPTFGDSPRNFCFSPGEEFVLIAHQASGHVTVCPIDSKTGAVGNALGSVILPGASCVIRV

SEQ ID NO: 22511 - DNA, 678 bp, Unknown
  Obtained from environmental sample
  misc_feature (1)..(678): n is a, c, g, or t
ttgcgcttgccaaaaatggacactctggacggcaaaagacccgctttgtgtgccttatcccgggcgcacatgggaagcaccgcagcagcattgactttgggagcacaggtgtttaaaactttggatgcagcggcagcggccatttacgaaagtaaggcaaaagcgatttacgcccgcgctcggcaaagcgatactcaagcctccgcttttgagcggagcgtaaccaacgatttttactatgacccaaccgatgtggacaatatggctttggctgctgcatatttaggcgaagcaaaaacctatgcccctccagccgcatacgaagttagctggggtgattgcaatgctcttgccaaccatagtttggcactgctcggcgatgtagcggcaaaaaaacgcttgctccaagaggtggcacgttatgaccgcaaagatgaaatagacaatgtttggaacgtcacaggtggatatacatggggcagtttgcatcgttggataggcatggcaaatgcgtatgaacgagcgagccgcttggatggaaaatcactcaccgctccgtttttgggcgttttggattatgtgtttggtcgcaataactggggcatagctatgctcgcttccgccgatttgccttatagtgtccgcaatatcctacatggcatttaccgcttgacctaa

SEQ ID NO: 22512 - protein, 225 aa, Unknown
  Obtained from environmental sample
  SIGNAL (1)...(29)
  misc_feature (1)..(225): Xaa is any amino acid
MRLPKMDTLDGKRPALCALSRAHMGSTAAALTLGAQVFKTLDAAAAAIYESKAKAIYARARQSDTQASAFERSVTNDFYYDPTDVDNMALAAAYLGEAKTYAPPAAYEVSWGDCNALANHSLALLGDVAAKKRLLQEVARYDRKDEIDNVWNVTGGYTWGSLHRWIGMANAYERASRLDGKSLTAPFLGVLDYVFGRNNWGIAMLASADLPYSVRNILHGIYRLT

SEQ ID NO: 22513 - DNA, 804 bp, Unknown
  Obtained from environmental sample
  misc_feature (1)..(804): n is a, c, g, or t
ttgttcttggcggctttgtcttttggtatgctggtgggaagatttatttatgtggcgagtgacggattagtttccagcacattgcttgcccacaattttaccgtatatccacctaaatatcatgaaaagaggcaggaagctaaggcgtggataatccctattgctgcaattctggtaactctcgtctttacctgttcagttaccttgctcggagctcaacgcgccgggaattccatgtcctcagtattgataccgttgattgtttttttccttgccactttcgcgctggcaattacccttaaaaaaaatacgggggcgctatatacgacggtaatcgcacagcttgaaaatctttcatctgaacagaaagaccttaccaagcgaatttccatctgttccgtggatgaactgggaagtattgccggaatggtaaatacttttagcgaacatttgggcggcggtatccgtgatataaaagacgggcaaggagacctttccaaagtgggaaatagcttggaaggaaacgcctcaactatggtaaattccattgcaaaaatttctacggcagtggaacatgtcttggttaaaactaaagggcagatggaaagcgccaatacgtcatcacgcgaggtaaagcagatttccgagcaaattaaatcattggaagaaaatatttttacccaaacgtccagtataaccgaagcttccgccgcagttgaagaaatggtaggcaatatatcatccataagttccgtaaacggaaaaaatggcggcacaattcaagacggtaggggaaacctctga

SEQ ID NO: 22514 - protein, 267 aa, Unknown
  Obtained from environmental sample
  SIGNAL (1)...(30)
  misc_feature (1)..(267): Xaa is any amino acid
MFLAALSFGMLVGRFIYVASDGLVSSTLLAHNFTVYPPKYHEKRQEAKAWIIPIAAILVTLVFTCSVTLLGAQRAGNSMSSVLIPLIVFFLATFALAITLKKNTGALYTTVIAQLENLSSEQKDLTKRISICSVDELGSIAGMVNTFSEHLGGGIRDIKDGQGDLSKVGNSLEGNASTMVNSIAKISTAVEHVLVKTKGQMESANTSSREVKQISEQIKSLEENIFTQTSSITEASAAVEEMVGNISSISSVNGKNGGTIQDGRGNL

SEQ ID NO: 22515 - DNA, 669 bp, Unknown
  Obtained from environmental sample
  misc_feature (1)..(669): n is a, c, g, or t
ttgaaaaaggttatgaggttcaaaggcattatgcgccggagtagctcatttaacacagggcgtatagagcacctttatttagatgaatgggtgcgcgatatgaagcaaaagcggcttgtgaacttgcactatggcgatatgaccgattccagctcgctgattcgcattttgcaattggttcgtccaaatgaaatatataaccttgcggcacaaagggacgtaaaagtttcttttgacgtgccagaatataccgcagaagcagatgcaattggaacccttcgccttttagaagccgtacgaattttgggcatggaaaagaacactcgtatttaccaagcaagcacaagtgaactttacggcttagttcaagaaattcctcaaaaagaaacaactcctttctacccgagttctccttatggagttgcaaaactctacggtttttggataacaaaaaattaccgcgaaagctacgggatgtatgcagttaatggcaccctctttaaccaggaaagcgagtggagtggagaaacttttgtaaccagaaaaattacaattgagctgcgagcatctcacttggtttgcaaaggcaagcacatcctttgggtaatttggattcttgagagatggggaaggcaagtgagaaaggattcgcaggcggattatttgtag

SEQ ID NO: 22516 - protein, 222 aa, Unknown
  Obtained from environmental sample
  DOMAIN (1)...(219): NAD dependent epimerase/dehydratase family
  misc_feature (1)..(222): Xaa is any amino acid
MKKVMRFKGIMRRSSSFNTGRIEHLYLDEWVRDMKQKRLVNLHYGDMTDSSSLIRILQLVRPNEIYNLAAQRDVKVSFDVPEYTAEADAIGTLRLLEAVRILGMEKNTRIYQASTSELYGLVQEIPQKETTPFYPSSPYGVAKLYGFWITKNYRESYGMYAVNGTLFNQESEWSGETFVTRKITIELRASHLVCKGKHILWVIWILERWGRQVRKDSQADYL

SEQ ID NO: 22517 - DNA, 753 bp, Unknown
  Obtained from environmental sample
  misc_feature (1)..(753): n is a, c, g, or t
gtggggcaaaaattggaaaaatacttctcaaattacaggccaaaacccgaaagtgccttgctcatggggcttttggcaggcgataggtctggaatttcggaaactttgcagaatgattttagaaaaacgggtttggttcacgttttaagcatttctgggtttcacgtcgttatgctggcgggtatgctcactctgtttttgagggctttgaggttgccacgcaaggtttcgcaaattttatccatagcccttttatgcctttatgctcccatcacaggcggttcttctgcggtgtggcgcgctgtgcttatgttttgcgttatggaaagcggaaatatttttcaaaaaagcgcaaattcaataaatgcccttggggtggctcctgcttttatcctaatttttaacccagaacaggctttcagtgccggatttcagctttcggcggcggcaacttttggaattttgctagggcagggcattaaattgccgagttttcgcggcaaaataggcaaggttttttcctcttttatttttaatccgagttttataacgctctgcgcaacgttaagtcactttgcccttgctcgtttttcattttcagtctttttctccaaatatcctggcttggaaatttggtgggttgttccgcttgtgggtttggctatgcaggctggggtcttatcgcttatctggattcaccccctttatttgtcaaacatttgcgaatccctcccccctccctctgccgtctag

SEQ ID NO: 22518 - protein, 250 aa, Unknown
  Obtained from environmental sample
  DOMAIN (24)...(237): Competence protein
  misc_feature (1)..(250): Xaa is any amino acid
MGQKLEKYFSNYRPKPESALLMGLLAGDRSGISETLQNDFRKTGLVHVLSISGFHVVMLAGMLTLFLRALRLPRKVSQILSIALLCLYAPITGGSSAVWRAVLMFCVMESGNIFQKSANSINALGVAPAFILIFNPEQAFSAGFQLSAAATFGILLGQGIKLPSFRGKIGKVFSSFIFNPSFITLCATLSHFALARFSFSVFFSKYPGLEIWWVVPLVGLAMQAGVLSLIWIHPLYLSNICESLPPPSAV

SEQ ID NO: 22519 - DNA, 738 bp, Unknown
  Obtained from environmental sample
  misc_feature (1)..(738): n is a, c, g, or t
atgctttccgcaaccataagcgaggcttctggcaggttgctcgcggggcaaacgctggaggctttttggaattcggtttgcggctacaacttattttccgttggattaaactgcgcccttggtgcagaggaaatgggttcgcacattgcggagatttccagaattgcaaatgtttttgtgagtgcatatccaaatgcgggcttacccaacccgctcggcggctacgacgaaacgccggaaggcatggcaggtcacatagagaaattcgcgcaaaacggctgggtgaatatagtgggcggttgttgcggcacaacaccggaaaacatagccgcaatgaaaaaagccgtgcaaggcaaagcaccgagaaagatcccggagataaaaaatataaccaggctctccggcttggaacccgttgatataacggagcagagcaattttatgaacatcggcgagcgaaacaatatggctggtagcttgaagttcgcaaagatggttagggaaaataattggagcgaggcaattcagttatccatttctcagattgaaaacggtgcgcagataatagatataaacgtagatgacgggttgctcaattcaagcgagaaaatgcggcattttgtgaacctctatgtttctgaaccagcagcggcaaaatgccctataatgatagatagttcggactggaatggacttgtggctggcatggaaaagtttctccggccaagggtattgtga

SEQ ID NO: 22520 - protein, 245 aa, Unknown
  Obtained from environmental sample
  misc_feature (1)..(245): Xaa is any amino acid
MLSATISEASGRLLAGQTLEAFWNSVCGYNLFSVGLNCALGAEEMGSHIAEISRIANVFVSAYPNAGLPNPLGGYDETPEGMAGHIEKFAQNGWVNIVGGCCGTTPENIAAMKKAVQGKAPRKIPEIKNITRLSGLEPVDITEQSNFMNIGERNNMAGSLKFAKMVRENNWSEAIQLSISQIENGAQIIDINVDDGLLNSSEKMRHFVNLYVSEPAAAKCPIMIDSSDWNGLVAGMEKFLRPRVL

SEQ ID NO: 22521 - DNA, 435 bp, Unknown
  Obtained from environmental sample
  misc_feature (1)..(435): n is a, c, g, or t
ttgctcagggtttatttcacagggtgtttcttcaataattttatgccctggcacgtgggtggagacttaaaaaagatttacgacataaataaaaatttcaaggaaaccgttggggcggctgtgtctgccccctttttggacaggctctgcgggctttacattttatgtgcttttgccctagccgtgggagctgcatttttttggagagacccaaaccagagatattttttattgccctcgctgttgatttttttggctttttccctagccttgtgtatgttgttcagccgcaggtttggcccgctggttttcggtaagttattcccatttttggggaaaagggttttgcatctacatgggcggttctcagcgttcaaaacaaaaaaactttttacaccagtatttggcgttttccacagttacgcaagggcctag

SEQ ID NO: 22522 - protein, 144 aa, Unknown
  Obtained from environmental sample
  misc_feature (1)..(144): Xaa is any amino acid
MLRVYFTGCFFNNFMPWHVGGDLKKIYDINKNFKETVGAAVSAPFLDRLCGLYILCAFALAVGAAFFWRDPNQRYFLLPSLLIFLAFSLALCMLFSRRFGPLVFGKLFPFLGKRVLHLHGRFSAFKTKKLFTPVFGVFHSYARA

SEQ ID NO: 22523 - DNA, 306 bp, Unknown
  Obtained from environmental sample
  misc_feature (1)..(306): n is a, c, g, or t
atggatttggtatttgaatgggatctagaaaaagaacgggaaaatgttaaagatcatggcatttattttgataccgctgtacaggcattttatgattattaccgtatggaacgccatgatgatgattcaagcgataatgaggatcgctggcaaactatgggattttttgacgatgtgctttttgtggtttatacggagcgtaaggatattatccgtataatatccgcgcgtattgcggagccttttgaaaggaggatttattatggcaatagtgagatacacggctggcaaagagttaacccctga

SEQ ID NO: 22524 - protein, 101 aa, Unknown
  Obtained from environmental sample
  DOMAIN (3)...(90): Protein of unknown function (DUF497)
  misc_feature (1)..(101): Xaa is any amino acid
MDLVFEWDLEKERENVKDHGIYFDTAVQAFYDYYRMERHDDDSSDNEDRWQTMGFFDDVLFVVYTERKDIIRIISARIAEPFERRIYYGNSEIHGWQRVNP

SEQ ID NO: 22525 - DNA, 402 bp, Unknown
  Obtained from environmental sample
  misc_feature (1)..(402): n is a, c, g, or t
atgatgttgttaataatttttgtcagcgcggcagtaacataccggctgatactccatgagcgggcaagggagatgggcattatgagggctattggtttttacggaggcgatttaaggcttgttttgtggacggaggttattgccctgggaataatttccctgtgcgcgggctttttcctttcgctccttttaagcggtttgttttcgtttgtgtctttttcatggtttccaagttttgaaatattccagaaaaacggaaaattatccgttctgtatctgcctaaaacggttttaattaacgcgattcttgtgtttgccgtgcttatttgcgccgcgttttttccgtctttaaaagtttcaaaaagaaatttaccgtcgttattatcgggagaggccttatga

SEQ ID NO: 22526 - protein, 133 aa, Unknown
  Obtained from environmental sample
  DOMAIN (1)...(124): Predicted permease
  misc_feature (1)..(133): Xaa is any amino acid
MMLLIIFVSAAVTYRLILHERAREMGIMRAIGFYGGDLRLVLWTEVIALGIISLCAGFFLSLLLSGLFSFVSFSWFPSFEIFQKNGKLSVLYLPKTVLINAILVFAVLICAAFFPSLKVSKRNLPSLLSGEAL

SEQ ID NO: 22527 - DNA, 339 bp, Unknown
  Obtained from environmental sample
  misc_feature (1)..(339): n is a, c, g, or t
gtgagattgaggccggagtgctttaacgcgtggaaagccgatgttgagttcaggggcagggtcatccatgtcggcgcggcgcgggggattttggcaaacgccgctcttatggcggcttcattcgctgtaatgctgccgcgctcggaaagcccggaggccacagacggctattacggctactactgtcccatggaaatatccggcaatttggaaaccgcccaactggaaatttttttacgggattttgaaaacgaaggcatgaagcggaggctggaggttttggagacacttggcaaaaacagtcgaggcgcaatttccgggcggaaaggttattgttaa

SEQ ID NO: 22528 - protein, 112 aa, Unknown
  Obtained from environmental sample
  misc_feature (1)..(112): Xaa is any amino acid
MRLRPECFNAWKADVEFRGRVIHVGAARGILANAALMAASFAVMLPRSESPEATDGYYGYYCPMEISGNLETAQLEIFLRDFENEGMKRRLEVLETLGKNSRGAISGRKGYC

SEQ ID NO: 22529 - DNA, 834 bp, Unknown
  Obtained from environmental sample
  misc_feature (1)..(834): n is a, c, g, or t
ttgcatnnnnnnnnnnnnnnnnnnnnnnnnnncacgcgctctccttccccttctgggtcgaatccgctnatnaaaaatgccgctgagtatcttttatggttttttgacggcgntgcggaaatagtgatgaaaataataaaagggatcatgcagtatgcgcctatcggcgtgtgcgcccttgttttcggagttttagcccagaacgggccgaaagtaatcggcgctctggggattgttaccgccgcctgttttatcggctatgctttacatattgtcgtcgtttattttgggcttctcaaattctacggaggcatgaatgttaagcgctttttcagggatggaaaggacccgtttatcaccgcttttgtaaccagaagttccaacggtactttttttgtaaccatggaagccgcggagagtatgggcatagagaaggacgtgtattctttctcgcttccgcttggggcaaccgtcaatatggacggaaccgcgatttacgagggcgtatgcgccatcttcatcgctcttaccgtttggggtcatggttttaacgcccatcaaatgggaatgatcgtagtgacagcgactttggcttcaatcggaaccgccggtgttccgggcgccggcgcaatcatgctgcttatggtacttgaaagcgtggggcttaaggttgaggcgggaaccgcggtggcgggcgcctacgcgatgatcatcgggattgacgcgcttcttgacatgggccggaccgccctcaatgttaccggagaccttgtctgtaccgcggttgtttccaaaaaaatgaatatgcttgacataaacaagtggaattcctga

SEQ ID NO: 22530 - protein, 277 aa, Unknown
  Obtained from environmental sample
  DOMAIN (1)...(266): Sodium:dicarboxylate symporter family
  misc_feature (1)..(277): Xaa is any amino acid
MHXXXXXXXXXTRSPSPSGSNPLXKNAAEYLLWFFDGXAEIVMKIIKGIMQYAPIGVCALVFGVLAQNGPKVIGALGIVTAACFIGYALHIVVVYFGLLKFYGGMNVKRFFRDGKDPFITAFVTRSSNGTFFVTMEAAESMGIEKDVYSFSLPLGATVNMDGTAIYEGVCAIFIALTVWGHGFNAHQMGMIVVTATLASIGTAGVPGAGAIMLLMVLESVGLKVEAGTAVAGAYAMIIGIDALLDMGRTALNVTGDLVCTAVVSKKMNMLDINKWNS

SEQ ID NO: 22531 - DNA, 585 bp, Unknown
  Obtained from environmental sample
  misc_feature (1)..(585): n is a, c, g, or t
ttgaagccgattatccacaaaaccccattgtttctcgctctattgactgcgctgctagggcctctagggcctgtccaggccctgtgcgcccaaaccatgtcggaagacatcatattgaccgagctgcctgaattttcggcaaacccagacgtcgccattttcatcgcgtctatgtcagccaagcatggcatggatggcgaatatttggcagggctcttttccagcatcaggccaaacatgcgggtgctgtcgctattctcgcccagccatctcaaaaccgcgccgccctcttggaagaattacagcgcttcatttctcagcaaggcgcgcattgatggcggggccgcgttctgggcgcaaaacaaagaggcgctggacagagccttccagcaattcggcgtcccccaagaaattatagtcgccatcatcggggtagaaacctactatggaaggcacactggcggttttggcgtgatggaggcccttgccacttggcttccacgaacaaggcgcgcccaaatttttaggggcgagctggagcattttctgctgctgggcccaagaaaagggcttaaaaccctttga

SEQ ID NO: 22532 - protein, 194 aa, Unknown
  Obtained from environmental sample
  SIGNAL (1)...(27)
  misc_feature (1)..(194): Xaa is any amino acid
MKPIIHKTPLFLALLTALLGPLGPVQALCAQTMSEDIILTELPEFSANPDVAIFIASMSAKHGMDGEYLAGLFSSIRPNMRVLSLFSPSHLKTAPPSWKNYSASFLSKARIDGGAAFWAQNKEALDRAFQQFGVPQEIIVAIIGVETYYGRHTGGFGVMEALATWLPRTRRAQIFRGELEHFLLLGPRKGLKTL

SEQ ID NO: 22533 - DNA, 534 bp, Unknown
  Obtained from environmental sample
  misc_feature (1)..(534): n is a, c, g, or t
atgtgctgggaaagcatgaaattgacaacttcgaaaaacgaggtcatggtgataatatgcccgggtgtaaggccggattccccttaccttcagctggcaaagcgtatggaaaccgatatcggcgtatttcttgcggccatcggaggcttttccgcgacaggctcccctgtaaggcttatcgcggttaccggctccaagggcaaatccagcgtatcctctgccctgcattgggcgctgaaagagtcaaacttgagggtctacctcggcggcaatatcacggtgtcgcccctttcatttctggacgagcttcacaacggcgataccgttgtgcttgaactttcaagctggcagttaggcgatctgaaaggcagaacaaacgaagacggctccgccctgttcaaaccgaaagccgccgtgcttaccgccatcatgccggatcaccttgaccgctacggcactatggaggcgctatatcagcgtacaaagcggataatctaccagggacaggaccaaagcgacagtgggatcctctag

SEQ ID NO: 22534 - protein, 177 aa, Unknown
  Obtained from environmental sample
  DOMAIN (60)...(177): Mur ligase middle domain
  misc_feature (1)..(177): Xaa is any amino acid
MCWESMKLTTSKNEVMVIICPGVRPDSPYLQLAKRMETDIGVFLAAIGGFSATGSPVRLIAVTGSKGKSSVSSALHWALKESNLRVYLGGNITVSPLSFLDELHNGDTVVLELSSWQLGDLKGRTNEDGSALFKPKAAVLTAIMPDHLDRYGTMEALYQRTKRIIYQGQDQSDSGIL

SEQ ID NO: 22535 - DNA, 780 bp, Unknown
  Obtained from environmental sample
  misc_feature (1)..(780): n is a, c, g, or t
gtgccgggccgcccctccaggtcgacggtatctataagcttgtatgtagactatgacgctttgcatttggtttacgattcgatctcctcaaaaaaagaatgcgaagattttctggatctgcattttgatatcataaacctttccaagattccaacgcggaaaatgaaatctattaccgacgaaccgttaatctggcgttactttgtcacgcctttgcctaccaaacttgcctcaagcctggctcgacgaagcggcgaattcacggccaaatgcgtgtttcgcgtcaatactaggatcgatggcgcttatgtattttccagcggaaagaacatgggcgtattcgagggagtcggcttccccgaggatgtcggacggttttacaagcttgaagaatacgagggctggtgctttaccgctcacgggcgctatccgacaaatacgccgggctggtggggcggcgctcatccgttctcgcttcttgattatacagtggtacacagcggcgaagtatcctcttacgacaccaatcggcgctcaattgaaatgtacggctataagtgcacgcttcataccgacaccgaaggtatcacctacataggtgattatctgcacagaaaacaccagctttccttcaaagaaatcgcttcggttatcgcggctccgttctggtcaactatcggaaacatgaaacctgacgatctggagacccatgagtacctgcgcatcatgttcagccggcagctgataacccggcccgctttcaattcttgtacgctttga

SEQ ID NO: 22536 - protein, 259 aa, Unknown
  Obtained from environmental sample
  misc_feature (1)..(259): Xaa is any amino acid
MPGRPSRSTVSISLYVDYDALHLVYDSISSKKECEDFLDLHFDIINLSKIPTRKMKSITDEPLIWRYFVTPLPTKLASSLARRSGEFTAKCVFRVNTRIDGAYVFSSGKNMGVFEGVGFPEDVGRFYKLEEYEGWCFTAHGRYPTNTPGWWGGAHPFSLLDYTVVHSGEVSSYDTNRRSIEMYGYKCTLHTDTEGITYIGDYLHRKHQLSFKEIASVIAAPFWSTIGNMKPDDLETHEYLRIMFSRQLITRPAFNSCTL

SEQ ID NO: 22537 - DNA, 507 bp, Unknown
  Obtained from environmental sample
  misc_feature (1)..(507): n is a, c, g, or t
ttgttctccgctactaaaaatatagcgtcgttattattcggttatatattaaatcccataaaacgcattgttataggcgcgattgattacattccgaatctttttacgattgtgataattatcattgttacccattatgtgctgagagggtttaaatattttgcgtctcaaatagaaaaaggcaagttgcaaattccgggtttttataccgaatgggcaagacccactttgagaattttacaggttcttttgtgggcgtttaccattgcagttatctatccttatctgccgggttccgaatcaaaagcttttcagggagtttcggtttttatccggaattattttttccgtccggttcgaacaagtggaattggaaaattttggtctccgggcttgaaatttcaaaatatggcgcccctttttaaaaaaaggccgaactttcgttttaaatttataggagaatatcgggggttttgtttgtgggaaaaaaaaattttgaagggttag

SEQ ID NO: 22538 - protein, 168 aa, Unknown
  Obtained from environmental sample
  misc_feature (1)..(168): Xaa is any amino acid
MFSATKNIASLLFGYILNPIKRIVIGAIDYIPNLFTIVIIIIVTHYVLRGFKYFASQIEKGKLQIPGFYTEWARPTLRILQVLLWAFTIAVIYPYLPGSESKAFQGVSVFIRNYFFRPVRTSGIGKFWSPGLKFQNMAPLFKKRPNFRFKFIGEYRGFCLWEKKILKG

SEQ ID NO: 22539 - DNA, 855 bp, Unknown
  Obtained from environmental sample
  misc_feature (1)..(855): n is a, c, g, or t
ttgggagtctttgagcccctgacggtgtacaccgcgactattacgctgactgccaaaagcggctacaccttacaaagggtagcagccaactttttcacggttgcgggggcggcatcggtacacaacaatgccaattccggcgttgttacggcggtatttccggcgacaggcggcgtcaccatcaatatagccgccatacagggcataaccgccccggctgcagactctacccctgtaacggcaattaccgaaacagagcagttcagaggaactgttttatggtctccggagatatcgggaaccttcgccgaagctacacggcacaccgcgactattacactgatcgcaaaaaccggctactcatttgaaggggtaagaattaactttttcacggttgcgggggctgcatcggtacgcaacaatgcctattccggtgttgttacggcagcattcccggcgacagcggcactcccaatgacaataaatattccccttcttagccggcgttacatctccggtaatctggaaaccctcggcaatcgtaattcttctaacactcccaatatcccggaaccgtcatatggtcgacggatgtatcaggagtttttgatccctaaactgtttaccccgcgactttatcaccacccgcttaatctcgttatacattttcaaggggtagaggcccatttttttatttttgccacggttgcttcttttctctatatttccatatcccgccctcgttcccgcgttatctccccattacgggtaacttttccatcaatatctcccttttaccttggagtttactgccccccctgtcaaacatcttatctttgtatttgcaattcctaa

SEQ ID NO: 22540 - protein, 284 aa, Unknown
  Obtained from environmental sample
  misc_feature (1)..(284): Xaa is any amino acid
MGVFEPLTVYTATITLTAKSGYTLQRVAANFFTVAGAASVHNNANSGVVTAVFPATGGVTINIAAIQGITAPAADSTPVTAITETEQFRGTVLWSPEISGTFAEATRHTATITLIAKTGYSFEGVRINFFTVAGAASVRNNAYSGVVTAAFPATAALPMTINIPLLSRRYISGNLETLGNRNSSNTPNIPEPSYGRRMYQEFLIPKLFTPRLYHHPLNLVIHFQGVEAHFFIFATVASFLYISISRPRSRVISPLRVTFPSISPFYLGVYCPPCQTSYLCICNS

SEQ ID NO: 22541 - DNA, 306 bp, Unknown
  Obtained from environmental sample
  misc_feature (1)..(306): n is a, c, g, or t
gtgttttttgccgagaagtgcgaaaacaatattttaaaaaagtttgatcattatcaaaaaaaaggccgccttgaaatcctggctacagccgcgacaaacgcgttcctgcctttttatacagggtatcccgaagcggttcaggctcagttcccggtcgcgatttcgtcctacaaggctaatttcggcaggttaccacagggattctggcttccggaattgggatggaaagcggaattggattattggctcagggcttncaatttaaaaatatgcacttgtggattcccccgctctggctttccctaa

SEQ ID NO: 22542 - protein, 101 aa, Unknown
  Obtained from environmental sample
  misc_feature (1)..(101): Xaa is any amino acid
MFFAEKCENNILKKFDHYQKKGRLEILATAATNAFLPFYTGYPEAVQAQFPVAISSYKANFGRLPQGFWLPELGWKAELDYWLRAXNLKICTCGFPRSGFP

SEQ ID NO: 22543 - DNA, 408 bp, Unknown
  Obtained from environmental sample
  misc_feature (1)..(408): n is a, c, g, or t
atggaagaaatgttacgggctgaaatctggactgtcgcgcagaccaatgaaggcaatgtagtcttgctgcgccccctggataaaaacatagtcatacccgtctttgtaggccaactggaaatccagtcaatactcataggcatggaggatataaaattgccccgtccccttactcatgacctttgtctttccctgcttgacgctctgggccttgcgctggatcgcgtggaagtccgggaactcttcggcaacgcatttcacgccaaacttgtgataagcggcggcaatttttcagctgacaaacccttaattgtggacagcccccccttgggacccccttggacttgcgatcccgccgcaaatgccccttcatggtttccccggatattgaaaagcaaacgggcttag

SEQ ID NO: 22544 - protein, 135 aa, Unknown
  Obtained from environmental sample
  DOMAIN (1)...(122): Uncharacterised ACR, COG1259
  misc_feature (1)..(135): Xaa is any amino acid
MEEMLRAEIWTVAQTNEGNVVLLRPLDKNIVIPVFVGQLEIQSILIGMEDIKLPRPLTHDLCLSLLDALGLALDRVEVRELFGNAFHAKLVISGGNFSADKPLIVDSPPLGPPWTCDPAANAPSWFPRILKSKRA

SEQ ID NO: 22545 - DNA, 819 bp, Unknown
  Obtained from environmental sample
  misc_feature (1)..(819): n is a, c, g, or t
ttgacacacgcttcgtttattatcttctcctcttcaatttttgattttttattttttatttattattttttattttctctcttctctctccatcgctatttatgctattataacaacatgacagccgatgaattacgttcaaagtatattaattttttcgtttccaaaggacatgcccaaatacagggcaagtcccttttgccggaaaatgaccctacggtgctttttactacggcggggatgcatccgcttgttccgtatcttttagggcaggaacatccggcgggcaagaggctcgttgattttcaaaagtgcatacgcacgggggacattgacagcgtgggagatccaagccacctgacgttttttgaaatgttaggcaactggtctttgggagactactttaaagaagaagcgattaaaatgagttttgaatttttaacttccccgcagtggcttaatatcccgattgaaaaattgggtgtgacggtttttatgggcgaaggggaagttcccaaagatgatgagtcggcagcaatttggaagaaaatgggcattcccgaaaaccggatagcctatttgccaagagaggataactggtggggaccggctggtaccaccggcccttgcggtcctgatactgagatgttctactacataggggactcgccttgcggatccgattgtaaaccgggttgctcgtgcaaaaaatggttggaaatatggaacgacgtttttatgcagtacaacaaagaactcaagcggggcttaccaagcttcttgcgcgaaaatgggttcgatacgggcagtgggtattga

SEQ ID NO: 22546 - protein, 272 aa, Unknown
  Obtained from environmental sample
  DOMAIN (44)...(272): tRNA synthetases class II (A)
  misc_feature (1)..(272): Xaa is any amino acid
MTHASFIIFSSSIFDFLFFIYYFLFSLFSLHRYLCYYNNMTADELRSKYINFFVSKGHAQIQGKSLLPENDPTVLFTTAGMHPLVPYLLGQEHPAGKRLVDFQKCIRTGDIDSVGDPSHLTFFEMLGNWSLGDYFKEEAIKMSFEFLTSPQWLNIPIEKLGVTVFMGEGEVPKDDESAAIWKKMGIPENRIAYLPREDNWWGPAGTTGPCGPDTEMFYYIGDSPCGSDCKPGCSCKKWLEIWNDVFMQYNKELKRGLPSFLRENGFDTGSGY

SEQ ID NO: 22547 - DNA, 684 bp, Unknown
  Obtained from environmental sample
  misc_feature (1)..(684): n is a, c, g, or t
atgacagcaaaaatacaccctatgtccgtggtgagcgtggacgccgaacttggggatgacgttgtggtcggacctttttgcgtcattgaagggtcctccaagattggcaacaggacggtactccgcagtcacgttgtcatcgggccaaatacagagatcggccaagacaacgacatcttcccccatgccacgcttgggctgcaatgccaagacattagctataaaggcgagcttacgcgccttgtggtcggagaccgcaacaccatccgcgaatcagccacgctccacaggggtactgcaaagggcgggggcatcacaacggttggcagcgataacttcatcatgacgggagtccacatcgcgcacgactgttcggtgggagaccaagtgattatggcgaattgcgcctccttggctggccatgtccatgttggcagtatcccaaatatcagtgccttttccgcagtccaccagttctgctgcgttggtgactacccatttatggggggctttccaaccgccaacatggatgtactggcctatattaagaccgctcggaactctcgaggtcaaaagcttattgatttaaacacagatgggcttgaaaaccccaggggcttttttcacaggaaaactattagcggtccatcccgctcggtcccacccgaaatccttattcggtga

SEQ ID NO: 22548 - protein, 227 aa, Unknown
  Obtained from environmental sample
  misc_feature (1)..(227): Xaa is any amino acid
MTAKIHPMSVVSVDAELGDDVVVGPFCVIEGSSKIGNRTVLRSHVVIGPNTEIGQDNDIFPHATLGLQCQDISYKGELTRLVVGDRNTIRESATLHRGTAKGGGITTVGSDNFIMTGVHIAHDCSVGDQVIMANCASLAGHVHVGSIPNISAFSAVHQFCCVGDYPFMGGFPTANMDVLAYIKTARNSRGQKLIDLNTDGLENPRGFFHRKTISGPSRSVPPEILIR

SEQ ID NO: 22549 - DNA, 462 bp, Unknown
  Obtained from environmental sample
  misc_feature (1)..(462): n is a, c, g, or t
atgacagagtttttacacacccctgttatgcttgaagaaacgctcaatttgctcagtccccgcgggaaagacgaattgatgatagactgtttcacaggggaaggcgggcatagttattacttcctttccaggtttaaggaattgaagatggtttgtattgacgcggacaaggatattctcgcgatagcagaagagaggcttaaagaatttaaagaccgcgtctatttttattacggctggtctcatgacttttttaccgaatatccgtccgagcttaaaaggccggacactatattttttgatcttggcgtaagctcctaccattataaaaagagcgggaagggatttagttttgaaaaggacgaatatctggatatgagacttgacacttccggtggcgttacggcggcggatttattaaccaggcttccggaaaaagagctgggcaaccttcctttataa

SEQ ID NO: 22550 - protein, 153 aa, Unknown
  Obtained from environmental sample
  DOMAIN (3)...(153): MraW methylase family
  misc_feature (1)..(153): Xaa is any amino acid
MTEFLHTPVMLEETLNLLSPRGKDELMIDCFTGEGGHSYYFLSRFKELKMVCIDADKDILAIAEERLKEFKDRVYFYYGWSHDFFTEYPSELKRPDTIFFDLGVSSYHYKKSGKGFSFEKDEYLDMRLDTSGGVTAADLLTRLPEKELGNLPL

SEQ ID NO: 22551 - DNA, 645 bp, Unknown
  Obtained from environmental sample
  misc_feature (1)..(645): n is a, c, g, or t
atggattatacagaagcatttagtggaatctctgaacttctccaaaagggaaaagccaaagatattgtagtttcagtgcaaaaagccctggatgatggagccccgcccggggatattttggaaaaagccctgatggaagggatgaatatcgtaggggggaaattcaaacggaatgaagtttttgttccggaagttctcattgccgcacgggcaatgaacaaagccgttgaaacccttaaaccccatcttgctaaagcgggggtaaatcccgtaggaaaggcgatcatctgtaccgtcaagggagatctccatgatatcgggaaaaacctggtaaaaatgatgatcgaaggcaaaggtatcgaagtagtagatctgggtgtggactgtgacgcccaaaaaatcgtagacacggttaaagaaagcggagcaaaagttgtctgtctttccgccctccttaccactactatgacatctcagaaagatgtgatcgatgcgcttaaaaacgagggtgtccgtgacaaggtaaaggtgatggtaggaggcgctccggtaactcagagttttgccgatgaaatcggcgccgatgcttatacagccgatgtcgccagcgcttgcgaggtttgccgggctttttttaataagtaa

SEQ ID NO: 22552 - protein, 214 aa, Unknown
  Obtained from environmental sample
  DOMAIN (2)...(89): B12 binding domain
  misc_feature (1)..(214): Xaa is any amino acid
MDYTEAFSGISELLQKGKAKDIVVSVQKALDDGAPPGDILEKALMEGMNIVGGKFKRNEVFVPEVLIAARAMNKAVETLKPHLAKAGVNPVGKAIICTVKGDLHDIGKNLVKMMIEGKGIEVVDLGVDCDAQKIVDTVKESGAKVVCLSALLTTTMTSQKDVIDALKNEGVRDKVKVMVGGAPVTQSFADEIGADAYTADVASACEVCRAFFNK

SEQ ID NO: 22553 - DNA, 516 bp, Unknown
  Obtained from environmental sample
  misc_feature (1)..(516): n is a, c, g, or t
atgccaagaccaacgaacaaaaaggcacttcttgaacaagctgaactcaatttcaataagctattggaattcattgacgggcttcccgaaaaaataaaaaacgggacatacaaaaataatgagttgaatgagcgtgataaaacagtcgctgatgtgatatgccatttgcacgagtggcatttgatgatgggaacttggtataaagttggaatgtcgggtaaaaagccggcaatacctgcggagggttatacgtttcaaactttgccgaaattgaaccataagatatgggagcaatataaagggactgaattgaaaaaagcaattgagatgttcaaaaagagccataaggcagtaatggctttgattgggaagcatactgatgatgaattatttaccaaaaagaaataccaatggacaggaacaacgtcattaggttcgtactttatttcaagtacttcaagccattatgactggggtttgaaaactgtgaagccgttgaagaaaatggtgaaatga

SEQ ID NO: 22554 - protein, 171 aa, Unknown
  Obtained from environmental sample
  DOMAIN (1)...(169): Protein of unknown function (DUF1706)
  misc_feature (1)..(171): Xaa is any amino acid
MPRPTNKKALLEQAELNFNKLLEFIDGLPEKIKNGTYKNNELNERDKTVADVICHLHEWHLMMGTWYKVGMSGKKPAIPAEGYTFQTLPKLNHKIWEQYKGTELKKAIEMFKKSHKAVMALIGKHTDDELFTKKKYQWTGTTSLGSYFISSTSSHYDWGLKTVKPLKKMVK

SEQ ID NO: 22555 - DNA, 915 bp, Unknown
  Obtained from environmental sample
  misc_feature (1)..(915): n is a, c, g, or t
ttgttttgggtggagtgcatccctgctatcctttgcggcttgttcgttctgtttatccccgagggccctcgttatttggtggctcgcaaggaaaatcagaaagctggcgaaattttgggcaaaattctctcacccggcgttgtagctcaaaaaatagaggatattaaaaagagcttgcattccgaagttgctccaaagttcagcgacttgctggaaaaggtcgctggcaaaacccgtttggttcccatcgtttgggttggaataggcatcgcggcgttgcagcaatttgttggcataaatgttattttctactacggcaatgttctgtgggaatctgttggcttcactcagcaagacgctatgaaaactagtgttctctcttctgttgcaaacatatctagcaccgttatagccatagctctggtggatagaattggcagaaaaccattgctcttggcaggttctcttgggatgttcctaacgcttggcattatggctgctatatacggcacggcatgcgtggacgctcacggcaaccctgaaataagctgtgctgttgcctacactgctttgaatatctgccaatttctatgtggtgttttttgcattctcctgaggacctgtgtgctgggtattgctctgtcaattgtctacatccgccttcgcttagtataccttcgctttgggtcgcatacctccattggcatctctattttgtcatatcttgttttattcccagctttttgctgggcaaatcaggtattggtcttcgctaattcgcatttctccgcctcctccccctctatttactctccttctctcgtctctcgccagcctctggtacccctactccatttactcggaaaactcttcttctcttccttctcgactcccgtctattcaaatctcttttaa

SEQ ID NO: 22556 - protein, 304 aa, Unknown
  Obtained from environmental sample
  misc_feature (1)..(304): Xaa is any amino acid
MFWVECIPAILCGLFVLFIPEGPRYLVARKENQKAGEILGKILSPGVVAQKIEDIKKSLHSEVAPKFSDLLEKVAGKTRLVPIVWVGIGIAALQQFVGINVIFYYGNVLWESVGFTQQDAMKTSVLSSVANISSTVIAIALVDRIGRKPLLLAGSLGMFLTLGIMAAIYGTACVDAHGNPEISCAVAYTALNICQFLCGVFCILLRTCVLGIALSIVYIRLRLVYLRFGSHTSIGISILSYLVLFPAFCWANQVLVFANSHFSASSPSIYSPSLVSRQPLVPLLHLLGKLFFSSFSTPVYSNLF

SEQ ID NO: 22557 - DNA, 423 bp, Unknown
  Obtained from environmental sample
  misc_feature (1)..(423): n is a, c, g, or t
atgagagacaccggagcgacggcaagccctttccattccttccttttcctgcaaggtctggaaaccctgtcactacgggtggaacgccatgtagaaaacgcgctaaaagtggtagaatacctgcgtaagcatccaaaggtggaaagcttgaaccatccggctctgccaaaccatccggatcacgccctgtatcaaaagcacttcccgggcggcgcaggctcaattttcacttttgagatctctggcggtgcggagcaggcgaggaactttattgacagattggagttattctcccttcttgccaatgaggtggattccaaatcgctggttctccatccggcaagcacaacgcattcgcagctttcgggggacgagcttctggagcatgggataaagccgaataccatccggttttctttctga

SEQ ID NO: 22558 - protein, 140 aa, Unknown
  Obtained from environmental sample
  DOMAIN (2)...(140): Cys/Met metabolism PLP-dependent enzyme
  misc_feature (1)..(140): Xaa is any amino acid
MRDTGATASPFHSFLFLQGLETLSLRVERHVENALKVVEYLRKHPKVESLNHPALPNHPDHALYQKHFPGGAGSIFTFEISGGAEQARNFIDRLELFSLLANEVDSKSLVLHPASTTHSQLSGDELLEHGIKPNTIRFSF

SEQ ID NO: 22559 - DNA, 603 bp, Unknown
  Obtained from environmental sample
  misc_feature (1)..(603): n is a, c, g, or t
atgaggcaacaggatgacgtcgcaccgccgaatggcggtgcagtaaatccattcttatcggcaaacgacccgaaggggcgtatgttgccgaatgtaggacgaatcctgcgcggctcagtattgacttttcaccatttttttggtaatatacctattatgaatcttaaaactgtaatttcaacggaaaccatcgaccttaacttaaaaggtaccaccaagaaagaaataattaacgaattacttgatattcttgtcagaactggaaaaatcaaggataaaggggctgcgttagcggcggtaatggaaagagaagaaaaaatgtccaccggtatgaagcatggaatcgccattccgcacggcaaatgcgcctctacggaggatctggtcgcctgtatcggtatttccaaaaaccccgtagactttgattctctggataaacagccgtgcagaatcttcatcatgaccctttctccggtggaaaaaacgggaccccatttgcaatttttggcggaagtaagtttattatttaaaagcgcggaaaaacgcgaagaaattataaacgcaaaatctcccgaagaagttctggaaatacttgccgaataa

SEQ ID NO: 22560 - protein, 200 aa, Unknown
  Obtained from environmental sample
  DOMAIN (57)...(200): Phosphoenolpyruvate-dependent sugar phosphotransferase system, EIIA 2
  misc_feature (1)..(200): Xaa is any amino acid
MRQQDDVAPPNGGAVNPFLSANDPKGRMLPNVGRILRGSVLTFHHFFGNIPIMNLKTVISTETIDLNLKGTTKKEIINELLDILVRTGKIKDKGAALAAVMEREEKMSTGMKHGIAIPHGKCASTEDLVACIGISKNPVDFDSLDKQPCRIFIMTLSPVEKTGPHLQFLAEVSLLFKSAEKREEIINAKSPEEVLEILAE

SEQ ID NO: 22561 - DNA, 618 bp, Unknown
  Obtained from environmental sample
  misc_feature (1)..(618): n is a, c, g, or t
ttgggcggcgcaaccaaacccactactgttggatcccaaacttacagcgtaacgttcacgccgaccgagacggccaattataataccgttaccaatactgtgagcattaccgtaatcaactcgcccataacggccgccaatattaccattaacgctcctaccaaaggcgcgactccggcaacaacggcaacagttgcatcggagaattttacctccggaccagtatcatggaatccgcctcataccacattcctggccagtaaagaatacaccgccgcggtaacgctgacggcaaaaaccggttataccttcaccgattcgactaatgttaaagtaaacggcgaactcgcctcgataacaggcactcccggtaataccttaactttgtcatacacattcccggcaacaggcgaaaaaacagtttcgggcatagcgatcaaaacacagccggcaaagctgacatacacccacggcgacacgcttgatttatcagggcttgtggtaacgctgaaatatgatgataccacaaccgaggatgtcgccgtcgcagactttttccgcaaaaggcataaccgcagcccccataaacggcgctgcgttgggacatacgttgaataa

SEQ ID NO: 22562 - protein, 205 aa, Unknown
  Obtained from environmental sample
  misc_feature (1)..(205): Xaa is any amino acid
MGGATKPTTVGSQTYSVTFTPTETANYNTVTNTVSITVINSPITAANITINAPTKGATPATTATVASENFTSGPVSWNPPHTTFLASKEYTAAVTLTAKTGYTFTDSTNVKVNGELASITGTPGNTLTLSYTFPATGEKTVSGIAIKTQPAKLTYTHGDTLDLSGLVVTLKYDDTTTEDVAVADFFRKRHNRSPHKRRCVGTYVE

SEQ ID NO: 22563 - DNA, 705 bp, Unknown
  Obtained from environmental sample
  misc_feature (1)..(705): n is a, c, g, or t
atggattcaactcaggctctgcctcattatgttgtagggcgcattgcgcgcgacgctaaccagaatgaaaaagcgataagctcattcagggaagcggcgcgccttgatccttcaaacgccatgtacttccacgatttgggaagggtgctgtttattgggaagcgttacgcggaggcaagggataattttcaatcggcgacaaagataaaccccgggtatgaaccttcgtggtacaatcttggcggaactctgcgcgcgttaaaccgcgccgatgacgctcttgcggcgtacaggcatgctgttgcgataaaagccgattattcagccgcgcaccgtgaaatcggcagactgctcttggcaaaaggagacacgcagggcgcgattaaatcattcacaagcgcgttacagtccaatccaaatgattttaacgcaatgtgcgagttagccgccgcgcacagtcaggcgaaaaattatacggaagcggaaactatttttgcaaaggcgattcaaataaacgcttctgacccccagacaaattacaatatggcggtagttaaactggagcttaaaaaaaataatgaggcgcttatttttgcaaagctggcggtaaacgccaatccttccaacgcccgtttatgtttaccactttggggcttgcgtgtgcaacgatggggcgcggcggatcagggctattgcagtctataa

SEQ ID NO: 22564 - protein, 234 aa, Unknown
  Obtained from environmental sample
  DOMAIN (74)...(107): Tetratricopeptide repeat
  misc_feature (1)..(234): Xaa is any amino acid
MDSTQALPHYVVGRIARDANQNEKAISSFREAARLDPSNAMYFHDLGRVLFIGKRYAEARDNFQSATKINPGYEPSWYNLGGTLRALNRADDALAAYRHAVAIKADYSAAHREIGRLLLAKGDTQGAIKSFTSALQSNPNDFNAMCELAAAHSQAKNYTEAETIFAKAIQINASDPQTNYNMAVVKLELKKNNEALIFAKLAVNANPSNARLCLPLWGLRVQRWGAADQGYCSL

SEQ ID NO: 22565 - DNA, 408 bp, Unknown
  Obtained from environmental sample
  misc_feature (1)..(408): n is a, c, g, or t
ttgcaggtgggagttgttgtgatgcgcggtatgagtcgtgttaaacgccgcccagtggtttcaatggcccacgcgagaggggcgctgttacggtgtaacacgcagctacgggcgttaacgtcgccgcccaggatgccgccctggattgccgcgccgaccgcgaccgcctcgtcgggatttacgcccttgttgggttcttttttaaacaggtccttgacaagctgctgtaccgcggggatgcgggtagaacctccgacaaggataacttcgtcgatctgttcggcggataaacctgcgtccctaagcgccttgatgcatggttctttggatcgctcaagcaggtcgtttaccatctgttcgaatttcgcccttgtaagggatttttgcaaatgcttggggccgctctga

SEQ ID NO: 22566 - protein, 135 aa, Unknown
  Obtained from environmental sample
  misc_feature (1)..(135): Xaa is any amino acid
MQVGVVVMRGMSRVKRRPVVSMAHARGALLRCNTQLRALTSPPRMPPWIAAPTATASSGFTPLLGSFLNRSLTSCCTAGMRVEPPTRITSSICSADKPASLSALMHGSLDRSSRSFTICSNFALVRDFCKCLGPL

SEQ ID NO: 22567 - DNA, 588 bp, Unknown
  Obtained from environmental sample
  misc_feature (1)..(588): n is a, c, g, or t
gtggaaatagccatgaacaggaatcaggcaaaggttataagtctgttaacggcggctgtgttttttttggcgctcttaatatgcaatcgcctgttttttcgccttgatttgacaaagaacaaagcctacaccatctctgaggtttcaaagaatctttacagggaaatatcagaccaggtaaggattacctattttgtttctgaaaagctaaggcaggcccaccccatgccaggggagatagccgacttgctgcgggaatacgctgcaaattcaaggggaaagatacgcttcattcaaaaggatcccgcaaaggcggagctgttacaggcagttgaagagcttggaattataccacagcaaattcaattaactgaaaaaaatgaaattaccgttgctactgtttatacaggaatcctcattgaatacctggatcgcgaatccgtcattcccgttgtattttcattggataccctggaatacgatctaagctcgcgtatacgcctcgctggtgcgcaatacggaaaaggagatcggggtcattgtcggcgacagttacagccagtggagtaccgagtaccggctttttga

SEQ ID NO: 22568 - protein, 195 aa, Unknown
  Obtained from environmental sample
  misc_feature (1)..(195): Xaa is any amino acid
MEIAMNRNQAKVISLLTAAVFFLALLICNRLFFRLDLTKNKAYTISEVSKNLYREISDQVRITYFVSEKLRQAHPMPGEIADLLREYAANSRGKIRFIQKDPAKAELLQAVEELGIIPQQIQLTEKNEITVATVYTGILIEYLDRESVIPVVFSLDTLEYDLSSRIRLAGAQYGKGDRGHCRRQLQPVEYRVPAF

SEQ ID NO: 22569 - DNA, 714 bp, Unknown
  Obtained from environmental sample
  misc_feature (1)..(714): n is a, c, g, or t
atgaaagtgttatacccagaagttattcggataagcaaacgagcaaacaaaagcgacaaatgcaaatatgctggcaaaaccacagcggagatgaaacaaaaggcaacttatgccggttggaattttgaaaaaatttgggctataaacgatacaataaacaaaggttatccgtatttgctaggctctgattatatagaaaattacgagtatataagaaatgttatgaaattagaccattcaagaattttcagagaaaatacttgcccagtagaatcaatggtaataactactgccaaagaattgacagattttgcaagagcggtaagtaatggtaataattttctgaacaaaactgttatgctcggtgcaaacattatgctcaacgatacggcgaattggaaaaactgggatagcaatccacccaaaaacaaatggatacctataggaaccagagaaaatagattccacggaacttttaacggaaatggttttgccataggcggaatttacgtaaataattcaaaggacgagcaaggtttgtttggtgctatagatataaaaggagaggtaaaaaatcttggagtagttgcttcttacattaaaggagaatataaaattggtggaattgcagggattaacttgggcaagatatccaattgttatttcactggcatggtagtgggacttaccgacgtgggtgtgactgcagtgtaa

SEQ ID NO: 22570 - protein, 237 aa, Unknown
  Obtained from environmental sample
  misc_feature (1)..(237): Xaa is any amino acid
MKVLYPEVIRISKRANKSDKCKYAGKTTAEMKQKATYAGWNFEKIWAINDTINKGYPYLLGSDYIENYEYIRNVMKLDHSRIFRENTCPVESMVITTAKELTDFARAVSNGNNFLNKTVMLGANIMLNDTANWKNWDSNPPKNKWIPIGTRENRFHGTFNGNGFAIGGIYVNNSKDEQGLFGAIDIKGEVKNLGVVASYIKGEYKIGGIAGINLGKISNCYFTGMVVGLTDVGVTAV

SEQ ID NO: 22571 - DNA, 792 bp, Unknown
  Obtained from environmental sample
  misc_feature (1)..(792): n is a, c, g, or t
atggacgaggcttacgcgcttggcatattcatcaaccgcgccgaggctttcaggcagtggcttttgaaaccattccgcacgctggacggcggcgagattctgcgggaagatcctttgaccgaaaacgccagagtacttccaaactgcggcgatgttgccaaagagatttttaagattcttgacctcgaggggaagctgagagaccttcctgagcttaaggagctacgcaggcggatcagggctctgcaaaaaaacattgaatcgacagcttcccgttacgcaggcaacgaagaaaagcggcgcatgctccagtcggaaattccctcccagcgggacggccgcatggttctggctgttaaggcgaatttccgcagccgcatcaagggaatcgttcacgaggtttcatcttccgggcagacggtttttatcgagcctgaagaagtggtggagatgaacaacgagcttctcatcgaaaaccggaggcttgacgcggagatacgcagggtcttcagggagctcaccggccgcatctcttcgcggcgggaggatttgggagctttttacaggggcattgtttttttggaaacaattcgggcaaaggcgcgttacggctatgaaaacaaattggttttctccgaaaacatagaaatcgaaggcgaagggaagctcgttttgaatcaggcgaggcacccgcttttgggcaggcgggctgtgcccttggatctctttttgggggaaggcatacccccggtgatcatcacggggcccaaatactggcgggaaaaaccgtaa

SEQ ID NO: 22572 - protein, 263 aa, Unknown
  Obtained from environmental sample
  misc_feature (1)..(263): Xaa is any amino acid
MDEAYALGIFINRAEAFRQWLLKPFRTLDGGEILREDPLTENARVLPNCGDVAKEIFKILDLEGKLRDLPELKELRRRIRALQKNIESTASRYAGNEEKRRMLQSEIPSQRDGRMVLAVKANFRSRIKGIVHEVSSSGQTVFIEPEEVVEMNNELLIENRRLDAEIRRVFRELTGRISSRREDLGAFYRGIVFLETIRAKARYGYENKLVFSENIEIEGEGKLVLNQARHPLLGRRAVPLDLFLGEGIPPVIITGPKYWREKP

SEQ ID NO: 22573 - DNA, 807 bp, Unknown
  Obtained from environmental sample
  misc_feature (1)..(807): n is a, c, g, or t
ttgaacgaattcgacaaagcaatgactgcttatgaaagcatactaaacgaagatatcacaaacgctgaggcacattggtgctccatgctatgccgttatggtatcgaatatgtggaagatacacggtcacatgaacgcatcccaacctgccaccgcgtccaatatacgcaaatacttacggacacggactatctcgcggctttggagtacgcgggcgacagctatactcgcggcttgtatgaagccgaggccagaaaaatcagcgatatacaaaatggcatccttgccatttcgaaccatgaggagccttttgacatttttatctgttataaagaaacgacagacggtggtagtaggacaaaagacagtacaatagcgcaggatatctattaccagctgacaaatgaaaattatcgggttttcttctccaaaattactttggaggacaaattggggagcgagtatgaacctttcatttttgccgctttgaacagcgcaaaagtcatgcttgtaattggtaccaagtctgaatactttaatgatgtttgggtaaaaaacgagtggagccgcttcattgcgctgattaaatgcgataattcaaagctattaataccctgctaccgtgatatggatatttatgatttaccagaagaactctctatattccaaagtctggatatgtcaaaaattggcttttatccaggaatttgcttcgcgggaatcgagaaaatatttaacgctaccataacgcctgatacgataactgaaatacccgcaccatatattcccgtcccccccaggtattga

SEQ ID NO: 22574 - protein, 268 aa, Unknown
  Obtained from environmental sample
  misc_feature (1)..(268): Xaa is any amino acid
MNEFDKAMTAYESILNEDITNAEAHWCSMLCRYGIEYVEDTRSHERIPTCHRVQYTQILTDTDYLAALEYAGDSYTRGLYEAEARKISDIQNGILAISNHEEPFDIFICYKETTDGGSRTKDSTIAQDIYYQLTNENYRVFFSKITLEDKLGSEYEPFIFAALNSAKVMLVIGTKSEYFNDVWVKNEWSRFIALIKCDNSKLLIPCYRDMDIYDLPEELSIFQSLDMSKIGFYPGICFAGIEKIFNATITPDTITEIPAPYIPVPPRY

SEQ ID NO: 22575 - DNA, 456 bp, Unknown
  Obtained from environmental sample
  misc_feature (1)..(456): n is a, c, g, or t
atgcgaacagattcccagtccgaaaagtatatagctccgtcatatagactcaaggtactccactgtctgcttatgccccctaccattctcgggtatgagtcactagcccaccatcccaacgtagcctaccaacacgggaaataccgctccgcttgtggcagcgcgcaatccaaccagttcaacgtgcaaaactccaacgaatgcatatatggagatgctgcttccaaaaccgaacaatgggaatccatagcaaaagttctatacccgaacgactccttttttaatggcaagcaacgtcgcttaaagcagcatgacttccgctgctccgcttcgcttcaagacataatccgccgctatgaacgtggcaacgatgctcaagccgctattgaaaaactggcaaaggaaaacaaagtttcttcaacgaacttaacgcttttgagtttagaccacggctga

SEQ ID NO: 22576 - protein, 151 aa, Unknown
  Obtained from environmental sample
  misc_feature (1)..(151): Xaa is any amino acid
MRTDSQSEKYIAPSYRLKVLHCLLMPPTILGYESLAHHPNVAYQHGKYRSACGSAQSNQFNVQNSNECIYGDAASKTEQWESIAKVLYPNDSFFNGKQRRLKQHDFRCSASLQDIIRRYERGNDAQAAIEKLAKENKVSSTNLTLLSLDHG

SEQ ID NO: 22577 - DNA, 636 bp, Unknown
  Obtained from environmental sample
  misc_feature (1)..(636): n is a, c, g, or t
atgctaaaagaatatgactgctggctgcaggaaagaaaaataacgccgtcttttaacgtacccgctgttgttgttacgcaaaaaggcacagaagtatccgctcaggcggcaaaagaatattgtcttggcataaagaggcttctgggatttacgccaaaaatagagaaaaagcctgttaccggaaagagcgccgtatttcttgggacgctttctgttcttgaaaaacaagccggatttattgaagttaagcctgatataaaaccggaaggttttacgattaaagttacggataatcaggtttttatcgccgggaaagatgagcatgggcttttatacggggtatttcgttttctgtcgctgcttgcgtcaggagaaattaagggcggttttgaaatgagtgactctcctgtctctcctttaagaatgataaaccactgggacaactttgacggcacaattgaacgagggtacgcaggcgcttccctgttttacaaagacggtcgctttaattactacaaacagcggatagaagactatgcccgcctgcttgcctccgtcgggattaaccgtgtcttcaataaatacgttaacgtacggtcaatcgcgaaatttctttatttacggaaattatcttaa

SEQ ID NO: 22578 - protein, 211 aa, Unknown
  Obtained from environmental sample
  DOMAIN (118)...(211): Glycosyl hydrolase family 67 middle domain
  misc_feature (1)..(211): Xaa is any amino acid
MLKEYDCWLQERKITPSFNVPAVVVTQKGTEVSAQAAKEYCLGIKRLLGFTPKIEKKPVTGKSAVFLGTLSVLEKQAGFIEVKPDIKPEGFTIKVTDNQVFIAGKDEHGLLYGVFRFLSLLASGEIKGGFEMSDSPVSPLRMINHWDNFDGTIERGYAGASLFYKDGRFNYYKQRIEDYARLLASVGINRVFNKYVNVRSIAKFLYLRKLS

SEQ ID NO: 22579 - DNA, 789 bp, Unknown
  Obtained from environmental sample
  misc_feature (1)..(789): n is a, c, g, or t
gtgcaaattccgaaacccgagatttttagcgatgttgaaaaacagaacagcgttttctcgctgattatagcgcttacggcggcggcgatgacgatcctggcgtattgccttatttcaaaatttgtcaacgcgcccataaagcggctgacccaggatgtctcccggctttcgctcggccatcttgatacgcagattgaaataaactcaaatgatgaattgggcctgctggccaaaacatttaacaaaatgacctgcgatctgaaacaatccatcgaagaaaacgcccgcgagcgcgcggagaaagagaggatcagcgccgagcttgaggtggcggcggcgatacaggccagtatgcttcccaatattttcccgcccttccccgaaagaaccgaatttgacctgtacgcctccatgattccggcaaaggaggttggcggcgatttttatgatttttatttaattgataaagataacctggcggtggttatcgccgacgtttcaggcaagggcgttccggcagcgttattcatgatgattacgaaaaccatgatcaaagactcaagtcagggcaagaacctcaaagatgtttttgaatctgtaaacaaaaaattatgcgaaggcaatgaagcggatatgttcgttaccgcgtttatgggcatatacaatatccccggcggaaaatttgtgttccttaacgcggggcataatccgccgttgataaaaaaacacggaggcgcctatgaatcccttggaaacggaaccgggttatgttctggcgtggatgaatag

SEQ ID NO: 22580 - protein, 262 aa, Unknown
  Obtained from environmental sample
  DOMAIN (155)...(262): Stage II sporulation protein E (SpoIIE)
  misc_feature (1)..(262): Xaa is any amino acid
MQIPKPEIFSDVEKQNSVFSLIIALTAAAMTILAYCLISKFVNAPIKRLTQDVSRLSLGHLDTQIEINSNDELGLLAKTFNKMTCDLKQSIEENARERAEKERISAELEVAAAIQASMLPNIFPPFPERTEFDLYASMIPAKEVGGDFYDFYLIDKDNLAVVIADVSGKGVPAALFMMITKTMIKDSSQGKNLKDVFESVNKKLCEGNEADMFVTAFMGIYNIPGGKFVFLNAGHNPPLIKKHGGAYESLGNGTGLCSGVDE

SEQ ID NO: 22581 - DNA, 747 bp, Unknown
  Obtained from environmental sample
  misc_feature (1)..(747): n is a, c, g, or t
ttgctctttttgcattcttgttcccgcaacggcggcggcaagaggccttcgggcaattcnaacacatacgcatctctagccgatttcagcggtaaaaaaatcgccagcgagtccggcaccatattcgcccaatttatcgaccgcgtaattccgaaagtggaacacaggtactactttaccttcgaggacatagtagccgccctgcataccgacgcggtagacgccatagccctcgatatgcccgtagcgctctacttagcggcgcacaacagggggtttgcggtctttccgtacgtggtctcggttgacacttacggtttcgccgtcgccaaggggtcgcagctctgttataccggcaacgagattttgcgcaaattcaaggatagcggggtgatcaccgacgtggagatgtactggttcgccgccgacagcgggaaggaaaggccgctgccgcgactcactcaccgccccaacttcaacggggcggcaggcactataaggttcggttgcgagaacacgctcttccccatgagctacgcctcgcccggcggcgagaccgtcggcttcgacatagacatcatcaataggatagcctacgagatgaacatgagggtggaggttgtgacgatgcgcttcgccgaactgatacccgccctgctgtccggccgtctcgacatgatcggcggcagcatgacgatcacggaggagcgctccaagcttgtggacttcatcggcccggacttttaa

SEQ ID NO: 22582 - protein, 248 aa, Unknown
  Obtained from environmental sample
  misc_feature (1)..(248): Xaa is any amino acid
MLFLHSCSRNGGGKRPSGNSNTYASLADFSGKKIASESGTIFAQFIDRVIPKVEHRYYFTFEDIVAALHTDAVDAIALDMPVALYLAAHNRGFAVFPYVVSVDTYGFAVAKGSQLCYTGNEILRKFKDSGVITDVEMYWFAADSGKERPLPRLTHRPNFNGAAGTIRFGCENTLFPMSYASPGGETVGFDIDIINRIAYEMNMRVEVVTMRFAELIPALLSGRLDMIGGSMTITEERSKLVDFIGPDF

SEQ ID NO: 22583 - DNA, 432 bp, Unknown
  Obtained from environmental sample
  misc_feature (1)..(432): n is a, c, g, or t
atggcagaagttgcttttcagtatcaagttcctcaaaaaatgattggaacatttgtagttgacgcatttatttcagagcattatgagttttcaaactcggttactgatattccggtagaggaaggcagcaaaatatcagataacattgtcgaggatcaggatgtaatatccgttgaggcttttattggaaatgcggagtttgaagtagtcaccattgacggaaatactgtatccaatattcaggccccagacagaatggcgcgtgtacgtcaggcatatcttgaattaaaaaaactttcaaaatcaaagcagcttcttgatgttgttctggggcttgagacattcaccaatatggtgatcacttcaattcagattgaccgtgatggaaaaaccggcgcgaacctcccatttccaaggagttcaaaaaaataa

SEQ ID NO: 22584 - protein, 143 aa, Unknown
  Obtained from environmental sample
  misc_feature (1)..(143): Xaa is any amino acid
MAEVAFQYQVPQKMIGTFVVDAFISEHYEFSNSVTDIPVEEGSKISDNIVEDQDVISVEAFIGNAEFEVVTIDGNTVSNIQAPDRMARVRQAYLELKKLSKSKQLLDVVLGLETFTNMVITSIQIDRDGKTGANLPFPRSSKK

SEQ ID NO: 22585 - DNA, 693 bp, Unknown
  Obtained from environmental sample
  misc_feature (1)..(693): n is a, c, g, or t
ttggatgatataattcatgaacggacattacaacttgcaaggcttcaaaccagcgttgtatctgttcttgcaaatatggttgaaagccgcgacaaagaaacgggcgaccacattgaacgtacatcaatgtatataaaaatactcatagagggaatgaaatctaacggagtatattttgatgaacttaacaactgggatgttgaaaaaattattacatcggcgcgtatgcatgatttgggaaaaatatcgatatccgactcaattataaacaagcccggcaggcttacagaagaagaatttgaggtaatgaaatcacacacaacaataggtgaaaaaataattgatgaaattatagcccaaaacggagaagtagacttcctgaattatgctaaattatttgcgggtttccatcatgaacgatgggacggcaagggatatccgcacggagttaaagaactggacattccgttacaggggcgcattatggcgattgcggacgtatatgacgctcttgtttcagaaagaccctacaaaaaaccgtttatgcatgatgaagcggttaaaattattatggaaagcacaggtatgaaatacgatccgaaaatagcagaagtattttttgagctaaaagataaatttgcagaaataacaacgggcaaacacaggcggaaaaccgtaaaaattgcgggataa

SEQ ID NO: 22586 - protein, 230 aa, Unknown
  Obtained from environmental sample
  DOMAIN (34)...(171): HD domain
  misc_feature (1)..(230): Xaa is any amino acid
MDDIIHERTLQLARLQTSVVSVLANMVESRDKETGDHIERTSMYIKILIEGMKSNGVYFDELNNWDVEKIITSARMHDLGKISISDSIINKPGRLTEEEFEVMKSHTTIGEKIIDEIIAQNGEVDFLNYAKLFAGFHHERWDGKGYPHGVKELDIPLQGRIMAIADVYDALVSERPYKKPFMHDEAVKIIMESTGMKYDPKIAEVFFELKDKFAEITTGKHRRKTVKIAG

SEQ ID NO: 22587 - DNA, 810 bp, Unknown
  Obtained from environmental sample
  misc_feature (1)..(810): n is a, c, g, or t
ttggggcgggggaaatgcaagcacccgttcttactaaggagtatgcttatggaaacaaacaaccaaaattctgtttgttatgagtggggacctttccccctagggaatggaaagagtgttctggatatacgctatgaccctgtattcaaagctgtgtttaccaaggacacaaaagaatcaagaggcgcgttatcacaccttatttccgcgcttatcggacggattgtcaaagtggagacaattatcaccaatgaaccgcctgttgacgatctgcggcagcggtatttgcgcttcgatgtcgcctgcagaacggaagagggtgaacctgtcaatgttgagatgtcgtttaatcctagcaaggatgagtctgtacggcttgaatactatgcggcaagactatttgtaggacaggacatacatggggaagataaagattacaatgatttgaaaaaagcctaccaaattgccattttggcaaaagaaaaattttttccggacgaggaactaatacacaattttttatactatgatcccgatactcgtatttcgcttggcggtaaaaccagaataattacggttgaactggtaaaaacaaaaccgatagtagataaacctattgaaaaaatgacaaccgctgaactgtgggcagtattttttgaatatttgacagacaaggagaaacgggctaaaatgatagaaataatcaaccaagaggaaggcatagctatggcggtagaaacattgtcaaatatcacgcaagacgaggtagaatacgcgcgtatgactacgttaataaaaagttcggcttga

SEQ ID NO: 22588 - protein, 269 aa, Unknown
  Obtained from environmental sample
  misc_feature (1)..(269): Xaa is any amino acid
MGRGKCKHPFLLRSMLMETNNQNSVCYEWGPFPLGNGKSVLDIRYDPVFKAVFTKDTKESRGALSHLISALIGRIVKVETIITNEPPVDDLRQRYLRFDVACRTEEGEPVNVEMSFNPSKDESVRLEYYAARLFVGQDIHGEDKDYNDLKKAYQIAILAKEKFFPDEELIHNFLYYDPDTRISLGGKTRIITVELVKTKPIVDKPIEKMTTAELWAVFFEYLTDKEKRAKMIEIINQEEGIAMAVETLSNITQDEVEYARMTTLIKSSA

SEQ ID NO: 22589 - DNA, 807 bp, Unknown
  Obtained from environmental sample
  misc_feature (1)..(807): n is a, c, g, or t
ttgtttcgatgggcggggattaagggcatcggcctgctgggaacctgcgattgcacccatcccaggtggatagaggaactgcgggataatcttgaggacgcggagggcggcttttaccggctgaaagaaaaaacccgttcagaatttaacgccggccccgcgcttgcccaagggctgcccatgccagggcagcaggacaacaatgtgcatttcgtcctctccggcgagatcagtacgatctataaaaaagccggaaagacccggaaagtccaccatgttgtcgtgctgccggatttcaaagcagccgctgttttcaacgcaaaactggaacggctggggaacatccattcggacggaaggcccatattggggcttgattcccaaaaccttctgtccctgctgcttgaggccgacgacagggccattttaattcccgcccatatctggacaccctggttttccgtactcggcgccaaatcgggattcgattcaattgaagagtgttacggttcattgacttcttatatccccgcgatagagaccgggctttcttccaatccgcccatgaactgggctttaagcgggcttgaccgttattcgatcatttccaattcctacgccccttcgccggaacaacttggcagggaagcgactgtttttgatatgggagctttccctacgattctttcaggaaggctttgtacagtaacaaatttacagccctcaattgaattttttccccaggagggtaaaataccatttcgacggacactgattctgcggggacctgcctcttactcggaataa

SEQ ID NO: 22590 - protein, 268 aa, Unknown
  Obtained from environmental sample
  misc_feature (1)..(268): Xaa is any amino acid
MFRWAGIKGIGLLGTCDCTHPRWIEELRDNLEDAEGGFYRLKEKTRSEFNAGPALAQGLPMPGQQDNNVHFVLSGEISTIYKKAGKTRKVHHVVVLPDFKAAAVFNAKLERLGNIHSDGRPILGLDSQNLLSLLLEADDRAILIPAHIWTPWFSVLGAKSGFDSIEECYGSLTSYIPAIETGLSSNPPMNWALSGLDRYSIISNSYAPSPEQLGREATVFDMGAFPTILSGRLCTVTNLQPSIEFFPQEGKIPFRRTLILRGPASYSE

SEQ ID NO: 22591 - DNA, 453 bp, Unknown
  Obtained from environmental sample
  misc_feature (1)..(453): n is a, c, g, or t
gtgaccgttcctaaaagattcatgggcaacacagtgggcctagtggccagactggaaaacctttctgtgaagatgcagccaaaggcgcgcattgtcgtaaatgaaaaaacaggaaccgtgataatgggcgcggacgtcagggtcaatgcggtgagcatcgtccacggtaacatgaccatccaagtgtccagcgaaccgctgccagtcattccagcgccgtcgccagctgaggccgccccggcagcacccgctggcagaggccagggcagggccgccggcagaaatgcggccgccgaaccaacacacaagaacctgaacgtggagcagggcgtgaccgttgggcaactggcagaatcattgaatgccatgaacataaccccgacagacctcatcgcgattttgcaggccatcaaagacgcgggggccctctccgccgaactaaaggtgatatga

SEQ ID NO: 22592 - protein, 150 aa, Unknown
  Obtained from environmental sample
  DOMAIN (2)...(150): Flagellar P-ring protein
  misc_feature (1)..(150): Xaa is any amino acid
MTVPKRFMGNTVGLVARLENLSVKMQPKARIVVNEKTGTVIMGADVRVNAVSIVHGNMTIQVSSEPLPVIPAPSPAEAAPAAPAGRGQGRAAGRNAAAEPTHKNLNVEQGVTVGQLAESLNAMNITPTDLIAILQAIKDAGALSAELKVI

SEQ ID NO: 22593 - DNA, 690 bp, Unknown
  Obtained from environmental sample
  misc_feature (1)..(690): n is a, c, g, or t
atgttaataaacccatttacacacgccaaaaaattcgccgattcaaaccccattgccatgcggtacgcaatggacggtcttcttgcggcgttggctgtaaatatcgctgccaataataataatttattcgcgcttaggcttggcgccggggactaccaacttagccttgtacaatttctgccgcaaatattcaccatgctgatacttgtccctggaggactctttgccggcagccttcacaataaaaaacgcataataattggcgctttaattacaggcgcggttggttatttgctttgcgctttatcaccatttttcaggcttgcgaatgtcgagagcaaacttaaccctgagtattcaatttatttttttcttgtcttccttgcgtttgccgcaggcgctatggcgacatataatatatcgtggcagtcattttttccggaagtcgtagatttaaaggagcgcaaccgtgtattaacaatgcgttcccacatggatgtttttattagcatacctctgccgctgttggtcggtgtcatattactacacactgcggcgggtagaggaaaaattatcgttcatcagagtttttatttattttccgcgttgtttctgatattagctgcaataaattaccgcagtattatagccgttcgacccaccgccgccaaaagcgtttctttttcctga

SEQ ID NO: 22594 - protein, 229 aa, Unknown
  Obtained from environmental sample
  misc_feature (1)..(229): Xaa is any amino acid
MLINPFTHAKKFADSNPIAMRYAMDGLLAALAVNIAANNNNLFALRLGAGDYQLSLVQFLPQIFTMLILVPGGLFAGSLHNKKRIIIGALITGAVGYLLCALSPFFRLANVESKLNPEYSIYFFLVFLAFAAGAMATYNISWQSFFPEVVDLKERNRVLTMRSHMDVFISIPLPLLVGVILLHTAAGRGKIIVHQSFYLFSALFLILAAINYRSIIAVRPTAAKSVSFS

SEQ ID NO: 22595 - DNA, 735 bp, Unknown
  Obtained from environmental sample
  misc_feature (1)..(735): n is a, c, g, or t
atgcgtccaaattttaaaaacattccttacactccgacaactcagccatctgcagcaccgaaatctacgggcacgccatggctgacacccgaacaaatttccgtaaacgctgtatattccgccaaagacctcgaaggcatggaacacttgaattatgcggcaggacttccgccgtttttgcgcggtccgtattccacgatgtatgtgatgaaaccatggacagtgcgtcaatacgccggtttctcaacagctgaagaatccaatgcgttttaccgccgtaacttggcagccggacaaaaagggttgtccattgcgtttgacttggccacgcaccgcggctatgattccgatcacgagcgtgtggtgggtgatgttgggaaagccggagtggctgtggattccatcttggacatgaacattctgtttgaccaaattccgttggataaaatgtcggtatctatgacgatgaacggcgcggtattgccgattttggcgttctacatcgtggcggccgaacagcaaggcgtgaaaatggaagaattgagcgggacgattcaaaacgatattttgaaagagttcatggggcgcaacacctatatttatccgccgctgccgtcgatgaaaatcattgccgacatctttgaatttccatcgagaaacatgcccgaaattcaattccatttcgatttcgggataccacatggcaagaagcaggggccaaccgcccaaatttga

SEQ ID NO: 22596 - protein, 244 aa, Unknown
  Obtained from environmental sample
  DOMAIN (27)...(244): Methylmalonyl-CoA mutase
  misc_feature (1)..(244): Xaa is any amino acid
MRPNFKNIPYTPTTQPSAAPKSTGTPWLTPEQISVNAVYSAKDLEGMEHLNYAAGLPPFLRGPYSTMYVMKPWTVRQYAGFSTAEESNAFYRRNLAAGQKGLSIAFDLATHRGYDSDHERVVGDVGKAGVAVDSILDMNILFDQIPLDKMSVSMTMNGAVLPILAFYIVAAEQQGVKMEELSGTIQNDILKEFMGRNTYIYPPLPSMKIIADIFEFPSRNMPEIQFHFDFGIPHGKKQGPTAQI

SEQ ID NO: 22597 - DNA, 807 bp, Unknown
  Obtained from environmental sample
  misc_feature (1)..(807): n is a, c, g, or t
gtgtcggctggaggcagccacacagttgccatcaagactgacggcagcctgtgggcttggggaaatgttgcgcctcagataacagaaaaatattccccagtacaggtgggttcatcaaaagattcttggacggccgtgtcggcaggtgttggacacacgatggccatcaagagcaatggcaccctctgggcctgggggtggaacggcgctggccagcttggcgatggtacgctcgatggaaagagcgccccagttcaagtaggcaaaacaaatgattgggcgactgtttcatcgggaagtgattgcacgttagccatcaaaaaggacggcacactttgggcttgggggtggaatgaatacggtgtactcggcatcggcacatcgccaagggtgccgacccaagtaggcacggcgagggactggacgaaagtatcgactaggtacggccgtacgttggccatcaggtctggtggcacactttgggcttggggggaaggttacggcaatgtgccgacacgtgtggacacgacaactggctggacggcgatttcggtaggcatagaccacatggttgccctcaaggccgatggcacgatctggacttggggggctaattggaaaggccagcttggcgtttggacgacaagcgggcagccaccctaccaagtgggcaatggaggctgggcggccatgtcggcttacagagaatccactatggctctcaaaacggatggcacgctctgggctttggggaagcaactattacggcccgcttggcatctcgctttgattaatcctggtggttaa

SEQ ID NO: 22598 - protein, 268 aa, Unknown
  Obtained from environmental sample
  misc_feature (1)..(268): Xaa is any amino acid
MSAGGSHTVAIKTDGSLWAWGNVAPQITEKYSPVQVGSSKDSWTAVSAGVGHTMAIKSNGTLWAWGWNGAGQLGDGTLDGKSAPVQVGKTNDWATVSSGSDCTLAIKKDGTLWAWGWNEYGVLGIGTSPRVPTQVGTARDWTKVSTRYGRTLAIRSGGTLWAWGEGYGNVPTRVDTTTGWTAISVGIDHMVALKADGTIWTWGANWKGQLGVWTTSGQPPYQVGNGGWAAMSAYRESTMALKTDGTLWALGKQLLRPAWHLALINPGG

SEQ ID NO: 22599 - DNA, 822 bp, Unknown
  Obtained from environmental sample
  misc_feature (1)..(822): n is a, c, g, or t
atgaaacagcttaccaaggcgcttgtcgagcgtaccatgcaggctgaactaaccgagcatctcggatatgagaaacatgatcagggtaaaaaacaggtagaaaaccgccgcaacggtaaaacaaccaaagagctcagaacggaccaagggccgatgtccatcgaagtccctcgggaccgcgatggaagttttgaaccgcggatagtacccaaacaccagagggaatggcgcgggtttgatgataaaatcctgtcaatgtacgcgctggggcttaccacccggcaaatacaagatcaccttaaagacatttacgccgtagaagtatcacctgaattaatcagtcgggtgacggacgaagtaaaagaactggccaacgaatggaggggtcgtcctcttgaacccttttacccggtgctgtttctggacgctctgagggtacatatccgtgatggagccagtgttgttaaaaaatcagtgtatttggcattggcgatacgtatagacggccataaagagctcttagggctgtggatagagcaaactgaaggggccaagttttggctgagtatcatgaatgaacttaaaacgcggggggttcaggatatccttcttgctgccgttgacgggctgaccggatttcccgacgccattgccgcggtatatcctaaaaccaaagtccaactgtgcgtggtacatatggtcccgcactcggtgcggttcgtcccctacaaagaccgtaaaggcggaatcgcgggcttaaaaaatatttaccttgcccccgtcgctgaattagcatccccctgccctgaagggatttgctga

SEQ ID NO: 22600 - protein, 273 aa, Unknown
  Obtained from environmental sample
  DOMAIN (1)...(272): Transposase, Mutator family
  misc_feature (1)..(273): Xaa is any amino acid
MKQLTKALVERTMQAELTEHLGYEKHDQGKKQVENRRNGKTTKELRTDQGPMSIEVPRDRDGSFEPRIVPKHQREWRGFDDKILSMYALGLTTRQIQDHLKDIYAVEVSPELISRVTDEVKELANEWRGRPLEPFYPVLFLDALRVHIRDGASVVKKSVYLALAIRIDGHKELLGLWIEQTEGAKFWLSIMNELKTRGVQDILLAAVDGLTGFPDAIAAVYPKTKVQLCVVHMVPHSVRFVPYKDRKGGIAGLKNIYLAPVAELASPCPEGIC

SEQ ID NO: 22601 - DNA, 843 bp, Unknown
  Obtained from environmental sample
  misc_feature (1)..(843): n is a, c, g, or t
atgtggcgagttggtatgcacccgataaactccattgtagatataacaaactacgttatgctcgcgattgggcaacccacacacgcctttgactcggataacattgaagggcatataactgtgcgccgtgccaaagaatcagaaaaacttttgctattgaacggcaaagaattatcgctttctgcaaacgatttggttatagcagatgacgaagcctccgttggacttgctggtgtaatgggcggtagcaaagattctgtgcttcccaaaacaaccaaggtgatacttgaaattgcaaactttgactccaaaggcataaggcacaccgctatgcgttatgaagtgcgtacagaggcggcaatcaggtacgaaaaaggaatagacccagagagatgcgatatagccctctccctcgctatgcagatgtttgcagacttttttccaaaattatccataacgggatttcgcgatagctatcccgaacatctaaagagcaaagagatagatgtttctttggactggttggaaaaacgtcttggcaaacacattccaaacgatgatatagcttgtaagttggaacgacttggctttaaagttagctttgacaaaagcaatatgcacgtgattgtaccaacgtggcgttccacaggcgatatttccatacccgatgatattatggaagaagtagcccgcttgcacggctacgaaaactttgaacccacgcccataacaaccacatttggcggtgcaataaatcagttggatatagacatagacagaaagagcagagaatacttggcaatcagatgcggaatgcagaaatattcacatatccttggatga

SEQ ID NO: 22602 - protein, 280 aa, Unknown
  Obtained from environmental sample
  DOMAIN (165)...(235): tRNA synthetase B5 domain
  misc_feature (1)..(280): Xaa is any amino acid
MWRVGMHPINSIVDITNYVMLAIGQPTHAFDSDNIEGHITVRRAKESEKLLLLNGKELSLSANDLVIADDEASVGLAGVMGGSKDSVLPKTTKVILEIANFDSKGIRHTAMRYEVRTEAAIRYEKGIDPERCDIALSLAMQMFADFFPKLSITGFRDSYPEHLKSKEIDVSLDWLEKRLGKHIPNDDIACKLERLGFKVSFDKSNMHVIVPTWRSTGDISIPDDIMEEVARLHGYENFEPTPITTTFGGAINQLDIDIDRKSREYLAIRCGMQKYSHILG

SEQ ID NO: 22603 - DNA, 765 bp, Unknown
  Obtained from environmental sample
  misc_feature (1)..(765): n is a, c, g, or t
ttgcgtgcctgcaggtcgactctggaggatcccaccaaaacccccgggcggtccaaggtcggcctggcactgggcggcggcaggatgcggggtctggccaatgtcggcgtgcttaaagttctggaaaaaaacaatattcccattcattatatttccggcaccagcgccggttccatagccgcggctttctgggcttccggcaaatccgcctcggagatcgaggaaattgcgctgaatattgactggttaaaagtcgcccagcccagttttaatctcaacggtttcttaaacccggacaaattaaaaaaatatctggaacagcagctggcggttaaatatttcaaggagaccaaaatacctttgagcatttccgccagcgatctgctttccggccaagaatatgttttcgaaaaacccggcgaggaaatagcgctggccgttaccgccagctgttccataccgggcgtgtttgcgccgaccaaatatcagggacattatctggtggacggctgtctggtcaataatgttccgctcagcaatctggccaaacatcacccggatgtgtatatcggcgtaaatgttatctcccgcaagccgatgccgttcctgcccaaaaatatgtttcaggttttttcccggggttacgatatttacgagctgtccaatatagcgcgttacgacaaatacaaaccgctgttgctggagccgctgaaagagtacatctcgccgacgatcaaacccggaaagaattttatcacaagctaa

SEQ ID NO: 22604 - protein, 254 aa, Unknown
  Obtained from environmental sample
  DOMAIN (22)...(182): Patatin-like phospholipase
  misc_feature (1)..(254): Xaa is any amino acid
MRACRSTLEDPTKTPGRSKVGLALGGGRMRGLANVGVLKVLEKNNIPIHYISGTSAGSIAAAFWASGKSASEIEEIALNIDWLKVAQPSFNLNGFLNPDKLKKYLEQQLAVKYFKETKIPLSISASDLLSGQEYVFEKPGEEIALAVTASCSIPGVFAPTKYQGHYLVDGCLVNNVPLSNLAKHHPDVYIGVNVISRKPMPFLPKNMFQVFSRGYDIYELSNIARYDKYKPLLLEPLKEYISPTIKPGKNFITS

SEQ ID NO: 22605 - DNA, 372 bp, Unknown
  Obtained from environmental sample
  misc_feature (1)..(372): n is a, c, g, or t
ttgtgcctgaaagaagacgtttttcgccttctttcaacatgttgcacttctaatattggtaccatactaggtttatcgacaaaaaaagcgtttaggattatatatgatataatgaaaggaacaaaacctgtgttgctggctataatagccgcgcttgttctaaaactgttctttttcgattttatcatcgctcagggacattcaatggaacctgcgattcaagacggctctgttttggttgtaagccgcgttgcctacgggcttcaactgccgacaaacaggtatttgtttcgctgggggaagccgaaaattggggaagttgtggtttattatacgccttccggggaattagcggtaaacgctgtacaatag

SEQ ID NO: 22606 - protein, 123 aa, Unknown
  Obtained from environmental sample
  misc_feature (1)..(123): Xaa is any amino acid
MCLKEDVFRLLSTCCTSNIGTILGLSTKKAFRIIYDIMKGTKPVLLAIIAALVLKLFFFDFIIAQGHSMEPAIQDGSVLVVSRVAYGLQLPTNRYLFRWGKPKIGEVVVYYTPSGELAVNAVQ

SEQ ID NO: 22607 - DNA, 750 bp, Unknown
  Obtained from environmental sample
  misc_feature (1)..(750): n is a, c, g, or t
atggctgtgaacttgaactataatgccagaggtagcatgtgctttggtgaggatagcagttgcccaaaatacggcaggctttataattggaaagcggctagaactgcttgccccagcggttggcatttgccaagcaatgaagaatggcagattttagcggatttcgcaagtactggcggggcagcagccggaaaaacactcaaagcaaaaagcggttggtatgaaaattctggaaccgatgcttttggtttttcagctttgcccggaggtcaaggcggggctcacggtggtctcatcaatagcggtatctatggttattggtggagttcttcggagtacgatgcgagcaaagcttacaacagagacatattctaccaaagcgatggttttttcgttgataagtacgataagagcgattttttgtttagcgttcgttgtattaaaggcaagcaggcagccgtaggagaatacaccgaagcagagaaggcggatatggaagctttaaaggcgattgtttcgcgagtagaaaaaaattattttaccgatgagagagacaaacaaacttatagaaccataaaattgaataaccaaacttggatggcagagaacttgaactataacgcaaaaggaaaaggcagcaagtgctatgaaaataatgagaacaattgccaaatatacggcaggctttataattggggaacggctatgaaagctttgccccaaaagttggcatttgccaagcgctgctga

SEQ ID NO: 22608 - protein, 249 aa, Unknown
  Obtained from environmental sample
  misc_feature (1)..(249): Xaa is any amino acid
MAVNLNYNARGSMCFGEDSSCPKYGRLYNWKAARTACPSGWHLPSNEEWQILADFASTGGAAAGKTLKAKSGWYENSGTDAFGFSALPGGQGGAHGGLINSGIYGYWWSSSEYDASKAYNRDIFYQSDGFFVDKYDKSDFLFSVRCIKGKQAAVGEYTEAEKADMEALKAIVSRVEKNYFTDERDKQTYRTIKLNNQTWMAENLNYNAKGKGSKCYENNENNCQIYGRLYNWGTAMKALPQKLAFAKRC

SEQ ID NO: 22609 - DNA, 606 bp, Unknown
  Obtained from environmental sample
  misc_feature (1)..(606): n is a, c, g, or t
atgttccacgttgagctgatcgctttccatcgggattggcttgaatggccagggcagaacggtattcatccccatattatcgaatacataggactgcgccccgatcacctttggaggcagccgcccaaaaccgaggagccgttttctactccgcgttcgtggcatatgctttcagatgccatgaccagctatggggataatattaccgaaaagcaattggaaatcctggcttctggctgtttgtcgcctcaccacgccacgcaattccgcgcgtttgtcaaacaaatacgcaataggtatgcgctgtccgctataattaatggcagtcagaaatggcctaacaggccggaagacagagacgcactttattttcttgcccagagttttaaagcgcaacttgtcaaggaactgccgaccgataaaaacaacctttccggcgcgtcgcaggatctggcatttcgcgcaaaatcgctgatgaaagatttggcgaatatcagcctggaaatcgcacagatgacggtatcttcggaagaagcccaagttttaccagactggttcattgttgaggttatacgggatttgcccagattggcggcgaaaaaataa

SEQ ID NO: 22610 - protein, 201 aa, Unknown
  Obtained from environmental sample
  misc_feature (1)..(201): Xaa is any amino acid
MFHVELIAFHRDWLEWPGQNGIHPHIIEYIGLRPDHLWRQPPKTEEPFSTPRSWHMLSDAMTSYGDNITEKQLEILASGCLSPHHATQFRAFVKQIRNRYALSAIINGSQKWPNRPEDRDALYFLAQSFKAQLVKELPTDKNNLSGASQDLAFRAKSLMKDLANISLEIAQMTVSSEEAQVLPDWFIVEVIRDLPRLAAKK

SEQ ID NO: 22611 - DNA, 420 bp, Unknown
  Obtained from environmental sample
  misc_feature (1)..(420): n is a, c, g, or t
ttggaacgggaaactataaatggtttccagatacgctacagttacgatggccgtggaaatttggcggagaaagtatacggtgatggaacacaggaaaggtgggaatggagcgggaacgatcagttgatgaagtacatagaccgggacggtgtagtgacagaatggaaatatgacagccgatggaattatgttgaacaaagacgcggcggagaagtggtattcatcgggagatacgacgagcagaatcggctgataacaagccgtgaaggggagcacgcggaaatacggtacgaatatgataaccgcgattacttaaaggccagaaccgtaagaatagacaacaatgaaatacaagaaaaatgggaaaacgacgcttttggccggattttgaagtataccgacggcctcgggcgggagtga

SEQ ID NO: 22612 - protein, 139 aa, Unknown
  Obtained from environmental sample
  misc_feature (1)..(139): Xaa is any amino acid
MERETINGFQIRYSYDGRGNLAEKVYGDGTQERWEWSGNDQLMKYIDRDGVVTEWKYDSRWNYVEQRRGGEVVFIGRYDEQNRLITSREGEHAEIRYEYDNRDYLKARTVRIDNNEIQEKWENDAFGRILKYTDGLGRE

SEQ ID NO: 22613 - DNA, 669 bp, Unknown
  Obtained from environmental sample
  misc_feature (1)..(669): n is a, c, g, or t
atgaccgagagatacacaaagcccaaggcgggcgatgatgccgccaatgtgacgataaccgtctttgatggttcgtcgggtcctgccgaatacaaccttttgagcttcaacaaagggataatcacatttggcagggacaaaaaaaacgacatcgtgatactgtccccatttgtcaccaggcaccatggttactttagatacaccgaaggtgcatgggtgatagttgacaaccccgaaagccaaaacgggctcatcttcaacgatgagcttatagaaaacaaagtgatgcacgatggggattccatcaggttcgaaaagagcatcggcagcgtcgtcatggttgtctcaaaaggctctgcgtccgggtggaaaaacatagacctttgcggcgccaccgtgctgactataggcagcgccaccgattgcgacattgtgctggaccacgtcagcgtctccaagctgcatgccgaaattcgcgtcaggggcggcaattattttttgcaggacaacaatagcaccaacggcctgttgctgaacggcaaaaaagtgataggcagcagcaagctcagagaaaaagaaaaaatcctgataaccaacaccaagctggtttcacacagagataaatatcctatctcaccatcaacaagggccttagcttggacgttctga

SEQ ID NO: 22614 - protein, 222 aa, Unknown
  Obtained from environmental sample
  DOMAIN (41)...(105): FHA domain
  misc_feature (1)..(222): Xaa is any amino acid
MTERYTKPKAGDDAANVTITVFDGSSGPAEYNLLSFNKGIITFGRDKKNDIVILSPFVTRHHGYFRYTEGAWVIVDNPESQNGLIFNDELIENKVMHDGDSIRFEKSIGSVVMVVSKGSASGWKNIDLCGATVLTIGSATDCDIVLDHVSVSKLHAEIRVRGGNYFLQDNNSTNGLLLNGKKVIGSSKLREKEKILITNTKLVSHRDKYPISPSTRALAWTF

SEQ ID NO: 22615 - DNA, 489 bp, Unknown
  Obtained from environmental sample
  misc_feature (1)..(489): n is a, c, g, or t
atgaaatacatgccaagggccacggacgcagcagtcgccgaaaaacttcagggcttgggcggcctaatgatagtgggccccaaatggtgctttttttcttcaacggccctgcagttttccaacagcgcggtgtacctagacgattccgaggatgggcaaagcaatgtccaaattgcctcgcttaatccatccttgctgctgaagggcgcgacgcccagactaattgacgagtggcagttggcgcccgatctttttggtgcggccaggcgtgagattgacaagaggggggccagcggccaattcatattcacgggctcgacgacgccaccatcggcacaggccaggcactccggcgcgggccggttctcatacatccgcatgtaccccatgtccctttgcgaatctggagaatcgaatgggtctatatccccggccgacttattcgctggcaagcccgatctggggatagcctccagccttaccgtatag

SEQ ID NO: 22616 - protein, 162 aa, Unknown
  Obtained from environmental sample
  misc_feature (1)..(162): Xaa is any amino acid
MKYMPRATDAAVAEKLQGLGGLMIVGPKWCFFSSTALQFSNSAVYLDDSEDGQSNVQIASLNPSLLLKGATPRLIDEWQLAPDLFGAARREIDKRGASGQFIFTGSTTPPSAQARHSGAGRFSYIRMYPMSLCESGESNGSISPADLFAGKPDLGIASSLTV

SEQ ID NO: 22617 - DNA, 528 bp, Unknown
  Obtained from environmental sample
  misc_feature (1)..(528): n is a, c, g, or t
ttgaaggaaattactgctttgttgggagttggggaaattcagcaggttatgtgtatgctcttgcaagaaagggtttccgtgaaggatttagaaagcattttggagctaattgcaaatgccgcgaaaatttcaaaagatgcggtgtttataaatgagcaggttaggcttggcttaacaaggcaaatttgcaaaccatatataaacgaagacaccaatcaaatgtcggttatagcccttgctccagacttggagcaaatgctggaggcttcggttcaaaacacaaatagaggtcccaggctcgtgattaggccagatcttattgggcgtattatggaaaaaatggaattaattcaaacaaaagtgcaagcaaacggggacaaacccataatagtttgctcgccaaatgtgcgctatcccctgaaaaaattattggaaagcaattttccaaatttagtagttttatcttatagtgaaattatcaccggtgttaatatcaccgtagcggagactttaagcactcatgattag

SEQ ID NO: 22618 - protein, 175 aa, Unknown
  Obtained from environmental sample
  misc_feature (1)..(175): Xaa is any amino acid
MKEITALLGVGEIQQVMCMLLQERVSVKDLESILELIANAAKISKDAVFINEQVRLGLTRQICKPYINEDTNQMSVIALAPDLEQMLEASVQNTNRGPRLVIRPDLIGRIMEKMELIQTKVQANGDKPIIVCSPNVRYPLKKLLESNFPNLVVLSYSEIITGVNITVAETLSTHD

SEQ ID NO: 22619 - DNA, 393 bp, Unknown
  Obtained from environmental sample
  misc_feature (1)..(393): n is a, c, g, or t
atggaaacagcctgcggcatgagagcggagcttcagattttcggcagcgactacgacacgcccgacggaacctgcattcgggactatattcatgtcagcgaccttgccgtcggccacgccgccgcgctggattacatcatcaaaaacaacaaaagcctgatcgtgaacctgggcagcgaggcgggatcttcggtaaaggaagtcctggaaaccgcgcgccgtgttaccggcaaacccatccccgcaaagatcgttggcagacggtcaggcgatcccgcgaaactgacagcgtcgtcggcccttgcccacgagctactaggctgggaagcaaaatactctgatatggaaacattgatacggacgagttgggaagtttataagaatcaggaatag

SEQ ID NO: 22620 - protein, 130 aa, Unknown
  Obtained from environmental sample
  misc_feature (1)..(130): Xaa is any amino acid
METACGMRAELQIFGSDYDTPDGTCIRDYIHVSDLAVGHAAALDYIIKNNKSLIVNLGSEAGSSVKEVLETARRVTGKPIPAKIVGRRSGDPAKLTASSALAHELLGWEAKYSDMETLIRTSWEVYKNQE

SEQ ID NO: 22621 - DNA, 504 bp, Unknown
  Obtained from environmental sample
  misc_feature (1)..(504): n is a, c, g, or t
atgctggtggcggccatgaatccctgcccttgcggctttcagaccgatccccgccgcgtatgcacctgctcgccgcagcagatcgagcggtaccgggccaagctgtccggccccttgcttgatggcatcgatctgcatgtggaggttccggccgtgcctttcgacgatctccgggcgcgccggcccggttccggctcggccgccatgcgcgggcgcatcgccgcagcccggagcatccaggccgaacgctacgccagcgccgcctgccgcaccaatgcggacttgtcgggaagcctgctggaagaacactgccggctgggacaggccgaacacgactttctgcgcgaagccgtagtcaggctggccctgtcggccagggcctacacgcgcattctgcgtcttggccggacgattgcggatctggcgcaagcgcctgagctgaacgtggcccatctggccgaagccatcaattgccgcgttctggatcgcgagcgtctgttgtaa

SEQ ID NO: 22622 - protein, 167 aa, Unknown
  Obtained from environmental sample
  DOMAIN (1)...(57): Magnesium chelatase, subunit ChlI
  misc_feature (1)..(167): Xaa is any amino acid
MLVAAMNPCPCGFQTDPRRVCTCSPQQIERYRAKLSGPLLDGIDLHVEVPAVPFDDLRARRPGSGSAAMRGRIAAARSIQAERYASAACRTNADLSGSLLEEHCRLGQAEHDFLREAVVRLALSARAYTRILRLGRTIADLAQAPELNVAHLAEAINCRVLDRERLL

SEQ ID NO: 22623 - DNA, 609 bp, Unknown
  Obtained from environmental sample
  misc_feature (1)..(609): n is a, c, g, or t
ttgcaacagattcttggaaaatcggctgaaccgcctgtttatcttgactgcaagccggtttcatctacggaaatggttttcaagttttcgcaggcggttaatgttaagtcacttctttttgaaccgccgctggaagttgaatcaatcggcgagggagaagatgttttggttatttttgccaagcagcttgaagagggaaagaaggtaacagcggatataattgttgaagatgccggtctgaacacgctcaatgtgattgttccgttcagaacaaggaatgacagaatgccaaagcttgttattaacgaactgcggacagagaatagcaagcccaaagtggaatttgtggagttcctttccaaagagaaaaataaccttggcgctatgaggctctttattgccggacattcagtttcaacgcctgtttacgaatttcccccgacagaggttaaagcaggcgagtatattgtgcttcatctgcggacagtagaagaaggctgcctggatgagactggcgtggatcttgccctttcaggtggtacggatgcccagaacaacgcccgtgatttttggtaccccggtaatacgaaattgatgcacaaatactga

SEQ ID NO: 22624 - protein, 202 aa, Unknown
  Obtained from environmental sample
  misc_feature (1)..(202): Xaa is any amino acid
MQQILGKSAEPPVYLDCKPVSSTEMVFKFSQAVNVKSLLFEPPLEVESIGEGEDVLVIFAKQLEEGKKVTADIIVEDAGLNTLNVIVPFRTRNDRMPKLVINELRTENSKPKVEFVEFLSKEKNNLGAMRLFIAGHSVSTPVYEFPPTEVKAGEYIVLHLRTVEEGCLDETGVDLALSGGTDAQNNARDFWYPGNTKLMHKY

SEQ ID NO: 22625 - DNA, 711 bp, Unknown
  Obtained from environmental sample
  misc_feature (1)..(711): n is a, c, g, or t
atgatatctgatctggacaaactcaggtcattacaggaaattatctatgaaaaaatcggactggaaaagaacatccaggaaattcctaagttattggatactcaggaagaacttttaaacagattaaagaaaacattcatcgaaaaaaattcaaattttgaaaaagttaaggcggaagaggctgactttaaaaacaagcttgcggaagttgaatcagcaagggaaaaatccgaaaaaaacatggacatggtaagtacccaaagggagtacgaggcccttgataaggaaattaaggaagcttcggaaaaagaacagcaataccgcaaagaattacagcaaaggggaagtattctttgtgaacttgacgatcagattaaacagcagaccgcgttaattgaacagcaggaaaaagaattggaagaacgcagaaaaaaaattgaagcggaaattaatgacaaaaagaagcaaattgaaaatttgaagaaaaaagagggcaaactgactgaaaaccttgattccgaagtcgtgtttaaatttgagcgtattatcaaaaataagatggggatcggtattgtggcgataaagggcaatgtctgtatgggctgccatatgattcttcccgtccaatttgcccaacgaagtcagaataggcgaggaatatgtcttttgcccttattgttcacgcattctttactaccaagaatcgggtga

SEQ ID NO: 22626 - protein, 236 aa, Unknown
  Obtained from environmental sample
  DOMAIN (1)...(230): Uncharacterized ACR, COG1579
  misc_feature (1)..(236): Xaa is any amino acid
MISDLDKLRSLQEIIYEKIGLEKNIQEIPKLLDTQEELLNRLKKTFIEKNSNFEKVKAEEADFKNKLAEVESAREKSEKNMDMVSTQREYEALDKEIKEASEKEQQYRKELQQRGSILCELDDQIKQQTALIEQQEKELEERRKKIEAEINDKKKQIENLKKKEGKLTENLDSEVVFKFERIIKNKMGIGIVAIKGNVCMGCHMILPVQFAQRSQNRRGICLLPLLFTHSLLPRIG

SEQ ID NO: 22627 - DNA, 348 bp, Unknown
  Obtained from environmental sample
  misc_feature (1)..(348): n is a, c, g, or t
ttggaggcaggtgggaatcaaatttttcttttttacgggggatcaatagggctaaggcgccgaggagccggggaaaaaactaatgcaacttttttgtattcattggttcagcttcccaaagctccggaagtgattctgctgataaacgccggagttaaactcgccgcacagggttcggaggctcttgataacttgaaaaccattgccgaacatggcgcggatatacgctcatgcggccaatgcctgaactattacgggcttactgaaaagctggctgtggggaagatcaccaatatgatggagattgtggagtttttgacttcatcaaggcggacggtaacaatttaa

SEQ ID NO: 22628 - protein, 115 aa, Unknown
  Obtained from environmental sample
  misc_feature (1)..(115): Xaa is any amino acid
MEAGGNQIFLFYGGSIGLRRRGAGEKTNATFLYSLVQLPKAPEVILLINAGVKLAAQGSEALDNLKTIAEHGADIRSCGQCLNYYGLTEKLAVGKITNMMEIVEFLTSSRRTVTI

SEQ ID NO: 22629 - DNA, 429 bp, Unknown
  Obtained from environmental sample
  misc_feature (1)..(429): n is a, c, g, or t
ttggaattaacagcgcaagtttacaacattaacaaggggcataattccgaaatacttaaaaaatgcaaaacacttgatagttacagtgtttttatagacaagattcgggaataccagaagaacggattaactcttgaaaattcatttaaaaatgcgatagaatactgtaaagaaaataacatactgaagaattttttagaaacccacagttcggaggtatttaatatgctgttgacagagtggaattgggatgatgctctggaagttgcccgtgaggaagcttgggaagacggtcatgaagaaggttttggagaaggcatggaattagcagcccgcaatgctttagttgaaggactttcaaatgaaacaattaaaaaaattactggtctggatttgaacgcaattgaggcaattaaggagacgctgtag

SEQ ID NO: 22630 - protein, 142 aa, Unknown
  Obtained from environmental sample
  misc_feature (1)..(142): Xaa is any amino acid
MELTAQVYNINKGHNSEILKKCKTLDSYSVFIDKIREYQKNGLTLENSFKNAIEYCKENNILKNFLETHSSEVFNMLLTEWNWDDALEVAREEAWEDGHEEGFGEGMELAARNALVEGLSNETIKKITGLDLNAIEAIKETL

SEQ ID NO: 22631 - DNA, 666 bp, Unknown
  Obtained from environmental sample
  misc_feature (1)..(666): n is a, c, g, or t
atggtcttcggtaaccgcggcgacacctcggcgacgggtgtggcgttcacgcgtaacccgtcgacgggcgcgaaggaactgtacggcgagttcctcgtcaacgctcagggcgaggacgtcgtcgccggtatccgcacccccaacccgctgcctgagctcgagtcggtgctgccgcaggcgtacgccgagttcatcgcgacgatgaagaagctcgaggaccactacggtgacatgcaggatatcgagttcaccatcgaggagggcaagctgtacctcctgcagacgcgtaacggtaagcgcactgcggccgccgcgctcaaggtagcgcgtgacctcgtcgaagagggggtcatctccaaggatgaggcgctcatgcgtatcgagcccgaccagctcgaccagctgcttcaccccgccctcgacccgtcgcacggtgccgtctcgttgacgcgcggtctcaacgcgtcgccgggtgcggccgtcggccgtatcgtcttcgacgccgacgaggctgcccgctgcggcgaggccggcgaggccgtcgtgctcgtgcgttgggagacgacgccggacgacattcacggtgtcattcgccgctcagggtgtcctcccctcgcatggtggcatgacgtcccacgcggctgttgtctcgcgtggcatgggtaa

SEQ ID NO: 22632 - protein, 221 aa, Unknown
  Obtained from environmental sample
  DOMAIN (1)...(125): Pyruvate phosphate dikinase, PEP/pyruvate binding domain
  misc_feature (1)..(221): Xaa is any amino acid
MVFGNRGDTSATGVAFTRNPSTGAKELYGEFLVNAQGEDVVAGIRTPNPLPELESVLPQAYAEFIATMKKLEDHYGDMQDIEFTIEEGKLYLLQTRNGKRTAAAALKVARDLVEEGVISKDEALMRIEPDQLDQLLHPALDPSHGAVSLTRGLNASPGAAVGRIVFDADEAARCGEAGEAVVLVRWETTPDDIHGVIRRSGCPPLAWWHDVPRGCCLAWHG

SEQ ID NO: 22633 - DNA, 357 bp, Unknown
  Obtained from environmental sample
  misc_feature (1)..(357): n is a, c, g, or t
gtgcggccgtcggccgtatcgtcttcgacgccgacgaggctgcccgctgcggcgaggccggcgaggccgtcgtgctcgtgcgttgggagacgacgccggacgacattcacggtgtcattcgccgctcagggtgtcctcccctcgcatggtggcatgacgtcccacgcggctgttgtctcgcgtggcatgggtaagccgtgtgtggccggtgcgggcgatatgcccatccacacggacgcgaagacggcgaccattcgagatgttctccttccgggacaaggacatcatcacgcctggatgggtcgactgggtcccgtgttccccggggggcgcttcaagcttcatgcccgccgctag

SEQ ID NO: 22634 - protein, 118 aa, Unknown
  Obtained from environmental sample
  DOMAIN (16)...(94): PEP-utilising enzyme, mobile domain
  misc_feature (1)..(118): Xaa is any amino acid
MRPSAVSSSTPTRLPAAARPARPSCSCVGRRRRTTFTVSFAAQGVLPSHGGMTSHAAVVSRGMGKPCVAGAGDMPIHTDAKTATIRDVLLPGQGHHHAWMGRLGPVFPGGRFKLHARR

SEQ ID NO: 22635 - DNA, 720 bp, Unknown
  Obtained from environmental sample
  misc_feature (1)..(720): n is a, c, g, or t
atgcaaaagaaactcaaatccgcgttgatagttgcaagcattgctgcatcggcaaccctgatggtagttgcctgcggcggcggcactgctgtagaactagaagcctacgtaagagatgttggagaagcagaaaaaacaatgatcgttggaatggacgaaaaagacggtcctatatggggcggttggacagaacccagctccagcagcatagccgcagcagaacctagctccagcagcgaaggcagcacaaacccaggcatctcttcttcagaaggtccggtaacaaacccaagcagctccagcgcaggcttgcccccaatagggaacagcagcagcagtggcttgcccccaatagtgatcagcagctccagcgttgcaaaaagcagcagcagcgcagctcaggcagcaacaggcggttgcatagcaagtgccaccccaaaaggcacctgtagctgggatggctattcagcaacaaaagctctagtcccaggcgacaaactaaaacccgccgctttcaccttgccagcaggttgcaccgccgtaaaatggaactacgccccagacaccacaagaatggtgctaaacaacctatgcagcgcaaccaccgaagaaggcttcaacgccggcgcctccgaaacctacgtcctcttcgccgaactaacctgcgacgacggcaaaaacgtaatagcctgcaacccaaaagccggctggtcatcctaa

SEQ ID NO: 22636 - protein, 239 aa, Unknown
  Obtained from environmental sample
  SIGNAL (1)...(24)
  misc_feature (1)..(239): Xaa is any amino acid
MQKKLKSALIVASIAASATLMVVACGGGTAVELEAYVRDVGEAEKTMIVGMDEKDGPIWGGWTEPSSSSIAAAEPSSSSEGSTNPGISSSEGPVTNPSSSSAGLPPIGNSSSSGLPPIVISSSSVAKSSSSAAQAATGGCIASATPKGTCSWDGYSATKALVPGDKLKPAAFTLPAGCTAVKWNYAPDTTRMVLNNLCSATTEEGFNAGASETYVLFAELTCDDGKNVIACNPKAGWSS

SEQ ID NO: 22637 - DNA, 690 bp, Unknown
  Obtained from environmental sample
  misc_feature (1)..(690): n is a, c, g, or t
ttggaaacttcccctctcgacctctttagtgcctgggctgccaaaaaccgcttggtccttgcccaggtcaaaactcaggataaaagtaacgagataaccgccatcccctcgcttctggaacttatcgcccttgaaggctgtatcgttaccattgatgccatgggctgccaatacaaaatagcggactacattgtcgaagaaaaggccgattatgtgttctctctgaaggaaaatcaacaatccctttacgaagatgtggccgaatacttcaaaggcattgacttctctcatcctgcacctgatgtccttgtcggaagtaccttctatgtagaccatggacgtcttgaacggcgttcttatggtgtttcaggcaatgtctcttggcttactgaacgccatcccgcatggaaaaccattaaatctatcggcatagtccaatctaccagggaaacccctcaaaaaacttcaaccgaatgccgctattatgtttcttctctcaatccagacccacaaacctttgccaccgctgtccgcgcccattggggaattgagaactctctccactatgtattggacgttgctttccgcgaggatgcttgccggataaaaactggcactgctcctgagaattgggcatggtttagaaaaattgccatgacagtggcacgtttcggacaaacagtctactaa

SEQ ID NO: 22638 - protein, 229 aa, Unknown
  Obtained from environmental sample
  DOMAIN (1)...(221): Transposase DDE domain
  misc_feature (1)..(229): Xaa is any amino acid
METSPLDLFSAWAAKNRLVLAQVKTQDKSNEITAIPSLLELIALEGCIVTIDAMGCQYKIADYIVEEKADYVFSLKENQQSLYEDVAEYFKGIDFSHPAPDVLVGSTFYVDHGRLERRSYGVSGNVSWLTERHPAWKTIKSIGIVQSTRETPQKTSTECRYYVSSLNPDPQTFATAVRAHWGIENSLHYVLDVAFREDACRIKTGTAPENWAWFRKIAMTVARFGQTVY

SEQ ID NO: 22639 - DNA, 585 bp, Unknown
  Obtained from environmental sample
  misc_feature (1)..(585): n is a, c, g, or t
ttgatgctattgggcgtatttttctggttcaccgggtacaacgcagtagaaacattttttaccttgtgcgctacgaacccccgggacatgaacgcgggcagcgcttctatgacgctagcaattttttcccttacctttttagcctttgcggttccggccggatttattgcagtaaaaaccggacggcgcagagctatattaattggtttattcgggcttgttgtactgtttcttccgatggtctttctggccaatgtgtggatcgcgcgtatctgcctttttttaggcgggttcttctgggcaatggtcaacataaactctctgccgatggttgtacagctttcaggcgaggaaaaagtcggagcttttgtgggttattactatttcttttcgttcagctcgcagattgtctctccggttttattcggctttatccgcgacttggtaggccattacaaagtgctgttcctatacgcctgcatagccttcatactggcggccataagtctgttttttgtaaagcacggtgaggatgcgccggtgtcggtaagcgcgtcagaggtgtttgaatcgcttgatgattga

SEQ ID NO: 22640 - protein, 194 aa, Unknown
  Obtained from environmental sample
  misc_feature (1)..(194): Xaa is any amino acid
MMLLGVFFWFTGYNAVETFFTLCATNPRDMNAGSASMTLAIFSLTFLAFAVPAGFIAVKTGRRRAILIGLFGLVVLFLPMVFLANVWIARICLFLGGFFWAMVNINSLPMVVQLSGEEKVGAFVGYYYFFSFSSQIVSPVLFGFIRDLVGHYKVLFLYACIAFILAAISLFFVKHGEDAPVSVSASEVFESLDD

SEQ ID NO: 22641 - DNA, 459 bp, Unknown
  Obtained from environmental sample
  misc_feature (1)..(459): n is a, c, g, or t
atggacgatgcagaggcttggattagcggcaagaagcagaagctgaaagggctttatgtttatgtggacggctcttttatgccacacagcgagtatgccgggtggtcttgggttgccgtggaagacggggttgaaatagccaaagattctggaacagctcgtaagccagcttttagcagaaacatagatggcgaactctacgccgcgtggaaggcaatggagtttttagcaaaaaagaagcgcaaaggcacaatttgccacgactacgaaggcattgcctgctgggcaacaggtcaatggaaagcaaacagcacagtttcccaaatttacgtgaacagaattgccgatataaaagtttgggcaaaattcaaaaaagtgacaggccacagcaatgatgaatggatcgataaagcagacatagcatgtgaaggaagctctgacggggacttaaccttttga

SEQ ID NO: 22642 - protein, 152 aa, Unknown
  Obtained from environmental sample
  misc_feature (1)..(152): Xaa is any amino acid
MDDAEAWISGKKQKLKGLYVYVDGSFMPHSEYAGWSWVAVEDGVEIAKDSGTARKPAFSRNIDGELYAAWKAMEFLAKKKRKGTICHDYEGIACWATGQWKANSTVSQIYVNRIADIKVWAKFKKVTGHSNDEWIDKADIACEGSSDGDLTF

SEQ ID NO: 22643 - DNA, 549 bp, Unknown
  Obtained from environmental sample
  misc_feature (1)..(549): n is a, c, g, or t
ttgctggaaactttttcaatagcgtacaaagcagcggattatttggaagtaaatgtgagctgcccaaacacaggcgaagagcgtttggatttagatacgtgttttatgaaagagattttttttgaaattgaaaattttagaaaaaatgccccttgccgcaaagcggtttatgcaaaactaagccccgacttaacagacaaacagttgctttcgcttttggatttgctagctcaatttggcgtgaatggaattattttgggaaacacttacccaagcgaaaaactctcttattcattgcccgctttaaatgaaaaaggcacaagcggcggaatttcaggtcgggttatttacgaaaacacattcgcaaaaacagtgcttgcaaaaaaacattttcctaatttttcccttgttgcctgcggcggaatagaccacggtttgaaagtgaaggatttgctaggtgaaggcgtggattttgttcaggtgtattccgtatttgcttttaggtggatggcagcgcagaagatgatttatgagcttgattttaaataa

SEQ ID NO: 22644 - protein, 182 aa, Unknown
  Obtained from environmental sample
  misc_feature (1)..(182): Xaa is any amino acid
MLETFSIAYKAADYLEVNVSCPNTGEERLDLDTCFMKEIFFEIENFRKNAPCRKAVYAKLSPDLTDKQLLSLLDLLAQFGVNGIILGNTYPSEKLSYSLPALNEKGTSGGISGRVIYENTFAKTVLAKKHFPNFSLVACGGIDHGLKVKDLLGEGVDFVQVYSVFAFRWMAAQKMIYELDFK

SEQ ID NO: 22645 - DNA, 522 bp, Unknown
  Obtained from environmental sample
  misc_feature (1)..(522): n is a, c, g, or t
atgattttgcggcttgacaaatggatgttttcggatggatacatggatatgattaccattgatagcctgagcatcacgccggaacttctcggcctgattgcggaaatcgacgaattcaaaggcgcgtggaaagccttgggaactcttgcgccggaacgtctttccgccttgcgtcgggtggcgaccattgaaagcgtcggctcttccacccgcatcgagggaagcaggctttccgacagcgaggtggaaaagctgttgaacctttccatacgctcttttgccacgcgcgatgagcaggaggttgccgggtatgcggaaaccatggagcagcctttccagtcctgggcatacattcccctgacggaaaatcatatccgtcaacttcatcgggacttgctgcgtcacagcgaaaaagacgagcgccatcgcggcaactacaaaacctccccgaaaaccgtacccccccttgacgagcagggcccgcaaataggcattgtctttgaaaacgcttaccgcctttga

SEQ ID NO: 22646 - protein, 173 aa, Unknown
  Obtained from environmental sample
  misc_feature (1)..(173): Xaa is any amino acid
MILRLDKWMFSDGYMDMITIDSLSITPELLGLIAEIDEFKGAWKALGTLAPERLSALRRVATIESVGSSTRIEGSRLSDSEVEKLLNLSIRSFATRDEQEVAGYAETMEQPFQSWAYIPLTENHIRQLHRDLLRHSEKDERHRGNYKTSPKTVPPLDEQGPQIGIVFENAYRL

SEQ ID NO: 22647 - DNA, 711 bp, Unknown
  Obtained from environmental sample
  misc_feature (1)..(711): n is a, c, g, or t
gtgacgtttttgcagtcgtcgagggaaaaccgaaagaagaaatggtggcggacttttgccccgaacatggccaagtttggaaactattttgtgaacatcatcaccaggcagcgcgggaaatcgcagtattactcaaatcgcgccgtcgaggcactgcttgcgggcgaccttgccgctggaaaggcactcgttgaaaatgcgctggaaatagatccagcttcgtcccaagcctggaacatcaagggcgtgctagaaaaaaatctgaagaacacagacgcggcattccaggcctttagaaccgccatcaggcacaaccccaaggatgcggcggcaatcagcaatttagctgggctatatagggcagaggggctattcgaagaatacacaaagctgaagtcggtcgagaacaggctgcgaaagaatgacccttactaccatgccttcctcgcgacagaagcgctggaaggcagcaagggaaaatcggcggccaagctgatcaataaagcgattaagctgcagccaagagacccagattttttcatcatcctctgctccgcgcttgaactgcaaaacaaatttcccgaagccatgaaggcgctggaggaggcaaaaaggaattcagttttggacaggcaagcggacatggacgctatcatagcggactttaagattaggcatgggttggaaacaagtggactccgtgcaaaatga

SEQ ID NO: 22648 - protein, 236 aa, Unknown
  Obtained from environmental sample
  DOMAIN (75)...(108): Tetratricopeptide repeat
  misc_feature (1)..(236): Xaa is any amino acid
MTFLQSSRENRKKKWWRTFAPNMAKFGNYFVNIITRQRGKSQYYSNRAVEALLAGDLAAGKALVENALEIDPASSQAWNIKGVLEKNLKNTDAAFQAFRTAIRHNPKDAAAISNLAGLYRAEGLFEEYTKLKSVENRLRKNDPYYHAFLATEALEGSKGKSAAKLINKAIKLQPRDPDFFIILCSALELQNKFPEAMKALEEAKRNSVLDRQADMDAIIADFKIRHGLETSGLRAK

SEQ ID NO: 22649 - DNA, 777 bp, Unknown
  Obtained from environmental sample
  misc_feature (1)..(777): n is a, c, g, or t
atgcaaaagcgtccgccggccgacgccggttttgatattgccgagacggcgcggctgttgcgctacggtctgcccttcgttccggtattcattatcgcctccgtattccaaggcatggacaagatagcgcttcgcgcatattcctcttttgaagagataggcctctacgccgccgcaagcaagttcgctttccttctcactataatgcagaccggcttctatcttttttggcaacccacctccctagagcgttacgaggccgaccatgacgatgttcgcttctttgaaaaaacgtttgagtacgcggctgtggcggtgctgatttcagcgggcttgctgcttctgatgaaagatatcgtcaaatacttgttggcgccgacctattgggattccgtgatgataatgcctttcttgctgctagtgccgctgatgaacctgctgagcgagattaccggatcgggcatcaggttcaagaagcgcacctacctctacataatagcggtgacggtcggtgtgtcggcgaacttcgctggaaactacttcctcattcccatattgggcgctcgcggcgcggcgatctccacgggggcggcctacacaatatactttgtgatgcaaacgcaaatagccggccggctcttcgcggcgaactataggatatacaagatgataccggcgtttctggtgataacggtatttatggcgctgaacgctttttgctatgttccgtggtggtgcaacgcggcgccgatcgcggtcgtgggctttgatgcatag

SEQ ID NO: 22650 - protein, 258 aa, Unknown
  Obtained from environmental sample
  misc_feature (1)..(258): Xaa is any amino acid
MQKRPPADAGFDIAETARLLRYGLPFVPVFIIASVFQGMDKIALRAYSSFEEIGLYAAASKFAFLLTIMQTGFYLFWQPTSLERYEADHDDVRFFEKTFEYAAVAVLISAGLLLLMKDIVKYLLAPTYWDSVMIMPFLLLVPLMNLLSEITGSGIRFKKRTYLYIIAVTVGVSANFAGNYFLIPILGARGAAISTGAAYTIYFVMQTQIAGRLFAANYRIYKMIPAFLVITVFMALNAFCYVPWWCNAAPIAVVGFDA

SEQ ID NO: 22651 - DNA, 375 bp, Unknown
  Obtained from environmental sample
  misc_feature (1)..(375): n is a, c, g, or t
ttgcatgcctgcggtcactctagaggatcccacaatcatcgaccattttatgagtgctattcggatgatattgtaaagctggttaatgtttccgatatttattacattgaaagcgttgatggcaaaactattgtctgctgtgaaaaagaaaattacctttttaagggccgcctgtatcagatttatgaaaaattaagagacaatggctttatacaaataagcaaatactgcattttaaatatcaataaactggacaaattcaggccgttagacaataatcgccttgaagcagtattatccaacggagtttacctgtgcattaccagaaaatacatttccggtataaaacaaatactgcgggagttgaataaatga

SEQ ID NO: 22652 - protein, 124 aa, Unknown
  Obtained from environmental sample
  DOMAIN (23)...(120): LytTr DNA-binding domain
  misc_feature (1)..(124): Xaa is any amino acid
MHACGHSRGSHNHRPFYECYSDDIVKLVNVSDIYYIESVDGKTIVCCEKENYLFKGRLYQIYEKLRDNGFIQISKYCILNINKLDKFRPLDNNRLEAVLSNGVYLCITRKYISGIKQILRELNK

SEQ ID NO: 22653 - DNA, 402 bp, Unknown
  Obtained from environmental sample
  misc_feature (1)..(402): n is a, c, g, or t
atgaatggaataaaaagaattattaccaacactatgtttgttacaggcgcggctttggttattttatcggtattctcggcattgctcgatgttgaaattcattttgttcctactgtttttgaaattctcctggcgaatatattaattattctcggtctttttatacgctggaaatttgaaatccgtaatataattctggaatatctgattgatattagctatataatctttgtccttgttgtattcgggcttatatttgattggtattcagcaataccggtgtggcttcttgtcgcaatggcggttgtaatttacatacttgccatgattttctctgttgccaagataaataaagacgcgaaagaattaaacaaattactgcaaaagcggcaaaaaaaatag

SEQ ID NO: 22654 - protein, 133 aa, Unknown
  Obtained from environmental sample
  SIGNAL (1)...(26)
  misc_feature (1)..(133): Xaa is any amino acid
MNGIKRIITNTMFVTGAALVILSVFSALLDVEIHFVPTVFEILLANILIILGLFIRWKFEIRNIILEYLIDISYIIFVLVVFGLIFDWYSAIPVWLLVAMAVVIYILAMIFSVAKINKDAKELNKLLQKRQKK

SEQ ID NO: 22655 - DNA, 489 bp, Unknown
  Obtained from environmental sample
  misc_feature (1)..(489): n is a, c, g, or t
ttggttttccccgatgagattgcggtgtccgggcctttgcggatcatggaagcgctcaacgatatcaagaccgacccgattgatcttgagggaagaaaaagcgatttcaacgtaatggtaaatatcgccaatcccaatccgctgctgctttccataaggggcgacgcctacgcggaattccgctgcgtcatccgcccttccgttccggtacgcaatattgacggcataaccatagacataatcggcctggacccgcatcttgagtctgatctgggcggaagaaccggaagcatcaggctggaagcaacccagtcgcttctggacaacttcaccgcggagcccggttttctcagcgtggactgttccggcattaccgaaccgggaacctataccctgccggtcgatattgacctgccggacggctttatccttgtcaggcgcgaccccgaggaagtgggcgttacattcacattagtgagtggggagtaa

SEQ ID NO: 22656 - protein, 162 aa, Unknown
  Obtained from environmental sample
  misc_feature (1)..(162): Xaa is any amino acid
MVFPDEIAVSGPLRIMEALNDIKTDPIDLEGRKSDFNVMVNIANPNPLLLSIRGDAYAEFRCVIRPSVPVRNIDGITIDIIGLDPHLESDLGGRTGSIRLEATQSLLDNFTAEPGFLSVDCSGITEPGTYTLPVDIDLPDGFILVRRDPEEVGVTFTLVSGE

SEQ ID NO: 22657 - DNA, 537 bp, Unknown
  Obtained from environmental sample
  misc_feature (1)..(537): n is a, c, g, or t
gtgatggacgcaaagagggcctccctgtacggctacgactgctctgccgcagagaacggcatatactcttccgacatcatcgctggtctgggctggactgtcgcaaacggggcgaaggctgtcaacttcagtatcggtttcaaaaatggcacttcttatagttcatcgcaggacgcactatattccagtgcgatgcggaacctgctggacatgggctataactacgttgttgtccattccgctgggaacggcacgatggacacaagcaggaacagcgtgtttgcacacgttttttattctgcactgcgccagaggatcatcacagtgggcgctgtggacagcagtttccagatggccagcttcaccaattatgggccaatggttgatgtcgtggcccctggcgtgaatgtctatagcagcatagccaccagcgattcatcctataccaactacgacggcacgtccatggccgcgccccacatcacgggtctggctggccttgtgtggtccgctgatcctggcctgaccggttcctag

SEQ ID NO: 22658 - protein, 178 aa, Unknown
  Obtained from environmental sample
  DOMAIN (2)...(177): Subtilase family
  misc_feature (1)..(178): Xaa is any amino acid
MMDAKRASLYGYDCSAAENGIYSSDIIAGLGWTVANGAKAVNFSIGFKNGTSYSSSQDALYSSAMRNLLDMGYNYVVVHSAGNGTMDTSRNSVFAHVFYSALRQRIITVGAVDSSFQMASFTNYGPMVDVVAPGVNVYSSIATSDSSYTNYDGTSMAAPHITGLAGLVWSADPGLTGS

SEQ ID NO: 22659 - DNA, 519 bp, Unknown
  Obtained from environmental sample
  misc_feature (1)..(519): n is a, c, g, or t
gtggtggccgtgacggaggggataatggccgccctgtccaaacccgaattggacggagtcatagcgcacgaactggtccacatcaaacacagggacatcctcatcgggagcctcgccgcaatgttggcccaggcgatcatggtcttaaaatacatcgcctattttgtcccacgcgacagggacgggcgctcctccaacccctacgcgacaatggcggtgttcatgctggccccagtagccgcgatgcttctccagatggccatcagccggggcagggagtacatggccgacgagttttcggctaggaccacggggatgcccgaccagcttgcatccgcgctccaaaaaatatcgggctacaacaagaggctgcccatgcagggcgcccagccggccacggcccacatgatgatagtcaaccccctgtcaggctctggcctgttctcgctgttcagcacgcacccgcccatcgaaaagaggatcgagcgtttgaactggctgaggacgaggatgtactag

SEQ ID NO: 22660 - protein, 172 aa, Unknown
  Obtained from environmental sample
  DOMAIN (1)...(168): Peptidase family M48
  misc_feature (1)..(172): Xaa is any amino acid
MVAVTEGIMAALSKPELDGVIAHELVHIKHRDILIGSLAAMLAQAIMVLKYIAYFVPRDRDGRSSNPYATMAVFMLAPVAAMLLQMAISRGREYMADEFSARTTGMPDQLASALQKISGYNKRLPMQGAQPATAHMMIVNPLSGSGLFSLFSTHPPIEKRIERLNWLRTRMY

SEQ ID NO: 22661 - DNA, 852 bp, Unknown
  Obtained from environmental sample
  misc_feature (1)..(852): n is a, c, g, or t
ttgggtacaaccctggatattcgtatgaaccaattaagacgtttgttgaatgccaaacccattgttcgtattcggaaatcacatagtggattaaccggactgattattgaaaatacatcggtagaagttaatggaattaaaaaagaatttgatggaatgtggtcaagcagtcttactgattcaacgcttaaaggaaaacctgatattgaagccgttgatttaacaatgcgtttacaggcattaaatgacacactggaatgtacgacaaaaccgattatttttgacggtgatacaggcggaaagttagagcattttgtattcacggtcagaactttggagcgactgggaatttccgctgtaattattgaagataaaattggcttgaaaaaaaattcattgtttggtacggaagtacatcaggaacaggcgactgttgaagaattttgtgaaaaaataaaagtgggtaaaaatagtcaaattaccggtgattttatgataattgccagaattgaaagtttgatttgcggcaagccggtaagtgatgccctggaaagggcttttgcgtatatggaagccggagctgacggtattatgatacacagcaaagaaaaaacaggagaagacattcaacaattttgcaatatgttcagagcaagaaaccaaacgcttcccatagttgttgtaccttctacctttgatcacataagggaaagcgaatttataaaatggggtgtcaatattgtaatatatgcgaatcatatgcttagaagttcttacccgtcaatgcttaataaggcaaaatcaattttaatgtgnnnnnnnnnnnnnnnnnnnnnnnnnnatgcaagctga

SEQ ID NO: 22662 - protein, 283 aa, Unknown
  Obtained from environmental sample
  misc_feature (1)..(283): Xaa is any amino acid
MGTTLDIRMNQLRRLLNAKPIVRIRKSHSGLTGLIIENTSVEVNGIKKEFDGMWSSSLTDSTLKGKPDIEAVDLTMRLQALNDTLECTTKPIIFDGDTGGKLEHFVFTVRTLERLGISAVIIEDKIGLKKNSLFGTEVHQEQATVEEFCEKIKVGKNSQITGDFMIIARIESLICGKPVSDALERAFAYMEAGADGIMIHSKEKTGEDIQQFCNMFRARNQTLPIVVVPSTFDHIRESEFIKWGVNIVIYANHMLRSSYPSMLNKAKSILMXXXXXXXXXXAS

SEQ ID NO: 22663 - DNA, 366 bp, Unknown
  Obtained from environmental sample
  misc_feature (1)..(366): n is a, c, g, or t
gtggtagacggagttccacaacaaagcgacatattaaaacttaacctcaatccccgtttaggacatgacccgcaaggttttcgtccggtaattgttttgagtaataatattgtttctctatatgccaatgttgttatagcagcgcctatatcaactactcagcgcaggcttccgctttattttgatttacctgatagccttaataccaagggaactgttttgcttgatcaattgattactctggattataaagccaggacattccaatttatagaaaaagccccttcggatttcttaatacaattattgaatgttgcccagccgaattttcacagtatgaataatatgattttcggtagtgtttaa

SEQ ID NO: 22664 - protein, 121 aa, Unknown
  Obtained from environmental sample
  DOMAIN (7)...(111): PemK-like protein
  misc_feature (1)..(121): Xaa is any amino acid
MVDGVPQQSDILKLNLNPRLGHDPQGFRPVIVLSNNIVSLYANVVIAAPISTTQRRLPLYFDLPDSLNTKGTVLLDQLITLDYKARTFQFIEKAPSDFLIQLLNVAQPNFHSMNNMIFGSV

SEQ ID NO: 22665 - DNA, 408 bp, Unknown
  Obtained from environmental sample
  misc_feature (1)..(408): n is a, c, g, or t
ttggcaaagaaatataaaaacaaagttaattccggcggcatagacattgctcctatgctggatatggtttttattttgctgatattttttgttgtcacaagttcttttgttagggaaaccggagtggacgtgaacaagcccaaagctagttctgccgaagaacttgcaagggaaagcattttgatagggcttagtcgcgaaggtacaattcacataaacgaaggacaagttgatttaagaacattgaaaactattttgcaacagatggtagccgaaaaacccgaccgcgcagccattattgtggcagacagggaagctcccggcggaaaaatcgttgatattcttgaccagtgcaatttggcaagggtgaaaaaagtatccatagcggcaagcaaagagagcgattaa

SEQ ID NO: 22666 - protein, 135 aa, Unknown
  Obtained from environmental sample
  DOMAIN (7)...(133): Biopolymer transport protein ExbD/TolR
  misc_feature (1)..(135): Xaa is any amino acid
MAKKYKNKVNSGGIDIAPMLDMVFILLIFFVVTSSFVRETGVDVNKPKASSAEELARESILIGLSREGTIHINEGQVDLRTLKTILQQMVAEKPDRAAIIVADREAPGGKIVDILDQCNLARVKKVSIAASKESD

SEQ ID NO: 22667 - DNA, 528 bp, Unknown
  Obtained from environmental sample
  misc_feature (1)..(528): n is a, c, g, or t
atgaacgagcgggaacaaacgctaaatcaactccttgtagaaatggacggctttgacggcaccagcgggcttattattctcgccgccacaaacagaccggacgtattagaccccgcgctccttcgccccggacgatttgatcgtcaggtggtggtggataaacccgatcttaaaggcagagaggcaattttaaaaattcattccaaggacgtaagacgtgaccccgccctaaaccttgaagtcgtcgcgcgcataacgtcaggtttttccggggcagatttggcgaatattgtaaacgaagccgcgcttttggcggtaagagcgggacggaaaatggtaactcagcgcgactttgacgaagcgattgaaaaacccgtcgccggcttgcagaaaaaaaccagagtgcttaaacaacaggaaagaaaactgaccgcctaccacgaagccggtcacgcgataatcgctgcgtttacacctaactccgaaagtgtgcagaaaatttcgattattccgcgcggttttgcttaa

SEQ ID NO: 22668 - protein, 175 aa, Unknown
  Obtained from environmental sample
  DOMAIN (113)...(175): Peptidase family M41
  misc_feature (1)..(175): Xaa is any amino acid
MNEREQTLNQLLVEMDGFDGTSGLIILAATNRPDVLDPALLRPGRFDRQVVVDKPDLKGREAILKIHSKDVRRDPALNLEVVARITSGFSGADLANIVNEAALLAVRAGRKMVTQRDFDEAIEKPVAGLQKKTRVLKQQERKLTAYHEAGHAIIAAFTPNSESVQKISIIPRGFA

SEQ ID NO: 22669 - DNA, 858 bp, Unknown
  Obtained from environmental sample
  misc_feature (1)..(858): n is a, c, g, or t
gtgggcgaaggggagttctttgcctttcttgggcccaacggtgccggaaagaccacaaccatctcaatcctgaccacaacgctttccaaaacttccggggaactccacattgccgggttcgatgtggacacccagtcgcggcaggtacgcgaagaaatcggaatcattttccagcaaccgagccttgacgagaacctcagcgccgaagaaaacatccgctttcacgcctgcctctacggtatgtgtgcgtaccgtcccgcttttaagctgatgccgtcgatgtaccgtaaaaaggttctggaactggcagatatggtcggtctcgccgacgtgttggggaagcccgtcaaaaaactttccggcggcatgcagcgcaaactggaaattatccgcagcctaattcacacgcctcgggtgctattccttgacgagccgacccagggccttgatgctgtaagccgccgtgggctgtgggactacattaacacggtgcgccgccaatacggaaccacggtatttcttactacccactacattgacgaggcggaaaacaccgacacggtatgcgtaatcaaccacggcaaaatcgtcttcatgaattcgcccgacgagatgaagcggaatttgctcaagcaaaagcttatcatcgacgcggactatcgtaatgcgctcaagggcggaattatccgcgctgaatcggagcataacagcaaacggcaggattacagatccctttcaggggcgcacggcgcaacagttgatcgcccatatcataacgcccttttccgttttgaaaataccccactcttcattgtaagacccttatgtgggaactcccacaaagacagaattcgctaa

SEQ ID NO: 22670 - protein, 285 aa, Unknown
  Obtained from environmental sample
  DOMAIN (4)...(194): ABC transporter
  misc_feature (1)..(285): Xaa is any amino acid
MGEGEFFAFLGPNGAGKTTTISILTTTLSKTSGELHIAGFDVDTQSRQVREEIGIIFQQPSLDENLSAEENIRFHACLYGMCAYRPAFKLMPSMYRKKVLELADMVGLADVLGKPVKKLSGGMQRKLEIIRSLIHTPRVLFLDEPTQGLDAVSRRGLWDYINTVRRQYGTTVFLTTHYIDEAENTDTVCVINHGKIVFMNSPDEMKRNLLKQKLIIDADYRNALKGGIIRAESEHNSKRQDYRSLSGAHGATVDRPYHNALFRFENTPLFIVRPLCGNSHKDRIR

SEQ ID NO: 22671 - DNA, 594 bp, Unknown
  Obtained from environmental sample
  misc_feature (1)..(594): n is a, c, g, or t
ttggacctggttttaaaaagcgaaactatccgcggcctttttgtgccgatacccggcgaggtccaggcaaaaaacgcgggcctcgcggcgctggccgttaaaaccgcttttcccaatcttcaaaatcaatgcctttacaaggggcttagcgctttcgtgcttcccgcccgttttgagaaaatttcgtcaacgccgctttttattgttgacggcgctcataccaaaaccagcgttaaaacctgtcttgacactttttctttgctttacggcgacggcggcattctccttttcggctgtgcggaaggaaaagacgttctttccatggcggaactttgccttccacatttctcgcggatcattataacaaagccggggacatttaaaaaaagcaatgtcgaggaaatacacgccgtttttattcagatggcggaagctcaaaaaactcaccccgagattatttttttaccagatacagaggaagcgattgatttggtacttaggctgactgcaaagcatgggcttcctgcgcttggaacgggatcgttttaccttgcgggggagattcggggcaaggttgatttaaagaaccattga

SEQ ID NO: 22672 - protein, 197 aa, Unknown
  Obtained from environmental sample
  DOMAIN (54)...(132): Mur ligase family, glutamate ligase domain
  misc_feature (1)..(197): Xaa is any amino acid
MDLVLKSETIRGLFVPIPGEVQAKNAGLAALAVKTAFPNLQNQCLYKGLSAFVLPARFEKISSTPLFIVDGAHTKTSVKTCLDTFSLLYGDGGILLFGCAEGKDVLSMAELCLPHFSRIIITKPGTFKKSNVEEIHAVFIQMAEAQKTHPEIIFLPDTEEAIDLVLRLTAKHGLPALGTGSFYLAGEIRGKVDLKNH

SEQ ID NO: 22673 - DNA, 360 bp, Unknown
  Obtained from environmental sample
  misc_feature (1)..(360): n is a, c, g, or t
atgagcgtcgctgtggaaaattcttccggtagttcggaacttatcaccaagggcgctattgaagagatgctctctatttcttcggaggctgattataacaattctaccgtaccgctgaccggagaacttcgggaagaaattcttgccgcctgccgaagacttatcgtcaaaggtatgatggtgcttggtcttgccagaaaaacgctggaatctgcagaaaaggcgctttccgcaaatgatgattgctccatgatattcaagggttaccttgccctccttgatcctcccaaagaaagcgccgaagccgctattatagtattgggtgaatacggcataacagtaatagttttaaccgagtga

SEQ ID NO: 22674 - protein, 119 aa, Unknown
  Obtained from environmental sample
  misc_feature (1)..(119): Xaa is any amino acid
MSVAVENSSGSSELITKGAIEEMLSISSEADYNNSTVPLTGELREEILAACRRLIVKGMMVLGLARKTLESAEKALSANDDCSMIFKGYLALLDPPKESAEAAIIVLGEYGITVIVLTE

SEQ ID NO: 22675 - DNA, 603 bp, Unknown
  Obtained from environmental sample
  misc_feature (1)..(603): n is a, c, g, or t
gtggacccctggccgggtggatcctcgcctggtttaaacaacacccaagccgtaacaactacaacggtccctcagacagccggaacatacaccgttacctttaccgtggcggcggcaaccggctggaacgttgcgtcaggattatccgccggaactctgacaattaaagccgcctcttcaacaaaccaaacccccgttgcaagcgattatgacatcggcaacctgacgcagacggcgggtagagttaccgcagttactataacgccgaaatccggcaaatcaagcggcgcggtaacgatcaaatatgcagggaattccacgatcccgcagacagccggaacctacgccataacctttgacgtggcggaggcatcaggctggaatgccgcgacaggtttatccgccggtacgctgaacataacatcatcaggcagtggttcaatcccagcctttacctctattttcgactttgaagcatggctgagggcgcagccggtgaacacggcaagcaccgcctataacatcgctttgaacatcagcagccttggtggtgataacaaaactcccggaagcgttggaaaagacgctgaaaaacaaccctga

SEQ ID NO: 22676 - protein, 200 aa, Unknown
  Obtained from environmental sample
  misc_feature (1)..(200): Xaa is any amino acid
MDPWPGGSSPGLNNTQAVTTTTVPQTAGTYTVTFTVAAATGWNVASGLSAGTLTIKAASSTNQTPVASDYDIGNLTQTAGRVTAVTITPKSGKSSGAVTIKYAGNSTIPQTAGTYAITFDVAEASGWNAATGLSAGTLNITSSGSGSIPAFTSIFDFEAWLRAQPVNTASTAYNIALNISSLGGDNKTPGSVGKDAEKQP

SEQ ID NO: 22677 - DNA, 381 bp, Unknown
  Obtained from environmental sample
  misc_feature (1)..(381): n is a, c, g, or t
ttgcccattggctggacagtggaacagtggaaagcggcccaaacagacacaagcaaacatgccgagctaaaagccgccgctggcaaatcctgcgcggtgcatgtgcaggccatgctggactttaaggccatgggctgcgccgtggttgactatggcaacaacatccgccaagtggcaaaagacaacggcgtggctaatgcctttgatttcccaggctttgtcccagcttacatcaggccgctgttttgcgaaggcaaggggccgttccgctggggtgccctccgtggagaccccgatgacatatacaaaactgacgcaaaaataaaaaagagctttttccccaaaacaagcacgtgtaccgctggctgggacttggcttag

SEQ ID NO: 22678 - protein, 126 aa, Unknown
  Obtained from environmental sample
  misc_feature (1)..(126): Xaa is any amino acid
MPIGWTVEQWKAAQTDTSKHAELKAAAGKSCAVHVQAMLDFKAMGCAVVDYGNNIRQVAKDNGVANAFDFPGFVPAYIRPLFCEGKGPFRWGALRGDPDDIYKTDAKIKKSFFPKTSTCTAGWDLA

SEQ ID NO: 22679 - DNA, 609 bp, Unknown
  Obtained from environmental sample
  misc_feature (1)..(609): n is a, c, g, or t
atgctggtgagggtgcacctgtcccgccccataaccctgcggattgattcctctgcagcccactggggcgagctccgccgattgacggcgcttcgcacagaactggccccattttatggcggcgagctgactctggcccgctcggcccacaaaaaggccgccccgcaagaagacagcgaagaggacgcgccctacatgactgcgaaagagatggcgttcagcgatccagaagacatgctggccgcagtcctaaaagaaggcaagcgaggcgtgtccatacagacgaacacggtgcttggcgagatgaacccagagcagttgtgggagaccaccatggatcccagccgcccaaccttgctccaagcgcgcgttgactatgcagcagaatccgacgaaatcttcaccgtgctgatgggcgacccactggagccaaggcgccggatcatacaagagaatgcccttttggctgacaactttgatgtgctaaccaaatctgaaggttcctcgttggaacaagctccaaaaccccaactgaatcgaaccattttggaattagaaaatggaattgccgaaattcctacctcggacttaccccttgagccggactaa

SEQ ID NO: 22680 - protein, 202 aa, Unknown
  Obtained from environmental sample
  DOMAIN (84)...(150): DNA gyrase B subunit, carboxyl terminus
  misc_feature (1)..(202): Xaa is any amino acid
MLVRVHLSRPITLRIDSSAAHWGELRRLTALRTELAPFYGGELTLARSAHKKAAPQEDSEEDAPYMTAKEMAFSDPEDMLAAVLKEGKRGVSIQTNTVLGEMNPEQLWETTMDPSRPTLLQARVDYAAESDEIFTVLMGDPLEPRRRIIQENALLADNFDVLTKSEGSSLEQAPKPQLNRTILELENGIAEIPTSDLPLEPD

SEQ ID NO: 22681 - DNA, 333 bp, Unknown
  Obtained from environmental sample
  misc_feature (1)..(333): n is a, c, g, or t
ttgctgaaagttgttcaatccagcaatatcttatacttgacttgtataaatgtctatgaaatattaaagggcttgaagtataagaataacacgaataaagaaaatttatttagagcttttttaaaacatgccactatttgtgactttgacgataattcaatctctcacgcagcaaatatatatgccgatttaaggaacaaaggtaaaactattggcgatgcagacatactgatagcttctattgttattagcaatggtggtattttagtctctaacaatcaaaagcattatgaagatattccttatttgaatttggaaaattggatagaatag

SEQ ID NO: 22682 - protein, 110 aa, Unknown
  Obtained from environmental sample
  DOMAIN (3)...(108): PIN domain
  misc_feature (1)..(110): Xaa is any amino acid
MLKVVQSSNILYLTCINVYEILKGLKYKNNTNKENLFRAFLKHATICDFDDNSISHAANIYADLRNKGKTIGDADILIASIVISNGGILVSNNQKHYEDIPYLNLENWIE

SEQ ID NO: 22683 - DNA, 558 bp, Unknown
  Obtained from environmental sample
  misc_feature (1)..(558): n is a, c, g, or t
ttggtgttttatttaaaccgttacaaccaatccacaacgtatgttgaccgccagtccgccgacagaagagcggcgtcttttttctggatgggcgaatgtttatacgcgatggggcagtttgaagaagcggaaaaattttacgcgtgggtaatcgcgaaatatgccgacagccccaaagtggaagccgccgcttaccgcatagatttaattaaacaaaagaaaattgaatccgaacttttggctcttttacagtggagtcatgaagaagcgctgcgcacgagcgaggattaccaaagaacgataagaacttatgaatatacccttaatatgtatcaaaggcgcatagccgagctttcaagcaatgaaagcgttattataaatatgaataatcaggaattcaggccgaccgacagccagcggcaggaagaaactgcgcccgaaagattacaggaacctgaaaacatagagtatacctataatgattatttaatagaaagggcaaagcagcttggaagcaacgttcaggaaattttaaataaagaaagcggagggcaatga

SEQ ID NO: 22684 - protein, 185 aa, Unknown
  Obtained from environmental sample
  misc_feature (1)..(185): Xaa is any amino acid
MVFYLNRYNQSTTYVDRQSADRRAASFFWMGECLYAMGQFEEAEKFYAWVIAKYADSPKVEAAAYRIDLIKQKKIESELLALLQWSHEEALRTSEDYQRTIRTYEYTLNMYQRRIAELSSNESVIINMNNQEFRPTDSQRQEETAPERLQEPENIEYTYNDYLIERAKQLGSNVQEILNKESGGQ

SEQ ID NO: 22685 - DNA, 498 bp, Unknown
  Obtained from environmental sample
  misc_feature (1)..(498): n is a, c, g, or t
gtgttgtctgaatttcctgagccggttaccgtaacagtacaagaagctgttttaccgccgtcaacagtggtaacggtgataattgcggttccgacgctaacgccggtaactacgccgcctgccgataccgtagccacggcggtatcactgctattccatgttacattctggtttgtcgcttcggagggtattactatcgcggtaagggtttccgtaccgcccactacaaggctggtgaattcttttaaagatacgcctgttacagcgacggcggtagtactgaccgtaacggcacaagaagcttttataccgccgtcaacagtggtaacggttataatcgcggttccttcgcttacgccggaaactacgccgcctgttgatactgtggctacattagcattgcttgtgctccatgttacattcttgtttgtcgcgtttgacggtattattgccgcggtaaggggtttccgtaccgcccacaataaggctggtggatga

SEQ ID NO: 22686 - protein, 165 aa, Unknown
  Obtained from environmental sample
  misc_feature (1)..(165): Xaa is any amino acid
MLSEFPEPVTVTVQEAVLPPSTVVTVIIAVPTLTPVTTPPADTVATAVSLLFHVTFWFVASEGITIAVRVSVPPTTRLVNSFKDTPVTATAVVLTVTAQEAFIPPSTVVTVIIAVPSLTPETTPPVDTVATLALLVLHVTFLFVAFDGIIAAVRGFRTAHNKAGG

SEQ ID NO: 22687 - DNA, 534 bp, Unknown
  Obtained from environmental sample
  misc_feature (1)..(534): n is a, c, g, or t
ttggccggttcttttgggggggttaacggtccgcggtattcctgggcattttcggccccgttatattcgtttccgggaaatatttttggcccctttttttggtgcccgttctggttaccgggcggtttaccctttttttcccccctattgttcctttttttcccgagttccccccccttcatgcgtacggagcttttgcagtacaagaacgcggcttttattcaggcggaacgcgtaatgggagcgaatttttggcgcataacgcttgttcacatactgccgaatcttgcagttccgctcctttcagcttctgtgcttggactttcaaacgcgatccttgcggaggcttcgatgagctatcttggaatgggaatacagccgccgcagccctcatgggggcgtatgctctatgaatcacaggcgtatttttttacatctccatggtgcgccctagctccgggtttattaatcacgtttacggtagtcgcttttcatcttctgggcgtcgggctgcgccgcaggttcggggaataa

SEQ ID NO: 22688 - protein, 177 aa, Unknown
  Obtained from environmental sample
  DOMAIN (1)...(177): Binding-protein-dependent transport system inner membrane component
  misc_feature (1)..(177): Xaa is any amino acid
MAGSFGGVNGPRYSWAFSAPLYSFPGNIFGPFFWCPFWLPGGLPFFSPLLFLFFPSSPPFMRTELLQYKNAAFIQAERVMGANFWRITLVHILPNLAVPLLSASVLGLSNAILAEASMSYLGMGIQPPQPSWGRMLYESQAYFFTSPWCALAPGLLITFTVVAFHLLGVGLRRRFGE

SEQ ID NO: 22689 - DNA, 654 bp, Unknown
  Obtained from environmental sample
  misc_feature (1)..(654): n is a, c, g, or t
ttgtattcaggattaacgtcaaccaaaagagaatgggaaatgggaaagagagaaattgtaatactggcagcctttgggcttttttcttgcacagatgtgcaacgcgacaacccttatgattcaggcggaaagaattatatgggagaccaacttggttgcagtgatgttgttagttattcctgcgatataagcggttacagaaccgttcaaataggcatccaaacttggatggcggaggatttgagctgcgatgctgaagttaacaaaacagaaaactgcaactactactgcttagggaaattttatgattggtgtacggctatggcgatttgcccaagcggttggcatttgccaagcgatgcagaatggcaggaacttgagtattttgcaggtggggccattgcattcaaaaatttggcaacgaaatattattggggggagagtcctgatgatgggggtgtggacaaatacggcttttcggctctgccggactattttgggtcctacgaaggcaactggtggactgctactaaggcgcccttagagcattcggagagaatctccattgtaatggactcgtactggggggtcaagatctccagggattataggagtattgataagcgtttgaaagttcgttgtattcaggactaa

SEQ ID NO: 22690 - protein, 217 aa, Unknown
  Obtained from environmental sample
  misc_feature (1)..(217): Xaa is any amino acid
MYSGLTSTKREWEMGKREIVILAAFGLFSCTDVQRDNPYDSGGKNYMGDQLGCSDVVSYSCDISGYRTVQIGIQTWMAEDLSCDAEVNKTENCNYYCLGKFYDWCTAMAICPSGWHLPSDAEWQELEYFAGGAIAFKNLATKYYWGESPDDGGVDKYGFSALPDYFGSYEGNWWTATKAPLEHSERISIVMDSYWGVKISRDYRSIDKRLKVRCIQD

SEQ ID NO: 22691 - DNA, 738 bp, Unknown
  Obtained from environmental sample
  misc_feature (1)..(738): n is a, c, g, or t
ttgacaccattaaagcagggcaggaagggtatttggagttgcagaggaaggcgttacaagagaaaaatgaaaataaagaatattattcttaataaaataattttaattgtcatagggggagttttctccattcttcttctaacttggttaactttattttttttattccccatggcaatcatagaaggaaaagcttataatataaataaattaaaaaaaataagtaaacagagagaattagcttatgatgaactttatatttcattacataatgaaatagatgaatcaatcaataatttatatattaaaccattaataaataaaaatgctgatacctgtgaaaaatttatcatttataatggtgatatttcattattagataaaattgataaaagaaatctcttaaaccttacaaaggaagagttaagaatattaagaaatacaatttttgctaaatatggttatatatttcaatcaaaagacctttccaaacactttaatagatttgtatggtataagccacagtataataatgttgacacaagactaagcgaatatgacaagcatattatagaaataatacgcaaaattgagaatgaacaaatcaataatgatatacaaagtattattgagaatttttatattaaaactgttgatattgataatatttattatcaattcctgaaaaaatctcaaattaaaatttcatttctattgcaaccctcctattgggtataa

SEQ ID NO: 22692 - protein, 245 aa, Unknown
  Obtained from environmental sample
  misc_feature (1)..(245): Xaa is any amino acid
MTPLKQGRKGIWSCRGRRYKRKMKIKNIILNKIILIVIGGVFSILLLTWLTLFFLFPMAIIEGKAYNINKLKKISKQRELAYDELYISLHNEIDESINNLYIKPLINKNADTCEKFIIYNGDISLLDKIDKRNLLNLTKEELRILRNTIFAKYGYIFQSKDLSKHFNRFVWYKPQYNNVDTRLSEYDKHIIEIIRKIENEQINNDIQSIIENFYIKTVDIDNIYYQFLKKSQIKISFLLQPSYWV

SEQ ID NO: 22693 - DNA, 552 bp, Unknown
  Obtained from environmental sample
  misc_feature (1)..(552): n is a, c, g, or t
ttgagagatgttatagaagcggcttccgaaaaaatattatcggtgataaatgaaaaaaatcctgctcttgaaaataaggaggatatagccacaaaaatcggagttggcgcaatagtctttaacgatttgaaaaacaggcggctgatggatgttaaatttgactgggacggagctttaagttttgacggagccacaggtccttatgttcaaaacgcacacgtgaggctttgcagcattttgagaaaaagcaataaaaatgctttagaattagaattcaaaagcgaagaacttttagaccaaaattcttacgatttaataaaagcactttcttgcaaagaagaaaaaataaacatagcttgcgaaagcagggagccttgcattctagctcaatactcactggagcttgcagaagctgctcacagatttattcacaataatagagttatagggagcagcgaggagaaaaacaggctgtttttagtttactgcacccagcaaattctggaaagtctccttgaactgctgggtatagctcccataaaagaaatgtaa

SEQ ID NO: 22694 - protein, 183 aa, Unknown
  Obtained from environmental sample
  DOMAIN (69)...(183): DALR anticodon binding domain
  misc_feature (1)..(183): Xaa is any amino acid
MRDVIEAASEKILSVINEKNPALENKEDIATKIGVGAIVFNDLKNRRLMDVKFDWDGALSFDGATGPYVQNAHVRLCSILRKSNKNALELEFKSEELLDQNSYDLIKALSCKEEKINIACESREPCILAQYSLELAEAAHRFIHNNRVIGSSEEKNRLFLVYCTQQILESLLELLGIAPIKEM

SEQ ID NO: 22695 - DNA, 858 bp, Unknown
  Obtained from environmental sample
  misc_feature (1)..(858): n is a, c, g, or t
ttgccagatgttcttgacgaagccaagtacagccttgattatttgctcaaaacattcccagacgaaaatacttttgtgatacaagtgggagacagcaaagatcacgaacaaggatggcgacttccagaaatggatgctctaaacggcaaaagacccgcattgtgcgctttgtctcgcgtgcacatgggaagcactgccgcagcactcgctttgggtgcaaacgtattcaaaaacttagatgcaaactcagccgcaaaatacagagaaaaagcaaaagcgatttatgcccgcgctaggcaaagcgatactcaaacctccgcatttgaacgcaatgtaatcaacgatttttattttgaccaaacagacgaagacaacatggctttggcagccgcagaactcggtgatttaaaggcttatgcaccgcctgccgcgagcgaagtgagctggagcgactggaacgcatttgcgaattatcgcttggcagaacaaggaaacgaagccgcaaaaaaacgcttacttttggaagcgaaacgctatgaaggggagaatatatggaaccttccaggcgattatgtgtggggcagtttgcatcgctggattggcatggcgaatgttcatttaagggcgcagcgtttgcagggaaaagaattgtccttgccatttttgggtgttttggattatgtatttggccgcaacaactggggcatagcaatgctcgcctctgctaatttgccatacagcattcgcaatggtttacaccggaatttaccgctttaccaaaagtttttcccacaggggctttttacagaaggtccggggagaacaagccgacctcaactgggaaatgggaaaaaataa

SEQ ID NO: 22696 - protein, 285 aa, Unknown
  Obtained from environmental sample
  misc_feature (1)..(285): Xaa is any amino acid
MPDVLDEAKYSLDYLLKTFPDENTFVIQVGDSKDHEQGWRLPEMDALNGKRPALCALSRVHMGSTAAALALGANVFKNLDANSAAKYREKAKAIYARARQSDTQTSAFERNVINDFYFDQTDEDNMALAAAELGDLKAYAPPAASEVSWSDWNAFANYRLAEQGNEAAKKRLLLEAKRYEGENIWNLPGDYVWGSLHRWIGMANVHLRAQRLQGKELSLPFLGVLDYVFGRNNWGIAMLASANLPYSIRNGLHRNLPLYQKFFPQGLFTEGPGRTSRPQLGNGKK

SEQ ID NO: 22697 - DNA, 702 bp, Unknown
  Obtained from environmental sample
  misc_feature (1)..(702): n is a, c, g, or t
ttggagctaggcaatccggaaaaaccacacttgctaaaagaaattggagataaaggccatgtttttatgcccttggacaaaaaagacattttaaccgccgctcttgaggaccctgccaattttgtaaaaaacaagtctggaacaatgataatagacgaaattcaaaaggcaccggatctaattccagaaatcaaatatgctgtagataacgacaagcgcacggggcagtatctgctcactggctctgccaatataaaatctttgccaagtgtctcggaaagccttgcaggcagggtaaagaacattcgtttgcgacctcttacccaaggagagatacttcgcaaaaagccctcttttttgaaaatggcttttaacggagaatttccaaaaaaaataagcggttacgacaaagaaaccatatttgatttagcgtttagaggcggctacccagaagcggtgttgttaaaaacgcaaaaggagcgaaaggactggcacaaggattatctagataccttgatagcaagggatttgaaggatattgcaaatatcaagagacaaaattccttgcgagaactcataaggattttggcttcttggtcgggcaagtttatggatttgccgcctatttgcaatgcccttgggttgtcaaatccaacaacggactcttacataaactgctttggaagctctttatttgtttga

SEQ ID NO: 22698 - protein, 233 aa, Unknown
  Obtained from environmental sample
  misc_feature (1)..(233): Xaa is any amino acid
MELGNPEKPHLLKEIGDKGHVFMPLDKKDILTAALEDPANFVKNKSGTMIIDEIQKAPDLIPEIKYAVDNDKRTGQYLLTGSANIKSLPSVSESLAGRVKNIRLRPLTQGEILRKKPSFLKMAFNGEFPKKISGYDKETIFDLAFRGGYPEAVLLKTQKERKDWHKDYLDTLIARDLKDIANIKRQNSLRELIRILASWSGKFMDLPPICNALGLSNPTTDSYINCFGSSLFV

SEQ ID NO: 22699 - DNA, 861 bp, Unknown
  Obtained from environmental sample
  misc_feature (1)..(861): n is a, c, g, or t
ttgcatgcctgcaggtcgactcntagaggatcccancttcacctngcgcgccgctggaacaaatcaatcggctctgtggaaagggaggaacttttttcgctggaaataggccctatggaagatcaaattgccctttacaagctggaaggaaacatgggtattaaacgcacaggctttacaatgagggaggggctgttttacattgccgacggaaacgccggaaaaattgtcaggtataactcctacggcgatttactgtttatgatatataacgaagaaacaaatccggctcccattaccttaaagacaaatatctccggggaagaacagacgacaaggtgggcgtatacgtatccgcttgacgcgcccggctggattaccgtggattcccgcaggcatatttttgccgaggacaggtttgcggcgcaagcctaccgcaccgatcccgaaaccaaggttgttcttgacgggataattcttcattttgatcaggacggccgttttatcaattacctgggacgcgaaggaatagggggcagtcctttccccaggattgtaggtcttaccacttcggcaaaagacgaacttgccgttatctgccggattccggacggctggaacgtatactggttcaacgcgtcgggagttcttctgtatttggtaaaaatcgcgtccgaagcgattcccgcttatcccgactggcctcaggccataaccgcggtagaccatgtcgccgccgctgtagacgcgcggaaactttttattaaaacagactacagcccgcaaacctttgatcagttgaccaatacccggacaggtcctgaaccctatcagttccattatctggattctggacattga

SEQ ID NO: 22700 - protein, 286 aa, Unknown
  Obtained from environmental sample
  misc_feature (1)..(286): Xaa is any amino acid
MHACRSTXRGSXLHLARRWNKSIGSVEREELFSLEIGPMEDQIALYKLEGNMGIKRTGFTMREGLFYIADGNAGKIVRYNSYGDLLFMIYNEETNPAPITLKTNISGEEQTTRWAYTYPLDAPGWITVDSRRHIFAEDRFAAQAYRTDPETKVVLDGIILHFDQDGRFINYLGREGIGGSPFPRIVGLTTSAKDELAVICRIPDGWNVYWFNASGVLLYLVKIASEAIPAYPDWPQAITAVDHVAAAVDARKLFIKTDYSPQTFDQLTNTRTGPEPYQFHYLDSGH

SEQ ID NO: 22701 - DNA, 435 bp, Unknown
  Obtained from environmental sample
  misc_feature (1)..(435): n is a, c, g, or t
gtgaaggcaagcccaaagagggaaattttggaaaaatctgtttctgcttatgggagaattttcttggcaaagaacattaaagaggctgtggatattgttaataggattgcgccggagcatttggagatagtggctaaaaatcaagatgagctggaaaaaatggttgaaaatgctggagccatattcataggctcttattcttctgagcctgttggcgattattttgcaggacctaaccacgttttgccaacaaatgggactgccagatttgcaagcccgcttggggtttatgattttttgaagagaactagcataataaggtatagcaaaaaggctttgctgaaaaatggggcaaatatagcgaaaatagcccattctgaggggttttatcaccataaaagggctattgaggtgcgcatagtaaccgctgattaa

SEQ ID NO: 22702 - protein, 144 aa, Unknown
  Obtained from environmental sample
  DOMAIN (1)...(141): Histidinol dehydrogenase
  misc_feature (1)..(144): Xaa is any amino acid
MKASPKREILEKSVSAYGRIFLAKNIKEAVDIVNRIAPEHLEIVAKNQDELEKMVENAGAIFIGSYSSEPVGDYFAGPNHVLPTNGTARFASPLGVYDFLKRTSIIRYSKKALLKNGANIAKIAHSEGFYHHKRAIEVRIVTAD

SEQ ID NO: 22703 - DNA, 873 bp, Unknown
  Obtained from environmental sample
  misc_feature (1)..(873): n is a, c, g, or t
gtgataaaagaagccattgttcaagctgctgctaaaaaaaacttgtctagcgaggttgccgaaaccgttatggacgagattatgggcggcaaagctacagatattcaattagccgcctttttaaccgcaatgtcggttaaaggcgaaaccatagaagaaataaccgcctgtgcaataggtatgcgaaaacattgcgttaggcttttgcacaatatggagtgcttggaaattgtgggaactggcggcgataaatcaaatacattcaatatatctacaacaacggcgattgtaacctcgtcttgcggaattcctattgcaaaacacggcaaccgtgcagccagtagccgttccggctcggcagatgttctaaactcgcttggtgttaaattggatataagccccgaacacagccttaaaattttgcaaaacataaatttgtgctttttattcgcgcaaaactaccacctctcaatgaaatatgttgcacctgttcgcaaagaactcggcataagaaccatattcaatattttgggacccttggtaaacccggcgggtgcctctatgcaactactcggtgtttacgaaaaagaactcttggagcctatggcacaggtgcttttgaatttgggcgttaacagcggaatggttgtttttgggcaagacggcttatacgaagtttcaatgagcgcacccacaagcgttttgcgaattcagagacgggttggctcaaagaattatgatataacccccagagcagtttggtctttaagcgttgccaaaaaaaaacacctcgctgggcggaactcccccaacaaaacgccaacattaccaaaggatatttctcttcgggaattagaaggacccaaggtttga

SEQ ID NO: 22704 - protein, 290 aa, Unknown
  Obtained from environmental sample
  DOMAIN (1)...(66): Glycosyl transferase family, helical bundle domain
  misc_feature (1)..(290): Xaa is any amino acid
MIKEAIVQAAAKKNLSSEVAETVMDEIMGGKATDIQLAAFLTAMSVKGETIEEITACAIGMRKHCVRLLHNMECLEIVGTGGDKSNTFNISTTTAIVTSSCGIPIAKHGNRAASSRSGSADVLNSLGVKLDISPEHSLKILQNINLCFLFAQNYHLSMKYVAPVRKELGIRTIFNILGPLVNPAGASMQLLGVYEKELLEPMAQVLLNLGVNSGMVVFGQDGLYEVSMSAPTSVLRIQRRVGSKNYDITPRAVWSLSVAKKKHLAGRNSPNKTPTLPKDISLRELEGPKV

SEQ ID NO: 22705 - DNA, 783 bp, Unknown
  Obtained from environmental sample
  misc_feature (1)..(783): n is a, c, g, or t
atgcgcagcgcggtagcgttctgccaaagcatagcagtctctaaaatgacaaaagaagcgtttaacacctgcggtgaagcgtatttttccgcattaacagaacaacagcgttctgaaatcgtgtcagtcgaagctgaccatgttgacggaactatgggcgctcaggtaagagaacaaaaactacactggctaaaatccgccgatgcttccaaacgtgaatgtaagattttgaataacgtgcgctgtctttcagaaggcgtggacgttccctctcttgatgccgtaatgttcctttcagccagaaacagccaaattgacgtagtacaatcagtcggacgtgttatgcgaaaagccgaaggcaaaaaatacggctatataataatccccgtcgtagtccttcccgatgccgacaccgataaagtgttatccaccgaccgctataaagtagtctggactgttcttaacgctcttcgcgcccatgatgatcgttttgacgctacaataaataaaatagaacttaataaaaccatacccgataaaatactggtaataaaacccaacatcggtgtcggtgatgataaagataaagacgtaaccccaaaaggacagggcggtacaagtgaattccagaaacaccttgaccttgaatttgctaaattacaaggcaaatctacccaaagattgcctggaaggcgaaaaaagacttttatggggaataatgggcatcctgatgttgcccaaaatgcccaacccgcatttcgaaaatattccccccttggataa

SEQ ID NO: 22706 - protein, 260 aa, Unknown
  Obtained from environmental sample
  DOMAIN (37)...(118): Helicase conserved C-terminal domain
  misc_feature (1)..(260): Xaa is any amino acid
MRSAVAFCQSIAVSKMTKEAFNTCGEAYFSALTEQQRSEIVSVEADHVDGTMGAQVREQKLHWLKSADASKRECKILNNVRCLSEGVDVPSLDAVMFLSARNSQIDVVQSVGRVMRKAEGKKYGYIIIPVVVLPDADTDKVLSTDRYKVVWTVLNALRAHDDRFDATINKIELNKTIPDKILVIKPNIGVGDDKDKDVTPKGQGGTSEFQKHLDLEFAKLQGKSTQRLPGRRKKTFMGNNGHPDVAQNAQPAFRKYSPLG

SEQ ID NO: 22707 - DNA, 435 bp, Unknown
  Obtained from environmental sample
  misc_feature (1)..(435): n is a, c, g, or t
ttgttatattttatgtataaaaagcggtataaaatgataggaaagttaccccaaaccacgcagcggaacctgttccgccccatgcttgctgatttcataaaccccagccacgagcttgttcttctgtccaagaaaatagactggcagtatttcgaggacgaattcgcgcccctctattgccccgacaacggaacgcccagcgttcccatccgcctgatggtatcctgccttatgctcaagcagctctacaatctaggcgatgagagcctgcccgcctattgggtcagggatgtttactttcagtatttcagcgggatgaccttttttgagcatgagtttccgttcaacccaagcgatttctcccatttccgcaagcgcataggcacagcttggtttgagaaaatttttgcgcacagcgtgaagaagcatggctaa

SEQ ID NO: 22708 - protein, 144 aa, Unknown
  Obtained from environmental sample
  misc_feature (1)..(144): Xaa is any amino acid
MLYFMYKKRYKMIGKLPQTTQRNLFRPMLADFINPSHELVLLSKKIDWQYFEDEFAPLYCPDNGTPSVPIRLMVSCLMLKQLYNLGDESLPAYWVRDVYFQYFSGMTFFEHEFPFNPSDFSHFRKRIGTAWFEKIFAHSVKKHG

SEQ ID NO: 22709 - DNA, 324 bp, Unknown
  Obtained from environmental sample
  misc_feature (1)..(324): n is a, c, g, or t
atgtgggagaaagcggatatttgggatttactaaaaagtttttcatcattggcgattaaccttcccgcggagcgtattatcgatctttacgaggaagttacggtaaatgaaaaaaccaccttgcttaacgaatttttggaaaacaaaggggagtgcagatttacggaactgattacaagagccggaacgcttgatgtcgtatgcgcttttttagcggttcttgaagccgcaaaaatgcgcttgattatgatctatcaaaaccgtctttttggtgatattcttatcagaccgaacaggcatgaaaatatatccactaatttataa

SEQ ID NO: 22710 - protein, 107 aa, Unknown
  Obtained from environmental sample
  misc_feature (1)..(107): Xaa is any amino acid
MWEKADIWDLLKSFSSLAINLPAERIIDLYEEVTVNEKTTLLNEFLENKGECRFTELITRAGTLDVVCAFLAVLEAAKMRLIMIYQNRLFGDILIRPNRHENISTNL

SEQ ID NO: 22711 - DNA, 534 bp, Unknown
  Obtained from environmental sample
  misc_feature (1)..(534): n is a, c, g, or t
gtgattgaaaatattgaaaaagaaacggcgcttgtcgaagcgattctattcatggaaggagaccctcttgatgaaggaacagtagcccgtatttgctgtctttcaaaggatgttataacaaacgctcttgataatttaagcgagcgttacgcgaacactgactgcgctcttgaacttacccgtgtcggaggcggaataaaaatttcagtaaagcgcgaatattgggataatttaaaagaaaggtacggcaaaaaaaacgaaggaaaaatttcccgcgccgcgatggaaacgttagcgattgtagcgtattcacagccgattacaagggcagaaatagaaaaaatccgcggggtgtcggcggacaatatgatccgcctgcttcttgaaaaaaattttatccgcgagacgggaaaaaggacattcctggccgcccgttttgtacggaaccccaaaagaatttttaaaacaattcggcctttaattcaatccccgaacttccaaagctcggcgaaagccgattttgaaaaattttga

SEQ ID NO: 22712 - protein, 177 aa, Unknown
  Obtained from environmental sample
  DOMAIN (10)...(152): Putative transcriptional regulators (Ypuh-like)
  misc_feature (1)..(177): Xaa is any amino acid
MIENIEKETALVEAILFMEGDPLDEGTVARICCLSKDVITNALDNLSERYANTDCALELTRVGGGIKISVKREYWDNLKERYGKKNEGKISRAAMETLAIVAYSQPITRAEIEKIRGVSADNMIRLLLEKNFIRETGKRTFLAARFVRNPKRIFKTIRPLIQSPNFQSSAKADFEKF

SEQ ID NO: 22713 - DNA, 663 bp, Unknown
  Obtained from environmental sample
  misc_feature (1)..(663): n is a, c, g, or t
ttgcagatggcgagctttaccatcaccgaaaaaggctactcgctgacaggacgctacggcgctataatgccggaaatctccgaaaatatgagaaacggcccggccaatccgaaaagttaccttggccgtattgccgcgctgttacctgaacgcttcgtaaacggtgaactgccccttgcaatggtaagcatggacaactgttctcatgacggcgatatgctttttaatgctatggaagcttttgcaatagactgggttgaaaataaagttgcgaatgaaagatttttagcttacgttagaaacaaacaaaaactttcatttccctggagcatgatcgacaagataaccccccggcccgatgaaagcgtcaggaaaatgctcgccgactccggtctggaaaatgtgcaagatattgtcacagcgaagaacacctttgtcgccccttttgttaattccgaagaaacgcaatacttcgttgtcgaggacttatttcccaacggccggccgcctcttgagaaaaaaggctcattgtttacaaacgaggaaaccgtagacatggcccagaaaatgaaggtctgcacatgtcttaaccccctggcacacggggcctccgggttttcggctgtcttgctggggctccccgcggatcaatcaaacagatga

SEQ ID NO: 22714 - protein, 220 aa, Unknown
  Obtained from environmental sample
  misc_feature (1)..(220): Xaa is any amino acid
MQMASFTITEKGYSLTGRYGAIMPEISENMRNGPANPKSYLGRIAALLPERFVNGELPLAMVSMDNCSHDGDMLFNAMEAFAIDWVENKVANERFLAYVRNKQKLSFPWSMIDKITPRPDESVRKMLADSGLENVQDIVTAKNTFVAPFVNSEETQYFVVEDLFPNGRPPLEKKGSLFTNEETVDMAQKMKVCTCLNPLAHGASGFSAVLLGLPADQSNR

SEQ ID NO: 22715 - DNA, 762 bp, Unknown
  Obtained from environmental sample
  misc_feature (1)..(762): n is a, c, g, or t
ttggaacgcaaaacaatagacctctccggcatccaagcacttgtgctagacgaagcagacgaaatgctggacatgggttttcaagaagatgttgaatatattttagaagcaactccagaagatgcgcaaagagccttgttcagtgccactatgccaaccgctgtgcaaaaaatagtttccacatacctcggcgaatacgaaacaataagaatagcgggcaaaaccgctaccgttgaaaaaattcgccaacgctatttatcggttcgccaagagcataagatggaggctctaacaagggttttggaaggcgaagaatttgaaggtatgctcatctttgtgcgcacaaaacaagccacggcagaaattgcggaacgcttggaagcaagaggtttcaaccgggttcccctttctggagatttggctcaatctttgagagaacgcacactaaaccgccttaaagacggcaaaatagacattgtggttgcaaccgatgttgccgccagaggcttggacgttgagcgcataacccacgttttgaactacgacattccctacgacaccgaatcttacgttcatcgcataggcagaacaggccgtgctggcagggacggcaatgccatattgtttgtcaccccaagagaaacacgcctgcttgccatgatagaaaaagaaactcgtcaaaaaattgaaaaaatgagtttgccaacaggcgagcagataagcgataaaagagtggctaaattccaaagaagatattattaa

SEQ ID NO: 22716 - protein, 253 aa, Unknown
  Obtained from environmental sample
  DOMAIN (125)...(201): Helicase conserved C-terminal domain
  misc_feature (1)..(253): Xaa is any amino acid
MERKTIDLSGIQALVLDEADEMLDMGFQEDVEYILEATPEDAQRALFSATMPTAVQKIVSTYLGEYETIRIAGKTATVEKIRQRYLSVRQEHKMEALTRVLEGEEFEGMLIFVRTKQATAEIAERLEARGFNRVPLSGDLAQSLRERTLNRLKDGKIDIVVATDVAARGLDVERITHVLNYDIPYDTESYVHRIGRTGRAGRDGNAILFVTPRETRLLAMIEKETRQKIEKMSLPTGEQISDKRVAKFQRRYY

SEQ ID NO: 22717 - DNA, 390 bp, Unknown
  Obtained from environmental sample
  misc_feature (1)..(390): n is a, c, g, or t
atgccagccaagcgcaaatacaaagattcagttttcacttctttgttcaaagataagaagcggcttctggaattgtacaacgcaatagatggaacttcttacaaagaccccaacttgataaacatcaacacattgaacggcgttttgttcgcaaataggcagaacgacatatcttttacgataggcggcaaattggttgtactcatcgagcatcaatctagcataaatgaaaacatgcctttgcgttttttgatatatatatcgaaggtatatgaaaagaaaaacgacccccaaaagcatttacaagcagaatatgcttcaaatcccaagaccagaattcatagttccatacatgggcgcaagaaaaatatccaaaaaaaaaaaaattga

SEQ ID NO: 22718 - protein, 129 aa, Unknown
  Obtained from environmental sample
  misc_feature (1)..(129): Xaa is any amino acid
MPAKRKYKDSVFTSLFKDKKRLLELYNAIDGTSYKDPNLININTLNGVLFANRQNDISFTIGGKLVVLIEHQSSINENMPLRFLIYISKVYEKKNDPQKHLQAEYASNPKTRIHSSIHGRKKNIQKKKN

SEQ ID NO: 22719 - DNA, 432 bp, Unknown
  Obtained from environmental sample
  misc_feature (1)..(432): n is a, c, g, or t
ttgtgcaccgatgaatgccgcatggtccgtatttttgcgatggatcagcgggatgaagccgtttttggcaagttcggcttcacgccggtcgctgatggcgatctctgtggggcatttcatatccacgccgccgtcgtctgtagggaaggtatggcacggcagattggacaccagtcctccgctttccacgcctctgatcatcgtacaccatccgtacagcttgaaagcccggttgatgttcacgcccatcgcataggcggaattgccccatgcatacttgcggtggtcttttccgtccacctcttcttcaaaatcgaactcatccacaggattggtttccggcccatagggcaggcgggccagaaaattcggcatgaccagaccgatatagcgtgnnnnnnnnnnnnnnnnnnnnnnnnnnatgcaagctga

SEQ ID NO: 22720 - protein, 143 aa, Unknown
  Obtained from environmental sample
  misc_feature (1)..(143): Xaa is any amino acid
MCTDECRMVRIFAMDQRDEAVFGKFGFTPVADGDLCGAFHIHAAVVCREGMARQIGHQSSAFHASDHRTPSVQLESPVDVHAHRIGGIAPCILAVVFSVHLFFKIELIHRIGFRPIGQAGQKIRHDQTDIAXXXXXXXXXXAS

SEQ ID NO: 22721 - DNA, 768 bp, Unknown
  Obtained from environmental sample
  misc_feature (1)..(768): n is a, c, g, or t
atgccgaattttctggcccgcctgccctatgggccggaaaccaatcctgtggatgagttcgattttgaagaagaggtggacggaaaagaccaccgcaagtatgcatggggcaattccgcctatgcgatgggcgtgaacatcaaccgggctttcaagctgtacggatggtgtacgatgatcagaggcgtggaaagcggaggactggtgtccaatctgccgtgccataccttccctacagacgacggcggcgtggatatgaaatgccccacagagatcgccatcagcgaccggcgtgaagccgaacttgccaaaaacggcttcatcccgctgatccatcgcaaaaatacggaccatgcggcattcatcggtgcacaatcactgcagaaaccacaggaatacatggaccccgacgccacggccaacgcgaatctctccgcccggctcccgtatgtgtttgcctgttcgcgcttcgcccattacctgaagtgcattgtgcgcgataaaataggctcgttcaaggaccgggaaagtatgcagacctggctgaacggctggattatgaattatgtggacgctgacccggccaattcctcccaggaaaccaaagcccgccgtcctctggccgcggcagaggttgtgctggaggatgtagaaggcaacccggggtattatagcgcacgtttttacctgcggccccactttcagttggaggggctggacggttctctgcgtctggtggcaaaactcccgtcggccaaaccggcctga

SEQ ID NO: 22722 - protein, 255 aa, Unknown
  Obtained from environmental sample
  DOMAIN (1)...(251): Protein of unknown function (DUF877)
  misc_feature (1)..(255): Xaa is any amino acid
MPNFLARLPYGPETNPVDEFDFEEEVDGKDHRKYAWGNSAYAMGVNINRAFKLYGWCTMIRGVESGGLVSNLPCHTFPTDDGGVDMKCPTEIAISDRREAELAKNGFIPLIHRKNTDHAAFIGAQSLQKPQEYMDPDATANANLSARLPYVFACSRFAHYLKCIVRDKIGSFKDRESMQTWLNGWIMNYVDADPANSSQETKARRPLAAAEVVLEDVEGNPGYYSARFYLRPHFQLEGLDGSLRLVAKLPSAKPA

SEQ ID NO: 22723 - DNA, 318 bp, Unknown
  Obtained from environmental sample
  misc_feature (1)..(318): n is a, c, g, or t
ttgactcttcttcatatcagtattacaatttgtaatatgagagcaaattacgttattaacgaggttattaccactgccaggcttcccatagaaataaggaataagctccttgcccttgccagatttaaaaacatgacaaaatccgaggttatcattaaatctctggaaatgtactacgaccgcgaggaaggtgacatagactctttttccctgggagagaaggtttttggtaaatacggctccggagacggcgaccgctctgttacctacaaggaacggattaagaaaaaactttcagacaggatgaatgcttggtag

SEQ ID NO: 22724 - protein, 105 aa, Unknown
  Obtained from environmental sample
  misc_feature (1)..(105): Xaa is any amino acid
MTLLHISITICNMRANYVINEVITTARLPIEIRNKLLALARFKNMTKSEVIIKSLEMYYDREEGDIDSFSLGEKVFGKYGSGDGDRSVTYKERIKKKLSDRMNAW

SEQ ID NO: 22725 - DNA, 354 bp, Unknown
  Obtained from environmental sample
  misc_feature (1)..(354): n is a, c, g, or t
atgggtctttccatgatgcttcagtgggtattgtggaacggctctcttgcggctttaggcgcaatcatcgctcttggtcatccgcttgcgattattgtctcttttctgggcgcgccgattacttcgctgaatccgtttatcggcgttggtattttatccggtattgttcaagcggcgttaaaaaaaccgcgagtttccgacgttgagcaaatgacggaagacgcgacaagtattaaaggcgtttaccgcaaccggattacaagggcattattagtgtttttcttttcaagtttgggcagttctatcggcacttttatatcaatacccgcgattatagggaaattttcaggataa

SEQ ID NO: 22726 - protein, 117 aa, Unknown
  Obtained from environmental sample
  misc_feature (1)..(117): Xaa is any amino acid
MGLSMMLQWVLWNGSLAALGAIIALGHPLAIIVSFLGAPITSLNPFIGVGILSGIVQAALKKPRVSDVEQMTEDATSIKGVYRNRITRALLVFFFSSLGSSIGTFISIPAIIGKFSG

SEQ ID NO: 22727 - DNA, 726 bp, Unknown
  Obtained from environmental sample
  misc_feature (1)..(726): n is a, c, g, or t
atgattaactacaattcttccgccgcccttcgaactttcctcgaacaggaaggacttggaatgaggaaaaaattcggccagaactttttgataaatcccgccgtaaggcagacgcttgtagacgcgcttggcgcgcaagaatgcgatgaagtgtgggaaataggtccggggcttggagcgatgacagccatgctacttgaaaagaaaataaaagtaaaagcgtttgaaattgacggcggttttatcagaatcttaaaacgggaattcgccgaagaaaataatttttgccttgtagaaggcgacgtaatgaagacatggaaaaataattttattgaaaaccgcgagcctgcgccatttctttttggaaaccttccgtataacatagctgcggctttccttgccgatttaattgaaaacggctgtcttttccggcgcatggtagttaccgttcataaagaagtcgcccttcgaatgacagcgtcctcaggtttcgcgggattattcgtcgttttccgtgctttgcgcttcggcttacaatggttagcctttgaccgtaaaccctccttcgtctttttatccccaagcctaatggttgacagccatgggcggctttgcttggaaaaaccctcaaagcgcccttccggagattccccgtttcttttttcccctctttgtccgtcgctccttttttccttctcggaccaaaaagaacaattaaaaaactaa

SEQ ID NO: 22728 - protein, 241 aa, Unknown
  Obtained from environmental sample
  DOMAIN (18)...(226): Ribosomal RNA adenine dimethylase
  misc_feature (1)..(241): Xaa is any amino acid
MINYNSSAALRTFLEQEGLGMRKKFGQNFLINPAVRQTLVDALGAQECDEVWEIGPGLGAMTAMLLEKKIKVKAFEIDGGFIRILKREFAEENNFCLVEGDVMKTWKNNFIENREPAPFLFGNLPYNIAAAFLADLIENGCLFRRMVVTVHKEVALRMTASSGFAGLFVVFRALRFGLQWLAFDRKPSFVFLSPSLMVDSHGRLCLEKPSKRPSGDSPFLFSPLCPSLLFSFSDQKEQLKN

SEQ ID NO: 22729 - DNA, 822 bp, Unknown
  Obtained from environmental sample
  misc_feature (1)..(822): n is a, c, g, or t
ttgggtctaggaaatgtcaaatgtattagattgacacccctttacaatcaagggtttcttggaagacccacaggggtcagaccaagacctgaccatgataggaaacgggctttttcgttcttgatgactcagggcaaagagctttatcaaggggcgggcgctttctcgctagacgcggaaggcgttctggtaaatccctcaaacggcatgaaggtacaaggctggatgcaaaaggaagtagaaggctacaccgtgcttgatgtttccagtcccacagaacagcttgtaattccggtaggcggcaaagatcccgccaaagcgaccactatggttgattttgcctgtaaccttgacaaacgtattcccgagcttccggaaaatccttccggggagcaggtgttaagatcaacatggacaaccaccataaaaatttacgattctttcggcgacgtgcacgatatgcaggttcagtttacccgcgtgccgggcactgtaaacagctggaatgcgagggtaaacgtcgatccgcagaatgaaaaccccacaaacgccaccataggctttggggaagaagctccggcggcgggaggccccacaacctttgtcgttaatttctcaaataacggaaccctgctttcggcggaagacggggcgggcaacgtgtcaggcgcttcaggccgcgtacagatgaatgtcgcatacgacgttcaaaccgccacgcccaatgaggacggcactcccacaagacaggaatttgttcttaatctaggcgaagtaggaggatttaccaaatcaatcacccagtacgcggaatccagttaa

SEQ ID NO: 22730 - protein, 273 aa, Unknown
  Obtained from environmental sample
  DOMAIN (129)...(273): Flagellar basal body protein FlaE
  misc_feature (1)..(273): Xaa is any amino acid
MGLGNVKCIRLTPLYNQGFLGRPTGVRPRPDHDRKRAFSFLMTQGKELYQGAGAFSLDAEGVLVNPSNGMKVQGWMQKEVEGYTVLDVSSPTEQLVIPVGGKDPAKATTMVDFACNLDKRIPELPENPSGEQVLRSTWTTTIKIYDSFGDVHDMQVQFTRVPGTVNSWNARVNVDPQNENPTNATIGFGEEAPAAGGPTTFVVNFSNNGTLLSAEDGAGNVSGASGRVQMNVAYDVQTATPNEDGTPTRQEFVLNLGEVGGFTKSITQYAESS

SEQ ID NO: 22731 - DNA, 702 bp, Unknown
  Obtained from environmental sample
  misc_feature (1)..(702): n is a, c, g, or t
ttgttatacgcgggtacgcggctgtactgccccaataccggctgcgccaaacgcctcctgcaccgcttggaaaaatggatatccgttctggacatccgcgaactgggcgataaactgatacgccagctgttcgacaagaaaagggcgcagcgtatagcggaactttatacgcttacagcggaagagcttgcggattacgagaggatgggcgaactctccgcggccaaggttgtccgccatatacagacaaaaagggagctgtcgctcgcggcttttatcgcgggctttgatcttgaaggcgtcgcggagactacgatggataaagtcgccgcggcaggttttaacacgctggaaaagctgcggcaggcctcggtggaagatctggcgggcgtttacggccttggggaaatcaccgcaaggataatagtcgaagggcttgtggaaaccgcgtctgaaatggacgccgtactggcaaaaggcgttatcagcatcgcgccgccgccgggcgaggaagaccagcccatgcgggggctttcgttttgtttcaccggggagcttgcatccatgaagcggaaccaggcggaagaaaagataaaagcccttggcgcctcggctaaatcatcggtagtaaaaggcctttcatacctggtcaccaatgatccaagctccggctccgccaaaacaagaaggctagggagttag

SEQ ID NO: 22732 - protein, 233 aa, Unknown
  Obtained from environmental sample
  misc_feature (1)..(233): Xaa is any amino acid
MLYAGTRLYCPNTGCAKRLLHRLEKWISVLDIRELGDKLIRQLFDKKRAQRIAELYTLTAEELADYERMGELSAAKVVRHIQTKRELSLAAFIAGFDLEGVAETTMDKVAAAGFNTLEKLRQASVEDLAGVYGLGEITARIIVEGLVETASEMDAVLAKGVISIAPPPGEEDQPMRGLSFCFTGELASMKRNQAEEKIKALGASAKSSVVKGLSYLVTNDPSSGSAKTRRLGS

SEQ ID NO: 22733 - DNA, 648 bp, Unknown
  Obtained from environmental sample
  misc_feature (1)..(648): n is a, c, g, or t
atggcaaacgctggtcctggaacgaacggcagtcagttttttatcacgatagttcccactcctcacttggacgggaaacatacggtttttggttatgtcgttcaggggcagaatatagtaaatacgacaaagcagggcgaccgtattcaaaaaattaccataatacgcaacggagcggacgctagtgcgtttaaagcagatcaggaaaattttgacaaattgctcaggcaaatgaaatcagcggaagagagcagactgcaagggcaaagacaaagagatattgccaaaataaaagccgattatccgggcgcgcagcaaacaaaatcgggcatttattacattattcaaaaacagggaacaggcgaaaagccggctcgcggtaagacggtaaaggttcattatacgggcaaacttcttaacgggactgtttttgacgcttcttctttaagaggtcagcctttggaatttgccgtgggaacaggcagagttattccgggttgggacgaaactgtccttgatatgcaagttggcgaaaagcggattgtcgttattccgcctgagcttgcctacggagacagggcggttggaggagtaattcccgcaaacagctttttggtttttgaaatggaactggtaggcattccttga

SEQ ID NO: 22734 - protein, 215 aa, Unknown
  Obtained from environmental sample
  DOMAIN (1)...(60): Cyclophilin type peptidyl-prolyl cis-trans isomerase/CLD
  misc_feature (1)..(215): Xaa is any amino acid
MANAGPGTNGSQFFITIVPTPHLDGKHTVFGYVVQGQNIVNTTKQGDRIQKITIIRNGADASAFKADQENFDKLLRQMKSAEESRLQGQRQRDIAKIKADYPGAQQTKSGIYYIIQKQGTGEKPARGKTVKVHYTGKLLNGTVFDASSLRGQPLEFAVGTGRVIPGWDETVLDMQVGEKRIVVIPPELAYGDRAVGGVIPANSFLVFEMELVGIP

SEQ ID NO: 22735 - DNA, 375 bp, Unknown
  Obtained from environmental sample
  misc_feature (1)..(375): n is a, c, g, or t
atgcttctgctttcgggctggaaacggaagtatccgttatatgatcccttctgcggttccggcactatactcgccgaagcgcttatgtacgcctgggacatggccccgggaatcgcacggactggagttcatggattcgccattgacaggctgcttatagccaacaaagaaattgaggaaacagtccgggcggaattccgcgccagaataaattttgaacggctgattcgccccgccggaagcgatgagaaccctgaatgttccgcgcttgccttgtcaaatctgaataaggttcgcgcgttagctgaaaacagtaaacagcaaattccatcttgttacgacaacgccaatgaacaaggctcggcctccctttga

SEQ ID NO: 22736 - protein, 124 aa, Unknown
  Obtained from environmental sample
  misc_feature (1)..(124): Xaa is any amino acid
MLLLSGWKRKYPLYDPFCGSGTILAEALMYAWDMAPGIARTGVHGFAIDRLLIANKEIEETVRAEFRARINFERLIRPAGSDENPECSALALSNLNKVRALAENSKQQIPSCYDNANEQGSASL

SEQ ID NO: 22737 - DNA, 594 bp, Unknown
  Obtained from environmental sample
  misc_feature (1)..(594): n is a, c, g, or t
ttgcatnnnnnnnnnnnnnnnnnnnnnnnnnncacattatttgcctctttttgcataacaggggttggcggctttatagcaaaggcaatgggattaaaattgccagagacaattgtgcccatagccttggcactcataataggcgggcttataataattggcgttgaaactcgggctaaaaaaatgcaactgagcacaaatataacttgggcggtggttgtagctgttggtgtagggcaatttatagcggctatatttccgggttcgtctcgttcgggaatggctattatgggggctttgctcgttggtctcgctaggccagaagcggttaaattcgcctttttggttgggataccaacgatgttcaccgctggtgggtatcagcttttgaaagcgttgaaaacaagcgaggcaaacgacttgttcacgctggaggcatttgtggcttacgcagtcgcagccatattttcttggctctccgtggtatggcttttaaaattcataagaagcagaaactttatccccttcgcttggtatagaatagcgctgggaatagggctaattatttttatatctttcaaaaattatggataa

SEQ ID NO: 22738 - protein, 197 aa, Unknown
  Obtained from environmental sample
  SIGNAL (1)...(29)
  DOMAIN (10)...(187): Bacitracin resistance protein BacA
  misc_feature (1)..(197): Xaa is any amino acid
MHXXXXXXXXXTLFASFCITGVGGFIAKAMGLKLPETIVPIALALIIGGLIIIGVETRAKKMQLSTNITWAVVVAVGVGQFIAAIFPGSSRSGMAIMGALLVGLARPEAVKFAFLVGIPTMFTAGGYQLLKALKTSEANDLFTLEAFVAYAVAAIFSWLSVVWLLKFIRSRNFIPFAWYRIALGIGLIIFISFKNYG

SEQ ID NO: 22739 - DNA, 354 bp, Unknown
  Obtained from environmental sample
  misc_feature (1)..(354): n is a, c, g, or t
atggataacaaaagtttagcagattggtggaaacacgcggttgtatatcacatatatccaaacagttttaaggatagcaataacgatggcataggggatatacccggcataataaaaaaattggattacctctcggaactcggagtggatgctatatggctatctccagtttattcctcccctatggtggatatgggctatgatattgccgattacaaaaatatagacgagcattacggaactatggatgattttaaaaacttattaaatgaagctcataaaagaggtattccccttaataatggaatttggggcttaaacaccacctccaatttgcattccggggttttttga

SEQ ID NO: 22740 - protein, 117 aa, Unknown
  Obtained from environmental sample
  misc_feature (1)..(117): Xaa is any amino acid
MDNKSLADWWKHAVVYHIYPNSFKDSNNDGIGDIPGIIKKLDYLSELGVDAIWLSPVYSSPMVDMGYDIADYKNIDEHYGTMDDFKNLLNEAHKRGIPLNNGIWGLNTTSNLHSGVF

SEQ ID NO: 22741 - DNA, 849 bp, Unknown
  Obtained from environmental sample
  misc_feature (1)..(849): n is a, c, g, or t
atgcctcaaaaatttttcaacatagcaggtccctgtaattcaagcgaacattatatgcttgaccctttgcggagcattggcgaagaattaatggatttgatagattcaaagcaatattttgttatccacgcatcaaggcagagcggaaaaacaaccctcttatgggagcttacggataaaataaatgcagagggtaaatattatgctttatattgctcactagaatgcttgcaaggaattacagcgattgagagaggtattccatctattgtgcgaaaaatagaatccgaattggaaaatcaaaatttaccgagcggatttgccaaagatgcgaattttgaaaatatagatggcgtgcttcaccaatcttttgtctcttattgtcgttctttagacaaacctttggttatactttttgacgaagcagattgcctcagcaacggaaccttaatctcttttttaaggcaattgcggaacggttttgtatctagagctagaattccctttgtcagttccattgccttagtagggatgcgcaatatcagggactacaaagcaagaatcagaagtgatagcgaaacgcttggaagctcaagcccattcaacatagtgaccgaaagtttgagtttgaaaaattttacaaaagaagatgttattaaactctatgcccaacacactcaagaaacaaggcaagtttttgagccacaggcgatggattacatttatggacaaacccaagggcagccctggctggtaaatccggtagctcgtgaatgcgtagaaaaaatctgcaaaaaagattacacaatgtgnnnnnnnnnnnnnnnnnnnnnnnnnnatgcaagctga

SEQ ID NO: 22742 - protein, 282 aa, Unknown
  Obtained from environmental sample
  misc_feature (1)..(282): Xaa is any amino acid
MPQKFFNIAGPCNSSEHYMLDPLRSIGEELMDLIDSKQYFVIHASRQSGKTTLLWELTDKINAEGKYYALYCSLECLQGITAIERGIPSIVRKIESELENQNLPSGFAKDANFENIDGVLHQSFVSYCRSLDKPLVILFDEADCLSNGTLISFLRQLRNGFVSRARIPFVSSIALVGMRNIRDYKARIRSDSETLGSSSPFNIVTESLSLKNFTKEDVIKLYAQHTQETRQVFEPQAMDYIYGQTQGQPWLVNPVARECVEKICKKDYTMXXXXXXXXXXAS

SEQ ID NO: 22743 - DNA, 615 bp, Unknown
  Obtained from environmental sample
  misc_feature (1)..(615): n is a, c, g, or t
ttgcaggggcggtaccccaaccccaacccgcacctgaacgcggcatccccttggcagttgctggtagcgacattcttgtccgcgcagtgtaccgacgccagggtcaacgccgtgacgcccgccctttttgcccgttggccgggtccggaacagaccgcgcgggccggatgcggcgaactggaagaagccgtccgcagcacgggttttttccgcatgaaggcgcgcaacatcctgcaaacggcgcggcggattgtggatgtctacggcggcgaggtgcccgccagtctcgccgaactcgtcaccttgcccggtgtcgcccggaaaacagccaatgtaacgctgtggggggctttcggcatcaacgaagggcttgccgtggacacgcatgttgcccgcatttcctatcgtctgggcttgactgatgcgcgggatgcggacaaaatcgaacaggaattgctcggactttttccgcgtgaggaatggggagatataaaccaccgcatggtgtcctttggtcgtgacgtctgccgggcgcgcgcgccgcgttgcggacagtgcgaattgtttgtgaattgcccgcgccggggcgttgataagttgggtgaaataggataa

SEQ ID NO: 22744 - protein, 204 aa, Unknown
  Obtained from environmental sample
  DOMAIN (22)...(158): HhH-GPD superfamily base excision DNA repair protein
  misc_feature (1)..(204): Xaa is any amino acid
MQGRYPNPNPHLNAASPWQLLVATFLSAQCTDARVNAVTPALFARWPGPEQTARAGCGELEEAVRSTGFFRMKARNILQTARRIVDVYGGEVPASLAELVTLPGVARKTANVTLWGAFGINEGLAVDTHVARISYRLGLTDARDADKIEQELLGLFPREEWGDINHRMVSFGRDVCRARAPRCGQCELFVNCPRRGVDKLGEIG

SEQ ID NO: 22745 - DNA, 849 bp, Unknown
  Obtained from environmental sample
  misc_feature (1)..(849): n is a, c, g, or t
atggagatttccagcggccggccgcctacaagtgggaaagctcctcgtttcggcgcgtctacgagccgatcacaggctgggaattcaggctcgatctgctcaagtgaaactgctgcgcaacacagccggcggcgagaatttttcgctttgaaatcgaagccgcaatccggcgccatcgcgcaacatccggacacatgcccgctatggaagtgtatggatatgaaaaaaacgatttttgtggtggatgacgccgagataaacttggagattgcgaaagaggcgttgaaagagcactacgaggtgaggacgttgttgtccgttgcggcgatgtttgagcttttgaaggacgtcaggccggagatgatcctgcttgatatcgaaatgcccgagacggacggttttgaagcgttgcggcagttgaaagcgcacgcgtcgtacgccgacatcccgatcatatttctgacaagctggaccgaccctcgtgtggaatcgcgaggctttgaaatgggcgtggtggattttattgcaaaaccgttttccgtgcccgtgctgaaaaaccgcatcacaacccatttgaacattgacgacctgatccgcgtgcggacggagcagctcgaacggctgcaaagcggtcttgtgttcatcctggcggatattgtcgaaagtcccgacaaggcgacgggcggacacattgaacgcacgtcggcgtatgtcgccttactgatagaccccatgatggaacgcggggtatatgccgacgagatacgcagcttgaacctggaaacgatcgtttcatcggcgcgcctggacgatgtgggtaaaaatggtgataccggacgtctgtgttga

SEQ ID NO: 22746 - protein, 282 aa, Unknown
  Obtained from environmental sample
  DOMAIN (76)...(189): Response regulator receiver domain
  misc_feature (1)..(282): Xaa is any amino acid
MEISSGRPPTSGKAPRFGASTSRSQAGNSGSICSSETAAQHSRRREFFALKSKPQSGAIAQHPDTCPLWKCMDMKKTIFVVDDAEINLEIAKEALKEHYEVRTLLSVAAMFELLKDVRPEMILLDIEMPETDGFEALRQLKAHASYADIPIIFLTSWTDPRVESRGFEMGVVDFIAKPFSVPVLKNRITTHLNIDDLIRVRTEQLERLQSGLVFILADIVESPDKATGGHIERTSAYVALLIDPMMERGVYADEIRSLNLETIVSSARLDDVGKNGDTGRLC

SEQ ID NO: 22747 - DNA, 684 bp, Unknown
  Obtained from environmental sample
  misc_feature (1)..(684): n is a, c, g, or t
ttgcaggcggtgcagggcgaatacattacaaccattgacgctgacggacaagaccccttgcatcttattccccaaatgctggaagccgttgtttcaggggaatacgattgcgccgcaaccaggcgggtaaaccgtaccggagaaccgcctgtacggtcctttttttcgcattgtttttacgcgcttatgaaaagaataagcgacatagaaatcgtttccggcgcgagggattttcgcctgatgaacagaaaatatttagaggcgattctggagttaccggaacggaacaggttttcaaaggggatattcccctgggtcggttttagaacaaagtggtttgaatatgaaaacattgaacgggctgcgggtaaaacaaaatggtctttctggaaactgtttttgtattcccttgacggaataattgccttttcgtcaaaaccgcttgcaatagcttccgtatttgggattctgttattcattatcgctctttcgtttatcgtttttatagtcattcgcagaatcgtatggggcgatcctgtgggcggatgggcgtcaacgatctgtatcattcttttctgttcaggaatccaacttttcacaacaggtatcttgggagagtacatggcaaaaatatataccgaggttaaacaacgcccacagtatgttgttcgggaggcaatgtga

SEQ ID NO: 22748 - protein, 227 aa, Unknown
  Obtained from environmental sample
  misc_feature (1)..(227): Xaa is any amino acid
MQAVQGEYITTIDADGQDPLHLIPQMLEAVVSGEYDCAATRRVNRTGEPPVRSFFSHCFYALMKRISDIEIVSGARDFRLMNRKYLEAILELPERNRFSKGIFPWVGFRTKWFEYENIERAAGKTKWSFWKLFLYSLDGIIAFSSKPLAIASVFGILLFIIALSFIVFIVIRRIVWGDPVGGWASTICIILFCSGIQLFTTGILGEYMAKIYTEVKQRPQYVVREAM

SEQ ID NO: 22749 - DNA, 678 bp, Unknown
  Obtained from environmental sample
  misc_feature (1)..(678): n is a, c, g, or t
atggtaaaaatattcacgcgttttatttttatctgtattgtagccatattccttgtgttcggagtcatggcttctctttttgaatcgttccgtgatccgtttatcatcatatttacaattcccctctctttaataggcatagtcgctatttatcttatcaccggaaccatatttaacgtattgactgctgtaggccttcttgtattgataggcgttattgtaaataacggtattgtacttgttgactatacaaacctcctgcgtaaacgaggttattctcttaatgacgcgtgtatagaagccgccggaaacagactgcgccccatattgatgaccactttaactacaattctcggattactgccgatggctttcttccccggcgaaggttctgaacttgtagctccaatcggtaaaaccgttctcggcggcctttcattcggtactttaatgacgctgtttcttatgcctacagtttacgcgataatgaacaaacgttatgacgcgcgtaaggcaaaggcgcaggcgtgtcgagaaagaatagcggcaggcgagaaacgttcgaaattaaaagaaactgttatcgccagcattgttaatacagcagatacgggagaaaaatctatgattcgcatagaaataattgctaaccagtcatgtcgaggaaaatatccatga

SEQ ID NO: 22750 - protein, 225 aa, Unknown
  Obtained from environmental sample
  SIGNAL (1)...(24)
  misc_feature (1)..(225): Xaa is any amino acid
MVKIFTRFIFICIVAIFLVFGVMASLFESFRDPFIIIFTIPLSLIGIVAIYLITGTIFNVLTAVGLLVLIGVIVNNGIVLVDYTNLLRKRGYSLNDACIEAAGNRLRPILMTTLTTILGLLPMAFFPGEGSELVAPIGKTVLGGLSFGTLMTLFLMPTVYAIMNKRYDARKAKAQACRERIAAGEKRSKLKETVIASIVNTADTGEKSMIRIEIIANQSCRGKYP

SEQ ID NO: 22751 - DNA, 705 bp, Unknown
  Obtained from environmental sample
  misc_feature (1)..(705): n is a, c, g, or t
atggcggcgaaaattgcttcatccggtaaggacatccgggccgccgcaatcatcggtaacgggatgctgagccttctcagctctgatacaagcgtgaggagccttggcgatctcaggagaaaaaccgttgaagtcgcgggccagggcgcaacgcctgattatgtttttcgcaggatacttgaatttaacggattatcgcctgaacgcgatgtcgctcttggctattccatggctccatcagaaatcgcccagtcgcttatcgcgggcagggtttccgtagctctgcttcccgaaccgtttgccaccatggccttaaccggaaagccggatcttgtttccgtagttgacattcagcgggagtggaccagagccggcggcaaagaaaatttccccatgaccctgctggttgttgatggagcttttgcttcagaaaatcctggggcggtaaaagaaatacttaacgcggttaaagtttccagtgagtgggttaggactaatcctgccgatgccgggaaactggtggaaaagcatgagctgggtttaagcgctcccgtagttgccgccgctgttccaaaaagcaactacgtgtttatcccgccgtccgaagggcgtacggcactggaagcgttgtttaatttgtttctggaatacgctccggcttcaataggcggagcgcttccgggtgagggattttattttaagtga

SEQ ID NO: 22752 - protein, 234 aa, Unknown
  Obtained from environmental sample
  misc_feature (1)..(234): Xaa is any amino acid
MAAKIASSGKDIRAAAIIGNGMLSLLSSDTSVRSLGDLRRKTVEVAGQGATPDYVFRRILEFNGLSPERDVALGYSMAPSEIAQSLIAGRVSVALLPEPFATMALTGKPDLVSVVDIQREWTRAGGKENFPMTLLVVDGAFASENPGAVKEILNAVKVSSEWVRTNPADAGKLVEKHELGLSAPVVAAAVPKSNYVFIPPSEGRTALEALFNLFLEYAPASIGGALPGEGFYFK

SEQ ID NO: 22753 - DNA, 684 bp, Unknown
  Obtained from environmental sample
  misc_feature (1)..(684): n is a, c, g, or t
atgggcacttgggcggacaggatagacatatgcgaggacaaagaacggtttaacgcaacaattgagcgccttcaaataaaccgcccaaagagattcaaagttatgaccgagacggaagcacttgagactgccgaaaagcttggctatccggtgctaatgcgcccgtcatatgtactcggcgggcagatcatgatcatcgcattctctcaggatgacatacgcgaatatatggagatcattttacgggtaaaacaagaaaacccggttcttattgacaagtatcttgaagggctggaaatagaagttaatgcgatccgtgacgacgacctttcactgggcgagaatggagcagtgcttattccaggcataatggaacatgttgagcgtaccggcgttcattccggggacagcattaccgtatatcccgcccttaacattgacgacacactggccgaaaaaatttttgacgttacagaaaaactctgtatggcttcgaatgttaagggccttgttaatattcaatacgttctttacgaaaacgatatttacgttatagaagtcaatcccacgacgtcccgcacggtgccctatatcagcaaagttaccggtattcccatgtgcgagcttgccacaaaggtaagcatcggagaaaaactttcttctttaaatacaaatccggcatag

SEQ ID NO: 22754 - protein, 227 aa, Unknown
  Obtained from environmental sample
  DOMAIN (13)...(215): D-ala D-ala ligase C-terminus
  misc_feature (1)..(227): Xaa is any amino acid
MGTWADRIDICEDKERFNATIERLQINRPKRFKVMTETEALETAEKLGYPVLMRPSYVLGGQIMIIAFSQDDIREYMEIILRVKQENPVLIDKYLEGLEIEVNAIRDDDLSLGENGAVLIPGIMEHVERTGVHSGDSITVYPALNIDDTLAEKIFDVTEKLCMASNVKGLVNIQYVLYENDIYVIEVNPTTSRTVPYISKVTGIPMCELATKVSIGEKLSSLNTNPA

SEQ ID NO: 22755 - DNA, 336 bp, Unknown
  Obtained from environmental sample
  misc_feature (1)..(336): n is a, c, g, or t
atggaagcggggatgctttcgtcggatttgttaagggggcataaagacaccatagtcttgcgtatccttatgaacggcgatgcctatggctttgagatttacaaccgcatcctggggaaaaccggcgagcagtacgaactaaaggagaccactctgtactcaagctataagcggcttgaggcggagggttgcataacatcgtactggggcgacgagacccagggggcgcggcggaaatactaccggataaccgacaagggccggcttgtatttgaacaaaacatgcgtgattggatattcacgcagaaaatcatcaacgatctattggaggaatga

SEQ ID NO: 22756 - protein, 111 aa, Unknown
  Obtained from environmental sample
  DOMAIN (9)...(94): Transcriptional regulator PadR-like family
  misc_feature (1)..(111): Xaa is any amino acid
MEAGMLSSDLLRGHKDTIVLRILMNGDAYGFEIYNRILGKTGEQYELKETTLYSSYKRLEAEGCITSYWGDETQGARRKYYRITDKGRLVFEQNMRDWIFTQKIINDLLEE

SEQ ID NO: 22757 - DNA, 642 bp, Unknown
  Obtained from environmental sample
  misc_feature (1)..(642): n is a, c, g, or t
ttgacaatgacggtaaaagacgacttttttacggctaaaggctctgttctaataacaggcggtactatccgcatcacggaatgctatgagggcatagaggggcttaatgttaccatcaatggcggagacatagatatcttttcaaaggatgacggcatcaatgcccgggagtacgtaaccactactactaatgtgaggggcaggtttccgggacgtcagccaatgagccgcacgataaacgaaaatatctatgtgcgcataacaggcggcaatttacaaatctacgcgatgacggacggcattgacgccaacaacaatgtcttccttgaaggcggaacggttcgtatcagcgggccgtcaagaggagtggaaggggccattgacgttgacggctctgtttttattaacggcggcaaacttattacagcgggaagcgtggcaagcgtatccacccaatccaggcagcctgccatacttgttacatacacccaacagtttccaacaggagccttcatcgaaataagagatacaagcggcaataccctcttggattatacctctaaaaactccttccttatgtcgggttttacatcacctgactttgctattggcaaaacgtattcactgtatgtcaaccggtag

SEQ ID NO: 22758 - protein, 213 aa, Unknown
  Obtained from environmental sample
  misc_feature (1)..(213): Xaa is any amino acid
MTMTVKDDFFTAKGSVLITGGTIRITECYEGIEGLNVTINGGDIDIFSKDDGINAREYVTTTTNVRGRFPGRQPMSRTINENIYVRITGGNLQIYAMTDGIDANNNVFLEGGTVRISGPSRGVEGAIDVDGSVFINGGKLITAGSVASVSTQSRQPAILVTYTQQFPTGAFIEIRDTSGNTLLDYTSKNSFLMSGFTSPDFAIGKTYSLYVNR

SEQ ID NO: 22759 - DNA, 351 bp, Unknown
  Obtained from environmental sample
  misc_feature (1)..(351): n is a, c, g, or t
ttggtaatgctcaaaggtgaaatctggtgggctgtactgccaaaagtacgcgggtcggaacctgcgaaaacacgtccggtgttgattgtccaaagcgatacaatgaaccgcagttcggttagtacggtcatgtgcgcatctatcacgtcaaaccttgaactggaacacgctccggggaatatccgccttgaaaaaggggtatcaaaactggaaaagacttctgttataaacttttcgcaaattgttactatcgacaaaacatttatacaggagtatgtttgcgctttgccaaaatcatttctggaacgtattgaccaaagcttaaaaacggttttcgacatacaattttaa

SEQ ID NO: 22760 - protein, 116 aa, Unknown
  Obtained from environmental sample
  DOMAIN (4)...(113): PemK-like protein
  misc_feature (1)..(116): Xaa is any amino acid
MVMLKGEIWWAVLPKVRGSEPAKTRPVLIVQSDTMNRSSVSTVMCASITSNLELEHAPGNIRLEKGVSKLEKTSVINFSQIVTIDKTFIQEYVCALPKSFLERIDQSLKTVFDIQF

SEQ ID NO: 22761 - DNA, 711 bp, Unknown
  Obtained from environmental sample
  misc_feature (1)..(711): n is a, c, g, or t
atgagggcgaagctgtaccccatttttctgcccggtacggagggcaagtacatagccgggacagctaacgaagcctcggtcaacatcgaggaaatctgcgccgacgccgtaaaacgcggaggctatgacggcagccacgatcaaatggtaaaagccgtccgccacttcatgaaggaaacccgctaccagctcgccgacggcttttccgtcaacctcgacatctgctccatccatccaaacatcggcggcctgttcgccggcgagaacgaagcccacgaccaccagaaacaccccctcgacttccgcttccatgccctcaaatccctgctcgacctgcggcacgagatagaagtgctgatcgagggcgtagccgacacccacggctacatcatggaattcaccgacgtaaccagcgggacagtcaacgacgcctactcccagacgggaatgttcgccattaccggctacaaactcaaagtggaaggcgaccaccccgacgtaggcgtgtatttagagcagatcggcggccccgccaagctgagagcgggccacctggcggaaaacggccagtccaaagtcatcggcgtgttcccccccgaccctcccgcagactacaaagtcgtcataaaaacccagtattcgggcgcaacaaacaagttcctgaaagaagtccgcaccatagagagcggctttaccgtacatattatataa

SEQ ID NO: 22762 - protein, 236 aa, Unknown
  Obtained from environmental sample
  misc_feature (1)..(236): Xaa is any amino acid
MRAKLYPIFLPGTEGKYIAGTANEASVNIEEICADAVKRGGYDGSHDQMVKAVRHFMKETRYQLADGFSVNLDICSIHPNIGGLFAGENEAHDHQKHPLDFRFHALKSLLDLRHEIEVLIEGVADTHGYIMEFTDVTSGTVNDAYSQTGMFAITGYKLKVEGDHPDVGVYLEQIGGPAKLRAGHLAENGQSKVIGVFPPDPPADYKVVIKTQYSGATNKFLKEVRTIESGFTVHII

SEQ ID NO: 22763 - DNA, 465 bp, Unknown
  Obtained from environmental sample
  misc_feature (1)..(465): n is a, c, g, or t
ttgccgcttatatcaataaagccgaaattcagcgcgcaaagtttttacagccatattacaggtttcggaaaaacggacgcggaatacccatcattagcgtggacttttgaaaacaagtatttaataaacaaagggattttaagacatttttctttaaccattgaggactccgaaacaataagcgatcttgaaaacgcggttaaggcccacgctggccgtatgtttgcggattgcgtaaattttgaattggtatgtgaaaaccacgttaatgaaaaaaacgaggtttttcaaaagggcatgagcgtatgcgtatcagcgccatcggcaatgataacaaaggaaaccacatttattgcgcgtaacattgaactggcaaggactattgagggcaaaacatctacgctcacgcttgttttgccggggtcttatactggagaaatcccggaggcgctaccgtgggaatag

SEQ ID NO: 22764 - protein, 154 aa, Unknown
  Obtained from environmental sample
  misc_feature (1)..(154): Xaa is any amino acid
MPLISIKPKFSAQSFYSHITGFGKTDAEYPSLAWTFENKYLINKGILRHFSLTIEDSETISDLENAVKAHAGRMFADCVNFELVCENHVNEKNEVFQKGMSVCVSAPSAMITKETTFIARNIELARTIEGKTSTLTLVLPGSYTGEIPEALPWE

SEQ ID NO: 22765 - DNA, 591 bp, Unknown
  Obtained from environmental sample
  misc_feature (1)..(591): n is a, c, g, or t
atgtggagcgacccgatttttttgggaaaataccctgatgaattgtttcaaaaatatggtcaatatatgccaaagataggcccggacgatatgaagaccatcgcgcagcctcaggactttgtagggcagaatatctataacggcgaccagatcagggcggacgggaaaggcggatatgaatctgcgcccagggaaaccggttacgcttttaccgcggccaaatggcctgtgacacccaagtcgctttactgggggccgcgtttcttcgcggaacgctacaagacgcctatattcatcaccgaaaatggcctttcctgtaccgacgttgtctcgcttgacggcaaagtccacgatcccaatcgcattgattttcttaaccgctatctgcgttgcctgaaaaaagctgcggacgacggcgtggatatccggggctactttcagtggtgctttactgacaactttgagtgggctaaaggctatacagaacgcttcggaattgtacactgtaattttgaaacccatcagcggataataaaggattcgggttactggtacagggacacgataaagtctaacggcgcacagctgtaa

SEQ ID NO: 22766 - protein, 196 aa, Unknown
  Obtained from environmental sample
  DOMAIN (1)...(194): Glycosyl hydrolase family 1
  misc_feature (1)..(196): Xaa is any amino acid
MWSDPIFLGKYPDELFQKYGQYMPKIGPDDMKTIAQPQDFVGQNIYNGDQIRADGKGGYESAPRETGYAFTAAKWPVTPKSLYWGPRFFAERYKTPIFITENGLSCTDVVSLDGKVHDPNRIDFLNRYLRCLKKAADDGVDIRGYFQWCFTDNFEWAKGYTERFGIVHCNFETHQRIIKDSGYWYRDTIKSNGAQL

SEQ ID NO: 22767 - DNA, 372 bp, Unknown
  Obtained from environmental sample
  misc_feature (1)..(372): n is a, c, g, or t
atgatcagggcggaagcattacattttaggctggagggaaaaatgagtgatagatctaacggcatgtccgatggtatgaactatgccccgaaggggaaaccaaatcctgtcgttaaaaagggagagtttgttttttcggccatcgctcttgatcacgggcatatttacggagagtgcaacggtttgattgaagcgggagggacgctgaaaagcgtttacgatcccgatccaaaaaggttgacagattctgctgagccgtttcccgtgcgtaatgcgccgctgtcagcggaggaccaaaattcttggcgaccggggaagtttttgctttgtatcggggccctgcctttaccttctgaatctctttcgcgttag

SEQ ID NO: 22768 - protein, 123 aa, Unknown
  Obtained from environmental sample
  misc_feature (1)..(123): Xaa is any amino acid
MIRAEALHFRLEGKMSDRSNGMSDGMNYAPKGKPNPVVKKGEFVFSAIALDHGHIYGECNGLIEAGGTLKSVYDPDPKRLTDSAEPFPVRNAPLSAEDQNSWRPGKFLLCIGALPLPSESLSR

SEQ ID NO: 22769 - DNA, 525 bp, Unknown
  Obtained from environmental sample
  misc_feature (1)..(525): n is a, c, g, or t
gtgccgcctgttttaagctgttacaacgaatccattgtggtcagttcctattcaaaaagcctgtctcttcccggcgagcgtatcggttttatcgcggttagcccaaatgcaagcggtaaggacgatcttttaaacggtttaatttacgctacaagggtactgggtttcgtaaacgcccccgccctaatgcaaagattagtcggcgctttaacggaggcgcggatagacgtttccatttacgaaagaagacgggacgcttttgtaaaagttttgaataacgccggtatcgaatactcaatgccagagggggcgttttatcttttctgcaaggttccaaagagcaaaacaggcaggcaggaaactgatgacaaagcgtttgtcgaacaccttaaaaaacatctgattctaggggtaggcggaagcggttttggcaaaagcggctggctgcgttttgcctactgtgttgacgagaagataattaacgcttcacaaaacgcttttaaatcggctatggaaagttggtaa

SEQ ID NO: 22770 - protein, 174 aa, Unknown
  Obtained from environmental sample
  misc_feature (1)..(174): Xaa is any amino acid
MPPVLSCYNESIVVSSYSKSLSLPGERIGFIAVSPNASGKDDLLNGLIYATRVLGFVNAPALMQRLVGALTEARIDVSIYERRRDAFVKVLNNAGIEYSMPEGAFYLFCKVPKSKTGRQETDDKAFVEHLKKHLILGVGGSGFGKSGWLRFAYCVDEKIINASQNAFKSAMESW

SEQ ID NO: 22771 - DNA, 498 bp, Unknown
  Obtained from environmental sample
  misc_feature (1)..(498): n is a, c, g, or t
atgaagagatccctgcatagatttttatatattctttttgcaatcgcctggacggggttttttgcttccccgcttttcgcgcaggtaaaccagtcggaattggaaaaccttgggcctgtagaatttatcaactacgaggggccttattcaaggattgaaacccgcgcccagatccgtaatatcggttattccctagggcaggttatcaaagacggtaccgcgcgtacaggcgcttcgggccggtattttgtcattcactctgtaagcgagcaggacgggtttaagcttgacgcggatattttcggccttggccccgatgtcggggtcgatcacatccgcaatttaaggctgattattcaggggtacctggaagcggcctatgagtacaccgaaagagacgccgcccttatagctgaatacgtcactatttataacgccgtataccgtggagatattggctattttggttcccgctataaaaacccaggttatggataa

SEQ ID NO: 22772 - protein, 165 aa, Unknown
  Obtained from environmental sample
  SIGNAL (1)...(27)
  misc_feature (1)..(165): Xaa is any amino acid
MKRSLHRFLYILFAIAWTGFFASPLFAQVNQSELENLGPVEFINYEGPYSRIETRAQIRNIGYSLGQVIKDGTARTGASGRYFVIHSVSEQDGFKLDADIFGLGPDVGVDHIRNLRLIIQGYLEAAYEYTERDAALIAEYVTIYNAVYRGDIGYFGSRYKNPGYG

SEQ ID NO: 22773 - DNA, 858 bp, Unknown
  Obtained from environmental sample
  misc_feature (1)..(858): n is a, c, g, or t
ttgaaaatgcgttccatgggcgatagaaggacaaacggttattttaaggcgggcgccgctctggccttgcttatcctcggaatcacgctggcagggattttttttcttccccgcgactacaacgcaatggatccaggttcaagatttttaccgcccggaaaaaactttcttttaggcacggacaacttcggaagaaacatcttctaccgtgttatggcgggggcaaaatatacgatgcttacagcccttgttaccgtagccggaagcgcggtaatcggttcggccctcggaatgttttccggtttcgccggcgggctcttggacgaagctatcatccggcttttggacgtccttgcctcttttcctgggatactcctggcgctcttaatggtctcgcttttggaaaacagcccgggaacccttgtcgcggccctgctcatactttttacccccggctttacccgaatcatgcggaacggtatgctccgttacaagaatcgcgatttcattctctctgcccgcgttgccggaatcccttaccataggattatctttgcccacatttttcccaacattctgccttcccttctctcaacgtcggtgcttgggctttcaaacgcgattctcgccgaatccacgatgagttatctgggcctaggcatccagccccctgtaccaagctggggtcggatgcttgccgaatcccagaccttcctttttaacgccccttggtgcgcccttgttcccggcctaatgatcatactcactgtgcttgcctttcactacctgggagaaggaatgaaggaacgggccttatgtgnnnnnnnnnnnnnnnnnnnnnnnnnnatgcaagcttga

SEQ ID NO: 22774 - protein, 285 aa, Unknown
  Obtained from environmental sample
  DOMAIN (75)...(277): Binding-protein-dependent transport system inner membrane component
  misc_feature (1)..(285): Xaa is any amino acid
MKMRSMGDRRTNGYFKAGAALALLILGITLAGIFFLPRDYNAMDPGSRFLPPGKNFLLGTDNFGRNIFYRVMAGAKYTMLTALVTVAGSAVIGSALGMFSGFAGGLLDEAIIRLLDVLASFPGILLALLMVSLLENSPGTLVAALLILFTPGFTRIMRNGMLRYKNRDFILSARVAGIPYHRIIFAHIFPNILPSLLSTSVLGLSNAILAESTMSYLGLGIQPPVPSWGRMLAESQTFLFNAPWCALVPGLMIILTVLAFHYLGEGMKERALCXXXXXXXXXMQA

SEQ ID NO: 22775 - DNA, 936 bp, Unknown
  Obtained from environmental sample
  misc_feature (1)..(936): n is a, c, g, or t
ttgatcatactcgcggtgtccttttacgcaaatatgcttgtctctttttccatgcatacaatggaatacaacagggagcgccgtttaattgccgaaagcaaaagacttgccagcatggtcaactccgaagaattggacaagtaccgcgccgtacacgatatggaactgccggaataccatgccctgcgcctgcgtatgtttgaattttccaaagaagccgaagttctctatgtctattatatccgctcaacggattcgggattgcagtatatcgtggacaatgattttaacgaggaaacgcgggtaggtttggataccccgccatttgatccgctcaccgtgccgtggataatgtccgcgcagaaagggcaggcaggctgttccggccttggcaattacaatatcggctgggaaggcttgctctccgcttatgcgccggtttttgataaagatggaaatgtaaccgccgtcgcaggggtggacattaaggacggacctatagtacgggcgtggcatctggtgtctattcttagcgtattacagatcatcgtcgtagccgtcatttttgcaagcggcattgtctattttatttatttataccgccaactggaaatagcgcgggaagccagctttgccaaaagtgattttcttgcgaagatgagccacgaaatccgcaccccaatgaacgccattaccggcatggcggaacttgccttgcgcgaagaaatgccgcaggcggctcaggggcatatccttacgatcaggcaggcgggtgaaaatcttttgtccatcatcaacgacattttagatttctcaaagatcgaagccggcaaactggaaataaacccgattaaatatatgttttcatccctgatcgatgatacggtcaacattatccgtacgcgggttatggaaaaaacgcctgcggttttttag

SEQ ID NO: 22776 - protein, 311 aa, Unknown
  Obtained from environmental sample
  DOMAIN (212)...(277): His Kinase A (phosphoacceptor) domain
  misc_feature (1)..(311): Xaa is any amino acid
MIILAVSFYANMLVSFSMHTMEYNRERRLIAESKRLASMVNSEELDKYRAVHDMELPEYHALRLRMFEFSKEAEVLYVYYIRSTDSGLQYIVDNDFNEETRVGLDTPPFDPLTVPWIMSAQKGQAGCSGLGNYNIGWEGLLSAYAPVFDKDGNVTAVAGVDIKDGPIVRAWHLVSILSVLQIIVVAVIFASGIVYFIYLYRQLEIAREASFAKSDFLAKMSHEIRTPMNAITGMAELALREEMPQAAQGHILTIRQAGENLLSIINDILDFSKIEAGKLEINPIKYMFSSLIDDTVNIIRTRVMEKTPAVF

SEQ ID NO: 22777 - DNA, 387 bp, Unknown
  Obtained from environmental sample
  misc_feature (1)..(387): n is a, c, g, or t
ttgccgggagatcaggttctggaaaaaacgggcgcaggttatcaaacagaacgtcccgttcgaggaatattccctcgcggtttggagggcgaggaatttaccgtccttctgccctccactgagatctcagccgcgtggaaaattgccgaacgcctcagaaccagcgtagcggcgatgagggtcccttgggaaacccccctgccgcaggttacaatcagcctgggagtgttcgcttttgacaaggacagcgaaatggatactgttgacatccttcgccgcgccgacgaggcgttatacgtttccaaagcaaagggcagaaattgcagcaccatctgggatcccagcgttatcgacaccttacacagggaaaatacctctagcccataa

SEQ ID NO: 22778 - protein, 128 aa, Unknown
  Obtained from environmental sample
  DOMAIN (7)...(108): GGDEF domain
  misc_feature (1)..(128): Xaa is any amino acid
MPGDQVLEKTGAGYQTERPVRGIFPRGLEGEEFTVLLPSTEISAAWKIAERLRTSVAAMRVPWETPLPQVTISLGVFAFDKDSEMDTVDILRRADEALYVSKAKGRNCSTIWDPSVIDTLHRENTSSP

SEQ ID NO: 22779 - DNA, 402 bp, Unknown
  Obtained from environmental sample
  misc_feature (1)..(402): n is a, c, g, or t
ttggcattttttgtaagcacggctcatgtccatcttaccaatatgcaggttaaagcctttaacagtaccattataaaagggggaacaggggcaaatctccaaaaagcggaaaaaaagatgaaggattttaatgatataaaaatgtccgggctcaggttatttcattgcttacaacagcgattggatttcgttacaaaagacgagatggcggctattgtaaaaatagcgcttggagaagggacggaggcggaaatcatggaaaagctttataactggtttttacgggaacgcggcgacatacttattactgccttcattaccggtaaactcgacaataaactgataacgctgattaacatattaaaaaataatttcagaatgaaaaatcaaaagaattcgtaa

SEQ ID NO: 22780 - protein, 133 aa, Unknown
  Obtained from environmental sample
  misc_feature (1)..(133): Xaa is any amino acid
MAFFVSTAHVHLTNMQVKAFNSTIIKGGTGANLQKAEKKMKDFNDIKMSGLRLFHCLQQRLDFVTKDEMAAIVKIALGEGTEAEIMEKLYNWFLRERGDILITAFITGKLDNKLITLINILKNNFRMKNQKNS

SEQ ID NO: 22781 - DNA, 750 bp, Unknown
  Obtained from environmental sample
  misc_feature (1)..(750): n is a, c, g, or t
ttgaatttagcaacttcatacgctattatactctgtatattatggagtatttggtttgttgactcttgcagacgaagaggaaatattttgattttagcatcaggaaccagtttggttttattagcaattatattcagcggaacaagaacaggcttaataggaataggaataggcattctatttggaatatattcgtactcattcacggattcaagcatttcgcacactaccactattaataaaagcatgagtttttttataattatcatttttgtaactattgctttttcaataatttggaatacttttatgaaggatttgcttattgcaagaactatggaatccattttgaatggcaaaatagactctagcaatatggggcgcattatagcatggctttgcgcttatgatactttttccaataacaaaatatggggtgcaggtccagatagcttttccgatatttattcaaaatttctaaaaacttttccagatatagaaatctctcgtaaacctcttgttcatgcacataatgaaattttgcaaactttgtcgcaatctggtttgataggatttatacatttaagcgctgtggtttctttttgcatattctctattatcaattatatgcgaaaaaataaagaggaaacgatatgttatggaattatcgcaggtttctccattttcttcatttcaagttttgtagatggtatgccatcctttgggcttattccatggtctaggtcataa

SEQ ID NO: 22782 - protein, 249 aa, Unknown
  Obtained from environmental sample
  DOMAIN (122)...(193): O-Antigen Polymerase
  misc_feature (1)..(249): Xaa is any amino acid
MNLATSYAIILCILWSIWFVDSCRRRGNILILASGTSLVLLAIIFSGTRTGLIGIGIGILFGIYSYSFTDSSISHTTTINKSMSFFIIIIFVTIAFSIIWNTFMKDLLIARTMESILNGKIDSSNMGRIIAWLCAYDTFSNNKIWGAGPDSFSDIYSKFLKTFPDIEISRKPLVHAHNEILQTLSQSGLIGFIHLSAVVSFCIFSIINYMRKNKEETICYGIIAGFSIFFISSFVDGMPSFGLIPWSRS

SEQ ID NO: 22783 - DNA, 894 bp, Unknown
  Obtained from environmental sample
  misc_feature (1)..(894): n is a, c, g, or t
gtgctggcgcaggtggacaatgcggaagatttcctgcgtcacgccgccgtcaaggccgaaagggaagattttttacggcgcaggcgggatttggaggatgcgctgcggctggcggcgggcgatacgccttttgacgaattcacggcttccttcgcggcgtctgacaagctggagcgcgagcagcggctggcggcgctggacgcggaactggagcgccaggccggggaggaacgctcgctcgtggacgcgctcggcgccctgagcgcccggcgaagcgccctggaagcggcggcggaagaactgggcgcgttgcgccgtcaagaaacggccctgctggagagcttacggcagttgacgctggaatacgccaggcacgcccttgccggacggctcatccgcaccgccaagcacaattttgagcgcgagtcgcagcctgccgtcattcgcgcggcctcgtcactctttgccgcgattacggacggcgcgtggatcggcatcagcgcctcgctggacgacagcgccctgtccgcgctcccgccgcacggcgaagccgttgcgccggaacacctgagccggggcacgcaggagcagctctatcttgccctgcgcttggcctatatccgcaaccatgccggccgcgcgtccgccctgcccgtgatcatggacgacatcctcgtcaactttgatcccgcccgcgcggccagaacggccaaagcgctcacgctgctcgtgcgcggcttgccggcgcaggacggagaaaacgcggttcctccgcatcaggcgctttttttcacctgccatccccaccttgccgaaatgctgcaaaacaccgtgccggacagcgccctgtaccgcatgggcgagggcggcatccgcgtcggcgccttggagtga

SEQ ID NO: 22784 - protein, 297 aa, Unknown
  Obtained from environmental sample
  misc_feature (1)..(297): Xaa is any amino acid
MLAQVDNAEDFLRHAAVKAEREDFLRRRRDLEDALRLAAGDTPFDEFTASFAASDKLEREQRLAALDAELERQAGEERSLVDALGALSARRSALEAAAEELGALRRQETALLESLRQLTLEYARHALAGRLIRTAKHNFERESQPAVIRAASSLFAAITDGAWIGISASLDDSALSALPPHGEAVAPEHLSRGTQEQLYLALRLAYIRNHAGRASALPVIMDDILVNFDPARAARTAKALTLLVRGLPAQDGENAVPPHQALFFTCHPHLAEMLQNTVPDSALYRMGEGGIRVGALE

SEQ ID NO: 22785 - DNA, 531 bp, Unknown
  Obtained from environmental sample
  misc_feature (1)..(531): n is a, c, g, or t
gtgcccgccagggcgcatcgcaggcggagcaggggggtctggtcggatgtggccacaaccaccacgctgcggcgaaggccctccaccccaaggtcgttgtcaatgaactcttttagttccctgcctcgttcaccgaccagcactattacgtttacgtccgcgctggtgtttctggctatcattccaagcagggtggatttgcccacgcctgaccccgcgaatatccccacgcgctggcccttgccgagcgtcagcataccgtctatggccctaacgcccgtagccagtggctccaatatccgctggcgcagcatggggtttggaggggcgttgtttattgggactctagattcggctgggattggcggtccgccgtcgagtgggttccccagtgggtcaatgatcctcccagcattttttccgaaaccggcaacaggggcagttcgcccgtgccttccccatacatgccctggcttgattgccctcggtgttgtcctattggccatcagcaaaccctttttttgcctttga

SEQ ID NO: 22786 - protein, 176 aa, Unknown
  Obtained from environmental sample
  misc_feature (1)..(176): Xaa is any amino acid
MPARAHRRRSRGVWSDVATTTTLRRRPSTPRSLSMNSFSSLPRSPTSTITFTSALVFLAIIPSRVDLPTPDPANIPTRWPLPSVSIPSMALTPVASGSNIRWRSMGFGGALFIGTLDSAGIGGPPSSGFPSGSMILPAFFPKPATGAVRPCLPHTCPGLIALGVVLLAISKPFFCL

SEQ ID NO: 22787 - DNA, 606 bp, Unknown
  Obtained from environmental sample
  misc_feature (1)..(606): n is a, c, g, or t
ttgtcagaggttggcaatgaccttgcctccaacatgaccgagaccgccgccgcggtgaaccaaatcaccgccaatatccaaagtatcaaggggcgcgttattaatcaaagcgccagcgttacgcagaccaacgccaccatggaacaggttatagccaatatcaacaaactcaacgagcatgtagaagaccagagcagcaatatctccaaggcctcgtccgccattgaggaaatggtagccaatgtcggttctgtaacccaaacactggttagaaacgctgataatgtaaaaacactggaggaagcctcggaagtggtccgcaacgggttgcagggagtcgtagaggatgttcaggaaatagcccgaaaatccgaagccgtggggaaaattaactcggtaatggaagacattgccagccagaccaacttgctttctatgaacgagacgatagaagcggttcactccggggaagcggacaaggggttggccgtcgtaccccacgaactccgcaaactgggggaaaggtccagcagaacagtgcgagaccatccgccaccgtcatcaggatgtcaagataccaaccgcggaagtatctgtataccgtga

SEQ ID NO: 22788 - protein, 201 aa, Unknown
  Obtained from environmental sample
  misc_feature (1)..(201): Xaa is any amino acid
MSEVGNDLASNMTETAAAVNQITANIQSIKGRVINQSASVTQTNATMEQVIANINKLNEHVEDQSSNISKASSAIEEMVANVGSVTQTLVRNADNVKTLEEASEVVRNGLQGVVEDVQEIARKSEAVGKINSVMEDIASQTNLLSMNETIEAVHSGEADKGLAVVPHELRKLGERSSRTVRDHPPPSSGCQDTNRGSICIP

SEQ ID NO: 22789 - DNA, 897 bp, Unknown
  Obtained from environmental sample
  misc_feature (1)..(897): n is a, c, g, or t
atgaagtggagttttgtgcctagaggcggcaagcccgtttatatagctgtgaacgcagatgaaggcgaaccaggcactttcaaagaccattttttgatgagagaagaccctcatcgcctaattgaaggcttgataatagcgggttgggctttgggtgcaagaaatgcttatatttatgttcgcggtgagtttttgcctgctatagaggctttagccgaggcgataagagaagcctataaagctggttttttagggaaaaatataggcggaacaaaatacagtttagatattgccgtgcatagaggcgcaggtgcttatgtttgcggcgaagaaacagctctaataaatagcttggaagggcaaaaagggcagcctcgccttaaacctccattccctgcggtgaatggtgcttggaatatgcccacttgcgttaataatgttgaaacaataatggcattgccttggattttggaacacggacctgcggaatatcaaaaacttggaacaccaaaagcaggcggcacaaaggttttctgcatttctggagatgttaaaaaacgcggagtttacgaggcaaggcttggcattcccttgatggaattattggaaagcgaggaatattgcggcggcataatcggcaatttaaaaggttgcataccaggcggttcttcaacacaagttttaactgtggaagaatgcaaaaaagcaaatatggattacgaaagccttgcagcaatgggaacgatgtccggttccggagctgtaatgccctttaacgatacccacagcattgttgaaatgctaaacacacttgggcaaattttcctcgcacgaaatcctgcggggcaatgcacccccttgcccccgaaaggaacgggtttatgttccaccgcataa

SEQ ID NO: 22790 - protein, 298 aa, Unknown
  Obtained from environmental sample
  DOMAIN (1)...(223): Respiratory-chain NADH dehydrogenase 51 Kd subunit
  misc_feature (1)..(298): Xaa is any amino acid
MKWSFVPRGGKPVYIAVNADEGEPGTFKDHFLMREDPHRLIEGLIIAGWALGARNAYIYVRGEFLPAIEALAEAIREAYKAGFLGKNIGGTKYSLDIAVHRGAGAYVCGEETALINSLEGQKGQPRLKPPFPAVNGAWNMPTCVNNVETIMALPWILEHGPAEYQKLGTPKAGGTKVFCISGDVKKRGVYEARLGIPLMELLESEEYCGGIIGNLKGCIPGGSSTQVLTVEECKKANMDYESLAAMGTMSGSGAVMPFNDTHSIVEMLNTLGQIFLARNPAGQCTPLPPKGTGLCSTA

SEQ ID NO: 22791 - DNA, 912 bp, Unknown
  Obtained from environmental sample
  misc_feature (1)..(912): n is a, c, g, or t
ttgcgggggcaagggcttattttttggtccaagccggccgccaccccggaaggccagagcggaaacaaaccggggccgaagatttcggggttacgcggtccacgaaggggggagataaggctacgaccacgggccggcacctttcgcgcaggcgcagggcaagggcgaactggcgctggcggacggagcctcattgaccttccgcaggggacgcagcctgttgtagtcagagccagttttgaaaacggcgagaacgcggtgcgccgcgttctcttgttcatggaccctgatgacccgaccgccgaaacaaccgccccgcgcgagaagagcgtgctccgcgacgagcttaacgttttcggggccgcggacgacaattttgagcttaacgaagttaacataaatttgcgcccctacggcaagttctggtacgaggttccttacgcgatacgcgggctgttctttgacattaagacccttggcgccacttactttgacgtgggcgtaggcttaagtttttttgacggcaacgtgcgcctgcaggggcagtacggcaaagcgccgccatggggcgaagtgggcctcatggtagaaggcggccgctatgtcggcgacgtcatgggcttcaagattgtcgccaacataggctccataccctttgactggcttttcaaggacagggactgggagttttacaaaataaacttcggccttggcgcgaacttttcctggttcgagatggactggcgctcgtctctgtacatgggttccgcgctgatgcagatagacatagcgaacgtggagatcagggtatatataccccggctggaaatactttcacatagagtcggtttaccttcagcccgaagtgtggttcgcctcatccgacgccctcgacgacggcttcgcgaataa

SEQ ID NO: 22792 - protein, 303 aa, Unknown
  Obtained from environmental sample
  misc_feature (1)..(303): Xaa is any amino acid
MRGQGLIFWSKPAATPEGQSGNKPGPKISGLRGPRRGEIRLRPRAGTFRAGAGQGRTGAGGRSLIDLPQGTQPVVVRASFENGENAVRRVLLFMDPDDPTAETTAPREKSVLRDELNVFGAADDNFELNEVNINLRPYGKFWYEVPYAIRGLFFDIKTLGATYFDVGVGLSFFDGNVRLQGQYGKAPPWGEVGLMVEGGRYVGDVMGFKIVANIGSIPFDWLFKDRDWEFYKINFGLGANFSWFEMDWRSSLYMGSALMQIDIANVEIRVYIPRLEILSHRVGLPSARSVVRLIRRPRRRLRE

SEQ ID NO: 22793 - DNA, 633 bp, Unknown
  Obtained from environmental sample
  misc_feature (1)..(633): n is a, c, g, or t
atgaatattgctgaattaaaaaacataaccaaacagtatcccggaagcggtaaaaaagccaataacggcatcagccttgatttgcgcaagggggaaattctctgcatcgcgggagagaacggtgcggggaagacgacgctgatgaaaatcctctgcggtctggagaaagccgacgagggagaaataataaagaacggaaatatcagcatggtgcatcagcattttatgctgtttccagaatacactgcggctgaaaatattgtttttgggtttgaaccgcgtaaatacggcattttttttgacgctgaaaaagcgaataaaattagcgaaaaaataatttcagataacgatttttccataagcgcggatacaaaggtaaaggacttgactcttggagaaatgcagcatgtggaaatatgccgcgtattatataataacgcccaaataattgttcttgacgagcctacgtcgatattaacggaacatgaaataaaatcgctgcttaagactctaaaaactcttgtaaataacgggaaatcaattattcttataacgcataaatttaaccgagataaaaaaaatccagcgaccgcgtgcctgttttggggtaccggtaaaattaattggacgtaa

SEQ ID NO: 22794 - protein, 210 aa, Unknown
  Obtained from environmental sample
  DOMAIN (31)...(201): ABC transporter
  misc_feature (1)..(210): Xaa is any amino acid
MNIAELKNITKQYPGSGKKANNGISLDLRKGEILCIAGENGAGKTTLMKILCGLEKADEGEIIKNGNISMVHQHFMLFPEYTAAENIVFGFEPRKYGIFFDAEKANKISEKIISDNDFSISADTKVKDLTLGEMQHVEICRVLYNNAQIIVLDEPTSILTEHEIKSLLKTLKTLVNNGKSIILITHKFNRDKKNPATACLFWGTGKINWT

SEQ ID NO: 22795 - DNA, 375 bp, Unknown
  Obtained from environmental sample
  misc_feature (1)..(375): n is a, c, g, or t
atgtgcgaggcgggccgtattcagcatcatttgattcacagtattcaggaccccaacaccacgattatgaccgtgggctacatggcggaaaataccctgggccgccgcatccgcaaccgcgagagcgaggtaaaaattcacggaatgaccttcaaactgaaggcccatgtcgaggaaataaacgctttcagcgctcatgccgattatgtcgagatggtggaatggttgaacgcgctggacacatcgcgcctgaagggaatctttatggtacacggtgaaaagaagtcccaggcggcgttcaaaaagtaccttgcggaaaacggctatgcccaaacgcacatagtccagtacggcaagacttatgaactggagtga

SEQ ID NO: 22796 - protein, 124 aa, Unknown
  Obtained from environmental sample
  DOMAIN (49)...(95): RNA-metabolising metallo-beta-lactamase
  misc_feature (1)..(124): Xaa is any amino acid
MCEAGRIQHHLIHSIQDPNTTIMTVGYMAENTLGRRIRNRESEVKIHGMTFKLKAHVEEINAFSAHADYVEMVEWLNALDTSRLKGIFMVHGEKKSQAAFKKYLAENGYAQTHIVQYGKTYELE

SEQ ID NO: 22797 - DNA, 720 bp, Unknown
  Obtained from environmental sample
  misc_feature (1)..(720): n is a, c, g, or t
atggattctatttcactcaattcagatttatttcaagaagtagatgatataattgcattcatcaaaaaacattttaaaattgaatacattatcactggcgagccgcagcatactgaacgttttgactatccattggatgccattcgcgaaatagttgtaaacatggtggttcaccgtgattatagagatagttccgcaagcattattaaaatttttgataacagaattgaattttataatcctggaaaattatatggcggaataacagtgcaagatttgctatctggtaattacgtttcaaaatcacgcaataaattgatagcccgagcttttaaggcggcaaatgttatagaacgctacggttccggtattatgcgaattcgtaaaatctgcaaagagtacggcgtaaaagaacccgattttgatgaaatatccaatggatttcaggtggttttgtacaatgaaaaaattaatgtcaccgataatgtcaccgataatgtcaccgatgtcaccgataatgtcaccgataacgatattgatagggctaaaaaaatattgaatcttattgcagaaaataatagaataaccgcttcggaaatagccaaatatatgaaagttaccaaacggacaattttgcgtgatattgaaaaactgaaaagtgagaattcgctagaaagaatcggttctgaaaaaggtggctattggaaagtgaaagtttga

SEQ ID NO: 22798 - protein, 239 aa, Unknown
  Obtained from environmental sample
  DOMAIN (176)...(233): M protein trans-acting positive regulator (MGA) HTH domain
  misc_feature (1)..(239): Xaa is any amino acid
MDSISLNSDLFQEVDDIIAFIKKHFKIEYIITGEPQHTERFDYPLDAIREIVVNMVVHRDYRDSSASIIKIFDNRIEFYNPGKLYGGITVQDLLSGNYVSKSRNKLIARAFKAANVIERYGSGIMRIRKICKEYGVKEPDFDEISNGFQVVLYNEKINVTDNVTDNVTDVTDNVTDNDIDRAKKILNLIAENNRITASEIAKYMKVTKRTILRDIEKLKSENSLERIGSEKGGYWKVKV

SEQ ID NO: 22799 - DNA, 537 bp, Unknown
  Obtained from environmental sample
  misc_feature (1)..(537): n is a, c, g, or t
gtggactccgggcgttataccgattatgtatatgaatttgtcaagcgacattctttcggcgtgtatgcctgtaagggtaaagactggattaacaccggggaaacatacgcgctcttttcagaaaagacgcttgaaaaaatcggcatggctcaggcgtttcacattaacaccggaaaattaaaagaccgtataagcggcgcgcttaccagcgcgttttgggaaactgataaatttcagccgttatggtaccccaattttcctgaagattttagggatgattatttcaaaatgtttgaagcggaaaaaaaagtttttacaaaattaaaggacgcggaaaatataacgcgggtgcaatgggtgcaagaattcggaaaagacaaccacgcctttgatacatacgtctataatctagcggcgcttgaaatcgctgcggagtattattgcaaggaaactttgtttcttgaaacattaaactggcgcgccttttgggaatccgcaaagaccggggtgttttatgatgagcccgataataaataa

SEQ ID NO: 22800 - protein, 178 aa, Unknown
  Obtained from environmental sample
  misc_feature (1)..(178): Xaa is any amino acid
MDSGRYTDYVYEFVKRHSFGVYACKGKDWINTGETYALFSEKTLEKIGMAQAFHINTGKLKDRISGALTSAFWETDKFQPLWYPNFPEDFRDDYFKMFEAEKKVFTKLKDAENITRVQWVQEFGKDNHAFDTYVYNLAALEIAAEYYCKETLFLETLNWRAFWESAKTGVFYDEPDNK

SEQ ID NO: 22801 - DNA, 711 bp, Unknown
  Obtained from environmental sample
  misc_feature (1)..(711): n is a, c, g, or t
gtgtaccacattgtcgaaaagtacgatcctgtaatgaaggaagaaattaagcagcgcataaaggaagggcggtgggaagtaaccgcttcggcctgggtagaaaccgacaagaatatgcccaatacagaatcactgttacggcatatccgttatacaaaagattacctttcagataactggggcgtagaccgcgactcgttgaacatcgacttttccccggacacctttggccatagcgccaatatcccggagatcgacgcctacggaggcgttaagtacctctatcattgccgcgggtttgaagaacgccaggtgcttttccgctggaagtccccgtcgggaactgaaatcctggcgcattgtgaaccctattggtatatcagcggtataactcctcatgtggggataggggttacggaactggcctccctctgcggagggctcaagacttctttgatagtgtacggcgtgggcgatcatggcggaggccccacccggcgggacgttgagaaaatcatcgaaatgagggactggcctgtgttcccgaccattaagtttggaactttccaggagtactttaaggctgccgaagcggtcagggataaagtcccggttttcgataaagaaatcaacttcattttttccggctgctatactacccaatcccgcattaaactcggngaaccgccatggagaagccgcgctacttga

SEQ ID NO: 22802 - protein, 236 aa, Unknown
  Obtained from environmental sample
  DOMAIN (2)...(216): Glycosyl hydrolases family 38 N-terminal domain
  misc_feature (1)..(236): Xaa is any amino acid
MYHIVEKYDPVMKEEIKQRIKEGRWEVTASAWVETDKNMPNTESLLRHIRYTKDYLSDNWGVDRDSLNIDFSPDTFGHSANIPEIDAYGGVKYLYHCRGFEERQVLFRWKSPSGTEILAHCEPYWYISGITPHVGIGVTELASLCGGLKTSLIVYGVGDHGGGPTRRDVEKIIEMRDWPVFPTIKFGTFQEYFKAAEAVRDKVPVFDKEINFIFSGCYTTQSRIKLGEPPWRSRAT

SEQ ID NO: 22803 - DNA, 525 bp, Unknown
  Obtained from environmental sample
  misc_feature (1)..(525): n is a, c, g, or t
ttgatcttctggaggataggggaaaaaatggctttgttagccattggcaataatttccgttgcgggtttcggcaggatactgatgcggatcttgtcaggcaggtaaatgaaaaaaaggggatcccgacagagcttattccgccagtttatattaaggcgacagatagcaggcctgtcagttccagcttcatcagatctgcggttctcgcgggggatcttgatctggcgtcggggcttttagggcggaattttggcctggacttgtcggatgtaaactgcgaatgtgttgagtccgggcaaataaaacaaaaaaaccggggagcatatgcttatgatctccgctccgtaaacaggatcgccccggttaaagggcaatattctgttttgatgtttccatacggctatgctgacggcattttcgggcaggcatattcagaaaacggtaaaatttttctgcccattgaggcggaaagccttgagtttgttacggactttagtccgccgggctttagtccgccggattga

SEQ ID NO: 22804 - protein, 174 aa, Unknown
  Obtained from environmental sample
  misc_feature (1)..(174): Xaa is any amino acid
MIFWRIGEKMALLAIGNNFRCGFRQDTDADLVRQVNEKKGIPTELIPPVYIKATDSRPVSSSFIRSAVLAGDLDLASGLLGRNFGLDLSDVNCECVESGQIKQKNRGAYAYDLRSVNRIAPVKGQYSVLMFPYGYADGIFGQAYSENGKIFLPIEAESLEFVTDFSPPGFSPPD

SEQ ID NO: 22805 - DNA, 444 bp, Unknown
  Obtained from environmental sample
  misc_feature (1)..(444): n is a, c, g, or t
gtgggtgggggggaggacagggagtcagtgtcgggcgctacgggtcctggagggggtggcgatacaactcttgccatcagggcagacggcagcctgtgggcatgggggaacaataatggcgcactcggcctagggggcattggccctcagaacttcccagtccaagtgggtacgaacaagaattgggcggcagcgttgactgatggtcaggacacaatggccatcaagaaagacggcagcctatgggcatgggggcggaataaccacggtcagctcgggctaggagacccctcaagctggaacacgcccaagcaggtgggttcggacactgactgggcgacagtgtcgaagggcctcagccacacagtggccattaaggcagatgacccactctgggcgtgggggtgnnnnnnnnnnnnnnnnnnnnnnnnnnatgcaagctga

SEQ ID NO: 22806 - protein, 147 aa, Unknown
  Obtained from environmental sample
  DOMAIN (78)...(125): Regulator of chromosome condensation (RCC1)
  misc_feature (1)..(147): Xaa is any amino acid
MGGGEDRESVSGATGPGGGGDTTLAIRADGSLWAWGNNNGALGLGGIGPQNFPVQVGTNKNWAAALTDGQDTMAIKKDGSLWAWGRNNHGQLGLGDPSSWNTPKQVGSDTDWATVSKGLSHTVAIKADDPLWAWGXXXXXXXXXXAS

SEQ ID NO: 22807 - DNA, 405 bp, Unknown
  Obtained from environmental sample
  misc_feature (1)..(405): n is a, c, g, or t
atgacagacagcgatattttaaagcgaatagatcatactctgttaaaaatgaccgcctcatgggaggaaattaaaactctctgcgatgaggcggttaaatacaaaacagcttctgtttgcgtaccgccttcttatattaaatccattcacaatgagtttaaagacttgaatatttgcacagtcatcggtttcccattgggctattcgataaccgccgctaaagttctggaagcggaacgcgctattttaagcggcgcatatgaaatcgacatggtgattaatgtcggcgatgtaaaaaacggcagctttgactttgtgttggaagaaatcaaacttataaaaaaagcctgcgggcgaaaaaatactaaaagtgataaaagagacctgctatttaacagaagatga

SEQ ID NO: 22808 - protein, 134 aa, Unknown
  Obtained from environmental sample
  DOMAIN (5)...(133): DeoC/LacD family aldolase
  misc_feature (1)..(134): Xaa is any amino acid
MTDSDILKRIDHTLLKMTASWEEIKTLCDEAVKYKTASVCVPPSYIKSIHNEFKDLNICTVIGFPLGYSITAAKVLEAERAILSGAYEIDMVINVGDVKNGSFDFVLEEIKLIKKACGRKNTKSDKRDLLFNRR

SEQ ID NO: 22809 - DNA, 462 bp, Unknown
  Obtained from environmental sample
  misc_feature (1)..(462): n is a, c, g, or t
atggaggcagagaaagcaatgtcaaagaacagcgaaaaaaaattggttgagcaaaaaaaggcaatggcggaagctctcaaaaaaattgaaagatgcaggaagtctcgtttaaagaccctggaaatcggccataatgggtacctaaacgtatttccgcaagagataaggaaattaacctggcttataaacctttcgataatacatacagatattagaatattacctgattggatcggaggattgaaaaatctaaaaacgcttaatttgtatcttaaccaaaaaattaaaaaattgcctcgcagtatagctaatttaaaacaattaaaaaaattaattcttgacaatacgggggtaaagaaactcccttcttttttaggacaactttcgtctcttgaattgctggatattagtatgcatggcattaaagaagtacctcaatgtattttggacctgcctaaataa

SEQ ID NO: 22810 - protein, 153 aa, Unknown
  Obtained from environmental sample
  misc_feature (1)..(153): Xaa is any amino acid
MEAEKAMSKNSEKKLVEQKKAMAEALKKIERCRKSRLKTLEIGHNGYLNVFPQEIRKLTWLINLSIIHTDIRILPDWIGGLKNLKTLNLYLNQKIKKLPRSIANLKQLKKLILDNTGVKKLPSFLGQLSSLELLDISMHGIKEVPQCILDLPK

SEQ ID NO: 22811 - DNA, 312 bp, Unknown
  Obtained from environmental sample
  misc_feature (1)..(312): n is a, c, g, or t
atgaagtactcaaacaccgaaatcctcaaaaaacagcttgagcgcatacgccgcgatgttggcgcgttcaagggactcatcgacaaatgggatgtgattaccgaagtcgtgatcatgcccatctttgacaaatatgacaacgcggttacaaggatatgcaaagaattgggacgggtcaggatggtaaaagaagtttttgccgcagcgaaagaaacgaatccaggcgcatcgctcttaatcaacgattttgatcttagcacaacctatgagatccatataaaaaaaaagcctccaggctgggattcccattga

SEQ ID NO: 22812 - protein, 103 aa, Unknown
  Obtained from environmental sample
  misc_feature (1)..(103): Xaa is any amino acid
MKYSNTEILKKQLERIRRDVGAFKGLIDKWDVITEVVIMPIFDKYDNAVTRICKELGRVRMVKEVFAAAKETNPGASLLINDFDLSTTYEIHIKKKPPGWDSH

SEQ ID NO: 22813 - DNA, 636 bp, Unknown
  Obtained from environmental sample
  misc_feature (1)..(636): n is a, c, g, or t
atggcggaaattgtctcgtttatgtattcacgcttttgcacggttttacgcggtctgcacgaagacggcggcaatgacagagagaatacgattgagttatgcgcggaacttttggaaaaagaggaatacattgatgaaatgcgcgaaatactcagcggctttttaattgaatgttcccgcgtaaaactcaatccaaaaaccgaagcccgtatatcgtaccttatgcaggtcattgcctcgcttgaatcaatgagcgatgaatgttacagcatcagccgcctgctggaaaaaagcgttgataagaattacctgtttaaagacaaggaaatgaatgagcttatcccttatgtcggactggttgaggaatttttaaacttacttgaaaaccagcttaggcgtaccccgtcgccggaacaaaaaatacgcgccattgaactggaagataaaatcgacagagaccgcaagaaattgcagaaacttgggcgcaaacgcatcgaagcgggcggcaacgtaaaagccgaattgttttttattgacttagtccgccgtatagaaagacttggggattattgttttgagatttcagaagaaaattcgctaaaaaaatggattaacaatattatcaataaaagatga

SEQ ID NO: 22814 - protein, 211 aa, Unknown
  Obtained from environmental sample
  misc_feature (1)..(211): Xaa is any amino acid
MAEIVSFMYSRFCTVLRGLHEDGGNDRENTIELCAELLEKEEYIDEMREILSGFLIECSRVKLNPKTEARISYLMQVIASLESMSDECYSISRLLEKSVDKNYLFKDKEMNELIPYVGLVEEFLNLLENQLRRTPSPEQKIRAIELEDKIDRDRKKLQKLGRKRIEAGGNVKAELFFIDLVRRIERLGDYCFEISEENSLKKWINNIINKR

SEQ ID NO: 22815 - DNA, 1041 bp, Unknown
  Obtained from environmental sample
  misc_feature (1)..(1041): n is a, c, g, or t
atgagatttcccgtcgtcatgggaaaagacattacaggagaagcgcagacagtcgatcttgttcaaatgccgcacctgttaatcgcgggcgccacaggctcgggaaaatcagtctgtgtaaactccataatactttcgatactgtatcagcttcatccggcggagtgcagacttatgctaattgacccgaaaattgtcgagttgaaattatacaatgacatcccacatttattgacgccggtaattaccgattcaaaaaaagcgtttcaggctttacaatactgcatttatgaaatggaaagacgctatgcctgccttgactcgatgggagtgcgcgacattcgcagttacaataaacgcgttaaagaaaaaaatgtcgcgcaagagtatatgccatatatcgtcgttgtaattgacgaatacgcggatttaatgacgactaccggaaaggaattggagtccaccgtggcaagacttgccgcaatgagccgcgcggtcggtatacatcttgtgcttgcgactcagcgtccttctatcgacgtaattacggggcttatcaaagcaaacattccaagccgtatcgcgttcatggtcgcaagtaaaacggacagccgcattataatcgacatggtaggcgctgaaaaacttttaggtaagggcgatatgctttattccggcgttgtcgatcctttcccgattcgtatgcagggcgcgtttatctcagaagaagaagtagaagcggttgttgaatatgtaaaatcattcggtgagcccgattacatagacgatgaaattttctttgaggaagaagaggaagactcaggcgcttccctattctctgacggcgatgatccgttatatgaaaaagcgctggaaatagtttgtcagcagggtaaggcaagcgccagttacattcagcgcagactgaagataggctttaaccgcgccgcaaggattgttgatgagatggagcataatggggtagtcggtcccgcgcacggaagcaaacccagggaactgataaggtcgatgggagcttaa

SEQ ID NO: 22816 - protein, 346 aa, Unknown
  Obtained from environmental sample
  DOMAIN (1)...(179): FtsK/SpoIIIE family
  misc_feature (1)..(346): Xaa is any amino acid
MRFPVVMGKDITGEAQTVDLVQMPHLLIAGATGSGKSVCVNSIILSILYQLHPAECRLMLIDPKIVELKLYNDIPHLLTPVITDSKKAFQALQYCIYEMERRYACLDSMGVRDIRSYNKRVKEKNVAQEYMPYIVVVIDEYADLMTTTGKELESTVARLAAMSRAVGIHLVLATQRPSIDVITGLIKANIPSRIAFMVASKTDSRIIIDMVGAEKLLGKGDMLYSGVVDPFPIRMQGAFISEEEVEAVVEYVKSFGEPDYIDDEIFFEEEEEDSGASLFSDGDDPLYEKALEIVCQQGKASASYIQRRLKIGFNRAARIVDEMEHNGVVGPAHGSKPRELIRSMGA

SEQ ID NO: 22817 - DNA, 936 bp, Unknown
  Obtained from environmental sample
  misc_feature (1)..(936): n is a, c, g, or t
ttgaagcaaaccgaaaaagctgaatccgcatcaaaagcaaaaagcaattttctcgccaagatgagccacgagatacgcacaccaatgaacgccattataggcatggccgaactgatactgaggggagaactttcaaatgaagcgcggggttatgcgcgtgatataaaacaggcggggaataacttagtttcaataattaacgatattctggatctttcaaaaatcgaagcgggaaaactggaaattgttcccgtcaaatatatgctttcatctttgatcaatgacacggtcaatattatccgcacacggctcaaggaaaagccgatacggttttttacaaacattgatggaaatattcccaacagccttatcggagatgaagtgcgtctgcgtcagattctccttaaccttttgtccaatgcggtaaagtatacggaaaagggatgtatcggtttgacaattactatggataaacaggacgataaccatgtcttgctcaggatggatgttaccgataccggaaaaggaataaaacctgaacatcaggcaaaactctttgacgagtttgtccgtgtagatatgaagaagaaccagggcattgaaggaacaggactggggcttccaattacaagacggctttgtacggctatggatggaaaattaagcatgaagagcgaatacggtaagggcagcgtattcacagtgattatccagcagggcattgaaaaaaaagaaccctttgccgtggtagaggaatcggagaaaaagaagattcttgtttatgaaagcagagttaattacgctaaatctttgtgttggtcgctggaaaacatgaaggttcctcataccatggtgacgaatcagaatgagtttgcctctgcgctgtaccgtgaagaatggttttatgtgtttccnggtacgctcggccgattctga

SEQ ID NO: 22818 - protein, 311 aa, Unknown
  Obtained from environmental sample
  DOMAIN (13)...(78): His Kinase A (phosphoacceptor) domain
  misc_feature (1)..(311): Xaa is any amino acid
MKQTEKAESASKAKSNFLAKMSHEIRTPMNAIIGMAELILRGELSNEARGYARDIKQAGNNLVSIINDILDLSKIEAGKLEIVPVKYMLSSLINDTVNIIRTRLKEKPIRFFTNIDGNIPNSLIGDEVRLRQILLNLLSNAVKYTEKGCIGLTITMDKQDDNHVLLRMDVTDTGKGIKPEHQAKLFDEFVRVDMKKNQGIEGTGLGLPITRRLCTAMDGKLSMKSEYGKGSVFTVIIQQGIEKKEPFAVVEESEKKKILVYESRVNYAKSLCWSLENMKVPHTMVTNQNEFASALYREEWFYVFPGTLGRF

SEQ ID NO: 22819 - DNA, 1344 bp, Unknown
  Obtained from environmental sample
  misc_feature (1)..(1344): n is a, c, g, or t
ttgctggacagagccgcgcccgcaagaggtaacgccgtacaggcaacgcaacttgtgtggagagagagctacacgtacgacaggaacgggaacagagcgagcaagagcaacgcgtggggagtaataaggtacgagtacgacggcgagaacaggcttgtgaagaagggagacatagtaataacgaacgacaaagacgggaacacgcttaccgagaaagggacaaggtacgaagcgaggtacgaatacaacgggcagaaccggatggtgtactcagaggtaacgagtcattcggacaggacgcacagcgtaagcgtgtatgattacgacgcgttaggcaggaggacgctgacgcagaatgtgacgggacagacgcttaggactgtatatgacggaagaagttttgaggtaataagggaaggggaagcgttcagggacgggagtcttactacaagttattcaagcagcgcacagacaaggggacagaacaacacgttacgaagcaatgagcctaccggggaaagataccgctggataggtgaaagcgggacagcggcagcgacaggagaaggctacgccgtacaggggagcaggtacggagctaggggagtaacgctgtacgggaacggggaggctgtggctgtaagctacagttcgagcgcgggaggcaagtccgtatatttggggaaggacttgcttgggagcgtgaggagcgcgacggtggacggcgggagcttcaggtacgaatacgacgcattcgggcagccttacgcgggagacttggacgggatgatgaacctggggtacacgggtaagccttatgacgccgctacggggttatataactacgggtacagggactataggccgcaggctgccaggttcactaccgtagacccggtaagggacgggagcaactggttcgcttatgttaacaacgaccctgttaactggattgacccttgggggttgtgcgctagtgacagtcaaaaatctggaattaataattttccttctttttattatatgggtggagaacgttggtcaaatacaccactcaatgttaatggtgcattaatagaaaaagaaggatgcgcattaattgcaatggctgatattggaatggcgaatttagttatgcaaaacaagctattaacccaaaattttactttatataacggaaatgttattcaaatatctaattggattacaccggttactttgaacgtacctggaaattttgataaaaacacagataaacttgattttgtaaaaactgcagcagcttatggtatgatagcggagcgatcagaaagaaaaaatcccgaaaatgctcaagatatttaa

SEQ ID NO: 22820 - protein, 447 aa, Unknown
  Obtained from environmental sample
  misc_feature (1)..(447): Xaa is any amino acid
MLDRAAPARGNAVQATQLVWRESYTYDRNGNRASKSNAWGVIRYEYDGENRLVKKGDIVITNDKDGNTLTEKGTRYEARYEYNGQNRMVYSEVTSHSDRTHSVSVYDYDALGRRTLTQNVTGQTLRTVYDGRSFEVIREGEAFRDGSLTTSYSSSAQTRGQNNTLRSNEPTGERYRWIGESGTAAATGEGYAVQGSRYGARGVTLYGNGEAVAVSYSSSAGGKSVYLGKDLLGSVRSATVDGGSFRYEYDAFGQPYAGDLDGMMNLGYTGKPYDAATGLYNYGYRDYRPQAARFTTVDPVRDGSNWFAYVNNDPVNWIDPWGLCASDSQKSGINNFPSFYYMGGERWSNTPLNVNGALIEKEGCALIAMADIGMANLVMQNKLLTQNFTLYNGNVIQISNWITPVTLNVPGNFDKNTDKLDFVKTAAAYGMIAERSERKNPENAQDI

SEQ ID NO: 22821 - DNA, 858 bp, Unknown
  Obtained from environmental sample
  misc_feature (1)..(858): n is a, c, g, or t
atgagtcccaagggccgccatgccaagagcaaggcccgcatcacccagtatgaaaaactttttcaggatgatgaacgggaacgttcccgcggtgcggcgcagaatagcaagattaccataccggcggggccgcatctgggcaagttcgtcattgaggcgcaggggctcgcgaagtcatacggcgagcgcatactgtttgaaaatctggactttaccataccacccggagcctgtgtcggcattatcgggccgaacggcgcgggcaagactacgctgtttaaaatcatcaccggaagcgaaaaacctgattccggcgatttgcggttaggcgacagcgtcaagctgggttatgccgatcagatgcgcgccgtgttagacgacaacaaaagcgtgtgggaacagctttccggcggtcaggatttaatcaggctgggagcggggcagggggcgcgggaagtcaactcacgcgcctattgcgcatggtataacttttcaggcggcgaccagcagaagaaagtcggcgtactttccggcggcgagcgcaaccgcctcaacctggcgatgatgctcaaggaaggcgccaatgtgctgctgctggacgagccgaccaacgatctggatgtaaacaccctgcgggcgcttgaagacgcgctggacagttttgccggcgtaagcctggtgataagccacgaccgctggtttctcgaccgcattgttacccacatcctcgcttttgaagacggcgaagtgctgtggtatgacggcaactggtcggagtacgctgaatggcggcgggaaagacttggcacgacggcggacagcccccaccgttatgtgtaccgcaaactggaacggtaa

SEQ ID NO: 22822 - protein, 285 aa, Unknown
  Obtained from environmental sample
  DOMAIN (76)...(248): ABC transporter
  misc_feature (1)..(285): Xaa is any amino acid
MSPKGRHAKSKARITQYEKLFQDDERERSRGAAQNSKITIPAGPHLGKFVIEAQGLAKSYGERILFENLDFTIPPGACVGIIGPNGAGKTTLFKIITGSEKPDSGDLRLGDSVKLGYADQMRAVLDDNKSVWEQLSGGQDLIRLGAGQGAREVNSRAYCAWYNFSGGDQQKKVGVLSGGERNRLNLAMMLKEGANVLLLDEPTNDLDVNTLRALEDALDSFAGVSLVISHDRWFLDRIVTHILAFEDGEVLWYDGNWSEYAEWRRERLGTTADSPHRYVYRKLER

SEQ ID NO: 22823 - DNA, 393 bp, Unknown
  Obtained from environmental sample
  misc_feature (1)..(393): n is a, c, g, or t
ttgcgtcctcactccgtttttatttttttaccgttccagtttgcggtacacataacggtgggggctgtccgccgtcgtgccaagtctttcccgccgccattcagcgtactccgaccagttgccgtcataccacagcacttcgccgtcttcaaaagcgaggatgtgggtaacaatgcggtcgagaaaccagcggtcgtggcttatcaccaggcttacgccggcaaaactgtccagcgcgtcttcaagcgcccgcagggtgtttacatccagatcgttggtcggctcgtccagcagcagcacattggcgccttccttgagcatcatcgccaggttgaggcggttgcgctcgccgccggaaagtacgccgactttcttctgctggtcgccgcctga

SEQ ID NO: 22824 - protein, 130 aa, Unknown
  Obtained from environmental sample
  misc_feature (1)..(130): Xaa is any amino acid
MRPHSVFIFLPFQFAVHITVGAVRRRAKSFPPPFSVLRPVAVIPQHFAVFKSEDVGNNAVEKPAVVAYHQAYAGKTVQRVFKRPQGVYIQIVGRLVQQQHIGAFLEHHRQVEAVALAAGKYADFLLLVAA

SEQ ID NO: 22825 - DNA, 462 bp, Unknown
  Obtained from environmental sample
  misc_feature (1)..(462): n is a, c, g, or t
atgaataaagcggtattgatgggtatgcttttcggaattgcggcttcggctgttaacgcggatgataatgacggaatcttttcatttaaaaacgggcattttgaagtttttattctggtcgaatccgaaagagacggaaatgcggatattcttatcgaagcggacaaaaatattctcgaccgttatattcccgcaggcggttttaaacatacagccaacgccgtgttgataaaagctcccggtcagaatattttaattgacaccggaacaggagccggcggcattattatagaaaaaattaaaaagctgggagtacagcctgaaaatattgacgctgtgcttataacccacctgcacggagaccatttcggcagtcttcaaatcaacggcacggcggtatttccaaaagccaaggtttatatttccgccaaagaacttaaatattttaccgaaaccaagtaa

SEQ ID NO: 22826 - protein, 153 aa, Unknown
  Obtained from environmental sample
  SIGNAL (1)...(20)
  misc_feature (1)..(153): Xaa is any amino acid
MNKAVLMGMLFGIAASAVNADDNDGIFSFKNGHFEVFILVESERDGNADILIEADKNILDRYIPAGGFKHTANAVLIKAPGQNILIDTGTGAGGIIIEKIKKLGVQPENIDAVLITHLHGDHFGSLQINGTAVFPKAKVYISAKELKYFTETK

SEQ ID NO: 22827 - DNA, 972 bp, Unknown
  Obtained from environmental sample
  misc_feature (1)..(972): n is a, c, g, or t
atgatatattttatgtataaaattatgaagaaacaacagaggatttatttttcagctttttacgtctgcctgattttcctgtcttcctgttcaataaataaactggcgataaacgctgtgtccaatgcgctgacagggtcgggcagttcagatgtttttacggggatactgatcctcaactggttggagacgctcttcccttttgccataaaaatgtatgaatccctgctttccgcaacccctgaccatcaggggcttatgctgaccacaggctccctttttgtaatgtatgccaacgcttttgtgcagggaccggctgaaatgcttccaagaggcgaatgggaagcgcgtgaagcggcgttaaaccggtcaaaacaactgtaccttcggggatacaaaatactttatgacgctcttgaaaaaaaatttcccggctttagaaatgccactgtggaaaaaggcactattcagcccctgcttgataaatgtaaaaaacaggacgtaggtcttttatattgggctgtcgccggcggactttcagcgtattctatcgacgtgcttgattatgagttgagcgcgaatataccccaatggacggctatgatccaaagggcttatgaacttgatccaaattatggcactgccgccttagatgagtttttcatacttttttacgcttctttgcctgaattattgggcggagatttagaacgcgctgaatatcattataaattggcgcttgaaaaaacagggggaaattccgccggcacttatgtttcttacgctcaagctgtttgcgttccggcgcagaattatgatgtttttaaagagtgccttgaaaaagccgtcgctatcgacccaaataaagacacttcgacgcggcttgtaaatattttaaatcagcgaaaagccggctggcttcttgaaaacgcangggtgtttttttctttccttcctatgcctgattattga

SEQ ID NO: 22828 - protein, 323 aa, Unknown
  Obtained from environmental sample
  misc_feature (1)..(323): Xaa is any amino acid
MIYFMYKIMKKQQRIYFSAFYVCLIFLSSCSINKLAINAVSNALTGSGSSDVFTGILILNWLETLFPFAIKMYESLLSATPDHQGLMLTTGSLFVMYANAFVQGPAEMLPRGEWEAREAALNRSKQLYLRGYKILYDALEKKFPGFRNATVEKGTIQPLLDKCKKQDVGLLYWAVAGGLSAYSIDVLDYELSANIPQWTAMIQRAYELDPNYGTAALDEFFILFYASLPELLGGDLERAEYHYKLALEKTGGNSAGTYVSYAQAVCVPAQNYDVFKECLEKAVAIDPNKDTSTRLVNILNQRKAGWLLENAXVFFSFLPMPDY

SEQ ID NO: 22829 - DNA, 303 bp, Unknown
  Obtained from environmental sample
  misc_feature (1)..(303): n is a, c, g, or t
atgaccgtttacgaaagcattatgcaaggcttaaccgaagctgtagactatcagcagggcaaaatccccgcccgaaaaaccaaactgaccataaaaccggtagccgctttcaacaccgaagacatcaagcggatacgccaaaaaaccggattaagccaggtagtttttgctggttcacttggtgtctccccaaaaacagtggaagcatgggaaaatggccgtaacaaaccggaaggagcctcacgccgtctgcttgaaatagtaagggatgatcctgggtttttgagacggtttcaggtttga

SEQ ID NO: 22830 - protein, 100 aa, Unknown
  Obtained from environmental sample
  DOMAIN (42)...(95): Helix-turn-helix
  misc_feature (1)..(100): Xaa is any amino acid
MTVYESIMQGLTEAVDYQQGKIPARKTKLTIKPVAAFNTEDIKRIRQKTGLSQVVFAGSLGVSPKTVEAWENGRNKPEGASRRLLEIVRDDPGFLRRFQV

SEQ ID NO: 22831 - DNA, 312 bp, Unknown
  Obtained from environmental sample
  misc_feature (1)..(312): n is a, c, g, or t
atgggaaagaaaggcataaaacggcgtgtccacacgaaggagttcaaagccgaagtggtagcattggccgagaagaaagaaaaaccggtaagccggatcgcggcggatctgggaatcaacgagaacatgctgcaccggtgggtgcaggcttcccgggaatcggcgggaagcggcctgcaggcgttcccaggccacgggcggccaaaggatgcggagctcgcccgcctgcggaaagagaacaaggcgctcagggaggccaatgaaatcctaaaaaaagcggcggtcatcttcgcgcaaggggaaccccaataa

SEQ ID NO: 22832 - protein, 103 aa, Unknown
  Obtained from environmental sample
  DOMAIN (8)...(90): Transposase
  misc_feature (1)..(103): Xaa is any amino acid
MGKKGIKRRVHTKEFKAEVVALAEKKEKPVSRIAADLGINENMLHRWVQASRESAGSGLQAFPGHGRPKDAELARLRKENKALREANEILKKAAVIFAQGEPQ

SEQ ID NO: 22833 - DNA, 486 bp, Unknown
  Obtained from environmental sample
  misc_feature (1)..(486): n is a, c, g, or t
atggcggtaagcagccccagcgcgacagcttcggtgcgcgggacgagctttgagtttgacacacggaacctccatgtaattagcgggaacgtgattttcaaggggataaagggagtggctacgcttataatagcggggtataacagcacaacggatgtaaaagggagcgcggtaaatccgcttgtttttggggacgccgcctataagccgcaaatgccagtggggacacaggcaaacgcttcgccagcttcgattgctacagggagtagcggggagccaacgcctacggagccgggtaaaccgactaatccgaccaatccaacgacgccaacgaacccgaacactccaaataacccaggcacgactaatccgggcgacaacactggtggcaacactggcggcaacactggcggcaacactggcggcaacactggcggtaacactggcggcggcggtaatactggtgttgatgtgaatttcaattaa

SEQ ID NO: 22834 - protein, 161 aa, Unknown
  Obtained from environmental sample
  misc_feature (1)..(161): Xaa is any amino acid
MAVSSPSATASVRGTSFEFDTRNLHVISGNVIFKGIKGVATLIIAGYNSTTDVKGSAVNPLVFGDAAYKPQMPVGTQANASPASIATGSSGEPTPTEPGKPTNPTNPTTPTNPNTPNNPGTTNPGDNTGGNTGGNTGGNTGGNTGGNTGGGGNTGVDVNFN

SEQ ID NO: 22835 - DNA, 426 bp, Unknown
  Obtained from environmental sample
  misc_feature (1)..(426): n is a, c, g, or t
ttgaccacgaaccaacacgaaccaacacgaacaacgacaagatgtgtacaaaaagttcgtgcatataccgaaggtacagttcgtgtgattcgtggtaaaaaattcttcttggatagctcctatccgcagaggtgcaaaaaatgttatcgtatgcggcttgaaaagacggcatcattcgccacacaggaaggattttccgcttttagtacaactctgctgataagcccgtatcaggatcatgaggagattaagcgcgtgggcgaagaaatggcggaaaaatacggggttgagtttttatatagggattatcgtccgctgttcagggaagggcaagctggcgcacgcgccgcgaatatgtatatgcagaagtactgtggttgcgtgttcagtgaggaagaacggtatttgggaggtttttatccgtaa

SEQ ID NO: 22836 - protein, 141 aa, Unknown
  Obtained from environmental sample
  DOMAIN (12)...(141): Uncharacterized BCR, COG1636
  misc_feature (1)..(141): Xaa is any amino acid
MTTNQHEPTRTTTRCVQKVRAYTEGTVRVIRGKKFFLDSSYPQRCKKCYRMRLEKTASFATQEGFSAFSTTLLISPYQDHEEIKRVGEEMAEKYGVEFLYRDYRPLFREGQAGARAANMYMQKYCGCVFSEEERYLGGFYP

SEQ ID NO: 22837 - DNA, 618 bp, Unknown
  Obtained from environmental sample
  misc_feature (1)..(618): n is a, c, g, or t
atgcccatgcacatcatggcggttgccgctgccgctagaggttcctgcggcactgctccgcaaaaagagccgatgagggaggagcacatacaacccgtgccggttaggtttcctaacatgggatgtccattttcaacaaaaattgtttttttatcgtctgagataatatcgaccgctccgcttatcactataacgcaaccgagtttttgcgccagcgctttcgccgtttgccccgcgctctccgccgtggcaatgtcgttatctgaagcgtcaacacccttagtttgcgaactaataccagcgataaatttaatttcagagatattcccacggattacgcttaactttacttcgcgtatcaaccttgccgccgtatcgttgcgtaactgtgacgcgcccacgcctaccgggtcaaaaataacggggattcccttcgcgttagccgaaatgccggcggcaatcattgacggaatagtgcgttcatttaacgtccccatgttcaaaacaacagcccccgctattgccgtgatgtccgccgcttcgtcgatagcgtcagccattacgggcgatgctccgatggcgagtgtgatgttggcgcaatcgttcacggttacatag

SEQ ID NO: 22838 - protein, 205 aa, Unknown
  Obtained from environmental sample
  SIGNAL (1)...(18)
  misc_feature (1)..(205): Xaa is any amino acid
MPMHIMAVAAAARGSCGTAPQKEPMREEHIQPVPVRFPNMGCPFSTKIVFLSSEIISTAPLITITQPSFCASAFAVCPALSAVAMSLSEASTPLVCELIPAINLISEIFPRITLNFTSRINLAAVSLRNCDAPTPTGSKITGIPFALAEMPAAIIDGIVRSFNVPMFKTTAPAIAVMSAASSIASAITGDAPMASVMLAQSFTVT

SEQ ID NO: 22839 - DNA, 813 bp, Unknown
  Obtained from environmental sample
  misc_feature (1)..(813): n is a, c, g, or t
atgcccagaacaggcgatagtgaaaagacattgtaccttgacagaattaaagagtactcaaacgcgtgcgctgagctcttaaaactggaaaaggatctgctgctggacattaaaaacgctccgaccgaagcgccctacaagcgtctggatcttgtagacgaaatgctcaatctggcgtctaactatatcgccataagcggcatttcacagtcggtaaataaatcaaaaaacctggattcgcttaacgacgcaagaaaagccctttacaagagcgttatctatcttgaggaagttgtcagtgacagtatagacgcgccgttctctgattatgaagaaaaacttgccctgatcgatctttacgatccgaataaacgatacctgcttgtaagaaagctcggcttttccattgagcttctggaagacgcctacggggacaatacaaaatggcggtggtcttttgtagagttggaaggcagattcgcggcagtggcgaaaaatataattgatttgaaaaaagccatgacaaatacggaccccatgtctccgtattacgagtcgactgtgtttcatctcaggctggtcaaaaaactgcttaaccaggctgctgaccgttaccgcgaaaaatatgagctgtcaacgggtcgtaccggcgattttaagatgggaatttcgtttctttccgcgttaagacgcctgcacattgttatggctgaaagggatgacgctgaaacggccaaaaagaaactggacatttggaccgccaagctggacagcgaccttaaaaagcaggaaggatccggtaagaaatcctga

SEQ ID NO: 22840 - protein, 270 aa, Unknown
  Obtained from environmental sample
  misc_feature (1)..(270): Xaa is any amino acid
MPRTGDSEKTLYLDRIKEYSNACAELLKLEKDLLLDIKNAPTEAPYKRLDLVDEMLNLASNYIAISGISQSVNKSKNLDSLNDARKALYKSVIYLEEVVSDSIDAPFSDYEEKLALIDLYDPNKRYLLVRKLGFSIELLEDAYGDNTKWRWSFVELEGRFAAVAKNIIDLKKAMTNTDPMSPYYESTVFHLRLVKKLLNQAADRYREKYELSTGRTGDFKMGISFLSALRRLHIVMAERDDAETAKKKLDIWTAKLDSDLKKQEGSGKKS

SEQ ID NO: 22841 - DNA, 594 bp, Unknown
  Obtained from environmental sample
  misc_feature (1)..(594): n is a, c, g, or t
ttgggccagaaggtgagcggcatactgaaacgcctgggtatgccaaacgcgcgttttgccccctcggtgacggcaaaaacccgcgaagacaatacacagaccccgatatacggcccctggggcggcgaagaggtggaattcctcatttccgccaattccggcgagcctttgaaggatctttcccgtgtcgcctccggcggagagctttcccgcgtcatgctagcgataaagtcggtattatcctcgggcgacagcatagaaaccctggtatttgacgaaattgacacaggcataggcggcgaggtggcccttgcggtgggtgaatacctggaaaaaatcggaaaataccggcaaattttctgtgtaacacatcttgccagtatagcagtacgtgccgataatcattttaaggttgaaaaacggactgagggaggcagaacctttaccggagtcggccctttgaacgcggaagggagaaagaaggaaatcgcccggatgctggccggggactcaggagaggcggcgcttgcccatgccgatgatttaatcttaaaatacggtagcggagaaacggatgcccagaacaggcgatag

SEQ ID NO: 22842 - protein, 197 aa, Unknown
  Obtained from environmental sample
  misc_feature (1)..(197): Xaa is any amino acid
MGQKVSGILKRLGMPNARFAPSVTAKTREDNTQTPIYGPWGGEEVEFLISANSGEPLKDLSRVASGGELSRVMLAIKSVLSSGDSIETLVFDEIDTGIGGEVALAVGEYLEKIGKYRQIFCVTHLASIAVRADNHFKVEKRTEGGRTFTGVGPLNAEGRKKEIARMLAGDSGEAALAHADDLILKYGSGETDAQNRR

SEQ ID NO: 22843 - DNA, 381 bp, Unknown
  Obtained from environmental sample
  misc_feature (1)..(381): n is a, c, g, or t
atggaatatataaactggtcagaaaaaaagatacctgttacaggcagttatgatctttttatcgcgggcggcggatgcgccggaacaggcgcggcgattgcggctggccgctcgggaataaaaacttttgcggtggaacggatgttcgcgttaggcggaaccatgacctgcgccctgatgagcaaaatcgcgatttcctcctgcaatcacgggattgccgaagagctgatcaaacgtctggatgcctatcaaaaatcaaatttccttgcctcgcgtcacgaggttccggttgatcctgagctatgcaagtggatgctggataggatggttattgatgaagcgggaacggaagttcggttgggacaacgatctgcgatgtaa

SEQ ID NO: 22844 - protein, 126 aa, Unknown
  Obtained from environmental sample
  misc_feature (1)..(126): Xaa is any amino acid
MEYINWSEKKIPVTGSYDLFIAGGGCAGTGAAIAAGRSGIKTFAVERMFALGGTMTCALMSKIAISSCNHGIAEELIKRLDAYQKSNFLASRHEVPVDPELCKWMLDRMVIDEAGTEVRLGQRSAM

SEQ ID NO: 22845 - DNA, 1164 bp, Unknown
  Obtained from environmental sample
  misc_feature (1)..(1164): n is a, c, g, or t
atggaaaaattccttacggccaatgaaggcttgaagagcaggtttaccaaatactttaaccttgaagattacagcccggaagaactcgcggcgatatttgcgtcccttgccaaaaaacagcgctttatagtgccgccggaaacaaaggctaaggttgtcgcttttttcaaagacaggtgcgtgcggaaaaccaaagacttcgcgaacggaagggaagtgaggaatttattggacgaagcgaggaagaaccaggcggaacgcttgtctcaggcggatatcgcgggcatgtccggtgaagacacccttacatttctccaggaagacattcccggcacgactgccgataaaatggtttccattgacgaggcgctcaaagacctcaacatgctggtggggcttaagtcggtaaaggatgcggtaacaaggataaccaactcattgcaggcccaaaaacttaccggcgaaacagaaacgcttgccaagcactttgtttttactggcaaccccggcacggggaaaacgacagttgcgcggattatgggcgacgtgttcaaggccgtaggaatgcttcccaccaacaatttgatagaagcggacaggggaaaacttgtggcatcctatgtaggccagacggccaagctggtggcccagcagtgcgacaacgctatgggcggcattctttttattgacgaagcgtactcgctgaacagggtgtgcaggacagtttcgggcaggaagcggtggatacgccttcttaaacggatggaagatgaccggggcaaatttgtggttatagccgcaggttataccaaagaaatggaagaatttttagcatccaacagcgggtttaaatcgcggttttctgattatatcaactttgacgactacgatacatccgaaatgcgggaaatctttatagggatgtgcaaaaaaaggaaaattgaatttgcacccggttttgacgaggcgttgcaaaaaagactagaagaattatatgcaggaagaaatgcccagtttgccaatgcccgaacggtaaggcaattatttgacaaaacaagggagaatgtatccgtaagggtgcttgccatgcggaaacccgaagaagaactaaagcgtgaaatattaatcatgcgccctgaagacttggatatgaccgtatcttaa

SEQ ID NO: 22846 - protein, 387 aa, Unknown
  Obtained from environmental sample
  DOMAIN (162)...(350): ATPase family associated with various cellular activities (AAA)
  misc_feature (1)..(387): Xaa is any amino acid
MEKFLTANEGLKSRFTKYFNLEDYSPEELAAIFASLAKKQRFIVPPETKAKVVAFFKDRCVRKTKDFANGREVRNLLDEARKNQAERLSQADIAGMSGEDTLTFLQEDIPGTTADKMVSIDEALKDLNMLVGLKSVKDAVTRITNSLQAQKLTGETETLAKHFVFTGNPGTGKTTVARIMGDVFKAVGMLPTNNLIEADRGKLVASYVGQTAKLVAQQCDNAMGGILFIDEAYSLNRVCRTVSGRKRWIRLLKRMEDDRGKFVVIAAGYTKEMEEFLASNSGFKSRFSDYINFDDYDTSEMREIFIGMCKKRKIEFAPGFDEALQKRLEELYAGRNAQFANARTVRQLFDKTRENVSVRVLAMRKPEEELKREILIMRPEDLDMTVS

SEQ ID NO: 22847 - DNA, 366 bp, Unknown
  Obtained from environmental sample
  misc_feature (1)..(366): n is a, c, g, or t
ttgcggntaacccaggggctacgctntccaggggatctcaaggcgctcaaggtaagcagggtttcagatggtatggggtcttatttttatgccttgggggatgaacatcaggaggcagaaggtacctacgcccatgactttttacgtggctatatttcgattgagtggtcaggcaatattgttattattaaaacccattccggccattcagacccggtggctgtagccctggacagttttggctttaatgaaatactcggcactattgcaggcaacgacaatactgtcgccgtattcctgagggaaggatgcaaaggcgaagattttatgaaacgcattaaagaaacgattccggaattgaaataa

SEQ ID NO: 22848 - protein, 121 aa, Unknown
  Obtained from environmental sample
  DOMAIN (43)...(116): Arginine repressor, C-terminal domain
  misc_feature (1)..(121): Xaa is any amino acid
MRXTQGLRXPGDLKALKVSRVSDGMGSYFYALGDEHQEAEGTYAHDFLRGYISIEWSGNIVIIKTHSGHSDPVAVALDSFGFNEILGTIAGNDNTVAVFLREGCKGEDFMKRIKETIPELK

SEQ ID NO: 22849 - DNA, 720 bp, Unknown
  Obtained from environmental sample
  misc_feature (1)..(720): n is a, c, g, or t
ttggaaggcgggacgctgcttatcagccgtactactgttattttctcatggtttaaaaacttctttgaagattgcgggtttaagggtgtaatttcaatagagtacgaaaaagacgatcttgatgacttattgaatgaactaaaaccaaaaaatgtttttatacacagcgaattttactcgcttgtaacgccctacatgataggcagacttattaagagatttccaaagttaaaaatcaacattgtaaatttttgtattttaccagacaacattgcggctcagttcatctttcatggtgctaattcttatcttgattttaatgacggctttgatgaaattaaaaaggggcttgagataatacaatccggtaaagaatattattcacagaagattaagcaagagattgacttatctaatgataatatagtttctacaaaagatacaacaaatcgtgaaaagtatgttttattacttctctgtaacggatttatagaagatcaaattgttgaaatcattaagaggagcaggcggactgttgatactcatattaataatttgtataaaaaacttggcgttaataaaagaatagatttattgagaaaagctctcattcttggtctggtcaaaataaaagatttaagttttcatggtactgataaaaataaatcaaagaacgagggacatgaagataaactgcaaacccgaaaccgccgcctttaa

SEQ ID NO: 22850 - protein, 239 aa, Unknown
  Obtained from environmental sample
  DOMAIN (145)...(202): Bacterial regulatory proteins, luxR family
  misc_feature (1)..(239): Xaa is any amino acid
MEGGTLLISRTTVIFSWFKNFFEDCGFKGVISIEYEKDDLDDLLNELKPKNVFIHSEFYSLVTPYMIGRLIKRFPKLKINIVNFCILPDNIAAQFIFHGANSYLDFNDGFDEIKKGLEIIQSGKEYYSQKIKQEIDLSNDNIVSTKDTTNREKYVLLLLCNGFIEDQIVEIIKRSRRTVDTHINNLYKKLGVNKRIDLLRKALILGLVKIKDLSFHGTDKNKSKNEGHEDKLQTRNRRL

SEQ ID NO: 22851 - DNA, 843 bp, Unknown
  Obtained from environmental sample
  misc_feature (1)..(843): n is a, c, g, or t
atgctccggcgggtagtgaatgttgtcaatttccgcatagatgaaaagcatcaggaactttccgtgaatatcgaccgttccattccccgcaacctcataggtgacgaccagcggatagcgcaagtcatcactaacctgttgggaaatgccgttaaattcactcccgaacagggcgcaatcagccttactgtgcgccttgcccagagagtagacgatgtctgtaccatagaattttcggtaagcgacagcggtatcggcatgactcccgaacagcagatgaaaatattcaactcctttgaacaggcggaatccagtacaacccgcaaatacggcggcacggggctggggcttgcaatttccaaaagcatagtagagatgatgggcggtaaaatatgggtacagtccgagccgggaaaaggatctgtttttgcctttaccattcaggctcagcgcggtacggaagaaaaacacgagcttttgtccgctgatgtaaatttgagcaatgtccgtatcatggtggtagacgatgaccaggatattttaacgtactttacggatatagcgcagagattcggcgtagcatgcgatgttgccataagcggggaaaaggcgcttgaactcatagaccaaaaaggcgattaccatatctattttatagactggaaaatgccgggcatggacggcatagaacttgtcagtaagataaaaaaccgtgtacctgaaaattccattgtaataatgatttccgccgccgaatggggcgcgattgccgaaagagcgaaaacagcgggtgttgataaatttttgtcaaagcctctcttcccttctacaatcgcagagtaa

SEQ ID NO: 22852 - protein, 280 aa, Unknown
  Obtained from environmental sample
  DOMAIN (169)...(279): Response regulator receiver domain
  misc_feature (1)..(280): Xaa is any amino acid
MLRRVVNVVNFRIDEKHQELSVNIDRSIPRNLIGDDQRIAQVITNLLGNAVKFTPEQGAISLTVRLAQRVDDVCTIEFSVSDSGIGMTPEQQMKIFNSFEQAESSTTRKYGGTGLGLAISKSIVEMMGGKIWVQSEPGKGSVFAFTIQAQRGTEEKHELLSADVNLSNVRIMVVDDDQDILTYFTDIAQRFGVACDVAISGEKALELIDQKGDYHIYFIDWKMPGMDGIELVSKIKNRVPENSIVIMISAAEWGAIAERAKTAGVDKFLSKPLFPSTIAE

SEQ ID NO: 22853 - DNA, 603 bp, Unknown
  Obtained from environmental sample
  misc_feature (1)..(603): n is a, c, g, or t
ttgatcagccaggatttaaccataatcggccacatgaacccggcttttatcggattgaaaatgagcgacccggtaatccccctctcatttataactgatgaattagtacgcacgggcaaaattacaggaatcgaatgggtgaactggagaaacgaaccggtcatcgggtttttcgaaacgcttcccaatggatggcgtttaggccttttggcgccgaaaaatacatattataaacccgtatatagtatggcgctgatactcagcatatttggcactacgcttgcaacggtattgagtatcatcctcattcgcgttgacgcggcaaaaaacaaatctgatacagagagcaggcataagagcgcgttccttgccaacatgagccacgaaatacgaacgccgatgaacgcgataatcggcatgaccacgataggaaagtcagcttctgactctgttcgcaaagattattgcttttcgaaaatacaggacgcttctaaccatctgctgggcgttattaacgatattctggatatgtccaaaattgaagccaataaacttgaactttccgagaggaatttgaacttgaaaaaatgctccggcgggtag

SEQ ID NO: 22854 - protein, 200 aa, Unknown
  Obtained from environmental sample
  DOMAIN (118)...(183): His Kinase A (phosphoacceptor) domain
  misc_feature (1)..(200): Xaa is any amino acid
MISQDLTIIGHMNPAFIGLKMSDPVIPLSFITDELVRTGKITGIEWVNWRNEPVIGFFETLPNGWRLGLLAPKNTYYKPVYSMALILSIFGTTLATVLSIILIRVDAAKNKSDTESRHKSAFLANMSHEIRTPMNAIIGMTTIGKSASDSVRKDYCFSKIQDASNHLLGVINDILDMSKIEANKLELSERNLNLKKCSGG

SEQ ID NO: 22855 - DNA, 594 bp, Unknown
  Obtained from environmental sample
  misc_feature (1)..(594): n is a, c, g, or t
gtgttttcattgaaagggaaccagggaaacctgcatgacgcagtgacagaatactgggaagtgctggacttcaacaaaccggcggcgcaggccaagcatatcaagtttcggagtgtatcaacgtatgacgagaaacacgggcggaaagaggcccgcgattatgcggtaagcgacgatgtccagtggctgcgggaactgttcccgcagtggaagagcatcaattcgataggggtggtggaatcgacgagggaaaccggcgagggggaggcaaaaacggaacggcggtattttgtttccagccttgtcgccgatgagaaactgttcgcccatgccgtgcgggcgcactggggtatagagaaccggttgcattatatgcttgatgttgtataccgggaggatgcctgccgggtccggaaggatcacagtccgcggacgctggggctgataaggaaaatagcgctcacaatagcaaggtctgacaaggaatcgaaaaccagcatcagaggccgcgtccagcaaatggcatggtcggaggattatctggaaactctgctgttccgttcggatttcgcttcggtacagaaaatttcatag

SEQ ID NO: 22856 - protein, 197 aa, Unknown
  Obtained from environmental sample
  misc_feature (1)..(197): Xaa is any amino acid
MFSLKGNQGNLHDAVTEYWEVLDFNKPAAQAKHIKFRSVSTYDEKHGRKEARDYAVSDDVQWLRELFPQWKSINSIGVVESTRETGEGEAKTERRYFVSSLVADEKLFAHAVRAHWGIENRLHYMLDVVYREDACRVRKDHSPRTLGLIRKIALTIARSDKESKTSIRGRVQQMAWSEDYLETLLFRSDFASVQKIS

SEQ ID NO: 22857 - DNA, 900 bp, Unknown
  Obtained from environmental sample
  misc_feature (1)..(900): n is a, c, g, or t
ttgaaattcggctggcaggtcaatacctggggcatcggcgagctggcgcagcgttacgcgaatgtcggcgacgctcaggcggaatctcttgcgaaagaatacgccgctgcatacgaactggccggagatcttgcccagccgggaaaggccagaaccgcgatgctagaacaggcgaaaattgaaattgccttaaaagaaatgcttgaaaaagaaaactcaggcgcttttaccaccacctttcaggaccttcacggcctgccgcagcttccgggtcttgccgcccagcggctaatggaacagggctatggtttcggtgcggagggcgactggaagcagtcaatgctaacccgctgcgccaaggtaatggcctctgggctttccggcggcgtctcttttatggaagattatacctaccatttcgagagcggcaaggaagccgcccttggtgcccatatgctggaaatatgcccctcgatagccggagcaaaaccccgcgtcgaggtgcatcccctgggaatcggcggcaaaggcgatccagcccgtctggtatttgacgccgcccccggccctgctgttctggcaaccctgatagaccttggcgaccgcttcaggatgatcgtgaacgaaattgagaccattaaaattgaaaatgaaatgcctaaactccctgtagccagggcgctgtggaagccctacccaagtctgagctgcgccgccgaggcatggatactcgcgggcgggactcaccacgctgtttataccaccgctttaaccgctgaatatttcagggactgggcggagatatgcggcattgagtttgtcttaatcgggcgcgatacaaagccggacaggctgagggatgaactgcgctggagcgaagcatactggtcgggccgctaa

SEQ ID NO: 22858 - protein, 299 aa, Unknown
  Obtained from environmental sample
  DOMAIN (1)...(299): L-arabinose isomerase
  misc_feature (1)..(299): Xaa is any amino acid
MKFGWQVNTWGIGELAQRYANVGDAQAESLAKEYAAAYELAGDLAQPGKARTAMLEQAKIEIALKEMLEKENSGAFTTTFQDLHGLPQLPGLAAQRLMEQGYGFGAEGDWKQSMLTRCAKVMASGLSGGVSFMEDYTYHFESGKEAALGAHMLEICPSIAGAKPRVEVHPLGIGGKGDPARLVFDAAPGPAVLATLIDLGDRFRMIVNEIETIKIENEMPKLPVARALWKPYPSLSCAAEAWILAGGTHHAVYTTALTAEYFRDWAEICGIEFVLIGRDTKPDRLRDELRWSEAYWSGR

SEQ ID NO: 22859 - DNA, 966 bp, Unknown
  Obtained from environmental sample
  misc_feature (1)..(966): n is a, c, g, or t
gtgaattttatttttcgctatattctgagacggcttctctttcttgtacccatactccttgtggtatcggtattaatcttttttctgatccgccttaccccttctgaccccatcggttccattaccagcggacggaggatcagcgatgagacgcgggcggcccttacagcccagtaccatttggacgtcagccttaagcggcagtaccttatctggatcggtaacgcggtaaggggaaacctgggggacagtttcaggcaccggcagccggtgggatccctccttgcggcaaggcttcccactactattcaacttgtccttatgagcgcgttatttgcggttcttttggctgttcccgcgggcgttatcagcgccgtcaaacggtataccgtcgttgaccgtgttatttcggcttttatgttattttgcgtgtcctcgcccgtatttctcaacgctattttattgatgttgatttttgtctttaaactgaggtggtttccggcgtttggagccggacgcggtttcacggaaaatttgtattatttatgcctgcccgcatttgccttgagccttaatatggtcgcccttttgggccgtataattcgggaccgcatgatcggcgaaatcaaatccaattatgcccttgccctgagcgccaagggaacgcctttccgccgtatcgtgatgacccattgttttaaaaataccctgattcccgtaattaccgtcgggggcgtgcanataggcgcaatggttatcggagcggtgttagttgaaaatgttttcgctctgggaggaataggggctttgctgatcgagggaattcaagcgtcggattatcccgtagtgcagagcattatgctttttcttgtcgccctgtttcttgttcttaatttgacggtggatgttgtctactttataatcgatcccagaattcgggcttccggaagtaccggaaggatttga

SEQ ID NO: 22860 - protein, 321 aa, Unknown
  Obtained from environmental sample
  DOMAIN (99)...(314): Binding-protein-dependent transport system inner membrane component
  misc_feature (1)..(321): Xaa is any amino acid
MNFIFRYILRRLLFLVPILLVVSVLIFFLIRLTPSDPIGSITSGRRISDETRAALTAQYHLDVSLKRQYLIWIGNAVRGNLGDSFRHRQPVGSLLAARLPTTIQLVLMSALFAVLLAVPAGVISAVKRYTVVDRVISAFMLFCVSSPVFLNAILLMLIFVFKLRWFPAFGAGRGFTENLYYLCLPAFALSLNMVALLGRIIRDRMIGEIKSNYALALSAKGTPFRRIVMTHCFKNTLIPVITVGGVXIGAMVIGAVLVENVFALGGIGALLIEGIQASDYPVVQSIMLFLVALFLVLNLTVDVVYFIIDPRIRASGSTGRI

SEQ ID NO: 22861 - DNA, 1518 bp, Unknown
  Obtained from environmental sample
  misc_feature (1)..(1518): n is a, c, g, or t
ttggataccgcggaaaccctcgggttccggggcgaggcccttgccgcggcagccgcggtcgcaaggcttgaaattatcagtagtaccggatcaggtgaagcatggcggcttgaaacggaccccggcggagaaaaatggcacataacggcggccaacaggaccaggggcactactgtacgcgccgccaacctctacgaaaacatacccgcccgaaaaaaatttcttaaacgcgaagggagcgaggccgccctgtgccgtcagatgtttatagacaaggcgcttgcctttccggaaataagcttccgctttacgcaggatggcaagcccaaagatttctttcccgccgcgagctcaaaaaaagaacgctttgccgcggcggcgctggaaaacaatgaaagggaatttatccatgagatcaatgtttcaggcgggggattttccgttgacatcgtaatcggcggcccggagctttttcgcgccgacaaaagaatgctctacatctttgccaacggcaggcgcatacaggattattcgctcatgcacgcgatggaatacggaactcaaggctggtttcccaacggaacccatcccctgggagccgcgtacctggacatagatccggccctcgccgattttaacatacaccccgccaagagggaggcccgcttcagggatcctggcgcgatccaccacgcgataagctcatgtcttagggatttttgccgcggctatgaacgcctccatgggcgcagccacagcgaaacaaattatgacaattttattaacaatatagggagtggggtttttaacggcaatacagactggttaacacagtctaaccggcatggcgacgcaggcgcaggagggatacttgcaatgaaggcccttctggacgctccccccgctttcgcgcctttgcccggacaggcgcaaaatgccgccccgcttgattatacagccgaggacgcccccatatacggggagccgcgttacatcggaagcgttttcggcgtgtttattctgcttgaatggggagaaaaactgttcatcatcgaccagcacgccgcccatgaacgcatcctgtataaccgttttctttcacagcccattcccgtacaggaattgctggttcccattacatttaacacagaaagcgaagaagacgatcgtttttttgaggcaaaaaaagaagggcttgccgccctggggattgtaattgaaaaggacgaagacacctggcagatcacggcgcttccggcaggctggcgtttgacggacgcgcaaaccgtaaaagagatcctcagcctgcgcgaggccggcgaaaatatcgcagaacgctgggcagccaccctaagctgccatcaggcaatacgtgacggcgaccgccttgacgaggcaacggcgctggccctggcaaaggaagcgctgatgctgcccgaaccccgctgcccccacggccgcccaatctggaccgaagtcacccgcgaggcgctgtacaaagccgtacggagaagctga

SEQ ID NO: 22862 - protein, 505 aa, Unknown
  Obtained from environmental sample
  DOMAIN (130)...(242): DNA mismatch repair protein, C-terminal domain
  misc_feature (1)..(505): Xaa is any amino acid
MDTAETLGFRGEALAAAAAVARLEIISSTGSGEAWRLETDPGGEKWHITAANRTRGTTVRAANLYENIPARKKFLKREGSEAALCRQMFIDKALAFPEISFRFTQDGKPKDFFPAASSKKERFAAAALENNEREFIHEINVSGGGFSVDIVIGGPELFRADKRMLYIFANGRRIQDYSLMHAMEYGTQGWFPNGTHPLGAAYLDIDPALADFNIHPAKREARFRDPGAIHHAISSCLRDFCRGYERLHGRSHSETNYDNFINNIGSGVFNGNTDWLTQSNRHGDAGAGGILAMKALLDAPPAFAPLPGQAQNAAPLDYTAEDAPIYGEPRYIGSVFGVFILLEWGEKLFIIDQHAAHERILYNRFLSQPIPVQELLVPITFNTESEEDDRFFEAKKEGLAALGIVIEKDEDTWQITALPAGWRLTDAQTVKEILSLREAGENIAERWAATLSCHQAIRDGDRLDEATALALAKEALMLPEPRCPHGRPIWTEVTREALYKAVRRS

SEQ ID NO: 22863 - DNA, 504 bp, Unknown
  Obtained from environmental sample
  misc_feature (1)..(504): n is a, c, g, or t
atggagagacatttaacgctatgtatttttcgcaaggacttcacacaaagagcacaaaggtacaaagaacacaaagaggaatttatgttacggctctcacctgaaatggaaaaaaatattagggtagacggcgaaactgcgtatcccaacgaatgttgcggcgttctcatcggcgaggttgataatgcgggaattaaaacagtcaagagtacgctaaccattaacaatgcaagtgaaaacggcgaacaataccaccgtttcctcataacgccggaagatatgatgaaagcggaaaaagccgcaagaacgaagaaacttgatgttataggtttttatcactctcaccccgaccatccgtctgcgccgtcaggttatgataaagatcatgccctgcctttttactcctatgtgattgtgtctgtggatagcggcaaggcgcaggttttaacaagctgggagttagcagatgatagaagtaattttatacaggaaaaaataaattaa

SEQ ID NO: 22864 - protein, 167 aa, Unknown
  Obtained from environmental sample
  misc_feature (1)..(167): Xaa is any amino acid
MERHLTLCIFRKDFTQRAQRYKEHKEEFMLRLSPEMEKNIRVDGETAYPNECCGVLIGEVDNAGIKTVKSTLTINNASENGEQYHRFLITPEDMMKAEKAARTKKLDVIGFYHSHPDHPSAPSGYDKDHALPFYSYVIVSVDSGKAQVLTSWELADDRSNFIQEKIN

SEQ ID NO: 22865 - DNA, 867 bp, Unknown
  Obtained from environmental sample
  misc_feature (1)..(867): n is a, c, g, or t
gtgactggattatggccgggaattataccagtgtccccacaagtggatttgaccgggttagatattaccgcgattgccttagctccgggtggcgctgatggggtggtagtgcgtaacgccagtaacgagttgtggtggctaacgtctgcgcctgatgctgaatctcaccctaacgcattaccaaactctgccttgacggatccaattgctccgattgtgccgcccagtttgcttagtccagggccagggctggcatccagcgcgaaccctggggcaagtagcacgatggtcccaaaccaacccgagttgcccggcgaaatagcggaagatccaaatcaagatccggaactcggacctatgccggggcgcgtcaatatccatacgggtgctcacctgatagccccttccattgacgatgaagggttaatttggactggtgaagtggaagggccaattagagtcgttgattattccggcacggtctacgaagtaactgccaattggttgggcggcggagttctgagcgacgagcctgaacttggcgccgaactcattgagcacttgaccgtcgcccccggagggcggcaggttgccatcgtaactcgcgatgaagggggcacccgtattttggtggcagggataatccgggacagtcagggcatcccaattgggttagctgagccaatagaggtaggcgcctcggtgcgcgaagtcagcgctgtcacttggcaagatgactcggttctggccgttatcggatggatgaacggagtgaacggggtctatttagtccgaatccgccggcctggatgccccccggtggtctgcctcccccgatccccggaatcgcagagccgctgtggttaa

SEQ ID NO: 22866 - protein, 288 aa, Unknown
  Obtained from environmental sample
  misc_feature (1)..(288): Xaa is any amino acid
MTGLWPGIIPVSPQVDLTGLDITAIALAPGGADGVVVRNASNELWWLTSAPDAESHPNALPNSALTDPIAPIVPPSLLSPGPGLASSANPGASSTMVPNQPELPGEIAEDPNQDPELGPMPGRVNIHTGAHLIAPSIDDEGLIWTGEVEGPIRVVDYSGTVYEVTANWLGGGVLSDEPELGAELIEHLTVAPGGRQVAIVTRDEGGTRILVAGIIRDSQGIPIGLAEPIEVGASVREVSAVTWQDDSVLAVIGWMNGVNGVYLVRIRRPGCPPVVCLPRSPESQSRCG

SEQ ID NO: 22867 - DNA, 315 bp, Unknown
  Obtained from environmental sample
  misc_feature (1)..(315): n is a, c, g, or t
gtggcttcgatcttcgataaggtcctacggattggcgagggccggatcctgcgtagcctggaaaagacagcaaaagacgctggcgcgcttgaaccgcgtttcaaagcgatgagcgatgatgagttacgcagccaaaccgcaaagttccgagagcgtctcgcccaaggggccactttggactccctgatgcccgaagctttcgcagcggtgcgggaagcgtcccaacgtacgctcggcatgcgccactttgatgtgcagctgatgggcggggcggccttgcatcgtggtgacattgctgagatgaaaacgcggtga

SEQ ID NO: 22868 - protein, 104 aa, Unknown
  Obtained from environmental sample
  DOMAIN (5)...(104): SecA DEAD-like domain
  misc_feature (1)..(104): Xaa is any amino acid
MASIFDKVLRIGEGRILRSLEKTAKDAGALEPRFKAMSDDELRSQTAKFRERLAQGATLDSLMPEAFAAVREASQRTLGMRHFDVQLMGGAALHRGDIAEMKTR

SEQ ID NO: 22869 - DNA, 441 bp, Unknown
  Obtained from environmental sample
  misc_feature (1)..(441): n is a, c, g, or t
ttggacttggccatcgacaagctcgccgaacggntgcgtcgggctcgggatcgtaaaaaggatcatggtggtctttcggtgcgcgaggttttggccgaagcttcatctgatgcaattgatgcccaaacgttagctgagggtgactatttggtcgaaaccgaagctgacgccgatgaggtaatggctgctgcggcttggcaaggtccgctagtagttaatggggctccagtggagcgccgcctcggcgattccccagtgatcattcgccaaaagttgcactcggctgatcggttgaccgtggctgaagctgtggagcagatggaacttgtcggccatgatttcttcttattcattgactctgagtcggatcgtccgtccgtagtttacctccgcaaggggtggacttatggcgttctccaattagatgctaaagtagcctag

SEQ ID NO: 22870 - protein, 146 aa, Unknown
  Obtained from environmental sample
  misc_feature (1)..(146): Xaa is any amino acid
MDLAIDKLAERXRRARDRKKDHGGLSVREVLAEASSDAIDAQTLAEGDYLVETEADADEVMAAAAWQGPLVVNGAPVERRLGDSPVIIRQKLHSADRLTVAEAVEQMELVGHDFFLFIDSESDRPSVVYLRKGWTYGVLQLDAKVA

SEQ ID NO: 22871 - DNA, 651 bp, Unknown
  Obtained from environmental sample
  misc_feature (1)..(651): n is a, c, g, or t
atgacggacgtaaaaaacattatcgcggcccgggcggcaaaagagcttaaggacggcgacgtggtaaatctgggaattggcattcccaccctggtggttaattttctgcctccgggcatagacattatacttcattcggaaaacggcattatgggaatggggcccactccctcagccggcgaagaaaatatggatatcgtgaacgcggggggccggccggttaccataaaaaccggggccatgtttttcgacagcgcggtatctttcggaataatacgcggcggacatgtggacgccaccattatcggggcgctggaagtggacgaaaagggcagcatctcaaactggatagtgccgggaaaatcgattcccggcatgggcggggccatggatctgatggcagcggcaaaaaaggttatagtcgtaactacccataccaataagggcgcgcctaagatactgaagaactgcacccttccgtacggggctttggacgccgttgacatgatcattacggaaatgggggtaatggaaattacgcctgacggcatcatgctgaccgaactgcaccccgattttacaaaagagcaggtacaggcagcaaccggggcaaaattaataattagtccgaatttgaaaccgatggcttaa

SEQ ID NO: 22872 - protein, 216 aa, Unknown
  Obtained from environmental sample
  DOMAIN (2)...(173): Bacterial regulatory proteins, deoR family
  misc_feature (1)..(216): Xaa is any amino acid
MTDVKNIIAARAAKELKDGDVVNLGIGIPTLVVNFLPPGIDIILHSENGIMGMGPTPSAGEENMDIVNAGGRPVTIKTGAMFFDSAVSFGIIRGGHVDATIIGALEVDEKGSISNWIVPGKSIPGMGGAMDLMAAAKKVIVVTTHTNKGAPKILKNCTLPYGALDAVDMIITEMGVMEITPDGIMLTELHPDFTKEQVQAATGAKLIISPNLKPMA

SEQ ID NO: 22873 - DNA, 423 bp, Unknown
  Obtained from environmental sample
  misc_feature (1)..(423): n is a, c, g, or t
atgatgccgtcaggcgtaatttccattacccccatttccgtaatgatcatgtcaacggcgtccaaagccccgtacggaagggtgcagttcttcagtatcttaggcgcgcccttattggtatgggtagttacgactataaccttttttgccgctgccatcagatccatggccccgcccatgccgggaatcgattttcccggcactatccagtttgagatgctgcccttttcgtccacttccagcgccccgataatggtggcgtccacatgtccgccgcgtattattccgaaagataccgcgctgtcgaaaaacatggccccggtttttatggtaaccggccggccccccgcgttcacgatatccatattttcttcgccggctgagggagtgggccccattcccataatgccgttttccgaatga

SEQ ID NO: 22874 - protein, 140 aa, Unknown
  Obtained from environmental sample
  SIGNAL (1)...(22)
  misc_feature (1)..(140): Xaa is any amino acid
MMPSGVISITPISVMIMSTASKAPYGRVQFFSILGAPLLVWVVTTITFFAAAIRSMAPPMPGIDFPGTIQFEMLPFSSTSSAPIMVASTCPPRIIPKDTALSKNMAPVFMVTGRPPAFTISIFSSPAEGVGPIPIMPFSE

SEQ ID NO: 22875 - DNA, 684 bp, Unknown
  Obtained from environmental sample
  misc_feature (1)..(684): n is a, c, g, or t
atggcggtaatcaaagcggagcaagtgataaaagactatggcttggacgggcaagttgtgcacgccttgcggggcattagtttggagtttgagaaaggggaatttgccgctattgctggtccttcggggagcggaaaatccacatttcttcacttagctggatgtttagataccttgacgggcggaaatatgttcgtggggggttccaatacgggaaatatgtcaaagcagcaactggctttgctcaggcggcagaatataggttttatttttcaggcgtataatttgattcccgtgctgtctgttgaggagaatatttcttttcctcttacattgctcggtattgataaaaaagatattaaagaacgcacagcgaaaattctgcgagatgttggacttgaagatatggcaaaacgccgcccaaaagagatgtctggtgggcagcagcagcgtgttgctattgcccgtgccttggtgaaaaagcccgcgcttattttagcagacgaaccaaccgcgaatttggattccgcaactggcaaggaaattcttgaactgatgctctctctaaataaaaccgaaggctgcacatttatcttttccacgcacgaccaaatggtgatggattacgctcgccgcattgtgcgtattagagatggggcaatagaaagcgatgaggttaagtga

SEQ ID NO: 22876 - protein, 227 aa, Unknown
  Obtained from environmental sample
  DOMAIN (33)...(219): ABC transporter
  misc_feature (1)..(227): Xaa is any amino acid
MAVIKAEQVIKDYGLDGQVVHALRGISLEFEKGEFAAIAGPSGSGKSTFLHLAGCLDTLTGGNMFVGGSNTGNMSKQQLALLRRQNIGFIFQAYNLIPVLSVEENISFPLTLLGIDKKDIKERTAKILRDVGLEDMAKRRPKEMSGGQQQRVAIARALVKKPALILADEPTANLDSATGKEILELMLSLNKTEGCTFIFSTHDQMVMDYARRIVRIRDGAIESDEVK

SEQ ID NO: 22877 - DNA, 330 bp, Unknown
  Obtained from environmental sample
  misc_feature (1)..(330): n is a, c, g, or t
gtggaaaagataaatgtgcagccttcggttttatttagagagagcatcagttcaagaatttccttgccagttgcggaatccaaattcgcggttggttcgtctgctaaaataagcgcgggctttttcaccaaggcacgggcaatagcaacacgctgctgctgcccaccagacatctcttttgggcggcgttttgccatatcttcaagtccaacatctcgcagaattttcgctgtgcgttctttaatatcttttttatcaataccgagcaatgtaagaggaaaagaaatattctcctcaacagacagcacgggaatcaaattatacgcctga

SEQ ID NO: 22878 - protein, 109 aa, Unknown
  Obtained from environmental sample
  DOMAIN (32)...(70): Protein of unknown function (DUF1602)
  misc_feature (1)..(109): Xaa is any amino acid
MEKINVQPSVLFRESISSRISLPVAESKFAVGSSAKISAGFFTKARAIATRCCCPPDISFGRRFAISSSPTSRRIFAVRSLISFLSIPSNVRGKEIFSSTDSTGIKLYA

SEQ ID NO: 22879 - DNA, 450 bp, Unknown
  Obtained from environmental sample
  misc_feature (1)..(450): n is a, c, g, or t
atgaaaaaagacctcggcctcatcgccatggcgaactcgaacgcatacgtcgcgaaaatcgcgatgggcgcgaacgaaatccaaaccatcaaggcgttcaaggaggcggggagtttccgcggcccctcgctcatcatcgcgtattcgccatgcatcgcgcacggcttcgacctcgcgaagggcggctcgcagtccaaggccgcggtcgcgagcggacactgggagctctaccgcttcgacccgcgccgccgggagaacggcgagagcccgctacagcttgacagcccgcccgcgacgatggagctccgcgattatctcctggccgaaacgcgctacaaggcgctcgcgacgggcgacccgaaacgcttcgaggaaatgctggccgtgcgcaaagccgagaacgaccgccgctccgggctcctgcgttatttggcggaatttaagggatag

SEQ ID NO: 22880 - protein, 149 aa, Unknown
  Obtained from environmental sample
  SIGNAL (1)...(17)
  misc_feature (1)..(149): Xaa is any amino acid
MKKDLGLIAMANSNAYVAKIAMGANEIQTIKAFKEAGSFRGPSLIIAYSPCIAHGFDLAKGGSQSKAAVASGHWELYRFDPRRRENGESPLQLDSPPATMELRDYLLAETRYKALATGDPKRFEEMLAVRKAENDRRSGLLRYLAEFKG

SEQ ID NO: 22881 - DNA, 492 bp, Unknown
  Obtained from environmental sample
  misc_feature (1)..(492): n is a, c, g, or t
ttgacagcccgcccgcgacgatggagctccgcgattatctcctggccgaaacgcgctacaaggcgctcgcgacgggcgacccgaaacgcttcgaggaaatgctggccgtgcgcaaagccgagaacgaccgccgctccgggctcctgcgttatttggcggaatttaagggatagccgcccgctatatcgcaataaagcttcacacgtcgagattgacgacggagagcgcgttctcgactatgaagtcgcgcctcggctcgactatatcccccatcagcatggagaaggtttcgtccgcggcggcggcgtcgtctatcttgacctgcagcaggctcctagcctcgggatccatggtggtttcccaaagctgctcggcgttcatctcgcccaagcccttgtagcggcttatcgccatgccggttttcgcggtgttgaaggcgagctccatcagcgcgagcggagaggcgacgggcagggtcttgtcccttcataa

SEQ ID NO: 22882 - protein, 163 aa, Unknown
  Obtained from environmental sample
  misc_feature (1)..(163): Xaa is any amino acid
MTARPRRWSSAIISWPKRATRRSRRATRNASRKCWPCAKPRTTAAPGSCVIWRNLRDSRPLYRNKASHVEIDDGERVLDYEVAPRLDYIPHQHGEGFVRGGGVVYLDLQQAPSLGIHGGFPKLLGVHLAQALVAAYRHAGFRGVEGELHQRERRGDGQGLVPS

SEQ ID NO: 22883 - DNA, 492 bp, Unknown
  Obtained from environmental sample
  misc_feature (1)..(492): n is a, c, g, or t
gtgaacgacattaccgatacgctgaaggtgacaataaaccgggtaaacggcagagatgttaccgttgcggcaaacgcgggctacatcaaaatttccccgcttgaagcggacggttacacgaaagacgggtggaacatatacggttttgggagaaatggttataacagatacggttttgacaaagacggctattacaaagacggttacaaggacggctataacagaaacggttatgacagaaatggttacgacaaagacggttatgacagaaaagggcgcaacagaaaagggcagacgcgggaggaaatcgcgcggcaagaacaggcacgtaaacggcaagcgaagatagatgagatgtggggaaacggctattggggatggcctattataggaggcggtctcaatatacaacctttgggcggattttttgaatttggaatggaaggaggcgctagtaaatggttaattgtcgatttcggactagtatcgtga

SEQ ID NO: 22884 - protein, 163 aa, Unknown
  Obtained from environmental sample
  misc_feature (1)..(163): Xaa is any amino acid
MNDITDTLKVTINRVNGRDVTVAANAGYIKISPLEADGYTKDGWNIYGFGRNGYNRYGFDKDGYYKDGYKDGYNRNGYDRNGYDKDGYDRKGRNRKGQTREEIARQEQARKRQAKIDEMWGNGYWGWPIIGGGLNIQPLGGFFEFGMEGGASKWLIVDFGLVS

SEQ ID NO: 22885 - DNA, 765 bp, Unknown
  Obtained from environmental sample
  misc_feature (1)..(765): n is a, c, g, or t
atggagtacgctggcacataccgaaataaaaacaatatcccgcgaaacggtcagaaggacattaaaaaaaacgagattaaaccttggcgcagccaggaatggtgtatcccgccggaaggggagccagagtttgtagcctcaatggaggatatactggatgtttacaccagaaaatatgatgaaaaccgcgttttgatatgcttggatgaagttccccggcagttgattggcgagacacggaagccggttccggcagggcgcggcaagaccgcccgttatgatacagagtacaaacgcaatggcacgtgtgtaatttttatgtttaccgcccccttgaaaaactggagaaggtcggaggtgacggagcgccggacaagtcttgattgggcgcggcagattaaaaaactgataacggttgattttccccatgctaaaaaaattgttcttgttatggataatctcaatactcatacaataggctccctgtataaagcatttcctcctgaagaagcaagatattatcgtaacaaacttgaaatccattacacgccgaaacatggcagttggctcaatatggcggagatagaaatcaatgtgcttgtgaatcacggcctttcaatacgggtttcctcaatgcagcagatgaaaaaagaagtcgccgcatggaacaaagaccggaatcaaaacgcaagtaaaatcaattggagattttcaacagaaaatgcgaggattaaacttaaacgactttatccacagtttgaatag

SEQ ID NO: 22886 - protein, 254 aa, Unknown
  Obtained from environmental sample
  misc_feature (1)..(254): Xaa is any amino acid
MEYAGTYRNKNNIPRNGQKDIKKNEIKPWRSQEWCIPPEGEPEFVASMEDILDVYTRKYDENRVLICLDEVPRQLIGETRKPVPAGRGKTARYDTEYKRNGTCVIFMFTAPLKNWRRSEVTERRTSLDWARQIKKLITVDFPHAKKIVLVMDNLNTHTIGSLYKAFPPEEARYYRNKLEIHYTPKHGSWLNMAEIEINVLVNHGLSIRVSSMQQMKKEVAAWNKDRNQNASKINWRFSTENARIKLKRLYPQFE

SEQ ID NO: 22887 - DNA, 471 bp, Unknown
  Obtained from environmental sample
  misc_feature (1)..(471): n is a, c, g, or t
gtgattcacaagcacattgatttctatctccgccatattgagccaactgccatgtttcggcgtgtaatggatttcaagtttgttacgataatatcttgcttcttcaggaggaaatgctttatacagggagcctattgtatgagtattgagattatccataacaagaacaatttttttagcatggggaaaatcaaccgttatcagttttttaatctgccgcgcccaatcaagacttgtccggcgctccgtcacctccgaccttctccagtttttcaagggggcggtaaacataaaaattacacacgtgccattgcgtttgtactctgtatcataacgggcggtcttgccgcgccctgccggaaccggcttccgtgtctcgccaatcaactgccggggaacttcatccaagcatatcaaaacgcggttttcatcatattttctggtgtaaacatccagtatatcctccattga

SEQ ID NO: 22888 - protein, 156 aa, Unknown
  Obtained from environmental sample
  misc_feature (1)..(156): Xaa is any amino acid
MIHKHIDFYLRHIEPTAMFRRVMDFKFVTIISCFFRRKCFIQGAYCMSIEIIHNKNNFFSMGKINRYQFFNLPRPIKTCPALRHLRPSPVFQGGGKHKNYTRAIAFVLCIITGGLAAPCRNRLPCLANQLPGNFIQAYQNAVFIIFSGVNIQYILH

SEQ ID NO: 22889 - DNA, 447 bp, Unknown
  Obtained from environmental sample
  misc_feature (1)..(447): n is a, c, g, or t
gtgcgctgtgccgagatgctcacaagggaaaacagcgccgaaaaacgaaaacgggcgcaagcgcttttgttagcagaacaagattacaccgacgacatgatagcagaccggacagggctgagccgccgcggcctggaacaattacggcaacgctttgtagaagaaggttttgaagtaacccttacaggaaaacctcgcggccacaggcagaaagcgcttggcggggcggatgaagcgcgtcttatcgcgttggtatgcagcccaaaacctgacgggaggacgcgttggacattgcggttgttggcggataaatggagtacgctggcacataccgaaataaaaacaatatcccgcgaaacggtcagaaggacattaaaaaaaacgagattaaaccttggcgcagccaggaatggtgtatcccgccggaaggggagccagagtttgtag

SEQ ID NO: 22890 - protein, 148 aa, Unknown
  Obtained from environmental sample
  misc_feature (1)..(148): Xaa is any amino acid
MRCAEMLTRENSAEKRKRAQALLLAEQDYTDDMIADRTGLSRRGLEQLRQRFVEEGFEVTLTGKPRGHRQKALGGADEARLIALVCSPKPDGRTRWTLRLLADKWSTLAHTEIKTISRETVRRTLKKTRLNLGAARNGVSRRKGSQSL

SEQ ID NO: 22891 - DNA, 429 bp, Unknown
  Obtained from environmental sample
  misc_feature (1)..(429): n is a, c, g, or t
atgagcgctgaaaactgggacgctgttcttcgcaccgatcttgacagtttttacaatgtacttcaccctcttataatgccgatctgccgtaaaaaacaaggcagaataattacactttcttcagtatcgggaattacgggaaaccgaggacaggtgaattacagcgccgcaaaagcgggaataatcggagcgacaaaggctttggcagtcgagcttgcaagccgttcaattacggtaaattgcatagcgccgggcataatcgaaaccgatatgatccgggaagcgccgcttgataaaattcttccgtccatacctatgggtagaatcgggaaacccgaagaagtcgccgcattggcagtattcctgctttctgaagaagcctcttatatcacaaggcaggtaatatctgtaaacggaggaatggtttaa

SEQ ID NO: 22892 - protein, 142 aa, Unknown
  Obtained from environmental sample
  misc_feature (1)..(142): Xaa is any amino acid
MSAENWDAVLRTDLDSFYNVLHPLIMPICRKKQGRIITLSSVSGITGNRGQVNYSAAKAGIIGATKALAVELASRSITVNCIAPGIIETDMIREAPLDKILPSIPMGRIGKPEEVAALAVFLLSEEASYITRQVISVNGGMV

SEQ ID NO: 22893 - DNA, 1188 bp, Unknown
  Obtained from environmental sample
  misc_feature (1)..(1188): n is a, c, g, or t
atgctgctcacaaacaaacaggcgcgtcaatttctgctgcgccgccacggcctgatcggggaacatgtattcaagggtaaagaaggcgtaatggcgttcattaaacgcctcggctgcttgcagttcgatcccgtggatctatgcggcaggaacgccgacatcatcctgcattcgcgggtcgcggattacacaaagccgatacttgaggagctgctttacaaagaacgccgtcttatcgactacttcgacaagaatttgtcaattttccctgtagaagattttccgatatttgtgagtgagaagccaagcggcggatacgccgaagcttacgacgcgcggggcggtgaagctgtgcagcagattaagccccacatccggcagttaatcgcggagcggggacatatcagcgtaaaagatgtcgatgttgacgagaagatcgtctggcactggggcactattgcttcgcttcctcgggccgcgcttgagtcgatgtactttcgcggggagcttgtcatacatcacaagacaggcacaaataagagttacgccctggcaaaagatattttgcccgcagaagtattgaacgctccgtcgcctttcaaaacagaggaggaacggcaggcgtggcttgtaaaacgccgcattggctctgtaggaatgctatggaacaggtcaagcgacgcgtttttgggctcgcggttaaaaccggcccagcgcacggcggcattcgggaaactgcttgcagacggagagatcttcgaggtcagcgtaaaagacataaaagagccgttttatgtccgcgaggacgagcgcggtgagcttgagggagtcctttccggcgtggaatgcaaaaaccgcgctgagttcattgcgccgctggacaaccttttatgggacaggcggctaattgaaacgcttttcgccttcgcgtacaaatgggaaatatacacgccgcaagaaaaacgaaaatacggcccttatacgctgccttttctatacggcgataattttgccggtcgcgttgacataacgcgcaggggcagagcgatcctcattaacaaggtctggacggaaaacggcaaatcattgacaggcaagattaaggccgcgttcgaggaatgcgcgaaacgcttcgcggagtttaactactgcgaaagagtcgagtcgcaggatactcaaaatatctaa

SEQ ID NO: 22894 - protein, 395 aa, Unknown
  Obtained from environmental sample
  DOMAIN (1)...(395): Protein of unknown function (DUF1006)
  misc_feature (1)..(395): Xaa is any amino acid
MLLTNKQARQFLLRRHGLIGEHVFKGKEGVMAFIKRLGCLQFDPVDLCGRNADIILHSRVADYTKPILEELLYKERRLIDYFDKNLSIFPVEDFPIFVSEKPSGGYAEAYDARGGEAVQQIKPHIRQLIAERGHISVKDVDVDEKIVWHWGTIASLPRAALESMYFRGELVIHHKTGTNKSYALAKDILPAEVLNAPSPFKTEEERQAWLVKRRIGSVGMLWNRSSDAFLGSRLKPAQRTAAFGKLLADGEIFEVSVKDIKEPFYVREDERGELEGVLSGVECKNRAEFIAPLDNLLWDRRLIETLFAFAYKWEIYTPQEKRKYGPYTLPFLYGDNFAGRVDITRRGRAILINKVWTENGKSLTGKIKAAFEECAKRFAEFNYCERVESQDTQNI

SEQ ID NO: 22895 - DNA, 384 bp, Unknown
  Obtained from environmental sample
  misc_feature (1)..(384): n is a, c, g, or t
atgcgcgaattttccgtgcgggtgaagcacaacccggtgcgggagatgatcgacggcaagcgcatcgtgatcgtggacgactccatcgtgcgcggcacgaccatgcgcacccgggtgcggcagctgcgcacgctcggcgcgcgggaagtgcactgccgcgtgagctgtccgcctgtccggcatccctgtttctacggggtgaatttcgcgaatcccgacgagctgctggcagtgaaccgctccctggaaaacatccgcaagatgctggaattggacagcctgcactttctttcccaggaaggcctgctccgggcggtggaaaatccaaaagcctactgcctcgcctgttttgacggcaactactgcataccgccggaagattga

SEQ ID NO: 22896 - protein, 127 aa, Unknown
  Obtained from environmental sample
  misc_feature (1)..(127): Xaa is any amino acid
MREFSVRVKHNPVREMIDGKRIVIVDDSIVRGTTMRTRVRQLRTLGAREVHCRVSCPPVRHPCFYGVNFANPDELLAVNRSLENIRKMLELDSLHFLSQEGLLRAVENPKAYCLACFDGNYCIPPED

SEQ ID NO: 22897 - DNA, 1044 bp, Unknown
  Obtained from environmental sample
  misc_feature (1)..(1044): n is a, c, g, or t
atgtcacatacagtcttggtcggcgcgcagtggggcgatgagggcaagggcaagatcgtggatctgctcagttcggacatcggcgtcatcgtccgtttccagggcggcaacaatgccgggcataccatcaaggtcggcggggaaaagcacattctgcaccttgtgccttccggcatcctgcatcctggaaccctgtgcctgatcggcaacggcgtggtgctggatcctgcggtgtttctggcggaagtggacaagctcgcggcaaggggcgtggatacctgtcccgcccggatcaagatcagcaacaagacccacctcatcatgccctatcataaggcgctggatgccgggcgcgaactgtccctcgccggccgcaagataggcacaaccggccgggggatcggcccctgttatgaggacaaggtggcgcgtgtgggcctgcgcgcggtggatctgctcaatcccgatctcgtgcgcgccaaaatcaccgccgccctgttggaaaaaaacgccctgctcaccgcgctctataaaaaagaggccatggatccggacagcgtgttcacggacctcatgcagctcgccccgcgcatcactccgtacctggcggacgtgacctccgagcttgaggccgcttgggccgccggaaaaagcgccctgttcgaaggcgcgcagggcctccatctggatatcgatcacggcacctatccctttgtcacctcgtccaataccgtggccgggaatgtctccgccggagcaggcatctccctgcgccgcatcgacagggtgatcggcgtggtcaaggcctataccacgcgcgtgggcgcggggcctttcccggtcgagttgtttgacgccacaggcgactatctgcaaagcaaggggcaggaattcggcgccaccacgggccgcaaacgccgctgcggctggctggacgtggtggttctgcgtgaaagcgcgcgtctgtgcggctttacggagttcgccctcacccagctgatgtgctggcgggtctcagggaaatcgcatctgcaccgcgtatga

SEQ ID NO: 22898 - protein, 347 aa, Unknown
  Obtained from environmental sample
  DOMAIN (3)...(345): Adenylosuccinate synthetase
  misc_feature (1)..(347): Xaa is any amino acid
MSHTVLVGAQWGDEGKGKIVDLLSSDIGVIVRFQGGNNAGHTIKVGGEKHILHLVPSGILHPGTLCLIGNGVVLDPAVFLAEVDKLAARGVDTCPARIKISNKTHLIMPYHKALDAGRELSLAGRKIGTTGRGIGPCYEDKVARVGLRAVDLLNPDLVRAKITAALLEKNALLTALYKKEAMDPDSVFTDLMQLAPRITPYLADVTSELEAAWAAGKSALFEGAQGLHLDIDHGTYPFVTSSNTVAGNVSAGAGISLRRIDRVIGVVKAYTTRVGAGPFPVELFDATGDYLQSKGQEFGATTGRKRRCGWLDVVVLRESARLCGFTEFALTQLMCWRVSGKSHLHRV

SEQ ID NO: 22899 - DNA, 525 bp, Unknown
  Obtained from environmental sample
  misc_feature (1)..(525): n is a, c, g, or t
ttgacaggcatagatccttttataagagaagacattttgtatccgtctggcgttagagtattgaagcaggaaataaacgaacataatggtaaatatgatttgattatgcttcatcactcatttgaacatatgccagaacctcataatgcattagagaatatttataaaattttaaatgacgatggtatattattaataagaattcccgtatcggattctttcgcttaccgaaaatatcaaaacaattggtatcaactggatgccccgcggcattttttcttgcatacaacaaaaagcatgagttatttagctaaaaataacggctttactataaaggacataatttatgattccacagagtatcaaattcttggcagtgaaacatattgcagagatataaggcttattgatggaataaaatttacatcggcgtatattcaagagtgtaaaaaaattgctaaatatcttaataaaataaaagatggtgatcaatgctgtttcattttaaagaaaaccgtttcttag

SEQ ID NO: 22900 - protein, 174 aa, Unknown
  Obtained from environmental sample
  misc_feature (1)..(174): Xaa is any amino acid
MTGIDPFIREDILYPSGVRVLKQEINEHNGKYDLIMLHHSFEHMPEPHNALENIYKILNDDGILLIRIPVSDSFAYRKYQNNWYQLDAPRHFFLHTTKSMSYLAKNNGFTIKDIIYDSTEYQILGSETYCRDIRLIDGIKFTSAYIQECKKIAKYLNKIKDGDQCCFILKKTVS

SEQ ID NO: 22901 - DNA, 474 bp, Unknown
  Obtained from environmental sample
  misc_feature (1)..(474): n is a, c, g, or t
ttgccgcccctgcgggaattccgcggttatcgcagtcgagacaatgaaccccaacaagaggcaaggatgcctcggcaatgtaattgccatgtaccattcaaggaggatcgtatgatcattaatcacaacctgagcgcaatgtttgcggacaggtccctcaaggttaccgaaaattacctttccaaaggcatggaaaagctctcttccgggcagcggatcaaccgcgccggagacgacgcttccggattggctgtatccgagaaactgcgggcgcagatccgcggcctcaatatggcctcgttcaacgcgtccaacggtatttctttcattcaagtcagcgaaggctatctccaggaatctgaagatattcttcaacgcatccgtgaattgtcggttcaggcttccaacggcatctacagcgatgaggacagggtatatatccaggtggaaattcccagctcgtcgatgaactga

SEQ ID NO: 22902 - protein, 157 aa, Unknown
  Obtained from environmental sample
  DOMAIN (64)...(157): Bacterial flagellin N-terminus
  misc_feature (1)..(157): Xaa is any amino acid
MPPLREFRGYRSRDNEPQQEARMPRQCNCHVPFKEDRMIINHNLSAMFADRSLKVTENYLSKGMEKLSSGQRINRAGDDASGLAVSEKLRAQIRGLNMASFNASNGISFIQVSEGYLQESEDILQRIRELSVQASNGIYSDEDRVYIQVEIPSSSMN

SEQ ID NO: 22903 - DNA, 456 bp, Unknown
  Obtained from environmental sample
  misc_feature (1)..(456): n is a, c, g, or t
ttgacgagatggactcaggcggagtgcttcctgattgaattccattccgattcgccgcaggatactttctctctgggacaacgcatagcttcttttctatccgcgggctccgtcgtcgctcttcagggagaactaggcagcggtaaaacatatcttgttaaaggcatcgcggaaggtttgggcgtaacggaaaccataacaagccccacttacacaataataagcgaatacaattcctctcccgccttataccatattgacgcataccgcctgtcaggcgacgaggattttgaaaactcgggcggacgcgaaacaattaattcaggcgggatttctttaattgaatggggcgaacgaatacaaaaatcaatgccaaaagacgcgattacggttaatattataataacaggaccttgttccagattaattcaaatagaaggattggaaaaattatga

SEQ ID NO: 22904 - protein, 151 aa, Unknown
  Obtained from environmental sample
  DOMAIN (22)...(143): Uncharacterised P-loop hydrolase UPF0079
  misc_feature (1)..(151): Xaa is any amino acid
MTRWTQAECFLIEFHSDSPQDTFSLGQRIASFLSAGSVVALQGELGSGKTYLVKGIAEGLGVTETITSPTYTIISEYNSSPALYHIDAYRLSGDEDFENSGGRETINSGGISLIEWGERIQKSMPKDAITVNIIITGPCSRLIQIEGLEKL

SEQ ID NO: 22905 - DNA, 678 bp, Unknown
  Obtained from environmental sample
  misc_feature (1)..(678): n is a, c, g, or t
atgggcaggactgaggtaacgcaggcgcagtaccaaacggtgacggggagcaatcccagtagttttagttcaagtcccgcgagcggggaggtacaggggaaccgtccggtggagcgggtgagttggtatgacgcgctggtgttctgcaacaagctgagcgttatggaaggattaagccccgcgtacagcatatcgggcagcactgacccgtccgactggggaacggtgcctacgagcagcaacagcacgtggaacgcggcggtaattgtcagcggcgctaacggctaccggttgccgacggaagcgcaatgggagtacgcggcgaagggagggagtgcgccggggaattacacgtatgcggggagcaatacggtaggcaacgtggcttggaacagtggtaacagcaacagcatgacgcatgaagtagggacgaaagccgccaacgggcttggattgtacgacatgaacggtaacgtgtgggagtggtgctgggactggtatgggaactactccagcggggcgcagacgaatccggttggagccagttctggcacgtaccgggtgctacgcggcgggagttggtacgacaatgcttcctacacgcgttcggtctatcggacctacacatacccgtactacagggactcctacgtcggcttccggctggtgcgcccctga

SEQ ID NO: 22906 - protein, 225 aa, Unknown
  Obtained from environmental sample
  DOMAIN (1)...(224): Domain of unknown function (DUF323)
  misc_feature (1)..(225): Xaa is any amino acid
MGRTEVTQAQYQTVTGSNPSSFSSSPASGEVQGNRPVERVSWYDALVFCNKLSVMEGLSPAYSISGSTDPSDWGTVPTSSNSTWNAAVIVSGANGYRLPTEAQWEYAAKGGSAPGNYTYAGSNTVGNVAWNSGNSNSMTHEVGTKAANGLGLYDMNGNVWEWCWDWYGNYSSGAQTNPVGASSGTYRVLRGGSWYDNASYTRSVYRTYTYPYYRDSYVGFRLVRP

SEQ ID NO: 22907 - DNA, 900 bp, Unknown
  Obtained from environmental sample
  misc_feature (1)..(900): n is a, c, g, or t
ttgcaccagcctggcagtttaacctccctgcaaccaacgccgcctgcggtggggtcaagcgtattcgttaccactccttcaccnctgcaaatcaaggttccgtcgcccagcgtggctgcgtacaaagcggcgtggagcgaatatgcggacaggattagcgcgttacccctcggcgacaccacaagcgttataaacatagcagccatccagggtgtaaccgctccagcaaacggtggaacacctgtgacaacgataaccgaaaatgcccagtacatgggaattgttacatggaacgggaatccgactacatttgccgccgcgacccagtacacagcgacgattacgctgacagcaaaaagtggctttaccctgacaggggtatcggcaaacttcttcactgtagcgggtgcaacggcaacgaatacggctaactcaggcgttattacggcggtgtttccggcgacagcgacaagtgtcatcaccatcgctgccattggcggcgtaaccgccccggtagccggagcaatcccaataacggcaattaccgaatcggcgcagtataccggaactgtagcatggtcaccggcggtagccacaaccttttcttttgcaacgcagtacaccgccaccattaccctcagtgccaaaagcggctatatcctgcaaggagtggcagagaacttctttaccgttgcgggggcagaaacggtaaccaacagcaccaattccggcgtaattaaggcggtgtttcctaatacctcagctgcgctacccattgacggaatggtctatgtacccggcggcagtttccagatggggaaagaactcgcctggtcaggcgacataaccccggtacacacggtaatgctgaccggttttacatgggcaggactgaggtaa

SEQ ID NO: 22908 - protein, 299 aa, Unknown
  Obtained from environmental sample
  misc_feature (1)..(299): Xaa is any amino acid
MHQPGSLTSLQPTPPAVGSSVFVTTPSPLQIKVPSPSVAAYKAAWSEYADRISALPLGDTTSVINIAAIQGVTAPANGGTPVTTITENAQYMGIVTWNGNPTTFAAATQYTATITLTAKSGFTLTGVSANFFTVAGATATNTANSGVITAVFPATATSVITIAAIGGVTAPVAGAIPITAITESAQYTGTVAWSPAVATTFSFATQYTATITLSAKSGYILQGVAENFFTVAGAETVTNSTNSGVIKAVFPNTSAALPIDGMVYVPGGSFQMGKELAWSGDITPVHTVMLTGFTWAGLR

SEQ ID NO: 22909 - DNA, 1281 bp, Unknown
  Obtained from environmental sample
  misc_feature (1)..(1281): n is a, c, g, or t
atgtacagcatcggccgaggcgcgactgtaagcggcagcgccataaccgttacatggacaacggttgcgggcgcgtccgggtacaccctgtaccgggcctccgcgtatgacggcgacatatacatattccgcactaacgccgactcgcctttgtacacggacacgggtctggcaaaaggcgagtattcttaccaggtccgggcgtacaacgatgacggggacgggtacatatcccttccctgggggccggttgagattgtaataggctccggcccgcccgctcccgcaaaaccgcagaatctccgcgccgctgtgaattacgcggctgagcccgccgttgtcgcccttgcatggaacggggcggctaacgcggattcttacaccgtgtaccgctcccttgacgacgaactgtacgaaagaatagggcaggcgccttcggcaacgtatcaagatgccgatacccgaagcggggaagcttactattaccgagtgcggggcaataacggggctcaggaagggtatctgtcggattcatgcgggccggttttactccgtcccggaaagcccgagataagcgtcaccgtctgggacaaaacggcggccgtaaactgggccaacgtgtacggcgcggtcgcctattttgtataccgctctgcggacggagtccaattccggcttataaccgaaagaggcgtatccggcgtttcacacgacgatccggggctggctgccggcacataccattaccgtgtggaagcgtccaacgccgcggggaggagcgccccctctgaaagcaagcaggcggtaataacgaccaacgcggccgcgccggttatcagttcccatcctgtcggcgggacctatctgccgaatgtccccgcgaaccctctgcgggtgcaggcgggcgtcaatgacggcgggtcattaacttaccagtggtacaggaacgacaccgacagtaacagcaggggaacggaaatttctggagcgaccggttcaagttacacgccgcccaccgccgccgccggaaccgtttactattacgtagttgtcaccaacatcaacaacagcgcgggcggcgttaaaaccgcgacaacaacgagcaataccgcgaagattgaggtaacgacaggatcaacggcacaaacagggatagtcattaacctgtatggcatggatgaatgggacacggtagggcagaccgcgcaggccgaagccggcgttaacaaggaattctccgtgtcgggaactaccttcgaccagggatctcggccgatctga

SEQ ID NO: 22910 - protein, 426 aa, Unknown
  Obtained from environmental sample
  SIGNAL (1)...(25)
  DOMAIN (1)...(78): Fibronectin type III domain
  misc_feature (1)..(426): Xaa is any amino acid
MYSIGRGATVSGSAITVTWTTVAGASGYTLYRASAYDGDIYIFRTNADSPLYTDTGLAKGEYSYQVRAYNDDGDGYISLPWGPVEIVIGSGPPAPAKPQNLRAAVNYAAEPAVVALAWNGAANADSYTVYRSLDDELYERIGQAPSATYQDADTRSGEAYYYRVRGNNGAQEGYLSDSCGPVLLRPGKPEISVTVWDKTAAVNWANVYGAVAYFVYRSADGVQFRLITERGVSGVSHDDPGLAAGTYHYRVEASNAAGRSAPSESKQAVITTNAAAPVISSHPVGGTYLPNVPANPLRVQAGVNDGGSLTYQWYRNDTDSNSRGTEISGATGSSYTPPTAAAGTVYYYVVVTNINNSAGGVKTATTTSNTAKIEVTTGSTAQTGIVINLYGMDEWDTVGQTAQAEAGVNKEFSVSGTTFDQGSRPI

SEQ ID NO: 22911 - DNA, 630 bp, Unknown
  Obtained from environmental sample
  misc_feature (1)..(630): n is a, c, g, or t
atggatgtttttttgaaatgccatgaaattaatgatttattaatttcaaaggattacaatgaagcacgagatgaattaataaaattattagattaccataaaactaacaatattaaatattctcctgtattaaataatttaattcgtgaagttggtttatatccctacatagaatatgagacatccaattggcaagaaaaatttgtttttgatgcatttaaaattgatgttggaaaacaacaagcaacattacatagggaacaatcatttttattaagagaattattggaaaataaaaatattgctgttagtgcaccaaccagttttggtaaaagttttgttattgatgcatttatacaacacaaaaatcctaaaaatgtagttttaatcgttccaacaatagcgctaatggatgaaacaagacgaagactttataaaaaattctctgataagtataaaattattactacgaccgatgttgaacttgttgaatataatattttaatttttccacaagaaagagccattaactatattaatcgtcttaaagaaattgatctgcttgtagttgatgaattttacaaggctagttctttatttgaatccacggatcgttcatctattttataa

SEQ ID NO: 22912 - protein, 209 aa, Unknown
  Obtained from environmental sample
  misc_feature (1)..(209): Xaa is any amino acid
MDVFLKCHEINDLLISKDYNEARDELIKLLDYHKTNNIKYSPVLNNLIREVGLYPYIEYETSNWQEKFVFDAFKIDVGKQQATLHREQSFLLRELLENKNIAVSAPTSFGKSFVIDAFIQHKNPKNVVLIVPTIALMDETRRRLYKKFSDKYKIITTTDVELVEYNILIFPQERAINYINRLKEIDLLVVDEFYKASSLFESTDRSSIL

SEQ ID NO: 22913 - DNA, 921 bp, Unknown
  Obtained from environmental sample
  misc_feature (1)..(921): n is a, c, g, or t
atggaaaatattattgataataaattaaaatttgacattntgttaaatgagtctctatctaacatgaatccaaacaaacatattttaagcatagtaaatgattttgaagacggaaaatggagagattcaaaatttgacagctatatatgggataatatagctaagacggcattaagtgaaaaagaaagaaaatgtcttgtgagggatagttatagcgaattagttgcctcagcaaaaaacctgcgacttactgattctgaaaatgatgaaaaaggtcaaggcagtgaattagctgaaattattttatatggaattatgaaagatcattataatgcccttccagttgttccaaaaatattttataaacaaaatacccaagattatgcaaaaggtgcagatagtgttcatattgttattgaaggtaatgatttttctctgtggttcggagaagcaaaattttacaatagtatagaagatgctcgtttatcatcaattatagaatcaattagaaattctctgaaaagtgataagattaaaaaagaaaatagtattattcgaaatgtaactgatattgataacctagatataaaaccagacatcaaagatgtcattaaagaatctttgaaaaattctgaatcaattgattttttgaaacctaaaatacatataccaatttttattttgcatgaatgtgaaaaaactaaaaaatgcagtgaactttctacatattataaaacagaaataatcaatttccataaagaaagagctactactttttttaaaaaacaaactgataaactatctactgaaatatttaaatatgaagaaatcaaattccatttgattctttttccagttcctgagaaaaagccaattgtagagcgctttattcaaaaagcaattttttttaaaaacacatag

SEQ ID NO: 22914 - protein, 306 aa, Unknown
  Obtained from environmental sample
  misc_feature (1)..(306): Xaa is any amino acid
MENIIDNKLKFDIXLNESLSNMNPNKHILSIVNDFEDGKWRDSKFDSYIWDNIAKTALSEKERKCLVRDSYSELVASAKNLRLTDSENDEKGQGSELAEIILYGIMKDHYNALPVVPKIFYKQNTQDYAKGADSVHIVIEGNDFSLWFGEAKFYNSIEDARLSSIIESIRNSLKSDKIKKENSIIRNVTDIDNLDIKPDIKDVIKESLKNSESIDFLKPKIHIPIFILHECEKTKKCSELSTYYKTEIINFHKERATTFFKKQTDKLSTEIFKYEEIKFHLILFPVPEKKPIVERFIQKAIFFKNT

SEQ ID NO: 22915 - DNA, 471 bp, Unknown
  Obtained from environmental sample
  misc_feature (1)..(471): n is a, c, g, or t
gtggcgcggatttatggcacggaaacaagggaaataaacaaggcgatcaagaacaatcccggaaaattcccaacaggttatatcattgaagccgacaaggacgaactggtggaaaatttccaccggttcaaaaacctgaaacattctaccgtacaaccaaaggcatttaccgaaaaaggcttatatatgcttgcaactatcctgaaaagcccgcaagcgacagcggcgaccattgccattattgaggcttatgcgaaactgcgtgaattgtcgcaaacaatcgcaaagctggcagacgccaaagaaaaacccgaacaacaatctctcatgcaaagaagcggagaaattttctctgaattgatagccaacgatatgcctgtatcgggaacagaaaccacacttgaaataaattttgcagtaatgaaattcaagcacaccattaaaaaagagaagaagaagaatgaacagtga

SEQ ID NO: 22916 - protein, 156 aa, Unknown
  Obtained from environmental sample
  misc_feature (1)..(156): Xaa is any amino acid
MARIYGTETREINKAIKNNPGKFPTGYIIEADKDELVENFHRFKNLKHSTVQPKAFTEKGLYMLATILKSPQATAATIAIIEAYAKLRELSQTIAKLADAKEKPEQQSLMQRSGEIFSELIANDMPVSGTETTLEINFAVMKFKHTIKKEKKKNEQ

SEQ ID NO: 22917 - DNA, 936 bp, Unknown
  Obtained from environmental sample
  misc_feature (1)..(936): n is a, c, g, or t
ttgtccatagactcaaccatacattcattgcgcggcgttttggaaccctggttcgcagtgcagtatttagattcagaaaatatctcaaaagaaacgctaaaaaaatccaatgccctgattgtgcgctcaaccagaaaatacggagcccaaaccctgctcggcaccgatgtaaaattcataggaacagtcacctccggctacgagcacatagacaccgagttctgcaagcagaacgggattttcctctccaccgcgcacggcagcaacgcagaatccgttgctggctacgtatctgccgccttggttgaaatctcaaaaaaaacacgcaggcccctgaacgagcttgttcttggaattgtgggagttggcgcggttggcacctgcgtaaaaaaaaacgcggagaatttcgggatgcgccttttgctccgcgaccccccaaaaaacctcagcgatgatatttttgccgcagacataataactctccacaccccccttgaaacaggcggcgcgcacccaacttggcaccttgcaaacgaagaattttttggcaaaacgaaaaaggggacatggcttataaacgcggcgcgcggcgcggtgtgcgatagcgaggctttgcggagtgcgctgcagtcggggcatttgggcggtgcggtaatagacacctgggaaaacgagccaaacatagacgcttcccttttgccccttatagagatagcaacgccgcacatagctggccacagcgcagaggcaaaaataaacgccagcagaatggtagcgaactcgttgctcaaattctttggcatagagggcgaagcgagccttggcgagtgccccaaaaaaacaggaacctactcaatccgcgcagacgacttggcttttaggaaaaaccccacgcttttcgcagaaataagaaacagctacgaaagaattatgtaa

SEQ ID NO: 22918 - protein, 311 aa, Unknown
  Obtained from environmental sample
  DOMAIN (1)...(276): D-isomer specific 2-hydroxyacid dehydrogenase, catalytic domain
  misc_feature (1)..(311): Xaa is any amino acid
MSIDSTIHSLRGVLEPWFAVQYLDSENISKETLKKSNALIVRSTRKYGAQTLLGTDVKFIGTVTSGYEHIDTEFCKQNGIFLSTAHGSNAESVAGYVSAALVEISKKTRRPLNELVLGIVGVGAVGTCVKKNAENFGMRLLLRDPPKNLSDDIFAADIITLHTPLETGGAHPTWHLANEEFFGKTKKGTWLINAARGAVCDSEALRSALQSGHLGGAVIDTWENEPNIDASLLPLIEIATPHIAGHSAEAKINASRMVANSLLKFFGIEGEASLGECPKKTGTYSIRADDLAFRKNPTLFAEIRNSYERIM

SEQ ID NO: 22919 - DNA, 360 bp, Unknown
  Obtained from environmental sample
  misc_feature (1)..(360): n is a, c, g, or t
atgttagtagaattattaaaaagcaaaatccatagagctacagtaaccgatgcttgcttggattatgaggggtcaataacaatagacaagaagctcatgcaggcggctgggctttttgagcacgaaaaggtacatgtattgaatttgaacaatggagaacgttttgaaacttatgtaatagaaggtaaatcaaaatccggcactgtatgcttgaatggagcagctgcacgccttgtgcaaaaaaacgatttggtgataatagctgcttatgtatctttaacaccagaagaagcaaagagctggcaacccaaggttgtaaaagttaacgcaaaaaataaaattatggatagtaaaaaataa

SEQ ID NO: 22920 - protein, 119 aa, Unknown
  Obtained from environmental sample
  DOMAIN (1)...(116): Aspartate decarboxylase
  misc_feature (1)..(119): Xaa is any amino acid
MLVELLKSKIHRATVTDACLDYEGSITIDKKLMQAAGLFEHEKVHVLNLNNGERFETYVIEGKSKSGTVCLNGAAARLVQKNDLVIIAAYVSLTPEEAKSWQPKVVKVNAKNKIMDSKK

SEQ ID NO: 22921 - DNA, 705 bp, Unknown
  Obtained from environmental sample
  misc_feature (1)..(705): n is a, c, g, or t
atgaaaaaattactccttttatcgtcgttgtttgttgcgctgttttcttgcgctaaaccctctccccaaagctctgaggcactagctgccgagattgccgaagtcaaaagcgtactgaaatacgttattgaaagaggaatgggagcctcttatgagcaaatcaagaatcagattgaaaaagccgacaaaatctgggatttaaaaattgatgaaagcccttccacaggcgacccaaaggcaaagatagtgatagttgaattcactgaatttcaatgcccttattgcagtgcaattgctccagtgctggatactctagtcaatgttaaatatccgggtaaaatcaggcttgtgtacaagaacttcccgctcagcttccacgcaaatgcgccagcagcagcagcagcggcattggcagctcataagcagggcaaattctgggaatatcgctgggcacttgctccgcacttccagagcttggtggattccacattcatagctactgccgaaaaggttggcctgaatatagagcaattcaaaaaagacatggttttggatgatgaaaagaaagccataatagctcgcgatatgcagctcggagcagaagctggagttcagggaacaccaaacttctatattaacgggaaaagacaggacaggtttagcccttctcttgttgattcgcttgtaaaggaactttataaataa

SEQ ID NO: 22922 - protein, 234 aa, Unknown
  Obtained from environmental sample
  SIGNAL (1)...(18)
  DOMAIN (83)...(225): DSBA-like thioredoxin domain
  misc_feature (1)..(234): Xaa is any amino acid
MKKLLLLSSLFVALFSCAKPSPQSSEALAAEIAEVKSVLKYVIERGMGASYEQIKNQIEKADKIWDLKIDESPSTGDPKAKIVIVEFTEFQCPYCSAIAPVLDTLVNVKYPGKIRLVYKNFPLSFHANAPAAAAAALAAHKQGKFWEYRWALAPHFQSLVDSTFIATAEKVGLNIEQFKKDMVLDDEKKAIIARDMQLGAEAGVQGTPNFYINGKRQDRFSPSLVDSLVKELYK

SEQ ID NO: 22923 - DNA, 1149 bp, Unknown
  Obtained from environmental sample
  misc_feature (1)..(1149): n is a, c, g, or t
ttgagaaaccccgatgtgaaaaaaaacatcctgctgcgttcaaaagtaatcagctttttacgagcaaagatggaagagcttaagtttattgaaattcaaacgccgatacttacctcgtcctcgccggaaggggcgcgggattaccttgttcccagccgcaagcaccatggcaaattttacgcgctgccgcaggccccgcagattttcaaacagctcctcatggtttcgggctttgaccgctattaccagatcgccccctgcttccgcgacgaggacgcacgcgccgatcgctctcccggagagttttaccagcttgattttgaaatggcttttgcggatcaggaagatgttttccatgtggcggaaacggtaatgtacagcgtttttaaatctttctcggataaaatggtaagcccactgcctttcataagaattccctacgccgaagcgatgctcaaatacggaactgacaagcccgacctccggaaccccctcgttattgccgaccttaccggctttttcgcagatgtggaattccagccttttaaaaacatccctgtacggggaatagccgtgaaaagagccgcgcttcaatcaaaatccttttttgagaaaatgctggcctttgcaatggagattggcatgaagggcctcggttacatctccgttctggaagacggcagtcttaagggacctatcgtcaaattcctttcagcggaaaaacaggacgctctcaaaaaagatctctgccttgaaataaacgacaccctgttttttattgccgatgcgcccgacagggttaacaaccttgcgggacaaatccgcacggcattgggaaatcagttgaaccttatcaaaaaagacaggttcgaattctgctttatcgtggacttcccgatgtacggcataaatgaagaagcctcggcttctactgaggaagccggatctgttgaatttacccacaacccgttctccatgccacagggcggccttgaggcccttgaaacacagcctcccctcgacatccttgcctggcagtacgacattgtgtgcaacggtgtggagctatcgtccggcgcagtccgtaaccacctgcctgaagtaatggcaagagccttgaaattgcaggatacacccagaccgatatga

SEQ ID NO: 22924 - protein, 382 aa, Unknown
  Obtained from environmental sample
  DOMAIN (182)...(271): GAD domain
  misc_feature (1)..(382): Xaa is any amino acid
MRNPDVKKNILLRSKVISFLRAKMEELKFIEIQTPILTSSSPEGARDYLVPSRKHHGKFYALPQAPQIFKQLLMVSGFDRYYQIAPCFRDEDARADRSPGEFYQLDFEMAFADQEDVFHVAETVMYSVFKSFSDKMVSPLPFIRIPYAEAMLKYGTDKPDLRNPLVIADLTGFFADVEFQPFKNIPVRGIAVKRAALQSKSFFEKMLAFAMEIGMKGLGYISVLEDGSLKGPIVKFLSAEKQDALKKDLCLEINDTLFFIADAPDRVNNLAGQIRTALGNQLNLIKKDRFEFCFIVDFPMYGINEEASASTEEAGSVEFTHNPFSMPQGGLEALETQPPLDILAWQYDIVCNGVELSSGAVRNHLPEVMARALKLQDTPRPI

SEQ ID NO: 22925 - DNA, 762 bp, Unknown
  Obtained from environmental sample
  misc_feature (1)..(762): n is a, c, g, or t
ttgactttaaccccgccgtcatattattttcatagttctatggacacaaaatacatatttgtgacgggcggcgttgtttcaggcctcggcaagggtatcacggcggcgtctctggggcggctgctcaagcagcgcgggcttaaagtggcggctcagaagctcgatccgtacatgaacatagaccccggaacgatgagcccgttccagcacggcgaggtcttcgtcaccgacgacggcgccgagacggacctcgacctcggccactacgaacggttcatcgacgaaaacctgacgaagttctcaaacctgacgtccggcaaggtcttttggaacgtactcgaacgcgagcgcgcaggcgggtatttgggcggcaccgtgcaggtcatcccgcacgttacggaggttatcaaagagttcatctattccggcgcaaagggctcaggcgccgacgtccttatcaccgagatcggcgggacgaccggcgacatcgagagccagccgtttttggaggcgatacgccagattgcgctcgaaaacccgcgccaaaactgcctgttcatacacgtaacgctcgttccgtacctcanatgctccggcgagcataagtcaaagccgacgcagcactcggtgaaggaactccgcgccatgggtatctccccggacgtcatcatcgcccgcgccgacgaacctctaagccgcggcatcaaggaaaaaatcgctctcttctgcaacgtcaaaccggattgcgtcatagaaacatga

SEQ ID NO: 22926 - protein, 253 aa, Unknown
  Obtained from environmental sample
  DOMAIN (16)...(253): CTP synthase N-terminus
  misc_feature (1)..(253): Xaa is any amino acid
MTLTPPSYYFHSSMDTKYIFVTGGVVSGLGKGITAASLGRLLKQRGLKVAAQKLDPYMNIDPGTMSPFQHGEVFVTDDGAETDLDLGHYERFIDENLTKFSNLTSGKVFWNVLERERAGGYLGGTVQVIPHVTEVIKEFIYSGAKGSGADVLITEIGGTTGDIESQPFLEAIRQIALENPRQNCLFIHVTLVPYLXCSGEHKSKPTQHSVKELRAMGISPDVIIARADEPLSRGIKEKIALFCNVKPDCVIET

SEQ ID NO: 22927 - DNA, 1101 bp, Unknown
  Obtained from environmental sample
  misc_feature (1)..(1101): n is a, c, g, or t
gtgattgaccgcggcagcgtggacactcctttgcagaccggtacaatttccgtagacgcgatgatcccaatagggcgcggtcagagggaactgattatcggcgacagacagacaggcaagacggcgatctccatcgacacaatcatcaatcaaaagggaaagaacgttatctgcgtgtactgcgcgatagggcagaaatcttcctcgacagcggcgcttatcggaaaacttgaggaacacggcgcgatggactacacctttgttgtgttagcgtccgcctcggattcagccgcccttcaatacatagccccatacgccgccgtcgcgatggcggaacattttatgcgtcagggaaaagacgcgcttgtgatatacgacgatctttccaagcacgccgtcgcctaccgcacaatctccctgcttctgcgccgcccgcccggacgcgaagccttccccggcgacgtgttctatctgcactcgcggcttttggaacgcgccgtaaaactctcccccgaaaaaggcggcggctccatcacagcccttcccatagtcgagactcaggcgggagacatttcgtcttacattcccactaacataatttcaattacggacggtcagatcttccttgattccgaattgttcaattcgggattccgtcccgctatcgacgttggtctttcggtaagccgcgtcggaggctccgcccagacaaaagcgatacgcaagatttccggcagaataaggctggacctggcccagtaccgcgagatggcggcgttcgcgcagttcggcagtgatttggacaaggccacccaggacaaactcgcgcagggagagcggcttatggaagtgctgaaacagccccagctttcgccctacccgcttgttgaacagatagcgattcttttcctcgccgtggaaggttatcttcttgacgtcaagactgaaaatgtttcaacgtttgtaaaagaatttttgtcgcacttaaaaagccagaaacaggatctgttgaagggtatcgcggatacgggaatcgtttccaaagaacaggaagacgaattgcgcctaaccgtgcaaaattttaaaagagcggggaaataa

SEQ ID NO: 22928 - protein, 366 aa, Unknown
  Obtained from environmental sample
  DOMAIN (241)...(345): ATP synthase alpha/beta chain, C terminal domain
  misc_feature (1)..(366): Xaa is any amino acid
MIDRGSVDTPLQTGTISVDAMIPIGRGQRELIIGDRQTGKTAISIDTIINQKGKNVICVYCAIGQKSSSTAALIGKLEEHGAMDYTFVVLASASDSAALQYIAPYAAVAMAEHFMRQGKDALVIYDDLSKHAVAYRTISLLLRRPPGREAFPGDVFYLHSRLLERAVKLSPEKGGGSITALPIVETQAGDISSYIPTNIISITDGQIFLDSELFNSGFRPAIDVGLSVSRVGGSAQTKAIRKISGRIRLDLAQYREMAAFAQFGSDLDKATQDKLAQGERLMEVLKQPQLSPYPLVEQIAILFLAVEGYLLDVKTENVSTFVKEFLSHLKSQKQDLLKGIADTGIVSKEQEDELRLTVQNFKRAGK

SEQ ID NO: 22929 - DNA, 354 bp, Unknown
  Obtained from environmental sample
  misc_feature (1)..(354): n is a, c, g, or t
gtgttcctcaagttttccgataagcgccgctgtcgaggaagatttctgccctatcgcgcagtacacgcagataacgttctttcccttttgattgatgattgtgtcgatggagatcgccgtcttgcctgtctgtctgtcgccgataatcagttccctctgaccgcgccctattgggatcatcgcgtctacggaaattgtaccggtctgcaaaggagtgtccacgctgccgcggtcaatcacgggcgcggcgggcgattcaatgggcaggtattcttcggcggttatcgggcctttgccgtctacggcttgccgagggggttaccactcgccgaactcgcgataagccnnnnttaa

SEQ ID NO: 22930 - protein, 117 aa, Unknown
  Obtained from environmental sample
  misc_feature (1)..(117): Xaa is any amino acid
MFLKFSDKRRCRGRFLPYRAVHADNVLSLLIDDCVDGDRRLACLSVADNQFPLTAPYWDHRVYGNCTGLQRSVHAAAVNHGRGGRFNGQVFFGGYRAFAVYGLPRGLPLAELAISXX

SEQ ID NO: 22931 - DNA, 564 bp, Unknown
  Obtained from environmental sample
  misc_feature (1)..(564): n is a, c, g, or t
atgtttcacgcggagcgttgggcgggggcgtttttaagcgtctcaggcgaaaccgcaaacgaagcgtttttgtgcctcaaggcgcttgccgcgcagataaaaaccgcgcagggcgtactcatggggcgcagcgcctcaggcaggcttgaaaaaatactcagggaaagcgcggcggaaacccatactgaaactccggcggtagagtacgctatacgcttcctgtgcctgttagttgaaaaaaattgtttcaggtatgtcaatttacttctgcaaaagatcgaacaggatcttgacgagaaaaacaaaataatcaacgccgttctggaatccgcgtttcccgtggaaagcggctttgaggaatcattaacgcggattataaaagacaagacgggcgcttccggcgttaaaatgaaaacttgcgtaaagcctgaactgctgggcggttatattctgcggattggcagcctgtatattgacgcgagtctgaaggggcagttggaaagcctggcttttcatttaggcgcgcctaagttaggcggggatacaggaggcggcaatggctaa

SEQ ID NO: 22932 - protein, 187 aa, Unknown
  Obtained from environmental sample
  DOMAIN (4)...(173): ATP synthase delta (OSCP) subunit
  misc_feature (1)..(187): Xaa is any amino acid
MFHAERWAGAFLSVSGETANEAFLCLKALAAQIKTAQGVLMGRSASGRLEKILRESAAETHTETPAVEYAIRFLCLLVEKNCFRYVNLLLQKIEQDLDEKNKIINAVLESAFPVESGFEESLTRIIKDKTGASGVKMKTCVKPELLGGYILRIGSLYIDASLKGQLESLAFHLGAPKLGGDTGGGNG

SEQ ID NO: 22933 - DNA, 1347 bp, Unknown
  Obtained from environmental sample
  misc_feature (1)..(1347): n is a, c, g, or t
atgaatataaacgaattaatagaaagaatagattccaataactcaacaaaaatatttaacgagctttacggtgagaatgaagctgataacgtaagacagcgttataagaaacttataacagaagtgagagccgataaacatttttgcgaaacggaaaatttgcgtgtctttagcgcacccggaagaactgagcttgccggtaaccacacagatcataatcaaggtaaagtgctggcagcttccattcaactggacaatgttgctattgtacagaaaagaaacgataatattgttttcttccgttcaacaggtttccccgatgtaacggttaaattaacagataaaaacggcaatcctgatttacagtcaaaacctgaagaagaaggaacaacagaagccctgatcaggggtattgccactgaatttaaaaagcggggctgcagcattaacggattttcagctaatgcggattcaactgtgtttcccggttcggggttgtcgtcatcagcggcgcttgaaacgctcttgtgccggattttcgactccctgtacggcgaaagaagacgcagttcttttgagatcgcacaaatcggacaaatcgcgggaaataaatactttgggaaaccctgcggattaatggatcaggcggcgtgcgcctgcggcggcgctgtagcgattgatttcgccgattcttcacgccccgtaataaagcaaataaattttgatcccgccgccgccggttatgctctttgtgtagtgaacacaggcggcagtcactccgatcttaccgccgattacgcttccattccggcggaaatgaaatccgtcgccgcgtttttcggcaagtcagtacttggagagttggaaaaagaaaccgtactttcccgcgccgccgaattgcgaaaatcattgggagacagggcttttttacgcgccattcattttttcaacgaaaacgaaagagtagacgcaatgaccgcaattttattggaaatggaaaagtccgcaacagccgccgacaaacaacggacgttaagccgctacttggatttggttaatgaatcaggcgattcctcatgggagtttttacaaaacgtattctcccctacccgccccgaagctcaaggcatcgccgcggctcttgcgctgacaaaagattttttccgtaagcaaaatttgcacggcgcgtgcagagtccacggcggcggttttgccggaaccattcaagcctatgtccccgtagacgcaataaacgcctaccgcgcgcacatcgaagccgcattcggcgcaaactcgctgacggtattgcggataagggctaggggcgcggtggagtttgagttttaa

SEQ ID NO: 22934 - protein, 448 aa, Unknown
  Obtained from environmental sample
  DOMAIN (153)...(222): GHMP kinases N terminal domain
  misc_feature (1)..(448): Xaa is any amino acid
MNINELIERIDSNNSTKIFNELYGENEADNVRQRYKKLITEVRADKHFCETENLRVFSAPGRTELAGNHTDHNQGKVLAASIQLDNVAIVQKRNDNIVFFRSTGFPDVTVKLTDKNGNPDLQSKPEEEGTTEALIRGIATEFKKRGCSINGFSANADSTVFPGSGLSSSAALETLLCRIFDSLYGERRRSSFEIAQIGQIAGNKYFGKPCGLMDQAACACGGAVAIDFADSSRPVIKQINFDPAAAGYALCVVNTGGSHSDLTADYASIPAEMKSVAAFFGKSVLGELEKETVLSRAAELRKSLGDRAFLRAIHFFNENERVDAMTAILLEMEKSATAADKQRTLSRYLDLVNESGDSSWEFLQNVFSPTRPEAQGIAAALALTKDFFRKQNLHGACRVHGGGFAGTIQAYVPVDAINAYRAHIEAAFGANSLTVLRIRARGAVEFEF

SEQ ID NO: 22935 - DNA, 1197 bp, Unknown
  Obtained from environmental sample
  misc_feature (1)..(1197): n is a, c, g, or t
atgaaaaatattaatacagataatcccaatcccgcacaacgcgcggtaagcgccgaggaactgcttttacgttctccgcgcagccgcgcttttattaccggcagcgaggcggtgtccgaagcggtgaagcgggggaatgtcgatatgtctatcgcctaccctatcacgccgcagagcgagagtatgcaccttataggcgacttgtacgcgcaaggttacgtgcgcgattattaccgcgctgagaatgagtttgccgtgatggcggctgtccacggggcggcgctggggggcgggcgcgtctttacggccaccagcgggccgggaacgctgcgggctatggagatgttcccggtgtgggcgggatcgcggcagcctatcgtctgcgctttcatgtgccgcggcgtggcgttgccgccctccatacagccggagaatattgagatggcgtttctcttggacacgggaatgatcatgttccacgctgagaacgcccaagatttcttcgacatgatattggccggctacgcgatagcggagcaaccggaggtgcacctgccggtgggcgtcttcgccgacggcttcttcgtgacgcacacgcgcgaggtggtaatgctcccgccggacgatataaaattacacgcctattcgccggacattgcgcctatacagcctttcgacatggatcacccgccggtacgccaaactagagatccgctgatgaacaagagcaacttcacctcctacgccgccagcgcaagctggcatcaggagatactggcggcggcggagcgggcgcgaaagcacatcgacaaattcatggggggattgacagaggtcgaaaaccccgacgcggagataatgatagcagcctccggcacagccgcgtcgcaaagcagagaggctatacgagttttggaacgagagggaataaaggcaggcctgataaaagtgaagtccgtccgcccattcccaacaagggaaattatcgcggcgacggaaaaagccaagttgatagtagtaccggagttcaacgcgggcgggtggttggcgagagaagtcaaggcgtcattaaacaataacgaccgagtattagcaggcccaagggtcttcggcggaatggcaatgccgagcgaagtcattgtaggggaaataaagagggcgatggagggaggatcacaatgtcaatcaacgcggtga

SEQ ID NO: 22936 - protein, 398 aa, Unknown
  Obtained from environmental sample
  DOMAIN (275)...(388): Transketolase, C-terminal domain
  misc_feature (1)..(398): Xaa is any amino acid
MKNINTDNPNPAQRAVSAEELLLRSPRSRAFITGSEAVSEAVKRGNVDMSIAYPITPQSESMHLIGDLYAQGYVRDYYRAENEFAVMAAVHGAALGGGRVFTATSGPGTLRAMEMFPVWAGSRQPIVCAFMCRGVALPPSIQPENIEMAFLLDTGMIMFHAENAQDFFDMILAGYAIAEQPEVHLPVGVFADGFFVTHTREVVMLPPDDIKLHAYSPDIAPIQPFDMDHPPVRQTRDPLMNKSNFTSYAASASWHQEILAAAERARKHIDKFMGGLTEVENPDAEIMIAASGTAASQSREAIRVLEREGIKAGLIKVKSVRPFPTREIIAATEKAKLIVVPEFNAGGWLAREVKASLNNNDRVLAGPRVFGGMAMPSEVIVGEIKRAMEGGSQCQSTR

SEQ ID NO: 22937 - DNA, 594 bp, Unknown
  Obtained from environmental sample
  misc_feature (1)..(594): n is a, c, g, or t
ttgcgcgaagctgtcntgaacgctgtcgtgcataaggattatagcactggcaaccctattcatataaaaatttacgatgacaaagtcgtcatatataacgactgccagataccaccaaatattgagccagaaagcctgctatcaggcgtccgctcgaatcctcataacccgctgattgcaaacggatttttccgttcgggacagattgaggcatgggggcggggcatcgaaaagatgagaataggctgcattgccgatggtctaccggaaccggaatttacgatactgccaaatgtgttcattatttgctttcacattcggaataacaataaagtgttaaatagcaatgaaatggtaagtgattatcaaggtaattacttcggtataaactacggtttaaataaaacacaacaaaaaattgttgaattgatgataactacccctgaaataaccgcagaacagatagccaaggcaatcggtttaacaaaatgccagatagagacagacatcagcaaactgaaggcttccggcattgtggaacgcataggcgcgcgcaagaatggtcggtgggtagttaagcaaaaagaaaattag

SEQ ID NO: 22938 - protein, 197 aa, Unknown
  Obtained from environmental sample
  misc_feature (1)..(197): Xaa is any amino acid
MREAVXNAVVHKDYSTGNPIHIKIYDDKVVIYNDCQIPPNIEPESLLSGVRSNPHNPLIANGFFRSGQIEAWGRGIEKMRIGCIADGLPEPEFTILPNVFIICFHIRNNNKVLNSNEMVSDYQGNYFGINYGLNKTQQKIVELMITTPEITAEQIAKAIGLTKCQIETDISKLKASGIVERIGARKNGRWVVKQKEN

SEQ ID NO: 22939 - DNA, 753 bp, Unknown
  Obtained from environmental sample
  misc_feature (1)..(753): n is a, c, g, or t
atgcttttcttaagaaaaatcaaatatgtcatgcttaaatttaaccactatcttgaacggttaatacccgttacaacgccgttcagcatagtaatcggttttttactacctttcgttttttctgttttaaggccgtatgttccgcttcttttcggttttatgactttttcaggcgcgttaaaattgcgcgccgcggaacttggaaagagcgtccgtagtcctttaccgattctgttattctttgccgccgcccatgttttaatgcctgttcttgccatgtttgtttcgtcgcggttctttgcaaataacgacgttgtttcaggttttgtccttttgttttccggtcctaccgccgtttccggttttatctgggtattgatccttaaaggggatatggccctttgcctgacgctgattctgcttgatacccttcttgcgcccgttgttgttcccggtactatatcggtactgatgggcgcaaaaacaacaatggatatgagcggtatcgcgctctcccttttgtttatggtagtaattcccacaatcatcggggttacggtaaatgaaaccagcaagggaaagatacccgccgccatatgctcttactttgatccttttgccaaaatatgcctgatgcttgtaattgcaactaacgcagcggttgtcgcgcccgccgttaaattaacaaacccgcttatctggcaggttgggtttcttgtaattattcttacttccgccggtgtcctgatataa

SEQ ID NO: 22940 - protein, 250 aa, Unknown
  Obtained from environmental sample
  DOMAIN (48)...(225): Sodium Bile acid symporter family
  misc_feature (1)..(250): Xaa is any amino acid
MLFLRKIKYVMLKFNHYLERLIPVTTPFSIVIGFLLPFVFSVLRPYVPLLFGFMTFSGALKLRAAELGKSVRSPLPILLFFAAAHVLMPVLAMFVSSRFFANNDVVSGFVLLFSGPTAVSGFIWVLILKGDMALCLTLILLDTLLAPVVVPGTISVLMGAKTTMDMSGIALSLLFMVVIPTIIGVTVNETSKGKIPAAICSYFDPFAKICLMLVIATNAAVVAPAVKLTNPLIWQVGFLVIILTSAGVLI

SEQ ID NO: 22941 - DNA, 567 bp, Unknown
  Obtained from environmental sample
  misc_feature (1)..(567): n is a, c, g, or t
gtgtactgggatcgtactttagggcaggcaattgcttacgaagaaactttccgtttaacttttgaaatgtcggacggcagaacaattgaataccgcggaacagcgcaggcggaatttgtagaatcagaatctttggacagagaacgtttggctgatgagatcacaggagagattaaccgtcttgcgattcccgatgttaatgtaagagcggttgatgaaggcgtgtccatcagccttgaggacgttggtttttatcccgattccgacgttatgcttccgggtgaacttgcgaaacttgataaaatagccgaaatacttaaacgatatcccgaaagagacattctggtcggagggcataccgcacttgccggaacaagcgagggcaggatgaaactttcgacagagcgcgcaaaagcggtaacggattatcttctttcaaaaaatgtgcgcaccgcagaccgcatcgtaatccgcgggtatggcgcgcaaaagcctgttgcagataacaataccgaagagggcaggcgcaagaaccgcagggtcgagatcaccattttggaaaattaa

SEQ ID NO: 22942 - protein, 188 aa, Unknown
  Obtained from environmental sample
  DOMAIN (83)...(179): OmpA family
  misc_feature (1)..(188): Xaa is any amino acid
MYWDRTLGQAIAYEETFRLTFEMSDGRTIEYRGTAQAEFVESESLDRERLADEITGEINRLAIPDVNVRAVDEGVSISLEDVGFYPDSDVMLPGELAKLDKIAEILKRYPERDILVGGHTALAGTSEGRMKLSTERAKAVTDYLLSKNVRTADRIVIRGYGAQKPVADNNTEEGRRKNRRVEITILEN

SEQ ID NO: 22943 - DNA, 579 bp, Unknown
  Obtained from environmental sample
  misc_feature (1)..(579): n is a, c, g, or t
ttgcaaagacaaaacaaaatgcgctgcttgcgcttgcaaatcgggcggggaaatgccgcagaaagctctagcacttctttatccggaggtaacacaatgaacatttttaatcattgtcagtctgtagaagaagcaaaaaaacggtatcgggaattactaaagcagtaccaccccgaccacgcagggcaggaaggcgaagaaatcaccaaagaaataataaatcagtttaacgccttcttaaacagtttcatgtcccattcctttaattcctactatgaagataaggaatggaagcccgacccaggcgcagagacaccatttcaggaaatactacaaaaaatcatagaccttgactgtgaaatcgaaatcataggtttttggatttattgcttcaaatcctacaccgtcagggaacagttacgggaattgggcttctggtttacgaacaaacacaaagcctgggtatattcaggcagaaacaaattgaacatcagcagcagggaaacactggacgaaatcagagccaaaaaaggaagtcaaaaagtagaaaaagaaggcaagaaaaaaatatccgcataa

SEQ ID NO: 22944 - protein, 192 aa, Unknown
  Obtained from environmental sample
  misc_feature (1)..(192): Xaa is any amino acid
MQRQNKMRCLRLQIGRGNAAESSSTSLSGGNTMNIFNHCQSVEEAKKRYRELLKQYHPDHAGQEGEEITKEIINQFNAFLNSFMSHSFNSYYEDKEWKPDPGAETPFQEILQKIIDLDCEIEIIGFWIYCFKSYTVREQLRELGFWFTNKHKAWVYSGRNKLNISSRETLDEIRAKKGSQKVEKEGKKKISA

SEQ ID NO: 22945 - DNA, 591 bp, Unknown
  Obtained from environmental sample
  misc_feature (1)..(591): n is a, c, g, or t
ttgggcaaacccatcttccccgaaggcgacataaagaaagccgacaggccgggaatgtcggtagggcttgcgtggacaagcatgggcggcgacacccttgtgatagaagcgacatctcttcccggaaaagaaggttttacgctgacgggcaagatgggcgacacaatgaaggaaagcgccacaatcgccatgaccgtcgcccgcaaactggcggtggaacgctacggcatagatcatgagtggtttgacaagaaccatatccacttgcacataccggagggggcgacgcccaaggacgggccgtctgcgggtataaccatggcgacggctttaatttcgctgttacgcgaaaaaattatcaccgacaagctggtgatgacgggagaactttcgcttacagggcaggtgcttcccatcggagggcttaaggaaaagacagtcgccgcgcgcagaaacaaagcgaagcacattattttcccgaaacaaaatgaacgcgatcttgatgaaatcccggatcatgtgaaaaaagggattgagttccatcctgttacttcttatcaggaagttttatcgttagctctgcctgattaa

SEQ ID NO: 22946 - protein, 196 aa, Unknown
  Obtained from environmental sample
  DOMAIN (1)...(196): Lon protease (S16) C-terminal proteolytic domain
  misc_feature (1)..(196): Xaa is any amino acid
MGKPIFPEGDIKKADRPGMSVGLAWTSMGGDTLVIEATSLPGKEGFTLTGKMGDTMKESATIAMTVARKLAVERYGIDHEWFDKNHIHLHIPEGATPKDGPSAGITMATALISLLREKIITDKLVMTGELSLTGQVLPIGGLKEKTVAARRNKAKHIIFPKQNERDLDEIPDHVKKGIEFHPVTSYQEVLSLALPD

SEQ ID NO: 22947 - DNA, 747 bp, Unknown
  Obtained from environmental sample
  misc_feature (1)..(747): n is a, c, g, or t
ttggcggttagaaaacttcgcagggatacaaagggttcgattgtctgtcttgtaggtccgccgggtgtgggcaagacttcagtgggcaggtcaatcgcgcgcgcgcttggcaagcaattttttcgtttttccgtcggcggcatgagggacgaggccgaaattaagggacacaggcgaacctacatcggagcgctacccggaaaaattattcagggattgaaaatcgtaaaaacaaaagacccagtgtttatgatagacgaaattgacaaaatgggctccagttttcagggagacccggcaagcgcgcttcttgaagtgcttgatccggagcagaactacgctttccgcgatcattatcttgatcttccgtttgatatttcccatgtgttttttatcgtaacagccaacactctggacacaattcccgttccgcttatggaccgcatggaaataatccagcttccaggttatatcgacatagaaaaacttgagattgcccggcgttatcttctgccgaaaagccttgaaaaaaacggacttaaaaagaatcaggttaaatacacaaaggacagtcttttacacatagccaacgcctatgcccgcgaagccggagtgcgtaactttgaaaaaaatctggacaagattcaccgtaagctcgcgaagcagatcgtagaagcgcaggaagccgccgtctcctgcggaaacaggagacaacaaagaagcagatgcggcagtaaaacctgttga

SEQ ID NO: 22948 - protein, 248 aa, Unknown
  Obtained from environmental sample
  DOMAIN (14)...(157): ATPase family associated with various cellular activities (AAA)
  misc_feature (1)..(248): Xaa is any amino acid
MAVRKLRRDTKGSIVCLVGPPGVGKTSVGRSIARALGKQFFRFSVGGMRDEAEIKGHRRTYIGALPGKIIQGLKIVKTKDPVFMIDEIDKMGSSFQGDPASALLEVLDPEQNYAFRDHYLDLPFDISHVFFIVTANTLDTIPVPLMDRMEIIQLPGYIDIEKLEIARRYLLPKSLEKNGLKKNQVKYTKDSLLHIANAYAREAGVRNFEKNLDKIHRKLAKQIVEAQEAAVSCGNRRQQRSRCGSKTC

SEQ ID NO: 22949 - DNA, 972 bp, Unknown
  Obtained from environmental sample
  misc_feature (1)..(972): n is a, c, g, or t
ttgggatccatacgagtacaagtgggcggaaagacggttttgatgacttcgcttgcgtttcctataagcacgacgggtaaggttgtgggggttataggctttgacattcccctgactgaaatccagaaaatttcccagacccaaaagccttttcccaattccataaccgccgtattcagcaacaacggcacggttaccgcccactttgacgaaagccgtatcggaaaaaatttaagggttaccgaaacggacatggcgggaaggcatcttgatgattttgtgaatgccgttacggccggcagacagtattctttcaacaattatatcgaagcgttacaagagaatatgaaaatatttaccgttcccattcctgtcggttccgcaacaaccccctggagctacgcaatagccgttatgcgcaatacgataatggccccggtttacgaaatgatttccctcaccatagtgataagcgttgtggtattggctctggtagtcgcggcggcgctgatcctttcacgatccatcagcaagccaatcgtcaaagtggccgatactctcagggatatttccgagggcgaaggcgacctgacgcggagcatcgccgttcattccaacgacgagatcggcagcctggccctgtacttcaacaagactttggaaaaaatcagaaacctcgttataatcattaagaaagaagcggcaagcctccatgatgtgggcaatgatcttgccggcaacatgaccgaaaccgccgccgcggtcaatcaaatcacggctaatatccggagcatcaaacagcgggtaataaaccagagcgccggcgttaccgaaactcatgccacaatggagcaggttgtcgcgaacatcaataaactcaacagccatgttgaaaatcagagcggcaatatttcccaggcttcgtcagccatagaggagatggtagccaacatcaattctcggccaatctga

SEQ ID NO: 22950 - protein, 323 aa, Unknown
  Obtained from environmental sample
  DOMAIN (11)...(81): Cache domain
  misc_feature (1)..(323): Xaa is any amino acid
MGSIRVQVGGKTVLMTSLAFPISTTGKVVGVIGFDIPLTEIQKISQTQKPFPNSITAVFSNNGTVTAHFDESRIGKNLRVTETDMAGRHLDDFVNAVTAGRQYSFNNYIEALQENMKIFTVPIPVGSATTPWSYAIAVMRNTIMAPVYEMISLTIVISVVVLALVVAAALILSRSISKPIVKVADTLRDISEGEGDLTRSIAVHSNDEIGSLALYFNKTLEKIRNLVIIIKKEAASLHDVGNDLAGNMTETAAAVNQITANIRSIKQRVINQSAGVTETHATMEQVVANINKLNSHVENQSGNISQASSAIEEMVANINSRPI

SEQ ID NO: 22951 - DNA, 861 bp, Unknown
  Obtained from environmental sample
  misc_feature (1)..(861): n is a, c, g, or t
gtgaaagtattatacaggacacaaaaatttaaggattttaatcaaacaagagcagaaaaaggtattaagctaaagagcaagaatttattaaaaggccatggctttggatatatcattaaatcaaaaaaatcaattaaaattcataataagacaatagccgttgcacctgaaaattttagtatcattaataacatgaaggaatttgaagaatttattggggaagtcgatattccagcatggcatggcagagacgtgtatatagatttatcaaatgtaaaaaaaatcaccccagacgggttattaattatgattgcatacttaaatcgttataagagttgcaaccctgctcctcatatagctggcaatagccctactgaagactattgccatcaagtttttattgagtctggtttttataaatatgtaagcagtagacacgaacacagaaacagcaacaatgtcctatctgtacgttctgatgaattaatcagatctgacgaggctggcgcagtaattgcgtttgtacgcaataaattaaagataagtgataagactttgacaaaagcagtttatacaaccataatggaaacaatgaacaatgtcagagaacacgcgtatgcgggaagaaaaaattttggatggtggttgatggcattgcctaaaaaagagggtgacgtgattcattttgctttagttgataacggcagaggtatcccacataccgtacggaaaaaagtaacagaatcaataccttttttagagaatgacgcanagctaatccaagccactgtgcttgagcaaaacgaaagtctaccaagcttctataacagagattgggcctaccnnaaactaaaaaattag

SEQ ID NO: 22952 - protein, 286 aa, Unknown
  Obtained from environmental sample
  misc_feature (1)..(286): Xaa is any amino acid
MKVLYRTQKFKDFNQTRAEKGIKLKSKNLLKGHGFGYIIKSKKSIKIHNKTIAVAPENFSIINNMKEFEEFIGEVDIPAWHGRDVYIDLSNVKKITPDGLLIMIAYLNRYKSCNPAPHIAGNSPTEDYCHQVFIESGFYKYVSSRHEHRNSNNVLSVRSDELIRSDEAGAVIAFVRNKLKISDKTLTKAVYTTIMETMNNVREHAYAGRKNFGWWLMALPKKEGDVIHFALVDNGRGIPHTVRKKVTESIPFLENDAXLIQATVLEQNESLPSFYNRDWAYXKLKN

SEQ ID NO: 22953 - DNA, 522 bp, Unknown
  Obtained from environmental sample
  misc_feature (1)..(522): n is a, c, g, or t
ttgcagatattggaggcaacacagccaaatgggcaatatccgncttgcaaatacaatccagatgttgaggttattatagtggatttgccagggcaaatctctgttgcaaaaaaaaacgcagaaaatgcagggctttcaaagcgcatattattttgcgaaacaaatattttaagcgaaaacccgcaattgccccccgatgcagatgccgtgtggatgagccagtttttggattgtttttcgctggaagaaatttccagcattgttagcagggttggcaaggctgcgccaaaggcaaagatttatgtgttggaacctctgcttgatatgcaaaaatttgaggcaagtgcttattcgctgcaagcaacttctctatatttcacctgtatggcaaacggcaacagcaaaatgtataattttgcggaacttgtaaacgccgttgaaaaaggcggctttgctttgcaggaatcgcaccataatctaggtgcaaatgcctattcgttgctatgttttaaaaagagttag

SEQ ID NO: 22954 - protein, 173 aa, Unknown
  Obtained from environmental sample
  misc_feature (1)..(173): Xaa is any amino acid
MQILEATQPNGQYPXCKYNPDVEVIIVDLPGQISVAKKNAENAGLSKRILFCETNILSENPQLPPDADAVWMSQFLDCFSLEEISSIVSRVGKAAPKAKIYVLEPLLDMQKFEASAYSLQATSLYFTCMANGNSKMYNFAELVNAVEKGGFALQESHHNLGANAYSLLCFKKS

SEQ ID NO: 22955 - DNA, 426 bp, Unknown
  Obtained from environmental sample
  misc_feature (1)..(426): n is a, c, g, or t
ttgctcggcaaaagaaaatatttgggtgtaatagtgaatacctggtatatttccaatgaactggattttgcggatatttcaattcgcactgccaattctctttcaaaaggaaattgcgtgataattttcccagaaggaactcgttccattcccggaaagccaatagacttgaaaaaaggcgcggcgcggctggctattgaaacaggttatgatattatgccagtgcatattggcggcaatgaaaaaataggactgcgcaagcacgatgctctgttcagttttcatccaactcagagataccattatatttttgatatttttcagccaattcccgttgacgaatataaacgaatgccaagcggcatggcttcaaaactgctcacggaaaaaataaaagaacaaattagcggcgaaaaatttaactaa

SEQ ID NO: 22956 - protein, 141 aa, Unknown
  Obtained from environmental sample
  misc_feature (1)..(141): Xaa is any amino acid
MLGKRKYLGVIVNTWYISNELDFADISIRTANSLSKGNCVIIFPEGTRSIPGKPIDLKKGAARLAIETGYDIMPVHIGGNEKIGLRKHDALFSFHPTQRYHYIFDIFQPIPVDEYKRMPSGMASKLLTEKIKEQISGEKFN

SEQ ID NO: 22957 - DNA, 732 bp, Unknown
  Obtained from environmental sample
  misc_feature (1)..(732): n is a, c, g, or t
ttggattatggcggcgacttgacgctctgccagtcgctttcgttgatgcacttgccgcggcccgtgttgacgatgatcacgccgtctttcatttttgaaatcaattgggcgttcaccatgcccttggtttcgtcagtcaggggcgtgtgcagagaaatgaaatccgcctttgatgccaattcatcgatcgatggcaccaaattggctattgggtgttctttgaggaatgggtcgaaggcgattatcttcatgccgaaggctgctgcgcgctttgcgacttccgtggctatggcaccggcgccaacaaggcccaatgtcttgccatacagctctgtccgcttcagctcatttttcaggaatttgccatcgagcatggaaacgtgggcttctatgagccttgcgggaatggcggccatgaacgccattgccatttcggcgacggctatgctggacgcctttggcgtgttggtggccttgatgcccttttcggcgcaaagttttttgtcaatgttgtccatgcccacgccgccgcgtatgaccagctttaggttcggtgccttggccaaaaggtctgcgtttacagtggtcttagagcgtatcagcaaaacctcggcttctcccagcgtggccatgtcgcttgaaacttggccaaatgcggctaggcgctcgggtagttttgcatcgaaggcgtcggcgatcaggattttcatgttccctccagaattagtctag

SEQ ID NO: 22958 - protein, 243 aa, Unknown
  Obtained from environmental sample
  misc_feature (1)..(243): Xaa is any amino acid
MDYGGDLTLCQSLSLMHLPRPVLTMITPSFIFEINWAFTMPLVSSVRGVCREMKSAFDANSSIDGTKLAIGCSLRNGSKAIIFMPKAAARFATSVAMAPAPTRPNVLPYSSVRFSSFFRNLPSSMETWASMSLAGMAAMNAIAISATAMLDAFGVLVALMPFSAQSFLSMLSMPTPPRMTSFRFGALAKRSAFTVVLERISKTSASPSVAMSLETWPNAARRSGSFASKASAIRIFMFPPELV

SEQ ID NO: 22959 - DNA, 705 bp, Unknown
  Obtained from environmental sample
  misc_feature (1)..(705): n is a, c, g, or t
atgaaaatcctgatcgccgacgccttcgatgcaaaactacccgagcgcctagccgcatttggccaagtttcaagcgacatggccacgctgggagaagccgaggttttgctgatacgctctaagaccactgtaaacgcagaccttttggccaaggcaccgaacctaaagctggtcatacgcggcggcgtgggcatggacaacattgacaaaaaactttgcgccgaaaagggcatcaaggccaccaacacgccaaaggcgtccagcatagccgtcgccgaaatggcaatggcgttcatggccgccattcccgcaaggctcatagaagcccacgtttccatgctcgatggcaaattcctgaaaaatgagctgaagcggacagagctgtatggcaagacattgggccttgttggcgccggtgccatagccacggaagtcgcaaagcgcgcagcagccttcggcatgaagataatcgccttcgacccattcctcaaagaacacccaatagccaatttggtgccatcgatcgatgaattggcatcaaaggcggatttcatttctctgcacacgcccctgactgacgaaaccaagggcatggtgaacgcccaattgatttcaaaaatgaaagacggcgtgatcatcgtcaacacgggccgcggcaagtgcatcaacgaaagcgactggcagagcgtcaagtcgccgccataa

SEQ ID NO: 22960 - protein, 234 aa, Unknown
  Obtained from environmental sample
  DOMAIN (3)...(173): D-isomer specific 2-hydroxyacid dehydrogenase, catalytic domain
  misc_feature (1)..(234): Xaa is any amino acid
MKILIADAFDAKLPERLAAFGQVSSDMATLGEAEVLLIRSKTTVNADLLAKAPNLKLVIRGGVGMDNIDKKLCAEKGIKATNTPKASSIAVAEMAMAFMAAIPARLIEAHVSMLDGKFLKNELKRTELYGKTLGLVGAGAIATEVAKRAAAFGMKIIAFDPFLKEHPIANLVPSIDELASKADFISLHTPLTDETKGMVNAQLISKMKDGVIIVNTGRGKCINESDWQSVKSPP

SEQ ID NO: 22961 - DNA, 834 bp, Unknown
  Obtained from environmental sample
  misc_feature (1)..(834): n is a, c, g, or t
gtgacggagcagggggccaacgccgagcctgttttcctgacataccaggcggccccctacatagacgcactggtgaacaaggttcgggaaacgaagccggtgtacgacataacctcgcccgacgggattgggcacacggtctgggtcattgacgacgagagtgtgatctattccctgacgaacctctttggcggcatccctgccatgtacatagccgacgggcaccaccgtacggctgcggccatcaggtacggtcaggcccgccgtgccgccgctggcgcggacgccaccggcgaggagccttttgaatacttcatggcggtggtcttcccgcacagccagttgaaggtcatggactacaaccgagtcgtgaaagacctcaacggcctctcaaaggaccagttttttgcaaaggtgcaggaaaagttcgaccttgggccgaacaccacccgctcgcccaagaccatccacacattcggcatgtacctcgatggccagtggcacaccctgacggccaagcccggcacttgggacgccaaagacccggtcaagtcgctggacgtaagcattttgcagaacaacctgttgcagcccatcctgggcatccaggaccccaggaccgacacccgcattgatttcattggcggcatcaggggcatggaggaacttgaaaagcgcgtcaaagaaggtgccgctgttgccttcgctatgttcccgacgtcccttgtggagctgatgtccgtctcggacgcaggacaaataatgccgccaaaatcaacttggtttgagccaaagctgcgctcgggcctgttggtcagggtttatgaaagctaa

SEQ ID NO: 22962 - protein, 277 aa, Unknown
  Obtained from environmental sample
  DOMAIN (1)...(275): Protein of unknown function (DUF1015)
  misc_feature (1)..(277): Xaa is any amino acid
MTEQGANAEPVFLTYQAAPYIDALVNKVRETKPVYDITSPDGIGHTVWVIDDESVIYSLTNLFGGIPAMYIADGHHRTAAAIRYGQARRAAAGADATGEEPFEYFMAVVFPHSQLKVMDYNRVVKDLNGLSKDQFFAKVQEKFDLGPNTTRSPKTIHTFGMYLDGQWHTLTAKPGTWDAKDPVKSLDVSILQNNLLQPILGIQDPRTDTRIDFIGGIRGMEELEKRVKEGAAVAFAMFPTSLVELMSVSDAGQIMPPKSTWFEPKLRSGLLVRVYES

SEQ ID NO: 22963 - DNA, 693 bp, Unknown
  Obtained from environmental sample
  misc_feature (1)..(693): n is a, c, g, or t
ttgaatcactgccgaatagacaaaccgcgtgattttacggcggatgttaaaacacagtttgacattgtctgtacggaatggaaaaaacaaagtaaaaaaattattgatttgttaaacgaaattgaaaacatgatttctgaaaacaacgaactgcttgccgatcttgcccctttaatggcaaaatacaataaaattgccgttcccgaggctgaagaaatacaaaaatattttgagtatttattaagtttgcccgcggaatcctgcattgaaaaagcagaatctcatcctatacaaaatcaaatgacggcgttccttggttttatttccgcgatatgcgctcttaacctgaccaaagggaaaccaagggaaaacacggtaaaagaagacattaaggaaatacgcgcgatgttcggcctattttcttcgcttgcggtatcctgtatgcaggccgggttaattatttccctcatgtccctgctttccgaattacaggaacgatatttggaaagaaagcgtcttgaaggggttttaaccttcaacgacgcggcaaacctttccaaaacgatacttcttgaacaacacgacataaggcggagtgaaaaagaatcatttaaggcgataatgatcgatgaattccaggataacaacgacctccaaaaagaccttttattcctgctcgccgaaaaaaactga

SEQ ID NO: 22964 - protein, 230 aa, Unknown
  Obtained from environmental sample
  misc_feature (1)..(230): Xaa is any amino acid
MNHCRIDKPRDFTADVKTQFDIVCTEWKKQSKKIIDLLNEIENMISENNELLADLAPLMAKYNKIAVPEAEEIQKYFEYLLSLPAESCIEKAESHPIQNQMTAFLGFISAICALNLTKGKPRENTVKEDIKEIRAMFGLFSSLAVSCMQAGLIISLMSLLSELQERYLERKRLEGVLTFNDAANLSKTILLEQHDIRRSEKESFKAIMIDEFQDNNDLQKDLLFLLAEKN

SEQ ID NO: 22965 - DNA, 822 bp, Unknown
  Obtained from environmental sample
  misc_feature (1)..(822): n is a, c, g, or t
atgacaatacataagagcaagggtctggaatttcccgttgtctttctttgctgctgcggaaaggacagccggtcagacagcgtcaaagacgtatttttctctgaaaaaacaggcgttgttttaagccctcccctgcccggggcccttaattccataaaaaacatacgcaaaaattttctttgggaacaatcaatcgcagaaagaaaactgaaaagaaccgccgaactgcgccgccttctttatgtcgggatgacaagggcggaaaaagaactgtaccttaccggcagccttgaaataaataagaatatggattcgggcgattttattgaaacaataaaaaaatatatcgaaaaaaaatgcgaagaaaaagaaaattctattcccggcgattcaattattaataacgatacttttttcggactttttctgccgtcaatcgcctcacgaatatcacaaggatttatcagccttgaagaaatcccggtttataccgaagatgacattaaaaaacaggaagcaaatccaaaacatctttccggaaatcatttgccgaacaacaggggaggattaggagaatatatcaggaacgccgaacctttatataaaaaggcaaaaaaaatcaaaacgcccgaagcgcggaagaatcacataacgcccgtctcgttaaaggataaagaagaagatttaactcagacggacactgtgggcagaggattaataataaacagggaattttcaggggttaaagcggatgatgtctttgaaaaagtggattccttgcttgccaattctccaaatggaagagaatcctcggccatctga

SEQ ID NO: 22966 - protein, 273 aa, Unknown
  Obtained from environmental sample
  misc_feature (1)..(273): Xaa is any amino acid
MTIHKSKGLEFPVVFLCCCGKDSRSDSVKDVFFSEKTGVVLSPPLPGALNSIKNIRKNFLWEQSIAERKLKRTAELRRLLYVGMTRAEKELYLTGSLEINKNMDSGDFIETIKKYIEKKCEEKENSIPGDSIINNDTFFGLFLPSIASRISQGFISLEEIPVYTEDDIKKQEANPKHLSGNHLPNNRGGLGEYIRNAEPLYKKAKKIKTPEARKNHITPVSLKDKEEDLTQTDTVGRGLIINREFSGVKADDVFEKVDSLLANSPNGRESSAI

SEQ ID NO: 22967 - DNA, 570 bp, Unknown
  Obtained from environmental sample
  misc_feature (1)..(570): n is a, c, g, or t
atgctgggcattccatacgcatgcgaagatatagacaattttttctatggggggcctgttaacgacataatgtctgtcctgcgtcttgcggcccaccctttggacagcgcttcttacgcggagatgctccgctccccctttgccggtctttcgcttgagggaaccgcggtatgtttgtcgatttttaacgatgctgaaaatcccgcggtctttaatgacgggccgcttaatcttcttgacgaatcggaccgcgaaaaatatttacacggacaaaaggtttatttttcaatatgtgaaaaagccgcgaccgaaagcgtcagttccctggttacggaattgtggtataaagaaggctaccgttacgagacggaatggaatcagtctgtaagcgtataccgcgagttatacgactatcttttccaccttgcggtccttgccgacaccgcaaacgagggacttgcntcatttacggattctatgcgcgatctaggattttcaggcggcgggcttnaaggacatagaaatcccgctgaaacggcccggcgctgttcatttaatgacaatacataa

SEQ ID NO: 22968 - protein, 189 aa, Unknown
  Obtained from environmental sample
  misc_feature (1)..(189): Xaa is any amino acid
MLGIPYACEDIDNFFYGGPVNDIMSVLRLAAHPLDSASYAEMLRSPFAGLSLEGTAVCLSIFNDAENPAVFNDGPLNLLDESDREKYLHGQKVYFSICEKAATESVSSLVTELWYKEGYRYETEWNQSVSVYRELYDYLFHLAVLADTANEGLASFTDSMRDLGFSGGGLXGHRNPAETARRCSFNDNT

SEQ ID NO: 22969 - DNA, 453 bp, Unknown
  Obtained from environmental sample
  misc_feature (1)..(453): n is a, c, g, or t
ttgccagtatggaggcattgtatgtttaagaaattgatttttatcggtgttttgtttttggctgttgaaagtctctttgcggaggaaattaaaacaaacatagagattaacggtgtaaccgtgaacggcggtttgatatatgcggctgtatactcaaatgaaaatgattataaaaacgagacggcttttgcaaattttatcctgcagccggagaatgttaatttaaaatattctctggatttacccgaaggcgaatacgtagtttccgtatatcaggataaaaacggcgatgaaaaactcaataccggcctgtttggaataccttccgagcgtatcgggaaaacaaactacaatcttaagggagcgccgggtgattttaacgaattgaaagcgccggtaaacaatacatcccggaaactgattgttaatatgggaaaagtgaaactcttttag

SEQ ID NO: 22970 - protein, 150 aa, Unknown
  Obtained from environmental sample
  SIGNAL (1)...(27)
  misc_feature (1)..(150): Xaa is any amino acid
MPVWRHCMFKKLIFIGVLFLAVESLFAEEIKTNIEINGVTVNGGLIYAAVYSNENDYKNETAFANFILQPENVNLKYSLDLPEGEYVVSVYQDKNGDEKLNTGLFGIPSERIGKTNYNLKGAPGDFNELKAPVNNTSRKLIVNMGKVKLF

SEQ ID NO: 22971 - DNA, 420 bp, Unknown
  Obtained from environmental sample
  misc_feature (1)..(420): n is a, c, g, or t
atgaagaaaataaaaaaaataattaatgatattatgtttgtcaccggcgcggctttggttattctgacggtattttcgctgttattcagcgttgaaatcagttttgtgcccactgtttttgaaatttttgccgcggatattgttattattctgggtctttttctgcgcgggaagtttgaaatccgcaatttaatcctggaatatctggttgatatcagttttataatcgccgttcttgttgtattcgggctcatttttgattggtattccgcaataccggcgtggcttcttgtggtaatggcggttataatctatctgtttgccatgatattctctgttaccaagatcaaaaaagacgcggaagaattaaataaattactggaaaaacatcagaaaaagcaggcggacactgcatcttag

SEQ ID NO: 22972 - protein, 139 aa, Unknown
  Obtained from environmental sample
  SIGNAL (1)...(26)
  misc_feature (1)..(139): Xaa is any amino acid
MKKIKKIINDIMFVTGAALVILTVFSLLFSVEISFVPTVFEIFAADIVIILGLFLRGKFEIRNLILEYLVDISFIIAVLVVFGLIFDWYSAIPAWLLVVMAVIIYLFAMIFSVTKIKKDAEELNKLLEKHQKKQADTAS

SEQ ID NO: 22973 - DNA, 447 bp, Unknown
  Obtained from environmental sample
  misc_feature (1)..(447): n is a, c, g, or t
atgattattaatcttaagcaaaatgttttacaaaaagatattgaaatatcaattacctacccggtaaaaaatagaattgtagaacgtattgtctcgttgataaaatcagttgacgcgcaaattgagtgttatgctgatgatatcgtaaaaccggttaatgtttccgatatttattacattgaaagcgttgacgggaaaaccattgtctgctgtgaaaaagaaaattattttgttaaaagccgtttgtatcagatatatgaaaaattaaaggataacggatttatacaaatcagtaaatattgcattctgaatattaataagttggacaaattcaggccgttagacaataatcgactggaagcggtattgacaaacggggtttacctgtgtatcaccagaaaatatatttccggcataaaacagatattacgggagatgaataaatga

SEQ ID NO: 22974 - protein, 148 aa, Unknown
  Obtained from environmental sample
  DOMAIN (47)...(144): LytTr DNA-binding domain
  misc_feature (1)..(148): Xaa is any amino acid
MIINLKQNVLQKDIEISITYPVKNRIVERIVSLIKSVDAQIECYADDIVKPVNVSDIYYIESVDGKTIVCCEKENYFVKSRLYQIYEKLKDNGFIQISKYCILNINKLDKFRPLDNNRLEAVLTNGVYLCITRKYISGIKQILREMNK

SEQ ID NO: 22975 - DNA, 411 bp, Unknown
  Obtained from environmental sample
  misc_feature (1)..(411): n is a, c, g, or t
atggacaagcttggcagcgaacgggcgcgtatagagcagcttgtggccatactctccagaagcgtccagcatcttgaagcggccagagcaaaggcggatgccgccaaagccgcgctgaagcagcccgaagacgtacaggaggtatttaacagggcgtatgtaaaggaagtcggcggatatgccgccgcaagccaactcctgtgggctgcgcagagggatttctacgccgaggcgctacgcatgggcgtgtttctcgaaaggcacaaggaaaaaattcagttcagaaacaaaacagtgaccatagacgaacagtcgctgttacttgaatacaatgcgctgcaaaaatctctggaggagaaatcccaaaaaatgcaggccacattggcgtcagaccagattatggtacgctga

SEQ ID NO: 22976 - protein, 136 aa, Unknown
  Obtained from environmental sample
  misc_feature (1)..(136): Xaa is any amino acid
MDKLGSERARIEQLVAILSRSVQHLEAARAKADAAKAALKQPEDVQEVFNRAYVKEVGGYAAASQLLWAAQRDFYAEALRMGVFLERHKEKIQFRNKTVTIDEQSLLLEYNALQKSLEEKSQKMQATLASDQIMVR

SEQ ID NO: 22977 - DNA, 798 bp, Unknown
  Obtained from environmental sample
  misc_feature (1)..(798): n is a, c, g, or t
ttgccggacgagaagcttgtgttgctggtcacgggcgcacagggcgagcctctttccgctctggcccgcatggtgcagggaggacaccgccagctcgcgatcaagcgcggcgataccgtggtcatgtcctcacgcatgattcccggaaatgccagggccatcacccggatgatcaacgacatgttccgcttgggtgcggaagtctatcacgaaaaagtgcgcgacatccacgcctccggccatgcctgccgcgaagaattgcgggccatgcttgaagccgtgcatcccggacttttcgttcccatccacggggaataccgccatctggtcatgcatggccgtctggcccaagaatgcggtgtccccccggaatgcgccatcatcctcgagaacggcgaaccgctcaccctgctgcccacaggtatgcgccgggaaaaacaggttcctgtgcagtacacctttgtggacggcaagggcgtgggggatgtaggtactcttgttctcaaggaacgccacatcctcggcggcgaaggcatggtgctggtggtgctggtgcgggatgcggaaaacggcaacattctgcacggaccgcagatgatttccaagggtttcgtcttccaccagcacttcgagcatctgttggaagacgccaaatgcctggtgctggatcaacttgaggaaaaccgcaacgccggcccggcaaaactcggcgaagccatacgagcttcgttacgccgcttcttccggcgcattttggatcgcgatccggtcattgtccccatcatacgggacgtataa

SEQ ID NO: 22978 - protein, 265 aa, Unknown
  Obtained from environmental sample
  DOMAIN (67)...(107): RNA-metabolising metallo-beta-lactamase
  misc_feature (1)..(265): Xaa is any amino acid
MPDEKLVLLVTGAQGEPLSALARMVQGGHRQLAIKRGDTVVMSSRMIPGNARAITRMINDMFRLGAEVYHEKVRDIHASGHACREELRAMLEAVHPGLFVPIHGEYRHLVMHGRLAQECGVPPECAIILENGEPLTLLPTGMRREKQVPVQYTFVDGKGVGDVGTLVLKERHILGGEGMVLVVLVRDAENGNILHGPQMISKGFVFHQHFEHLLEDAKCLVLDQLEENRNAGPAKLGEAIRASLRRFFRRILDRDPVIVPIIRDV

SEQ ID NO: 22979 - DNA, 840 bp, Unknown
  Obtained from environmental sample
  misc_feature (1)..(840): n is a, c, g, or t
gtgcgcagccagcgtgattcgctgacgcgcctgagggagcagttgcagattacgaaggcgtcctttgacgtggggttgcgcccgaacttggatgtactccaggccgaagtggacgtcagccgcgccgaaagcctgctgatctccgccgagaacgcgcgcgaaacctacaaggcccaactcaacaccctgctcggcctatcggtgaccgccgcgctggactatgtgggcgtactctcgcatgtgccgttcgatatggggttggaaacctgcctggacacggcctacaaacagcgtcccgacctcgggatcgccgccaaagcggtcgccattgccggcaaagacgtcaacatcgcgcaaagccaatattatcctcagatctcggcatattatgccatcggcaacactggcgacaacttggccctccggcatgtatacgcggacggataccgctccagccgctgggaagtcggcattacgggaacctggacggtatttgaatggggcagaaccttttacgcggatcaacaggcccgttccgtggaatcccaaatccgcgcggacgaggcatccctgaagctgaatgtgggttttgacgtcaaatcgaagcttcttgcggcccgtgacgcggaaaaactgatttccgtggccacgaaaggcatggaacaggcacaagaggcttataaacaggcacaggcccgctacagggcacaagtgggcacgaacttcgacgtgctggatgcttccgccaacctcgccgcggcggaaaccacccctcaccggcgccaagggccggctatctcaccgcgctttccgctctctatgcggccatgggcgaactga

SEQ ID NO: 22980 - protein, 279 aa, Unknown
  Obtained from environmental sample
  DOMAIN (87)...(275): Outer membrane efflux protein
  misc_feature (1)..(279): Xaa is any amino acid
MRSQRDSLTRLREQLQITKASFDVGLRPNLDVLQAEVDVSRAESLLISAENARETYKAQLNTLLGLSVTAALDYVGVLSHVPFDMGLETCLDTAYKQRPDLGIAAKAVAIAGKDVNIAQSQYYPQISAYYAIGNTGDNLALRHVYADGYRSSRWEVGITGTWTVFEWGRTFYADQQARSVESQIRADEASLKLNVGFDVKSKLLAARDAEKLISVATKGMEQAQEAYKQAQARYRAQVGTNFDVLDASANLAAAETTPHRRQGPAISPRFPLSMRPWAN

SEQ ID NO: 22981 - DNA, 927 bp, Unknown
  Obtained from environmental sample
  misc_feature (1)..(927): n is a, c, g, or t
atgcttccgccaacctcgccgcggcggaaaccacccctcaccggcgccaagggccggctatctcaccgcgctttccgctctctatgcggccatgggcgaactgaaacccgacctggggctggccggaaaataatgcaagagtcccaagactttttgaccatcacccccttgggcggccttggcgaaatcggcctgaactgccagttgtgggagacgcccgcaggggtggtgatgatcgattgcggcctcatgtttccggatgactcccatctgggcgtggatgtcgtcatcccttgcctggattccgtgcgggccgtgcgcgaacgttttctgggcgtggtgctgacccacgggcatgaggatcatatcggcgccctgccctggcttattccgcacctgaagggagtgcgcgtctatggttccgccttcaccttggctctggcagcgcacaagctgaaagagcgcgggctgctggattacgctgatctgacgcctgtcactaccgataccgtgttgacgctcggcgatctgcgtttccgcttttttccggtctgccactccattccggaaggctttgcgctcggcgtggaaagccctgtgggcgctatcctccactccggcgatttcaaaatcgatccggaaccactcttcggttccggcacggacatgaggcttttcaaggactttgcgggcgagagcggcgtgcgtctgcttctctccgactccaccaatgcggaacgtgaggggcatacgctttcggaacgcgaggtcaaggaggaactcgacaaagttttcgccacagcccccggccgcattgtcatcaccctgttctccagccacatccaccgtatccaggaggtcttcgacctgcggaccattatgggcgttcggtggtcatcagcgggaaaagccttggcgtcaacatag

SEQ ID NO: 22982 - protein, 308 aa, Unknown
  Obtained from environmental sample
  DOMAIN (64)...(276): Metallo-beta-lactamase superfamily
  misc_feature (1)..(308): Xaa is any amino acid
MLPPTSPRRKPPLTGAKGRLSHRAFRSLCGHGRTETRPGAGRKIMQESQDFLTITPLGGLGEIGLNCQLWETPAGVVMIDCGLMFPDDSHLGVDVVIPCLDSVRAVRERFLGVVLTHGHEDHIGALPWLIPHLKGVRVYGSAFTLALAAHKLKERGLLDYADLTPVTTDTVLTLGDLRFRFFPVCHSIPEGFALGVESPVGAILHSGDFKIDPEPLFGSGTDMRLFKDFAGESGVRLLLSDSTNAEREGHTLSEREVKEELDKVFATAPGRIVITLFSSHIHRIQEVFDLRTIMGVRWSSAGKALAST

SEQ ID NO: 22983 - DNA, 867 bp, Unknown
  Obtained from environmental sample
  misc_feature (1)..(867): n is a, c, g, or t
atgggcgtttacgacacctttaccggaaaggcgcaaacttttaacgcggcttccggtgtctatgatgttgatgtttccgcagacggagaagttatgctgttgtccggttatagttatattgaagagcgggctatcgcggttgttaacgagcacagaacggataacggcttgaaaacaggcagaacttttaacggactttacaaagcgcgatattttagggacggagtaatagggattcgttcatctctgcacaataattgcatcgcatacgaaaattttaacggcgaaagcgaagtcctttttatgggaaacgaaaatcttatgttctccggccctcaggttcttgataatgagcggattgtttttatcgcttcccgtgaaggtaaaagagagctatggctttacaattatgttttgcaggaactctttaaaatagaaaatacaacgtatgacaataaatattgggaatatatgcgcggtttaaacgtttcggaaggaaaactcttttttagttataactccgatgatcgcatgtataaacttgggatgatcgatcttgaaaaaatgcaggcggtcttaaacggcagggacttttcaggcggtgtttttaatcctgtttccgcagacggctatatttactatcttgcgacatttgtttcacgtaacagccttatgcgctttcctgaaactgcggactctctttccgggaaccggattaatctgcagttaacaaaattggacaatcaaaattacaagactgcttccgagccgccgtacgcaggaccgtcaaaaccgtatattggactgcgttatatgaatccttttaagtattggcttcccataccttttgatctcgtgccgatctga

SEQ ID NO: 22984 - protein, 288 aa, Unknown
  Obtained from environmental sample
  misc_feature (1)..(288): Xaa is any amino acid
MGVYDTFTGKAQTFNAASGVYDVDVSADGEVMLLSGYSYIEERAIAVVNEHRTDNGLKTGRTFNGLYKARYFRDGVIGIRSSLHNNCIAYENFNGESEVLFMGNENLMFSGPQVLDNERIVFIASREGKRELWLYNYVLQELFKIENTTYDNKYWEYMRGLNVSEGKLFFSYNSDDRMYKLGMIDLEKMQAVLNGRDFSGGVFNPVSADGYIYYLATFVSRNSLMRFPETADSLSGNRINLQLTKLDNQNYKTASEPPYAGPSKPYIGLRYMNPFKYWLPIPFDLVPI

SEQ ID NO: 22985 - DNA, 597 bp, Unknown
  Obtained from environmental sample
  misc_feature (1)..(597): n is a, c, g, or t
gtgaagaaccccgctgcgttcatagcggtacaccgtacccaattccgcccagcgcaggggcaggtcacgataactgcggcccttgtttttataaatcaaaatatggaaaggacaattcatcggtttgatgatgtaatcctgattatcaatctgcatggggctgtacatattggatttataaaagccgagatgtccggaagtttcccaaagccagcttttgccgatatgcggcgtgtagagaatttcgtaaccgttgcggtaatgttcctgccgccaaaaatcctcgatggcgacacgcatacgcccgccgttgggatgccagtaaatgagaccggcgcccgcttcctcatgaaccgagaaaaggtcaaggtctttacccaggcggcggtggtcgcgtttttcaacttcctcaagaaaagcaaggtaggctttcaggtctttgggagtttcccacgccgtgccgtaaatgcggctcagcatgggacggttttcatcgccgcgccagtaagcgcccgcgatactttgcagtttgaaagcggcggaatttatttctctggtattggcaacatgcggcccccggcacaggtcagcccataa

SEQ ID NO: 22986 - protein, 198 aa, Unknown
  Obtained from environmental sample
  misc_feature (1)..(198): Xaa is any amino acid
MKNPAAFIAVHRTQFRPAQGQVTITAALVFINQNMERTIHRFDDVILIINLHGAVHIGFIKAEMSGSFPKPAFADMRRVENFVTVAVMFLPPKILDGDTHTPAVGMPVNETGARFLMNREKVKVFTQAAVVAFFNFLKKSKVGFQVFGSFPRRAVNAAQHGTVFIAAPVSARDTLQFESGGIYFSGIGNMRPPAQVSP

SEQ ID NO: 22987 - DNA, 1596 bp, Unknown
  Obtained from environmental sample
  misc_feature (1)..(1596): n is a, c, g, or t
ttgttgagggtgtcccgattggcccttcgcgcctgcgccctctttttcccgagccttccaccggaaaacagcttgaatacagaattgactcattatagtcggacaaaactgctcttgaaaaacaatggttttaagttaaaattatctatagtatttatgacaactgaaaatatttttaaacagggcgcgcagttttattttgtcgggataaaggggacgggagtttgcgcgctggccgaactgatacttaacgccggaataaaagtgcgcggcagcgacaccaacgaagttttttacactgatacaattttaaaaaatctgcaaattccctactatgaaaattttgacgcggcgcatatcacaaaagatattgatactgtgatccattccgccgcttacggtgcggataccaatcccgaacttgcgcaggcggtaaaacttggtatccctgtcataaaatataccgacgctcttggtatgtggtcggcaaggtttgactctacgggcgtgtgcggcgttcacggaaaaacaaccacaaccgcgcttgcaggcgtttgcgcgcgcggcgcaggccttccggctcaaatacttaccggaagcggcgcatttgattttggcgggaagtcaacgcttattcttggagataaattttttatcgcggaaacctgcgaataccgcaggcattttttatcgtttcatccaaagcggataatacttacttccatagaaagcgatcatcaggattatttcccggattataaatccattctggacgcgtttgttgaatactgccgtctgcttccttccggcgggcagcttatttactgcgccgatgattcgggggcaagcgaggcggctaanataattgaaagcgaanagcgcgggattacgtttatccnntacggattttacgccgatggcngatatcgcgtggtttcttataacgtagagaatgagagggcgcgtttttcccttgcgggatttccataccaatttacaatgaggattcccggccgtcatcaggcgttaaacgccgcggcggctgtcgcgcttacagcgtcgctgttgaaagaacagggagcggtgttagacgaagtaaaaattcaatctgtgggcaaagagcttgaaaattttaagagcacaaaacgccgaagcgaaattatcggggaagcgggcggaattatttttatggatgattatgggcatcacccgacagcgattaaaaataccctttccggtattaaaaatttttatccttcacgccggttaattgtaagttttatgtcgcacacttacacgcgcacttccgcccttcttgacgaatttgcttcggcgtttgacgacgcggacattgttttctttcataaaatttacgcaagcgcgagggaaaattacaagggcggcgttaacggcaggtcgctttacgaaaaagccgcagggcgcgtgacagctttttatcaggacgagccggacggcgcttttgctccgttatgtgaaatgttaaaacccggcgatatttttatcacgcttggcgcgggaaacaactggccgctgggcgttaaattgttcaatcattttgggggaagccatgattag

SEQ ID NO: 22988 - protein, 531 aa, Unknown
  Obtained from environmental sample
  SIGNAL (1)...(26)
  DOMAIN (168)...(352): Mur ligase middle domain
  misc_feature (1)..(531): Xaa is any amino acid
MLRVSRLALRACALFFPSLPPENSLNTELTHYSRTKLLLKNNGFKLKLSIVFMTTENIFKQGAQFYFVGIKGTGVCALAELILNAGIKVRGSDTNEVFYTDTILKNLQIPYYENFDAAHITKDIDTVIHSAAYGADTNPELAQAVKLGIPVIKYTDALGMWSARFDSTGVCGVHGKTTTTALAGVCARGAGLPAQILTGSGAFDFGGKSTLILGDKFFIAETCEYRRHFLSFHPKRIILTSIESDHQDYFPDYKSILDAFVEYCRLLPSGGQLIYCADDSGASEAAXIIESEXRGITFIXYGFYADGXYRVVSYNVENERARFSLAGFPYQFTMRIPGRHQALNAAAAVALTASLLKEQGAVLDEVKIQSVGKELENFKSTKRRSEIIGEAGGIIFMDDYGHHPTAIKNTLSGIKNFYPSRRLIVSFMSHTYTRTSALLDEFASAFDDADIVFFHKIYASARENYKGGVNGRSLYEKAAGRVTAFYQDEPDGAFAPLCEMLKPGDIFITLGAGNNWPLGVKLFNHFGGSHD

SEQ ID NO: 22989 - DNA, 420 bp, Unknown
  Obtained from environmental sample
  misc_feature (1)..(420): n is a, c, g, or t
atgaaaagaagggcgcttatcagcgtattttacaaagacgggattccggaattggcctcgtatctgaacggggcagggtgggagattctttcaaccggcggtacatcaaaatatttaaaggaaaataatattcctgtaaccgatgtttcctcggtgacgggttttcccgaatgtcttgacggcagggtaaagaccctgcaccccgcaatacacgccggccttttggcgcgccgcgatgaaaaaaaccacatggatacattacaggcgctgggtcttgcggctatcgatctagtctgcgtcaacctgtacccgttttttgaaaaggtacaggcaaagctgacccttgaacagacagttgagtttatcgacataggcgggccgaccatgcttcgttcggcggcgaaaattaccacgatgtaa

SEQ ID NO: 22990 - protein, 139 aa, Unknown
  Obtained from environmental sample
  DOMAIN (14)...(128): MGS-like domain
  misc_feature (1)..(139): Xaa is any amino acid
MKRRALISVFYKDGIPELASYLNGAGWEILSTGGTSKYLKENNIPVTDVSSVTGFPECLDGRVKTLHPAIHAGLLARRDEKNHMDTLQALGLAAIDLVCVNLYPFFEKVQAKLTLEQTVEFIDIGGPTMLRSAAKITTM

SEQ ID NO: 22991 - DNA, 720 bp, Unknown
  Obtained from environmental sample
  misc_feature (1)..(720): n is a, c, g, or t
atgacaaacattcaggcgaaggatttaggccacaaggaacttaaccgactgattaggaacgccggggaagacatttgcatagatgaatgttttgggcagaggtttatcggcagcggcatgagcggcaaaaatataacaataaacggaacgccggggaacgcgatgggcgcttattttaacggcggaacaatccttgttaacggaaacgcacaggacgctgtcggcgatacaatgaacgacggcaagatcatcatccacggcaacgccggcgacgcgcttggttacgccatgcggggcggcagcatttttgttaaaggcaacgccgggtacagaacaggcatccacatgaaagaatacaaggagaaaaaacctgtcatcgttgtaggcggcaagacgggcagtttcctgggcgaatacctcgccgggggcctgattatcgtgcttggcattggttttgaggaagctcctgtttattactttacagggaccggaatgcacggcggtcaaatttttatcccgacaaccaaggagctcctgggcctgcccgcgcaggttaccctgacagacgtcaaggcggaagacttaaatgaaatcaagccctatgtcaacgaatntgcggaatattttggaatggacgcggaatcacttttgaaagacaattttcatttattgaagccaaacgcgaggaacccgtacaaacaactatatacaacaaattga

SEQ ID NO: 22992 - protein, 239 aa, Unknown
  Obtained from environmental sample
  DOMAIN (2)...(211): GXGXG motif
  misc_feature (1)..(239): Xaa is any amino acid
MTNIQAKDLGHKELNRLIRNAGEDICIDECFGQRFIGSGMSGKNITINGTPGNAMGAYFNGGTILVNGNAQDAVGDTMNDGKIIIHGNAGDALGYAMRGGSIFVKGNAGYRTGIHMKEYKEKKPVIVVGGKTGSFLGEYLAGGLIIVLGIGFEEAPVYYFTGTGMHGGQIFIPTTKELLGLPAQVTLTDVKAEDLNEIKPYVNEXAEYFGMDAESLLKDNFHLLKPNARNPYKQLYTTN

SEQ ID NO: 22993 - DNA, 573 bp, Unknown
  Obtained from environmental sample
  misc_feature (1)..(573): n is a, c, g, or t
atggatagcgctttgatagtttcctgcatggaaaaagacactgctttttttacagagctgttaggcgcagcttccattcgtcatattacttcgctgaagtctgtcgaaaacgcgcagaagctaattttacaggaagacttcgaccttgtgattgtcaacgcgccactgcgcgacgaaagcagggaaaatttttccagatacatagcttcaaaaggcgcgtctcaggttatcctcctggtagaaaacgaatgttataattatgtttcatcggcttgtgaaaacgacggagtatttgtaattccaaaaccgctggaaaaggcggcttttttatccgcgctgtccctggtaaaatcggcccaaagcaggattaagcggatacagaatgaaaacgcacagctaaagcaaaaaattgaggacatacgcattatcgaccgcgcgaaatgtatattaatatccattatgaaaatgaatgagcaggaagcccacaggtatatagaaaaacaggcgatggacattcgctcaacaaagagaattgtagccgaagggatattaaaactgtatgagaactattag

SEQ ID NO: 22994 - protein, 190 aa, Unknown
  Obtained from environmental sample
  DOMAIN (129)...(184): ANTAR domain
  misc_feature (1)..(190): Xaa is any amino acid
MDSALIVSCMEKDTAFFTELLGAASIRHITSLKSVENAQKLILQEDFDLVIVNAPLRDESRENFSRYIASKGASQVILLVENECYNYVSSACENDGVFVIPKPLEKAAFLSALSLVKSAQSRIKRIQNENAQLKQKIEDIRIIDRAKCILISIMKMNEQEAHRYIEKQAMDIRSTKRIVAEGILKLYENY

SEQ ID NO: 22995 - DNA, 825 bp, Unknown
  Obtained from environmental sample
  misc_feature (1)..(825): n is a, c, g, or t
atggcaaagggagggacggccaacgcgaccgagaaaacggttgtatccgtaaatctactttccgaaatgataacggcttccggtcttggaccgtattcaaaaagtgaactatcaggaaaacttgcagggaagcaggtaacaatgtctttctgggattcttatttttaccgtggtttccaggggtcgtccacaacggctgatttaaaaacgctttttcagatgatatatcttttctttacacagccccgtctggagcaaagggcggtttccgccatgcttgatcagtacaaaacagcccttttacatcagaacgatgatccgcaaaccgtattctcgcgtgaattaacaaaaatgctttacaataaccatccgctttttaagcctcttgaatatgacgatatcgccaaggtttccataaaagacgctgatgattttttaaagctgtatattaatccgggcgattatacttttgtatttacaggtaacgttaacctgaatgtcatacgcgaattatcggtcagttacatcggttcaattcccgtttcccagtcgatgaacaactggcataatcccggaataaagcgctctactgaaggcagaagaacaatttataagggaaaagatgataagagtatggtctatcttagctggtatgcgaacggaccggcggatttcagcgaacagagaaatcaaaatgcgtcccttttgtccgaatatcttgagataattttaaacgatgaaatccgcgaaaaattggggcggagtatattcaattttccctcagcgcgtcggttaatacaattccgtacggcgaatacagtgtaa

SEQ ID NO: 22996 - protein, 274 aa, Unknown
  Obtained from environmental sample
  misc_feature (1)..(274): Xaa is any amino acid
MAKGGTANATEKTVVSVNLLSEMITASGLGPYSKSELSGKLAGKQVTMSFWDSYFYRGFQGSSTTADLKTLFQMIYLFFTQPRLEQRAVSAMLDQYKTALLHQNDDPQTVFSRELTKMLYNNHPLFKPLEYDDIAKVSIKDADDFLKLYINPGDYTFVFTGNVNLNVIRELSVSYIGSIPVSQSMNNWHNPGIKRSTEGRRTIYKGKDDKSMVYLSWYANGPADFSEQRNQNASLLSEYLEIILNDEIREKLGRSIFNFPSARRLIQFRTANTV

SEQ ID NO: 22997 - DNA, 828 bp, Unknown
  Obtained from environmental sample
  misc_feature (1)..(828): n is a, c, g, or t
atgaaaatggactattttcccgttgcgtcaagaggtatagcgatagaacgcgccctttcgattaatggggaagttcctttccttggagccgacaggctttcattccagcgcgtttggggcgacagcggcagcagccgttttgacaatcagggcaacgaaattcgcgcctcccaaattgaaaaaccgcgctgggagagcgcgtggtttatggattcattgggttatattacggagccttattcgttttatttgcggcagggcgcgaataccatcagacttacaggcgtaaatgaacctgtagttattcgatctctcgaaataaaagctcctgttcaaacccaaagctaccgcgactatatttcaagcataaatctggataaattcaaaaacagccgcagtaattattctttaaagattcagggagaaaaagcggtacgaaggtctgatccttcactgtatcctatttatgaccgttcttccggcgcaacggaacctccgagcgttgcaagaatcaggcttaacatgattggcggtcagagttggcgcgttgcgggacagtggattgaatgggaatttgaagttcccgaaaacgggctttaccgtatctcaataaagggcaggcaaaattataaccgtggttttgtttcaaaccgcagtgttatgatcaacggcgagcttcccgttaaggaacttgccgcagtgccttttaactacagcaataaatggaatctttccacgcttggcgataaaagtgaaaatttttatttcccgttggaagccggcttaaacactctcccgcgttcangcgactttgggcggtatgggtga

SEQ ID NO: 22998 - protein, 275 aa, Unknown
  Obtained from environmental sample
  misc_feature (1)..(275): Xaa is any amino acid
MKMDYFPVASRGIAIERALSINGEVPFLGADRLSFQRVWGDSGSSRFDNQGNEIRASQIEKPRWESAWFMDSLGYITEPYSFYLRQGANTIRLTGVNEPVVIRSLEIKAPVQTQSYRDYISSINLDKFKNSRSNYSLKIQGEKAVRRSDPSLYPIYDRSSGATEPPSVARIRLNMIGGQSWRVAGQWIEWEFEVPENGLYRISIKGRQNYNRGFVSNRSVMINGELPVKELAAVPFNYSNKWNLSTLGDKSENFYFPLEAGLNTLPRSXDFGRYG

SEQ ID NO: 22999 - DNA, 534 bp, Unknown
  Obtained from environmental sample
  misc_feature (1)..(534): n is a, c, g, or t
gtgagcccccgacggtacgccctcgtcgcgaatgcggagcattttgccgttttgggttccggggggcactttcacctttattgttttgccgtcaagggtgctgacgcggatttccgcgcccagagccgcctgggttaccgagattggaaccgcgcagtacagatcaaagtcatgccgctcaaaatattcatggggcttaatccggattatcacatacagatcgcctgccggggcgccgttttggcccgcgtcgccctgccggggaataaccagccgccttccgttttcaacccccgcgggaatagttaccgcgatttttatccgtttcttctgggtgccggagccgccgcattccgggcagggcctttcaataataaagccttgccctctgcaattgggacaggtagactgtaccgagaaaaaactttgggtacgccgtacctgaccggaaccttggcaggtagggcaagttttcctttccgcgcctttggcggccccggagcctttgcaagcctgacaagattcgttgtgtaa

SEQ ID NO: 23000 - protein, 177 aa, Unknown
  Obtained from environmental sample
  misc_feature (1)..(177): Xaa is any amino acid
MSPRRYALVANAEHFAVLGSGGHFHLYCFAVKGADADFRAQSRLGYRDWNRAVQIKVMPLKIFMGLNPDYHIQIACRGAVLARVALPGNNQPPSVFNPRGNSYRDFYPFLLGAGAAAFRAGPFNNKALPSAIGTGRLYREKTLGTPYLTGTLAGRASFPFRAFGGPGAFASLTRFVV

SEQ ID NO: 23001 - DNA, 573 bp, Unknown
  Obtained from environmental sample
  misc_feature (1)..(573): n is a, c, g, or t
ttgattaatagcaaatacaatacggcatatcatatgataaaatttgagaaaacagccaatgctcttaaaggatatacggaaaaagtaacattcagttttattgatttctataaaaagatagcggaaaatataaaaccattggggattattgaaatatcaacagaagaaaaaatgaccattgcccaaaaattttcagaaattgctaaaaataataattttttaattgatacatgcgcggaagatattgatctttcagaatacggtattacgcgcgctcgctgtatagacgacaggttaattttaaaaataacaggatataatttatctgttgaaaaagacagaaaccagcgcccggaatgcggctgtgtcaaaagtattgatctaggcgaatataactcctgttccaatggctgcgtttattgttatgcgaattatagcaataatattgttgaaaaaaatatcaaaaaacatattccgtcattgccgttattgacaggtgatatttaccctgatgatattataaaggaacgtaaagttacaagtgaaaaaatatttcagaatgagcttttttaa

SEQ ID NO: 23002 - protein, 190 aa, Unknown
  Obtained from environmental sample
  misc_feature (1)..(190): Xaa is any amino acid
MINSKYNTAYHMIKFEKTANALKGYTEKVTFSFIDFYKKIAENIKPLGIIEISTEEKMTIAQKFSEIAKNNNFLIDTCAEDIDLSEYGITRARCIDDRLILKITGYNLSVEKDRNQRPECGCVKSIDLGEYNSCSNGCVYCYANYSNNIVEKNIKKHIPSLPLLTGDIYPDDIIKERKVTSEKIFQNELF

SEQ ID NO: 23003 - DNA, 855 bp, Unknown
  Obtained from environmental sample
  misc_feature (1)..(855): n is a, c, g, or t
gtgacacggcatttatataacattacgctgcctgaacgcgacggcagatacggctacccaaaactcagcccgttatcccgcgcttttgcggaaacaaaccggtcgcgtgaaattatcgacaattaccccgaataccgcggtatggaaatgcacgtcactgaattcaacacatcgtactcgccgcgcactcccatacacgacacaaatcttaacgccgcatatatcgcctaccagcttgcatacctcggcgacacatgcgaatcatactcatattggacattcggggacatttttgaagaatccggcgtacctttcacgccttttcacggaggattcggacttgtcgccaacggaaagatatttaaacctacatactgggcgtttaaatttttcaaggacctgggaaacggcgaatgtattcatcgttcagaaaacgcagtcgttttaaagaaagcagacggaacttaccgcggcatcgcgtggaatatcatagcagctaacagtccttccggcaaagactgcggcaaattaacgctttctttcacatttgaaaattgcgcgttcaaggaaagcggctgctgcgttgtaacaaaaacagttgatgaagacgtatgcaatccgttaaaagtatggcatgatattggagaacccgctaacccgtcaaaggaacaaagtctgctccttcgtgaaagcgcatcgccgcttattaaaactcagcgcggcagcggcgcgcctgttatcgaattaacgcttggacgtaatgcgcttgtatactttgaggtattttccgcgccaataacaagcgatcgcggatttgactatgaacgcgcggtaaatattgagtttgcggaataa

SEQ ID NO: 23004 - protein, 284 aa, Unknown
  Obtained from environmental sample
  DOMAIN (1)...(264): Glycosyl hydrolases family 39
  misc_feature (1)..(284): Xaa is any amino acid
MTRHLYNITLPERDGRYGYPKLSPLSRAFAETNRSREIIDNYPEYRGMEMHVTEFNTSYSPRTPIHDTNLNAAYIAYQLAYLGDTCESYSYWTFGDIFEESGVPFTPFHGGFGLVANGKIFKPTYWAFKFFKDLGNGECIHRSENAVVLKKADGTYRGIAWNIIAANSPSGKDCGKLTLSFTFENCAFKESGCCVVTKTVDEDVCNPLKVWHDIGEPANPSKEQSLLLRESASPLIKTQRGSGAPVIELTLGRNALVYFEVFSAPITSDRGFDYERAVNIEFAE

SEQ ID NO: 23005 - DNA, 798 bp, Unknown
  Obtained from environmental sample
  misc_feature (1)..(798): n is a, c, g, or t
gtggtgttctgcaatgcccctgaggacaatcccttcatggcgggcgcttttcatggtgtcggcgagggggagagctgcctaaacatcggggtatcaggtcctggtgtagttaaggccgcgctggaaaacctcaggggggccagctttgacgaacttgccgatgcgataaaaaagaccgcattcaaaattacccgcatgggacagcttgtgggaatggaagccgcgcggcggctgggcgtaccttttggcatattggatctttcccttgcgcccacccctgaggttggggattcagtagcacgtatccttgaggagatgggacttgaaactgcgggaacccacggcactacggcagcccttgccatgttaaccgacatgataaaaaaaggcggcataatggcgtctacccatgtaggcggtttttccggggcctttatccccgtttcagaggatgaaggcatggttaacgcagtgaagaaaggcgcgctcagccttgataaacttgaggcgatgacttcggtctgctctgtcggtctggacatgatcgccctgcccggtgacacaagcgccgctacgctttcggcgatcattgccgatgaaatggcgattggcatggtgaataacaagaccactgcggtgcggattattcccgtgcctggaaaaaaagcaggcgattgggcggaattcggcggcctcctcggaggcgctcccgtcctgccgataaattccgcaagatgcgatgctttcattaatcgtggcgggagaataccggctccggttcactcattcaggaattag

SEQ ID NO: 23006 - protein, 265 aa, Unknown
  Obtained from environmental sample
  DOMAIN (1)...(265): Uncharacterized ACR (DUF711)
  misc_feature (1)..(265): Xaa is any amino acid
MVFCNAPEDNPFMAGAFHGVGEGESCLNIGVSGPGVVKAALENLRGASFDELADAIKKTAFKITRMGQLVGMEAARRLGVPFGILDLSLAPTPEVGDSVARILEEMGLETAGTHGTTAALAMLTDMIKKGGIMASTHVGGFSGAFIPVSEDEGMVNAVKKGALSLDKLEAMTSVCSVGLDMIALPGDTSAATLSAIIADEMAIGMVNNKTTAVRIIPVPGKKAGDWAEFGGLLGGAPVLPINSARCDAFINRGGRIPAPVHSFRN

SEQ ID NO: 23007 - DNA, 699 bp, Unknown
  Obtained from environmental sample
  misc_feature (1)..(699): n is a, c, g, or t
atgaaagcatcgcatcttgcggaatttatcggcaggacgggagcgcctccgaggaggccgccgaattccgcccaatcgcctgctttttttccaggcacgggaataatccgcaccgcagtggtcttgttattcaccatgccaatcgccatttcatcggcaatgatcgccgaaagcgtagcggcgcttgtgtcaccgggcagggcgatcatgtccagaccgacagagcagaccgaagtcatcgcctcaagtttatcaaggctgagcgcgcctttcttcactgcgttaaccatgccttcatcctctgaaacggggataaaggccccggaaaaaccgcctacatgggtagacgccattatgccgcctttttttatcatgtcggttaacatggcaagggctgccgtagtgccgtgggttcccgcagtttcaagtcccatctcctcaaggatacgtgctactgaatccccaacctcaggggtgggcgcaagggaaagatccaatatgccaaaaggtacgcccagccgccgcgcggcttccattcccacaagctgtcccatgcgggtaattttgaatgcggtcttttttatcgcatcggcaagttcgtcaaagctggcccccctgaggttttccagcgcggccttaactacaccaggacctgataccccgatgtttaggcagctctccccctcgccgacaccatga

SEQ ID NO: 23008 - protein, 232 aa, Unknown
  Obtained from environmental sample
  misc_feature (1)..(232): Xaa is any amino acid
MKASHLAEFIGRTGAPPRRPPNSAQSPAFFPGTGIIRTAVVLLFTMPIAISSAMIAESVAALVSPGRAIMSRPTEQTEVIASSLSRLSAPFFTALTMPSSSETGIKAPEKPPTWVDAIMPPFFIMSVNMARAAVVPWVPAVSSPISSRIRATESPTSGVGARERSNMPKGTPSRRAASIPTSCPMRVILNAVFFIASASSSKLAPLRFSSAALTTPGPDTPMFRQLSPSPTP

SEQ ID NO: 23009 - DNA, 1605 bp, Unknown
  Obtained from environmental sample
  misc_feature (1)..(1605): n is a, c, g, or t
atgctcttaaaagtggttatatcttccaacctcgctattacaaattatccgacgcttcataacttcggccttgtaaaaccgactatagacggttttgcgaaatgggtaggagaggattttgccgccagcgaagtattgtttctgattaacggcatgatggcgattcaggaacgcatcaaagaactggaaggcaaaaccaaagagaaggaagaaatttccggtaagattaagatcatcaaacgcctgcttggcattaaaggaccgtcaaatgaactgcacggcaaagaagaaaagacgcccgagcccaagaaaaaatccgcaaaggaatacatggaagagtacggcaagtatttcccaaagggcttttttgacgacgccgaaggccagcttcttattacgctcggcgaaatatccagaatgttaagcatggacgagcagaacgataatgatacggcgattatgatccagcccatggtatacggcaattacggcaaagattcctgctcaggcggattttacagccgtaacgtggttaccggcgaaaagaaacttcagggcagttttttcaggaataagtttaacgagattggcgctgaagggcacgagatcaataaaattgacgctgtgtatcttaaacagatggaaaaaatagcgtggactctggaagacaaatttaaagaaatccgttatgtccgctttaccgtggaaaacggaaaactttggcttatagagcaaaggctggtagatcaaaaatcaacgcaggctgatcttaaactcttgcttgatcttcaaaagaggaaaatagttgacgcggcttatgtggtaaaggcgattgatcctttaaggcttaatgaaattctgcatcctgtaattaatcctgccagcgttaagggatttaaatcatggaagggcggtatcgcgggcgctccgggcgcggcgataggacgcgtttatttcagcacggacgctttgttggaagcgaaaaaagcggcgacacagcagggaaacaaagacagttttattctctgtcttgaatcttcttttgcggaagacgtaaaagcgattgaagtaagcgccggcgtattaaccgccgagggcggatattccgctcacgcgtccgtagtagcgcgccagtacggaaaagtgtcgcttgtatctcccgagcttaaaattaaaggaacaaaagcgaccctaggcgattttagtttctccgaaggaaactacataaccatcgatgttcctttctacggcgaatcaaaagtgtatcttggaacggcggaacttatagagcctgatccaaaaggttcggggcttctggactttatcgatctttccaagggcttcttaaaagaattccatgtcagatgtaacgcggatactccaagggacgctaaacttgctttagacttcggcgcggacggcgtaggtttgtgccgcacggaacatatgttctttaaagcggatcgcatcaatgttttccgcgatatgctgatgtccgatgacaaaaaagaacgccagaaggttttgaataaactgcaaataatgcaaagggaagatttttacggcattatgaaagtgatggcggcaaggactcggccaatctga

SEQ ID NO: 23010 - protein, 534 aa, Unknown
  Obtained from environmental sample
  DOMAIN (312)...(411): PEP-utilising enzyme, mobile domain
  misc_feature (1)..(534): Xaa is any amino acid
MLLKVVISSNLAITNYPTLHNFGLVKPTIDGFAKWVGEDFAASEVLFLINGMMAIQERIKELEGKTKEKEEISGKIKIIKRLLGIKGPSNELHGKEEKTPEPKKKSAKEYMEEYGKYFPKGFFDDAEGQLLITLGEISRMLSMDEQNDNDTAIMIQPMVYGNYGKDSCSGGFYSRNVVTGEKKLQGSFFRNKFNEIGAEGHEINKIDAVYLKQMEKIAWTLEDKFKEIRYVRFTVENGKLWLIEQRLVDQKSTQADLKLLLDLQKRKIVDAAYVVKAIDPLRLNEILHPVINPASVKGFKSWKGGIAGAPGAAIGRVYFSTDALLEAKKAATQQGNKDSFILCLESSFAEDVKAIEVSAGVLTAEGGYSAHASVVARQYGKVSLVSPELKIKGTKATLGDFSFSEGNYITIDVPFYGESKVYLGTAELIEPDPKGSGLLDFIDLSKGFLKEFHVRCNADTPRDAKLALDFGADGVGLCRTEHMFFKADRINVFRDMLMSDDKKERQKVLNKLQIMQREDFYGIMKVMAARTRPI

SEQ ID NO: 23011 - DNA, 888 bp, Unknown
  Obtained from environmental sample
  misc_feature (1)..(888): n is a, c, g, or t
ttgattaatactgaaactgttggggaagccgcccttaataaactctgcgcttcccttgtaaaagacgcgcttattcttgaaagcgaagggattaaaggcattccgataaatcatataagaagcgcgtcctactggtgcagacttgcacctaacggaaagcgtaaaacactggtaattgaaaacgccgagaccatgagggatgacgcgcgtaattcgcttttaaaactccttgaagaaccaccgccttccgtcagcattgttcttaccgcccagaggcgcgaagccataatgcagactattttatcgcgtctgcgtccataccgctttttaaaaaggagcgaggaaagcgagaaggaagttattaaaaacgtgtttaaggaaaattcagaattagcttatcccaatcaaaaaggttcgatactttcttcttatcttgattcatttcttcctcagagtacggaaaaattgtatccgcttgccgcatggtttattgtttcttttgcgaggacggcttccatttatgcgaaaagtaaagggcacgttcccgcatttttaatagcgttaggtgaacaatacgcgccagtcgcggaaacggcgggacttgagcgttattcaaaaaacagcaccattgtaaaagcaatactgggtaaaagtaaaaactttgaagaagtttcattctcacgttttatgagcatcacactggaattaaccggcgattgtttacgcgctatgaataatcctgaatatatcgcatataacgatttaattaaaaaatatgttagtgaagccgtaacttcggttgaagtgcttaatataaacgccgcaattacgcttgaaaatcttctatataaaataaaaacggcggcaacaagagggcattatggttga

SEQ ID NO: 23012 - protein, 295 aa, Unknown
  Obtained from environmental sample
  misc_feature (1)..(295): Xaa is any amino acid
MINTETVGEAALNKLCASLVKDALILESEGIKGIPINHIRSASYWCRLAPNGKRKTLVIENAETMRDDARNSLLKLLEEPPPSVSIVLTAQRREAIMQTILSRLRPYRFLKRSEESEKEVIKNVFKENSELAYPNQKGSILSSYLDSFLPQSTEKLYPLAAWFIVSFARTASIYAKSKGHVPAFLIALGEQYAPVAETAGLERYSKNSTIVKAILGKSKNFEEVSFSRFMSITLELTGDCLRAMNNPEYIAYNDLIKKYVSEAVTSVEVLNINAAITLENLLYKIKTAATRGHYG

SEQ ID NO: 23013 - DNA, 738 bp, Unknown
  Obtained from environmental sample
  misc_feature (1)..(738): n is a, c, g, or t
atggttgattttttcagacgcgccttaaaaaaactcgacagactcaactcggaacaacgcaaagagctattaatttcagccgtggaagaaatcgacctgcttggaaatgttcttgattcaatagatatgggcattctcgtttgtgataacaaggataatcttgttttggcgaataaatgcgcccttagaatgatatctatgaattacaatgaaggagtcaagttagaagaagccattttagacgatcaatttattgaaacttttaaggagataatcgccaaccgcgaaaaaataattgataaagagatagaaatagatcagcaggagcgcagaaggttatattccgtgaatgtcgtccctcttgttcataacaaaaaaattgctgggactcttatttacatagaagatattacggaaaaaagaagaggagaggcgcgtcttagaagggcagaaaatcttgcaagccttaccactttagccgccggcgtggcacatgaaattaaaaacccgcttggttcaatatcgatacatcttcagctcttgcaaaaagcacttgctaaaaaaagcgaggcttccgaaaagaaaacagataaatatttttctgttattaaagaagaaattgacaggcttaaccgcattgtagtagattttctttttgccgtgcgtcctatgaatcttgagttacgcgaaagtgacattaacaaattatcgcgcagattatggatttgtttagtttga

SEQ ID NO: 23014 - protein, 245 aa, Unknown
  Obtained from environmental sample
  DOMAIN (155)...(226): His Kinase A (phosphoacceptor) domain
  misc_feature (1)..(245): Xaa is any amino acid
MVDFFRRALKKLDRLNSEQRKELLISAVEEIDLLGNVLDSIDMGILVCDNKDNLVLANKCALRMISMNYNEGVKLEEAILDDQFIETFKEIIANREKIIDKEIEIDQQERRRLYSVNVVPLVHNKKIAGTLIYIEDITEKRRGEARLRRAENLASLTTLAAGVAHEIKNPLGSISIHLQLLQKALAKKSEASEKKTDKYFSVIKEEIDRLNRIVVDFLFAVRPMNLELRESDINKLSRRLWICLV

SEQ ID NO: 23015 - DNA, 711 bp, Unknown
  Obtained from environmental sample
  misc_feature (1)..(711): n is a, c, g, or t
atgaatctttataaaccaataaaaatcggctctctcgaattatcaggaaatctctttcttgcgcctgtggctgggtacactgatcgtgcgtttcgttccatttgcgccgaggagggggcggacttttcgtttacggaacttgtttccgccgaagcgctttatcgtaattttggacggtacgggttgggtgcggaagcggatgcgttttcaggtaacagcgccgctatcaatttggttcgacgtggagagaaagagaaacgttacgctatacaattattcggcggagagagcgaagctatctacaaggcggctgttttgcttgcgccgttgaaacccgacgctgtagacattaacgcagggtgtcctgttcccaaagttgtaaaaaacggcgcaggatcggcgttgatgaaaaatccgtccgttatcggaaaaattgtggaagccgccgttcgagcttcccgtgaaagtttggggtctgttcccgtaacaataaaaatacgttcaggctgggacagtaaatcgatcagctacgccgaatgcgcaaggattgccgttgaggcgggagcggcaatgatcagtctgcacccgcgcacacgagcgcaaaattacggcggcaaaagcgactggtctcatatagcggatttagtttcccgcctgagcgtccccgttacaggttccgggcgatctttactcgccggaggacgcgcttaa

SEQ ID NO: 23016 - protein, 236 aa, Unknown
  Obtained from environmental sample
  DOMAIN (19)...(236): Dihydrouridine synthase (Dus)
  misc_feature (1)..(236): Xaa is any amino acid
MNLYKPIKIGSLELSGNLFLAPVAGYTDRAFRSICAEEGADFSFTELVSAEALYRNFGRYGLGAEADAFSGNSAAINLVRRGEKEKRYAIQLFGGESEAIYKAAVLLAPLKPDAVDINAGCPVPKVVKNGAGSALMKNPSVIGKIVEAAVRASRESLGSVPVTIKIRSGWDSKSISYAECARIAVEAGAAMISLHPRTRAQNYGGKSDWSHIADLVSRLSVPVTGSGRSLLAGGRA

SEQ ID NO: 23017 - DNA, 417 bp, Unknown
  Obtained from environmental sample
  misc_feature (1)..(417): n is a, c, g, or t
atgtcccgcaggcggcctatggattccagtatttgtttcccgcccacttcctgctcttccatcgcgtttaagatattttgctcatgttcggaaactgtttttacgcctgagtctatcgcgccgaaacgctccaatacctcgtcggatgatttggtgatgctgtctatggacgtttttatttttttaagcatagtcgcggtagtttttgactgttcgcttgatgattcggcaagcttgcggatttcatcggcgactacggcaaagcccttgccggcttctccggcgtgcgccgcctcaatagcggcgttcatagaaagcaggttggtctggctggcgatattgtccattacggcgtttatttccaacagaccctcggagtccttcgatatttcctgtatcatctgcgccactgtctga

SEQ ID NO: 23018 - protein, 138 aa, Unknown
  Obtained from environmental sample
  misc_feature (1)..(138): Xaa is any amino acid
MSRRRPMDSSICFPPTSCSSIAFKIFCSCSETVFTPESIAPKRSNTSSDDLVMLSMDVFIFLSIVAVVFDCSLDDSASLRISSATTAKPLPASPACAASIAAFIESRLVWLAILSITAFISNRPSESFDISCIICATV

SEQ ID NO: 23019 - DNA, 534 bp, Unknown
  Obtained from environmental sample
  misc_feature (1)..(534): n is a, c, g, or t
gtggatgatctcgctcaaaaacgtggtcaagcgctatgggcggcaccactatggcctgaacgaggtcacgttccagatataccccggcgagttcgttttcctgacagggccgagcggcgcgggcaagaccacgctgctcaggctgctgttcagggaggagaccgccacgtcgggcgatgtcagcgtggccggccacaggctgaacgagatgccgcccagggaggtccccgtcctgcggcgcaagctgggcgtggttttccaggacttcaagctagtccaggacatgacagtgttcgagaacgtggccttcgtcctcaagatactgggcgcgggccgcaacgagcagaggcagcggtcgtggagggctctgaagatggtgggcctgcagcacaggctcgccagcttccccaggcagctctccggcggccagcagcagcgcgtcgccatagcgagggcgctggcaaacgaccccctgctgctgctggccgacgagcccaccggcaacctggacccagagcttctcggccgatctga

SEQ ID NO: 23020 - protein, 177 aa, Unknown
  Obtained from environmental sample
  misc_feature (1)..(177): Xaa is any amino acid
MDDLAQKRGQALWAAPLWPERGHVPDIPRRVRFPDRAERRGQDHAAQAAVQGGDRHVGRCQRGRPQAERDAAQGGPRPAAQAGRGFPGLQASPGHDSVRERGLRPQDTGRGPQRAEAAVVEGSEDGGPAAQARQLPQAALRRPAAARRHSEGAGKRPPAAAGRRAHRQPGPRASRPI

SEQ ID NO: 23021 - DNA, 456 bp, Unknown
  Obtained from environmental sample
  misc_feature (1)..(456): n is a, c, g, or t
ttgccggtgggctcgtcggccagcagcagcagggggtcgtttgccagcgccctcgctatggcgacgcgctgctgctggccgccggagagctgcctggggaagctggcgagcctgtgctgcaggcccaccatcttcagagccctccacgaccgctgcctctgctcgttgcggcccgcgcccagtatcttgaggacgaaggccacgttctcgaacactgtcatgtcctggactagcttgaagtcctggaaaaccacgcccagcttgcgccgcaggacggggacctccctgggcggcatctcgttcagcctgtggccggccacgctgacatcgcccgacgtggcggtctcctccctgaacagcagcctgagcagcgtggtcttgcccgcgccgctcggccctgtcaggaaaacgaactcgccggggtatatctggaacgtgacctcgttcaggccatag

SEQ ID NO: 23022 - protein, 151 aa, Unknown
  Obtained from environmental sample
  SIGNAL (1)...(19)
  DOMAIN (4)...(42): Protein of unknown function (DUF1602)
  misc_feature (1)..(151): Xaa is any amino acid
MPVGSSASSSRGSFASALAMATRCCWPPESCLGKLASLCCRPTIFRALHDRCLCSLRPAPSILRTKATFSNTVMSWTSLKSWKTTPSLRRRTGTSLGGISFSLWPATLTSPDVAVSSLNSSLSSVVLPAPLGPVRKTNSPGYIWNVTSFRP

SEQ ID NO: 23023 - DNA, 324 bp, Unknown
  Obtained from environmental sample
  misc_feature (1)..(324): n is a, c, g, or t
gtggagcaggtggacggcgcggtgtgctacaaggtggagctgacgcgcaaaacaggctccccgcgcatccagtatttctccaaggacacgggccttttggtcaagcaggagatggaggcggacaccccgatgggcaaactgtccgtggcctccatgctaaaggactaccgcaagacaggcggcgtgcttatgccattcaagacagtcagcaccttcgccggccagacatcaaccatcaccttcacggaggtgaaggtcaacgtggacatcccgaaatccacgttcgacccccccaaggaggtcatggagcttctgaagaagtag

SEQ ID NO: 23024 - protein, 107 aa, Unknown
  Obtained from environmental sample
  misc_feature (1)..(107): Xaa is any amino acid
MEQVDGAVCYKVELTRKTGSPRIQYFSKDTGLLVKQEMEADTPMGKLSVASMLKDYRKTGGVLMPFKTVSTFAGQTSTITFTEVKVNVDIPKSTFDPPKEVMELLKK

SEQ ID NO: 23025 - DNA, 555 bp, Unknown
  Obtained from environmental sample
  misc_feature (1)..(555): n is a, c, g, or t
atgacaatagacgctgaactcagggaaatcatgtacaaaaaaacaagtggccgcccggaccaataccccgacaatacggtggaagttctgctgcccatggttcgttttttcatgccaaacgcgcagctcctctggattaggctgccggctgatatgtcttcttttgactcaggcaggtcgcttgcagaggcggcaaaggatctggggcggaacatcgttgtcctcggatccacggatctgacccattacggccctaactacagatacacgcccaaaggctgcggaccgcaggccttaaaatgggtaaaggaagtcaacgaccggaaatttattgaagctgtagaatccggggatccgcgggcagtgctggaaagagccgaggctgacttatcaagctgttccgcaggcgcggtactcggcgcgatgggttacgcctccgccgcaaacgccggccccgcccgacttctcgaatacagcaccagcgccgacgcaactacggatattcccgattcatttgtgggatatgcggcaattcaaatagcaaatagcaagtag

SEQ ID NO: 23026 - protein, 184 aa, Unknown
  Obtained from environmental sample
  DOMAIN (4)...(179): Protein of unknown function DUF52
  misc_feature (1)..(184): Xaa is any amino acid
MTIDAELREIMYKKTSGRPDQYPDNTVEVLLPMVRFFMPNAQLLWIRLPADMSSFDSGRSLAEAAKDLGRNIVVLGSTDLTHYGPNYRYTPKGCGPQALKWVKEVNDRKFIEAVESGDPRAVLERAEADLSSCSAGAVLGAMGYASAANAGPARLLEYSTSADATTDIPDSFVGYAAIQIANSK

SEQ ID NO: 23027 - DNA, 489 bp, Unknown
  Obtained from environmental sample
  misc_feature (1)..(489): n is a, c, g, or t
ttggactgtatactggaagacagaacagaaaatgaaagcaaatacatcattgttgattttaagttaaaacatcttccaaaacgcgcggattgcacaggcggcgaagatgaagagcttcgcgatttccagcttcccatgtacataacccttgcggaagaaaatgaaaaaataattgtgaataccgcgcttttcttcagtattttggatttaaagccggaagtgataataggctttgccgaggataaatacaatgaaataacaatcccaaaaaaagaagacgcccgtattttgcgtaacagcgttaaatacaatcaaataataaatgaatttaatcaaaaagcaaaacagtttgcggacgaaattaaaaagatgagcttttccgtttttgaatctgattacaacgaatgtaacaactgtaattataacaggatttgccggacggcctatataatagaccgtgaaaaaaatatttcattggggaataattga

SEQ ID NO: 23028 - protein, 162 aa, Unknown
  Obtained from environmental sample
  misc_feature (1)..(162): Xaa is any amino acid
MDCILEDRTENESKYIIVDFKLKHLPKRADCTGGEDEELRDFQLPMYITLAEENEKIIVNTALFFSILDLKPEVIIGFAEDKYNEITIPKKEDARILRNSVKYNQIINEFNQKAKQFADEIKKMSFSVFESDYNECNNCNYNRICRTAYIIDREKNISLGNN

SEQ ID NO: 23029 - DNA, 399 bp, Unknown
  Obtained from environmental sample
  misc_feature (1)..(399): n is a, c, g, or t
gtggtatggtttataaaaaattcagggagctttataaagctttatttaggaggaaaaatgaaaaagaatttgtatttgtttgtagttttatgtattactgccttattgttaggatgttcaatgatgcaggaacaaaaaacagcaataattgaactcgaagccaacgcaactactggttatacttggatctatactatatcaccggaaggtatagtacatgaagtgtcaaacgaatacattcctgataaaaataacgaaggaatagacggtgctggtgggaaacatatctttacttttgaggctattgccgaaggaaaagcagaacttattttttcatatctcagagaatgggaagtaggcatacctccgataaaaacagtaacctacacagcgatgtag

SEQ ID NO: 23030 - protein, 132 aa, Unknown
  Obtained from environmental sample
  misc_feature (1)..(132): Xaa is any amino acid
MVWFIKNSGSFIKLYLGGKMKKNLYLFVVLCITALLLGCSMMQEQKTAIIELEANATTGYTWIYTISPEGIVHEVSNEYIPDKNNEGIDGAGGKHIFTFEAIAEGKAELIFSYLREWEVGIPPIKTVTYTAM

SEQ ID NO: 23031 - DNA, 363 bp, Unknown
  Obtained from environmental sample
  misc_feature (1)..(363): n is a, c, g, or t
atggtagtccgaatggcaatcttaatgtctgaacgcatttggctgctctaccgccagcttgataacacattaatagaaaatccgttagggcgcatntatgacgccctgcttatccagcttgaaaaaaatcgggttgacattaacagcaacggttcgtatcaatgtagcttcggtattaaggaattaataggtatggccggtatgcccgaatccgagaataaacaccttgaccgtaaagtcgccggtgacggaaaactgacctttaaggacgataaaattcagatagacaaaatctccgacatactaaaagaatccgtattctaccgcaaggcgcaaaaaatagctgaaaacagaaaaaggtaa

SEQ ID NO: 23032 - protein, 120 aa, Unknown
  Obtained from environmental sample
  misc_feature (1)..(120): Xaa is any amino acid
MVVRMAILMSERIWLLYRQLDNTLIENPLGRXYDALLIQLEKNRVDINSNGSYQCSFGIKELIGMAGMPESENKHLDRKVAGDGKLTFKDDKIQIDKISDILKESVFYRKAQKIAENRKR

SEQ ID NO: 23033 - DNA, 822 bp, Unknown
  Obtained from environmental sample
  misc_feature (1)..(822): n is a, c, g, or t
gtggaaggaaaacaaaacgccgacaaattttatattatcaagcaaggcagcgtgcggattatccgcgaagcgttaaccgatgaaacaggaagcgcgttaggcccaggagatatgtttggcctgatttccgcaatggcggcgcacggctatattgaatctgctgtagccgtgacggatgtctccctgctggcggtagaacggaaacaatacggaagccttatccgtaaagtcaataccatcgccgtcaacagcataaagtgtttctcccaaagattgagggaactggatatcgccctctcacaacggacattaaaaaacacagcgtcagccgatccttcgcacataattcaaataggcgactattacaagaactcaggcaaactgaaatcggcgctgtacgcatacaaccaataccttgctctccgccccgacgcgccgaatacggatgatattaaggcaataatcgccgaaatgaaaaaaaccattatcgaaccaaggccggaatacccgcctgacaaaatggtacagagatatccaaaagaacacctgctttttgcagaaggcgaacctgggcataccatgtatatcattcaggacggttcggtaaaaataacaaaaattgttgacaataaagaaattatccttgcggttcttggcaaaggcgatattttcggcgaaatggcgctgttggaagacaagccacgcgccgccaccgccgaagtttatgaagactgcacatactgggcggtaaccgtgataattttcaaacctcataaaagatcagccagatatggtagtccgaatggcaatcttaatgtctga

SEQ ID NO: 23034 - protein, 273 aa, Unknown
  Obtained from environmental sample
  DOMAIN (1)...(79): Cyclic nucleotide-binding domain
  misc_feature (1)..(273): Xaa is any amino acid
MEGKQNADKFYIIKQGSVRIIREALTDETGSALGPGDMFGLISAMAAHGYIESAVAVTDVSLLAVERKQYGSLIRKVNTIAVNSIKCFSQRLRELDIALSQRTLKNTASADPSHIIQIGDYYKNSGKLKSALYAYNQYLALRPDAPNTDDIKAIIAEMKKTIIEPRPEYPPDKMVQRYPKEHLLFAEGEPGHTMYIIQDGSVKITKIVDNKEIILAVLGKGDIFGEMALLEDKPRAATAEVYEDCTYWAVTVIIFKPHKRSARYGSPNGNLNV

SEQ ID NO: 23035 - DNA, 657 bp, Unknown
  Obtained from environmental sample
  misc_feature (1)..(657): n is a, c, g, or t
ttgacgagtttgattttagcaatggacggggtagacagcacattagggcatttttcatcttacttaaaagactggtcgcctcgttcatataaagatatgcagatgaaggttcctaatgtttgggaaaatgaaaatcaaaattccgttctaaaagatgatatttttaatacgataaaaaaaattaaagccgatttagcttattatgaccctccttatggttcaagcaatgaaaaaatgcctccgtcaagggttcgctatgcctcttattaccatatttggacaaccatttgcaaaaacgacaagcctaaactttttgggaaagttgcccgcagggaagattcttccgacatagtttccgcttctgtctttgaagaatttcgcaaaagcgaaagcggaagattcatagttatagaagcaattgacagattattatctgaaaccaaatgcccttggataattttgtcttatagttcgggaggcagagcaacggcacgggaattgaatgacgttatacattcgcacggaaaattggtcaaggttattgaagttagctataaaaagaatgtgatggctggcatgagttggacaaatgaatggataaattcagagcaagagcctcataaggagtttttgtttttaattgagaatcatttataa

SEQ ID NO: 23036 - protein, 218 aa, Unknown
  Obtained from environmental sample
  misc_feature (1)..(218): Xaa is any amino acid
MTSLILAMDGVDSTLGHFSSYLKDWSPRSYKDMQMKVPNVWENENQNSVLKDDIFNTIKKIKADLAYYDPPYGSSNEKMPPSRVRYASYYHIWTTICKNDKPKLFGKVARREDSSDIVSASVFEEFRKSESGRFIVIEAIDRLLSETKCPWIILSYSSGGRATARELNDVIHSHGKLVKVIEVSYKKNVMAGMSWTNEWINSEQEPHKEFLFLIENHL

SEQ ID NO: 23037 - DNA, 768 bp, Unknown
  Obtained from environmental sample
  misc_feature (1)..(768): n is a, c, g, or t
ttgannnnggatttatggccgagacatgaccgtgccactcattggaatggttgggctgcggatgcacaaagagttttccacgaagttttatggaacgaaaaagagggttatttccatttttacgttgacaaaaagaacggcacaaatgaagacgtttttgcagattccctcgccgccgacacatatctaagactgctcaatttggaaccaattatggattcaaaaaaggcaaaacgcaccttgacaaaaatctacaacaccaactacaaaaagaacagcccgctaataggcgcggcaaatttggtacacaaagatggctcacctctagaagaacacaacttccaagcgcacgatgtttggacaggaattcaatattgcctagcaaccgcaatgtatatgcacggaatgaaacacgaagcagaagatttaatcgaggcaagcttccgcaatctgtacaaagaggcaaaaatccccttcgcagccccagaaggcttcaacggaagctgccgtttgcacattagtaaaatcatcacaaaatctctgtacagcgaattgaaaaagaaaggagctttgcaagaagacggcagaatttcccctgatttgccaagagatttgaaaaagtttgaaagggaatttaagactatatgctcaaagcataaaattaaatgcaatgagctatttgttattttgcacaacaccgctttgaaatacaccgccgggaagtatttacgccccggcatggtgtttgcggtagcgagggtgatgtaa

SEQ ID NO: 23038 - protein, 255 aa, Unknown
  Obtained from environmental sample
  misc_feature (1)..(255): Xaa is any amino acid
MXXDLWPRHDRATHWNGWAADAQRVFHEVLWNEKEGYFHFYVDKKNGTNEDVFADSLAADTYLRLLNLEPIMDSKKAKRTLTKIYNTNYKKNSPLIGAANLVHKDGSPLEEHNFQAHDVWTGIQYCLATAMYMHGMKHEAEDLIEASFRNLYKEAKIPFAAPEGFNGSCRLHISKIITKSLYSELKKKGALQEDGRISPDLPRDLKKFEREFKTICSKHKIKCNELFVILHNTALKYTAGKYLRPGMVFAVARVM

SEQ ID NO: 23039 - DNA, 987 bp, Unknown
  Obtained from environmental sample
  misc_feature (1)..(987): n is a, c, g, or t
atggattctaccgttatgcgatttggagacaatatgcgggaagtggcggtaaccgaaggcgacaaagtcgaggctcaaatcaggctgggctggcaggtgaatacctggggcatcggcgaccttgccgcccgttacgcgaaagtcagcggcgagcgggcgggaaaattggcggaagaatacgccgctttatacgagcttgcgcctgatcttaagcaggacggcaaggcaagaaccgcgatgcttgaacaggcaaaaatcgagatcgcccttggagaaatgcttgaagcggaacacgccggggcttttaccacaaccttccaggatctgcacggcctgactcagctgccgggccttgcctgccagcggctcatggaacagggttacggcttcggcgcggaaggggactggaaacaatccatgctgacgcgggccgccaaagttatggcttcggggctgccgggcggcgtttcatttatggaagattacacctaccactttgagccgggtaaagaagccgccctgggcgcccacatgcttgagatatgcccttccatagcggacggaaaagcccgtattgaagttcatccgctgggaatcggcggcaaggcggatcctgcccgtatggtgtttaacgccgcccccggcccggcggtactggcaacgctcatagatattggcagccgtttcagaatgatcgtaaatgaaattgaaaccattaaaattgaaaacgccatgccgaaactgcccgtcgcgcgggctctctggaaaccatatccgaatttaagcgatgccgccgaggcatggataatttcaggcggtacgcatcattcggtatacagttccgctcttacggcggagtatttccgagattttgcggaaatgagcggcattgagtttgtgcttatcgaccgtgatacaaaaccggctcgtttacaggatgaactgcgccgcaacgaagcttattggtctcatcagtttgttatgtaa

SEQ ID NO: 23040 - protein, 328 aa, Unknown
  Obtained from environmental sample
  DOMAIN (1)...(326): L-arabinose isomerase
  misc_feature (1)..(328): Xaa is any amino acid
MDSTVMRFGDNMREVAVTEGDKVEAQIRLGWQVNTWGIGDLAARYAKVSGERAGKLAEEYAALYELAPDLKQDGKARTAMLEQAKIEIALGEMLEAEHAGAFTTTFQDLHGLTQLPGLACQRLMEQGYGFGAEGDWKQSMLTRAAKVMASGLPGGVSFMEDYTYHFEPGKEAALGAHMLEICPSIADGKARIEVHPLGIGGKADPARMVFNAAPGPAVLATLIDIGSRFRMIVNEIETIKIENAMPKLPVARALWKPYPNLSDAAEAWIISGGTHHSVYSSALTAEYFRDFAEMSGIEFVLIDRDTKPARLQDELRRNEAYWSHQFVM

SEQ ID NO: 23041 - DNA, 1482 bp, Unknown
  Obtained from environmental sample
  misc_feature (1)..(1482): n is a, c, g, or t
atggccgtcaccgcacgaatcgctatgaaagaacaagacccaatagcccgcggccgcaacttcgacgaggtgccgtacggttacacaagcgacgaggcaaaagcggaggcggctcgctgtctcaagtgcaagaagccgctatgcgtagacggttgcccggtcaatgtgaaaattcctgagttcatagggcttatagcggagggcgaatttatcgccgccgctagaaagatcaaggagaccaacgccctgccggcgatttgcgggcgcgtctgtccgcaagagacgcagtgcgaggcgcgttgcattctgggcaagaagggcgagccggtggccatcgggaaccttgagcgtttcgccgccgatacggagcgcgagtccggcaaaatcgaattgccgcctaagagccggccaaatggcaagagcgtggctgtggtcggttccggtccggcgggtttgacgtgcgcgggggaattggttaaagccggttttgacgtgacggtctttgaggcgttgcacgaggccggcggcgtactcgtctacggcattccggagttccgtctgcccaaggctattgtcaaaaaggagatagagtatttagaggcgctgggcgtgaagatcgttaaaaattttgtggtaggcagaacggccacggttgacgatttgttcaacgaagagaaattcgacgcggttttcgtgggttccggcgcggggcttccgtcgtttatgaatataaagggcgagaacggcataggcgtgtattcggcgaacgagtacttgacaagaagcaatttaatgaaggcgtatatagacgacccgtcgacacccataataaagggcaagcgcgtcataacggtcggcggcgggaacgtggcgatggactccgcccgcacggcgctgcgcctcggcgcggagaagtcgatgatcgtataccgcagaagcgaggccgagatgccggcgcgcgccgcggagattcatcacgcgaaggaggagggcatcgagtttaatctcctctgcaatcccgtcgagataatcgcgggagagaacggcgcggtaacgggtgtaaagtgcgtgcgtatggagctcggcgaacccgacgcttcggggcgccgccgtcctgtagaggttaaggggagcgagtttgtgattgattgcgacgtggcggttatcgccatcggcaacagcccaaacccgctaatcccgaacacgacgccggggcttaaggttaacgagaagcgcgggacgatatcagcgaatgaagccgacgggcgtacgtcgaagcggggagtatacgcgggcggggacatagtgacgggggcggccacggtgatcctcgcaatgggcgcggggaagacggcggcggagagtatcgcgcttgacttgacgcctgatcccggccttgaagatttgccgccgtatttgcggcgcgttaattatcctggtccctcgttcgatgggaatgtgggaggatcaactagattttga

SEQ ID NO: 23042 - protein, 493 aa, Unknown
  Obtained from environmental sample
  DOMAIN (281)...(392): Pyridine nucleotide-disulphide oxidoreductase
  misc_feature (1)..(493): Xaa is any amino acid
MAVTARIAMKEQDPIARGRNFDEVPYGYTSDEAKAEAARCLKCKKPLCVDGCPVNVKIPEFIGLIAEGEFIAAARKIKETNALPAICGRVCPQETQCEARCILGKKGEPVAIGNLERFAADTERESGKIELPPKSRPNGKSVAVVGSGPAGLTCAGELVKAGFDVTVFEALHEAGGVLVYGIPEFRLPKAIVKKEIEYLEALGVKIVKNFVVGRTATVDDLFNEEKFDAVFVGSGAGLPSFMNIKGENGIGVYSANEYLTRSNLMKAYIDDPSTPIIKGKRVITVGGGNVAMDSARTALRLGAEKSMIVYRRSEAEMPARAAEIHHAKEEGIEFNLLCNPVEIIAGENGAVTGVKCVRMELGEPDASGRRRPVEVKGSEFVIDCDVAVIAIGNSPNPLIPNTTPGLKVNEKRGTISANEADGRTSKRGVYAGGDIVTGAATVILAMGAGKTAAESIALDLTPDPGLEDLPPYLRRVNYPGPSFDGNVGGSTRF

SEQ ID NO: 23043 - DNA, 1023 bp, Unknown
  Obtained from environmental sample
  misc_feature (1)..(1023): n is a, c, g, or t
atgcaaaaattctcgcacgttatgcttggcggcttaacccacgaacctgcagaaaaattggcaaaagaacttgtgcgtataactccgcaggagttaaatcacgtgttttttgcagactccggttcggttggaatggaagtcgctatgaaaatggcagtgcagttttttaaaaacaatggcattaatggcaaaaccaaatttgcaagtctgtatagaggctatcacggagatacaactggagtgatgtccattggagacccagaagaaggtatgcaccatcttttcaagggatttttgccaaagcaattttttattcacccatctttgcaagaaatggaaaaactatttgaagaacacagcgaagaaattgccgcctttgcctgcgaacctcttttgcaaggtgcaggaggtttctatttttacccaccggaatttttgagcggtgcaaaaaaactttgctcacaatataatgtgctacttatagcagacgaagttgcaacaggatttgggcgcacgggaacaatgttcgcttgcgaacaagctggcataactcccgatattatggttttgggcaagggcttaacagcgggttatttgggactttctgcaactcttgcaacagacaatgtttacaattcatttttgggagagaactacgaaaaagcatttatgcacggaccaacctttatgggaaacgccttggcttgttctgccgctcttgcttctctcaaaatttttgagcgtgaaaattatttaggaaaaatcgctcgcataaatgaaatattaaaagaggagttattgggctttgaggctaagggagttaaggaagcacgtgtgtttggtgcttgcggagttatagagaccttgaatgaaaactgtcacgcaggcattcaggagtttgcacggtctcgcggtgtgtggctgcgcccatttttgaatgttgtatatacaatgccgccttatataatttcagaggaggaactgagaaaagtttgcggggttatgaaggagttttttaagtaa

SEQ ID NO: 23044 - protein, 340 aa, Unknown
  Obtained from environmental sample
  DOMAIN (1)...(290): Aminotransferase class-III
  misc_feature (1)..(340): Xaa is any amino acid
MQKFSHVMLGGLTHEPAEKLAKELVRITPQELNHVFFADSGSVGMEVAMKMAVQFFKNNGINGKTKFASLYRGYHGDTTGVMSIGDPEEGMHHLFKGFLPKQFFIHPSLQEMEKLFEEHSEEIAAFACEPLLQGAGGFYFYPPEFLSGAKKLCSQYNVLLIADEVATGFGRTGTMFACEQAGITPDIMVLGKGLTAGYLGLSATLATDNVYNSFLGENYEKAFMHGPTFMGNALACSAALASLKIFERENYLGKIARINEILKEELLGFEAKGVKEARVFGACGVIETLNENCHAGIQEFARSRGVWLRPFLNVVYTMPPYIISEEELRKVCGVMKEFFK

SEQ ID NO: 23045 - DNA, 729 bp, Unknown
  Obtained from environmental sample
  misc_feature (1)..(729): n is a, c, g, or t
ttgggcgtggacgtggacaacctcctggtctcccagcccgacaccggcgagcaggccttggagatagccgacacgctcgtgcgcagcggcgccatagatctgatagtgatagacagcgtggccgccctagtgcccgcggccgagatagagggcgatatgggcgacaaccacgtgggtctgcaagcccgcctgatgtcgcaagccctgcgcaaactgaccggcatactctcaaagtccaaaacctgcctgatcttcatcaaccagctgcgcatgaagataggtgtaatgttcggcaaccccgagacgaccaccggcggcaacgccctaaagttctacgcctcggtacgcgtagacatccgccgcatagccgccatcaaggacggcgaagacgtggtaggcaaccgaacccgggccaaggtagtgaagaacaaagtcgcccccccgttcagggaggccgagttcgacatcctctacggcaagggcatctctttcgagggcgacgttttggacttagccgtggagatgaagatagtggacaagagcggggcgtggttcaactacgagggcgagaggcttggtcagggcagggagaaggcgagggactacctgagggagaaccgcgaagtattggctaagatagaggggcaggtcagggcccaagcggccagccgtcgggcgggaggccatcaagacgctgggtctgatgaggggacggaggaagaggaatag

SEQ ID NO: 23046 - protein, 242 aa, Unknown
  Obtained from environmental sample
  DOMAIN (1)...(223): recA bacterial DNA recombination protein
  misc_feature (1)..(242): Xaa is any amino acid
MGVDVDNLLVSQPDTGEQALEIADTLVRSGAIDLIVIDSVAALVPAAEIEGDMGDNHVGLQARLMSQALRKLTGILSKSKTCLIFINQLRMKIGVMFGNPETTTGGNALKFYASVRVDIRRIAAIKDGEDVVGNRTRAKVVKNKVAPPFREAEFDILYGKGISFEGDVLDLAVEMKIVDKSGAWFNYEGERLGQGREKARDYLRENREVLAKIEGQVRAQAASRRAGGHQDAGSDEGTEEEE

SEQ ID NO: 23047 - DNA, 357 bp, Unknown
  Obtained from environmental sample
  misc_feature (1)..(357): n is a, c, g, or t
ttggcaaaaacaccctttcggaacattccgacaccacaaatccgagcaaaaacaccccttcggaacattccgacaccacaaatccgagcaaaaacaccctttcggaacattccgacaccccaaaaccgagcaaaaacaccctttcggaacattccgacacctcaaatccgagcaaaaacaccccatcggaacattccgacaccacaaatccaccaccaaccaggagagaacaatgaagatcaccaagctagacaccaaccacctgcgcaacgatgcgcatttccagttccacaccgagttccgcgacttggtagtgcaacacaaccccctaaccctcaaaatcaaaccccagtttga

SEQ ID NO: 23048 - protein, 118 aa, Unknown
  Obtained from environmental sample
  misc_feature (1)..(118): Xaa is any amino acid
MAKTPFRNIPTPQIRAKTPLRNIPTPQIRAKTPFRNIPTPQNRAKTPFRNIPTPQIRAKTPHRNIPTPQIHHQPGENNEDHQARHQPPAQRCAFPVPHRVPRLGSATQPPNPQNQTPV

SEQ ID NO: 23049 - DNA, 426 bp, Unknown
  Obtained from environmental sample
  misc_feature (1)..(426): n is a, c, g, or t
ttggccccccccccccccccccccctacaaatcggggcgcaacatacgcccgccctagccaccgcgcacacaccgccgtcctgcgaatacaatgcaccaccacgtgcgggcaaactcaaattgccgctacccataaatcgggcggcaaaagggcttcacaccccttcggaacactccgacacccacaaatttggcaaaaacaccctttcggaacattccgacaccacaaatccgagcaaaaacaccccttcggaacattccgacaccacaaatccgagcaaaaacaccctttcggaacattccgacaccccaaaaccgagcaaaaacaccctttcggaacattccgacacctcaaatccgagcaaaaacaccccatcggaacattccgacaccacaaatccaccaccaaccaggagagaacaatga

SEQ ID NO: 23050 - protein, 141 aa, Unknown
  Obtained from environmental sample
  misc_feature (1)..(141): Xaa is any amino acid
MAPPPPPPLQIGAQHTPALATAHTPPSCEYNAPPRAGKLKLPLPINRAAKGLHTPSEHSDTHKFGKNTLSEHSDTTNPSKNTPSEHSDTTNPSKNTLSEHSDTPKPSKNTLSEHSDTSNPSKNTPSEHSDTTNPPPTRREQ

SEQ ID NO: 23051 - DNA, 447 bp, Unknown
  Obtained from environmental sample
  misc_feature (1)..(447): n is a, c, g, or t
atggcgtacggtacatttggggaactgtatcataagaggtgggggatagagacgaaatacaaagaattgaagcagaaattggaaacagaaaacttttccggcaggcttgtagacaacgtaaagcaggatttttacgcgatgatgacggtggcgaacatggcggccagttgcgtacgggaggcaaaccggaacgcaaagaagaaacgggatgggagcgggaacctttatgagtatcaggtaaatgtaaatcatgcgataggagtattcaaggatcggttaatacgtgtaattatcgaagaagaccggatagcgcggcgttatctgatgagcgaattggtacgctgtatggaacggcgggtagtgccgatacgtccaaaccgggaggtagtccgtaaagactgcaatcgtaaagccaagtttcattataaccataaatcgaattgttaa

SEQ ID NO: 23052 - protein, 148 aa, Unknown
  Obtained from environmental sample
  misc_feature (1)..(148): Xaa is any amino acid
MAYGTFGELYHKRWGIETKYKELKQKLETENFSGRLVDNVKQDFYAMMTVANMAASCVREANRNAKKKRDGSGNLYEYQVNVNHAIGVFKDRLIRVIIEEDRIARRYLMSELVRCMERRVVPIRPNREVVRKDCNRKAKFHYNHKSNC

SEQ ID NO: 23053 - DNA, 759 bp, Unknown
  Obtained from environmental sample
  misc_feature (1)..(759): n is a, c, g, or t
atgtatcagatcggccgagcggcacgagtaatggcgactgaaattacaaacaataaatgccccgcatgcggcgcttccttgaatttttccgggtcttccaccccgaaattatgtgagcactgcggagtaaaattggatatttccccggttaaacagccggattccgccgcgccaaacgcggataacaaacctgtggcggacaaaaataaactgtggatcgctacgggtaaagaacccgtttacatgctttccaaaatggtaaacaggcacggacttgtcgcgggggctaccggcacgggcaagaccgtgtcaataaaggttttatctgaagcgttcagcgacataggcgttccggtttttttggcagatattaaaggggatgtttcgggactctgcaagacgggcgagcccaataaaaatgttgaagaacgcgtaaagaacatgaacattaacgatttcgcgtacacaagttatcccgtacgtttttttgacgtgtacggtaaaaacggaattccggtgcgcacgacaatatctgacatgggacctcttcttctcgctcgtatcctcggtttaaatgatacgcagagcggcattttacagattatatttaagattgccgacgacaacggactgttgttgatcgatttaaaggatctgcgcgcgatggttcagtttgcgggcgacaacgctaaagaattgtcatcgacatacggcaatatttcgacgcaagcgttggcgcgattcagcgaaatcttttaa

SEQ ID NO: 23054 - protein, 252 aa, Unknown
  Obtained from environmental sample
  DOMAIN (68)...(252): Bacterial protein of unknown function (DUF853)
  misc_feature (1)..(252): Xaa is any amino acid
MYQIGRAARVMATEITNNKCPACGASLNFSGSSTPKLCEHCGVKLDISPVKQPDSAAPNADNKPVADKNKLWIATGKEPVYMLSKMVNRHGLVAGATGTGKTVSIKVLSEAFSDIGVPVFLADIKGDVSGLCKTGEPNKNVEERVKNMNINDFAYTSYPVRFFDVYGKNGIPVRTTISDMGPLLLARILGLNDTQSGILQIIFKIADDNGLLLIDLKDLRAMVQFAGDNAKELSSTYGNISTQALARFSEIF

SEQ ID NO: 23055 - DNA, 732 bp, Unknown
  Obtained from environmental sample
  misc_feature (1)..(732): n is a, c, g, or t
gtgaaactttttcaaagcccgttgctatattcgacatttctattgtggatgctttcgggtctttacgaaatgatgccggaggtcggcgatcttgaaaaacctaagatagttttcttttttgacgaagcgcatattctgtttaatgaagcgccgaaaccacttctgcaaaaggtcgagcaagtggcgcgccttatccgttcaaaaggcgtcggtatttactttattacgcagtcgccgtccgatattcccgataccgtattatcgcagttgggaaataaaatccagcatgcgttacgcgcatacacgccaaatgatcaaaaggcgttaaaagccgcggcggcttcattccgttccaaccctgaattttccagcgaaaaagttttaggcgaactttccaccggcgaagcgcttatatcggtacttgacgaaaaaggcgctccgaagatcgtacaacgcgcatttatgttaccgccaaaaagttttataggtcccgcggagccggaacgcataagcggtctcatcaaaagttgtcctctgtactcaaagtacagcgaagcgattgaccgcgaatccgcgtatgaaatattgcagaagcaaaaaaagcaggctgacgctcaacaacaaaaacagcagtccgctccgccgagacaagcccagcccgtaagagcgtcaagaacgactagcgctaggaaaacagcagtcccgcgaacaaggcgctatcaagcgcgatga

SEQ ID NO: 23056 - protein, 243 aa, Unknown
  Obtained from environmental sample
  DOMAIN (1)...(239): Bacterial protein of unknown function (DUF853)
  misc_feature (1)..(243): Xaa is any amino acid
MKLFQSPLLYSTFLLWMLSGLYEMMPEVGDLEKPKIVFFFDEAHILFNEAPKPLLQKVEQVARLIRSKGVGIYFITQSPSDIPDTVLSQLGNKIQHALRAYTPNDQKALKAAAASFRSNPEFSSEKVLGELSTGEALISVLDEKGAPKIVQRAFMLPPKSFIGPAEPERISGLIKSCPLYSKYSEAIDRESAYEILQKQKKQADAQQQKQQSAPPRQAQPVRASRTTSARKTAVPRTRRYQAR

SEQ ID NO: 23057 - DNA, 696 bp, Unknown
  Obtained from environmental sample
  misc_feature (1)..(696): n is a, c, g, or t
gtggaggtcggggacggaacctaccttaacatcagggctttctattacgcctatgccgattaccggggggcgttcaaggacaacccctttgttctcagggtgtcgcaggaaacaaacaaacccctgccgccgggcgcattcatgcaggaaacagtcagcgcctttacccagatcgcgaaagataacactacctccgcgagaggccccgatgatatggtaagccagatcacaaggattctctcaaaggaaaaaggcaaaaatgttgacattgccgtctgtcttgatgttacaggttccatgcaggcctattttgacgcgatacgccagaagttaatccccatgttgaaggatatgaccgccgattttgcctctttcagaataggcatggtcttctacaaagattactatgatgaatttatgaacaaggtttttccctttacccgtgactttgacgcgcttcagaagagtatcagcgacgtgaaggtaagcgggggaggggatattcccgaggcggtttacgaggcgctctacgcgggcgctacaaagctgtcatgggaggcggataaaaggatcatgctcctaataggcgacgccccgcctcacccgcgccccagaggcgccatcacaaagcaaatggtagaaagggaagccgcaaaccgcggaatcgaactgcacgccatgatcctcccccagtga

SEQ ID NO: 23058 - protein, 231 aa, Unknown
  Obtained from environmental sample
  misc_feature (1)..(231): Xaa is any amino acid
MEVGDGTYLNIRAFYYAYADYRGAFKDNPFVLRVSQETNKPLPPGAFMQETVSAFTQIAKDNTTSARGPDDMVSQITRILSKEKGKNVDIAVCLDVTGSMQAYFDAIRQKLIPMLKDMTADFASFRIGMVFYKDYYDEFMNKVFPFTRDFDALQKSISDVKVSGGGDIPEAVYEALYAGATKLSWEADKRIMLLIGDAPPHPRPRGAITKQMVEREAANRGIELHAMILPQ

SEQ ID NO: 23059 - DNA, 813 bp, Unknown
  Obtained from environmental sample
  misc_feature (1)..(813): n is a, c, g, or t
atggtcagattggccgagccgaatgcgcaaatgctgagttatgagcaactggacgccaacacggaatccatcagagcccagcttgaccgctttgtccactttgacgataccacccgttccgtcaacaacaaggattggcttgccgaccttaactacatcgactttttgcgtgatattggccgccatttttcggtgaaccgtatgctgagtttcgaggcctacagaatgcgaatggaaaccggcctctcttttatcgagtttaattaccagctcctgcagagctacgattttctggaactgtaccgcagatacggctgccgtctgcaaattggcggcgacgaccagtggggcaatatcgtagccggcgtggaactgattcgccgcgttgaaggggcggaagtttttggcataacctttcctttgatcaccacggctgacggcaagaaaatgggcaagaccgaaaaaggcgcgatttttctcgatccggcgctgacaagcccctacgaattttttcagtactggcgcaatgtgcaggacgctgacatacgccgattcttgcttatgttcacctttctgccaatcggggaatgtgaggcgctgaccgcgcagggcaggaaccccaacgaggcgaaggaacgcctcgcctgggaggtgaccgctctgatccacggcaaaaccgaggctgacaaggccttagccggcgcgagggcggcttttggctttggcgccggaggcgcccttggcggggacaagtccgccatgcctcacgcggaactttcccgcgccgcttttgaaagggctataacgtggtag

SEQ ID NO: 23060 - protein, 270 aa, Unknown
  Obtained from environmental sample
  DOMAIN (1)...(240): tRNA synthetases class I (W and Y)
  misc_feature (1)..(270): Xaa is any amino acid
MVRLAEPNAQMLSYEQLDANTESIRAQLDRFVHFDDTTRSVNNKDWLADLNYIDFLRDIGRHFSVNRMLSFEAYRMRMETGLSFIEFNYQLLQSYDFLELYRRYGCRLQIGGDDQWGNIVAGVELIRRVEGAEVFGITFPLITTADGKKMGKTEKGAIFLDPALTSPYEFFQYWRNVQDADIRRFLLMFTFLPIGECEALTAQGRNPNEAKERLAWEVTALIHGKTEADKALAGARAAFGFGAGGALGGDKSAMPHAELSRAAFERAITW

SEQ ID NO: 23061 - DNA, 861 bp, Unknown
  Obtained from environmental sample
  misc_feature (1)..(861): n is a, c, g, or t
atggacgaacaagctcaaatttccagattcttccggcttcggcctaatagcctcgcgccgccccatcgctcgccggctagggggtctggggcccacggccccaggagccggctaggggtccaggggctgcgccctggaccggcattgcatgcaggggggctgctcggcggccccgggcgaggccagccggagggcctcgggcgaattccagacttcggccagggaattttgggggaaacgtcccaagggggcctggcggccgaaatcggagcagcagggaaaaaggccgccgtcggcctggagagccagccgggtgaagggctcggcgcagaaggcggccgggtcggcctcgggggccggggcgaaatcggtttccgggaggcccaggatattctggtaacgctgaaagctgagataatcggcctgggaggcgaaaagttcctggaacaagtcccgctcggccaggttggtcttcatttccacaaagctcaggcgcaagaggggcaattccgagccggccgcccggcggacggccaggaaggcggacaggttttcccgcaaaatttcccagcacccgccggggcggacccgggcgtaggtttccggccgggcggcgtccaccgagaccatgagccgggtcaggccggcttccagaagttttctagagagttccggggtcagaagggcgccgttggtgatgaggcttatatccaggcagccggcgcccttggcttcggccacccactggtggatatcgtctatcaggagaggttcgccggtgaggcccaggcgcagggaggggaggcccaaggccgcgccttcggccaaggcctggcggtaaagctcatggtccataaatag

SEQ ID NO: 23062 - protein, 286 aa, Unknown
  Obtained from environmental sample
  misc_feature (1)..(286): Xaa is any amino acid
MDEQAQISRFFRLRPNSLAPPHRSPARGSGAHGPRSRLGVQGLRPGPALHAGGLLGGPGRGQPEGLGRIPDFGQGILGETSQGGLAAEIGAAGKKAAVGLESQPGEGLGAEGGRVGLGGRGEIGFREAQDILVTLKAEIIGLGGEKFLEQVPLGQVGLHFHKAQAQEGQFRAGRPADGQEGGQVFPQNFPAPAGADPGVGFRPGGVHRDHEPGQAGFQKFSREFRGQKGAVGDEAYIQAAGALGFGHPLVDIVYQERFAGEAQAQGGEAQGRAFGQGLAVKLMVHK

SEQ ID NO: 23063 - DNA, 498 bp, Unknown
  Obtained from environmental sample
  misc_feature (1)..(498): n is a, c, g, or t
gtgctgggaaattttgcgggaaaacctgtccgccttcctggccgtccgccgggcggccggctcggaattgcccctcttgcgcctgagctttgtggaaatgaagaccaacctggccgagcgggacttgttccaggaacttttcgcctcccaggccgattatctcagctttcagcgttaccagaatatcctgggcctcccggaaaccgatttcgccccggcccccgaggccgacccggccgccttctgcgccgagcccttcacccggctggctctccaggccgacggcggcctttttccctgctgctccgatttcggccgccaggcccccttgggacgtttcccccaaaattccctggccgaagtctggaattcgcccgaggccctccggctggcctcgcccggggccgccgagcagcccccctgcatgcaatgccggtccagggcgcagcccctggacccctagccggctcctggggccgtgggccccagaccccctag

SEQ ID NO: 23064 - protein, 165 aa, Unknown
  Obtained from environmental sample
  misc_feature (1)..(165): Xaa is any amino acid
MLGNFAGKPVRLPGRPPGGRLGIAPLAPELCGNEDQPGRAGLVPGTFRLPGRLSQLSALPEYPGPPGNRFRPGPRGRPGRLLRRALHPAGSPGRRRPFSLLLRFRPPGPLGTFPPKFPGRSLEFARGPPAGLARGRRAAPLHAMPVQGAAPGPLAGSWGRGPQTP

SEQ ID NO: 23065 - DNA, 990 bp, Unknown
  Obtained from environmental sample
  misc_feature (1)..(990): n is a, c, g, or t
atgtccccagctcttaagcgcagccgcctggaagcggcccaggaccccgaagcccacctcggccggcttttgggcccggccttcgccgattaccggcgccgtttccgcgaagcggaagccggccggcggccacccgcccccctccacctggatgtggatgtcaccaccgcctgcaatttccgctgccccatgtgcccggccggccaaagcgggcatttttttcccggtctgacccggggcctatttatggaccatgagctttaccgccaggccttggccgaaggcgcggccttgggcctcccctccctgcgcctgggcctcaccggcgaacctctcctgatagacgatatccaccagtgggtggccgaagccaagggcgccggctgcctggatataagcctcatcaccaacggcgcccttctgaccccggaactctctagaaaacttctggaagccggcctgacccggctcatggtctcggtggacgccgcccggccggaaacctacgcccgggtccgccccggcgggtgctgggaaattttgcgggaaaacctgtccgccttcctggccgtccgccgggcggccggctcggaattgcccctcttgcgcctgagctttgtggaaatgaagaccaacctggccgagcgggacttgttccaggaacttttcgcctcccaggccgattatctcagctttcagcgttaccagaatatcctgggcctcccggaaaccgatttcgccccggcccccgaggccgacccggccgccttctgcgccgagcccttcacccggctggctctccaggccgacggcggcctttttccctgctgctccgatttcggccgccaggcccccttgggacgtttcccccaaaattccctggccgaagtctggaattcgcccgaggccctccggctggcctcgcccggggccgccgagcagcccccctgcatgcaatgccggtccagggcgcagcccctggacccctag

SEQ ID NO: 23066 - protein, 329 aa, Unknown
  Obtained from environmental sample
  DOMAIN (52)...(216): Radical SAM superfamily
  misc_feature (1)..(329): Xaa is any amino acid
MSPALKRSRLEAAQDPEAHLGRLLGPAFADYRRRFREAEAGRRPPAPLHLDVDVTTACNFRCPMCPAGQSGHFFPGLTRGLFMDHELYRQALAEGAALGLPSLRLGLTGEPLLIDDIHQWVAEAKGAGCLDISLITNGALLTPELSRKLLEAGLTRLMVSVDAARPETYARVRPGGCWEILRENLSAFLAVRRAAGSELPLLRLSFVEMKTNLAERDLFQELFASQADYLSFQRYQNILGLPETDFAPAPEADPAAFCAEPFTRLALQADGGLFPCCSDFGRQAPLGRFPQNSLAEVWNSPEALRLASPGAAEQPPCMQCRSRAQPLDP

SEQ ID NO: 23067 - DNA, 714 bp, Unknown
  Obtained from environmental sample
  misc_feature (1)..(714): n is a, c, g, or t
atggactacgctgaggaatcgcttaaaaaacactacgaatggcggggtaaactggaaaccatacccaaaatgccggtatccacgcgggaagatttgtcgctggcctatacgcccggcgtcgcccggccctgtcttgagatacaaaaagacccccaaaaaagctgggatctgaccggacgctggaatacggtggcggtagttaccgacgggactgcggtactgggtctcggcgacattggcccggaagcgggaatgcctgtgatggaaggaaaatgcgtgctgttcaaggctttcggcggcgtggacgcggttcccctgtgcatccgctcaaaggacgttgatgtaattgtagacaccgtcgccctgctggcggggagtttcggcggtataaatctggaagacatttccgccccccgctgttttgaaattgaacggaaactgaaagcgcgctgcgacatcccgatttttcacgatgaccagcacggcacggcggtggtaacattggccgccctgctcaacgcgctgaaactgaccggaaaaaaactggagaatatcagcgttgttacatcgggggcgggagcggcaggcacggcggttattcgtctgctgctggcgctggggctttccgatgtggtgatgtgcgaccgcgagggtgcgctttataaaggcagtccgggcatgaacagtgaaaaaggcggaaatnggctgaactaa

SEQ ID NO: 23068 - protein, 237 aa, Unknown
  Obtained from environmental sample
  DOMAIN (160)...(237): Malic enzyme, NAD binding domain
  misc_feature (1)..(237): Xaa is any amino acid
MDYAEESLKKHYEWRGKLETIPKMPVSTREDLSLAYTPGVARPCLEIQKDPQKSWDLTGRWNTVAVVTDGTAVLGLGDIGPEAGMPVMEGKCVLFKAFGGVDAVPLCIRSKDVDVIVDTVALLAGSFGGINLEDISAPRCFEIERKLKARCDIPIFHDDQHGTAVVTLAALLNALKLTGKKLENISVVTSGAGAAGTAVIRLLLALGLSDVVMCDREGALYKGSPGMNSEKGGNXLN

SEQ ID NO: 23069 - DNA, 354 bp, Unknown
  Obtained from environmental sample
  misc_feature (1)..(354): n is a, c, g, or t
atgtcgcagcgcgctttcagtttccgttcaatttcaaaacagcggggggcggaaatgtcttccagatttataccgccgaaactccccgccagcagggcgacggtgtctacaattacatcaacgtcctttgagcggatgcacaggggaaccgcgtccacgccgccgaaagccttgaacagcacgcattttccttccatcacaggcattcccgcttccgggccaatgtcgccgagacccagtaccgcagtcccgtcggtaactaccgccaccgtattccagcgtccggtcagatcccagcttttttgggggtctttttgtatctcaagacagggccgggcgacgccgggcgtatag

SEQ ID NO: 23070 - protein, 117 aa, Unknown
  Obtained from environmental sample
  misc_feature (1)..(117): Xaa is any amino acid
MSQRAFSFRSISKQRGAEMSSRFIPPKLPASRATVSTITSTSFERMHRGTASTPPKALNSTHFPSITGIPASGPMSPRPSTAVPSVTTATVFQRPVRSQLFWGSFCISRQGRATPGV

SEQ ID NO: 23071 - DNA, 450 bp, Unknown
  Obtained from environmental sample
  misc_feature (1)..(450): n is a, c, g, or t
atgaaaaagggaagccttgccgatgttctgcggggagccgatgtatttatcggcgtttccgcgcccggcatggttacgccggaaatggtaaaatctatggctcctaacgcgattttgtttccaatgtctaacccgacgccggaaatcatgccggatgaggctcttgccgcgggagccgcggtagtgggaacaggacgcactgattttgcgaatcaaattaacaatgttcttgccttccccggtattttccgcggagcgctggacgtgcgcgcaagcgacattaacgatgaaatgaaaatagcgtcggcgtacgcgcttgccgggcttgtaagtgaaaatgaattacacagcgattacattattcccgctgcttttgatccaagaataaaagacgctgtggcatcagccgcggcgcaggcggcaaaaaaaagcggcgtggcaagagtataa

SEQ ID NO: 23072 - protein, 149 aa, Unknown
  Obtained from environmental sample
  DOMAIN (2)...(142): Malic enzyme, NAD binding domain
  misc_feature (1)..(149): Xaa is any amino acid
MKKGSLADVLRGADVFIGVSAPGMVTPEMVKSMAPNAILFPMSNPTPEIMPDEALAAGAAVVGTGRTDFANQINNVLAFPGIFRGALDVRASDINDEMKIASAYALAGLVSENELHSDYIIPAAFDPRIKDAVASAAAQAAKKSGVARV

SEQ ID NO: 23073 - DNA, 555 bp, Unknown
  Obtained from environmental sample
  misc_feature (1)..(555): n is a, c, g, or t
gtgcgccggggttacgaggaaggctttttaagaaaatcaatagttgcggatccttttaacagggtcaacacaaacgacaacacgccggcaatgctgcatacggagatcgtgcctggcgacaaagtgactgtcaccgtaatgcccaaaggcggaggctgcgagaacatgggggcgttttgcaccctcttgccctccgatggggtacagggtgtattacaatttgtaatacagaccgtagacagggccggaggaaaaccctgccctcccctgcttgtgggcgtggggataggcggcagtatggacaagtgtgtgtggctggcaaaaaaagccctgctccgcccaataggcagccgaaactcaaatcccttttactcaagtctggaaacagagcttctggaaaaaattaataatcttggcataggccccatgggaacgggcggcagaataacggcccttgacgcgcatatcgaatactatccatgtcacataacagccttgccagtggcggtaaaccttcagtgccacgccagccgcgtcgccaggacggagttataa

SEQ ID NO: 23074 - protein, 184 aa, Unknown
  Obtained from environmental sample
  DOMAIN (1)...(184): Fumarate hydratase (Fumerase)
  misc_feature (1)..(184): Xaa is any amino acid
MRRGYEEGFLRKSIVADPFNRVNTNDNTPAMLHTEIVPGDKVTVTVMPKGGGCENMGAFCTLLPSDGVQGVLQFVIQTVDRAGGKPCPPLLVGVGIGGSMDKCVWLAKKALLRPIGSRNSNPFYSSLETELLEKINNLGIGPMGTGGRITALDAHIEYYPCHITALPVAVNLQCHASRVARTEL

SEQ ID NO: 23075 - DNA, 330 bp, Unknown
  Obtained from environmental sample
  misc_feature (1)..(330): n is a, c, g, or t
ttgaatttcgggagcggaggctttgggccagggcgacccgctttttgcggcaataacgtgcgggtaatggtccgccccatggtcaaaggacagcccttgtccagcgtttcgcaaaattcgcttgtggagagtactattcccgcccgcgggcctcgcagggttttgtgcgtcgtgctggtaacaacatgcgcccaggggacaggatcatattcgcccgtaaaaaccttgcccgcgacaagacccgcaaagtgggccatgtccaccatgaagacagcgcccactttatcagcgatttccctcatgcgcttgaagtttattttccgtgggtag

SEQ ID NO: 23076 - protein, 109 aa, Unknown
  Obtained from environmental sample
  misc_feature (1)..(109): Xaa is any amino acid
MNFGSGGFGPGRPAFCGNNVRVMVRPMVKGQPLSSVSQNSLVESTIPARGPRRVLCVVLVTTCAQGTGSYSPVKTLPATRPAKWAMSTMKTAPTLSAISLMRLKFIFRG

SEQ ID NO: 23077 - DNA, 351 bp, Unknown
  Obtained from environmental sample
  misc_feature (1)..(351): n is a, c, g, or t
atggtgttgtgtgacaaagccttattggacgatgtaacgtcgagggtctgcgccgccgccaaggaagttttgggcgataaactgaaaaaggtaatcctctacggttcctacgcccgcggcgactacgacgagtattcggacatagacttcttcgttctcgccgatatcccgcaagaggagtgttgcgacgcgagttcggatatttatgaccgtatatgggagtatgagttagagcagggtttaatgattagtccgcacgttacgggctacgagacgtttcttaattggcggaatgttttgccgtattacatgaacgtcataaaagagggtgtagaattgtatgcagcctga

SEQ ID NO: 23078 - protein, 116 aa, Unknown
  Obtained from environmental sample
  DOMAIN (13)...(113): Nucleotidyltransferase domain
  misc_feature (1)..(116): Xaa is any amino acid
MVLCDKALLDDVTSRVCAAAKEVLGDKLKKVILYGSYARGDYDEYSDIDFFVLADIPQEECCDASSDIYDRIWEYELEQGLMISPHVTGYETFLNWRNVLPYYMNVIKEGVELYAA

SEQ ID NO: 23079 - DNA, 1614 bp, Unknown
  Obtained from environmental sample
  misc_feature (1)..(1614): n is a, c, g, or t
atgtacaagggggcgctcgacatagacaagcagaatatgtcgttgctttccatctacgccgagtgcttggcgaagggcggcgatctcaagagcgccgctgtcgcctacgagcaggtgctgatgatgaacccaaacgccgtcagagagtacaaggaattgggcgctatacagacaaagcagggaaatgttgatcaggcgatgggcagctacaaaaagtacttggataagaatcccgccgacgaggagatcgccatggccgtcggtaactacgagtacggtaagaagcagtacaagaacgccgttaaatacttcgagatggtaaaaaaggccgacgcgcaaaacctccagttcctaacgaaactcggcgattcatactatcaagccgagaattacaagagggccgccgaggtctacgagaagatgcgcaaggtcaagggcgtgacggccgccgtgctgaaggagattctaaagccgcttgccgtctcctacgagaaggagaaccagccggccaaggccgcggacgcctacgcggcttacataggtttgccgggcgtggtcgaccaagacgcctcttacaagcgcgcgtctcttatagagaagatcgaccaagagcaggccgtcaaggcctacaacgccaacgccaaggcgttcccgagggatccacgcaacttcgtgcgtctcggcatgatctacgcgcagaagaaggagacatacccgcaggctgcggagaatctgaacgccgcgtctaagttggtggacaacgacgtcgatgtctggcaacagctcgcgcttgtgagcggaaagctcggcaaatccgatatggagcttgccgcctacaaaatgtacttcaagctgaaaccgcaggatctcgccgtgacccgccgcatcggcgagttgctttatgagaaaaagcaatactccgaggccatcacgaacttggagatgttcctcacgacaaacgataaggacgtgaaggctctgataatgctggccgacgcctacgaggctaccagccgtcagcagaagacgacggagctgttagccaaggcgaagggtttgaagggcaacgatccggacgttcgcgagcgcctttacaagatgtacaagagggagggtaaaaaggagctggccgacacggagatcagggagcttgtgaagataaccggcgacaatagacaccgcctcatgctctgcggcgacctggttgaagcggggaaacttgacgaggccgcgaaagtcgccaacgatgtaaaaaacagcgatccgaccaaccgcgacgggctgatggccttggcgggaattcagaggatgcagaagaagtacggcgacgccatagagacctacaagctcgtcttgttcgccgacaacaactacgcccccgcctgcgccggccgcgccgaagcgcacttcttgctcgccgaatacgacagggcggagacgtactacaaaaaggcgctgcagatagaccccaagatggtctcggccgaactgggcctgtcgagggtctacaaggccacaaagcagaaagacctgcaaatccagcacctgaacagggccaagctgcttgatccgaacaacaaggcggttcaggacgagattagactgttgaagtga

SEQ ID NO: 23080 - protein, 537 aa, Unknown
  Obtained from environmental sample
  DOMAIN (47)...(80): Tetratricopeptide repeat
  misc_feature (1)..(537): Xaa is any amino acid
MYKGALDIDKQNMSLLSIYAECLAKGGDLKSAAVAYEQVLMMNPNAVREYKELGAIQTKQGNVDQAMGSYKKYLDKNPADEEIAMAVGNYEYGKKQYKNAVKYFEMVKKADAQNLQFLTKLGDSYYQAENYKRAAEVYEKMRKVKGVTAAVLKEILKPLAVSYEKENQPAKAADAYAAYIGLPGVVDQDASYKRASLIEKIDQEQAVKAYNANAKAFPRDPRNFVRLGMIYAQKKETYPQAAENLNAASKLVDNDVDVWQQLALVSGKLGKSDMELAAYKMYFKLKPQDLAVTRRIGELLYEKKQYSEAITNLEMFLTTNDKDVKALIMLADAYEATSRQQKTTELLAKAKGLKGNDPDVRERLYKMYKREGKKELADTEIRELVKITGDNRHRLMLCGDLVEAGKLDEAAKVANDVKNSDPTNRDGLMALAGIQRMQKKYGDAIETYKLVLFADNNYAPACAGRAEAHFLLAEYDRAETYYKKALQIDPKMVSAELGLSRVYKATKQKDLQIQHLNRAKLLDPNNKAVQDEIRLLK

SEQ ID NO: 23081 - DNA, 723 bp, Unknown
  Obtained from environmental sample
  misc_feature (1)..(723): n is a, c, g, or t
gtgccgggccccccctccaggacgatggcatcgataagcttgattcttaaagacgttaaaaaaaaactgggcgatttctctcttttcgttgaacggctcgttgtgccatgtcccggtatttacgggcttatcggcccgaatggttcgggtaaatccacactggccaagctcatggccggattgctcgaaacggacaaaggcgtgattgacaccgggggattgaaccccagggatataacattcctcagccgaaagccctatatgatggacgatacggtgtataataacctggtgtatcccctcatgctgcgaaaaataaaacccgatccccggatcattgccctgtttctggacaagatgggattttccggccgggaaaaacaaaaggcccgaagcctttcaggcggagagcagcagaaactcgcctttctgcgggcgcttatctttaagccgcggcttatcatcgccgatgaggccatgacagccatggacattgacagccttgatctttttgaaagcatgatccttgaagagcaaaaaaaagatccggttatctggataatcataagccaccagatgccccacatcaggcgtctggtgaaccatgttttttttatgtacgggggaacgatagaggccgaaggcgccgcaaaagaaatgttttcccattcttccaatcctcatcttgaacaataccttagggcatacggcgggagaacctga

SEQ ID NO: 23082 - protein, 240 aa, Unknown
  Obtained from environmental sample
  DOMAIN (38)...(209): ABC transporter
  misc_feature (1)..(240): Xaa is any amino acid
MPGPPSRTMASISLILKDVKKKLGDFSLFVERLVVPCPGIYGLIGPNGSGKSTLAKLMAGLLETDKGVIDTGGLNPRDITFLSRKPYMMDDTVYNNLVYPLMLRKIKPDPRIIALFLDKMGFSGREKQKARSLSGGEQQKLAFLRALIFKPRLIIADEAMTAMDIDSLDLFESMILEEQKKDPVIWIIISHQMPHIRRLVNHVFFMYGGTIEAEGAAKEMFSHSSNPHLEQYLRAYGGRT

SEQ ID NO: 23083 - DNA, 897 bp, Unknown
  Obtained from environmental sample
  misc_feature (1)..(897): n is a, c, g, or t
atgttatataacaccctaataacggagccaaagatgaatataaaaaagtacaaggtaaacggggaagaaaaaatcagcctaagcgatttcgacaccggcgacaccggcggcttcaattcggccgacgacgttaaggagatgatgaaagacaacatcgtcgagatcgccaagctccaagataggttgtacgccgagggcaaaaccggcctgctgatcatctttcaggccatggacgccgccggtaaggacagcgctataaagcacgtgatgagcggggtgaacccgcaaggcgtggaggtcgtaagcttcaaacagccgtctgcggaggagctctcgcacgactacttgtggcgggcggcgaaagtactgccggcgagggggaagatcgccatcttcaaccgctcgtactacgaggacgttcttgtggtaaaggttcacaaactctacgaaaacatgaatctgcccgaccgttgcaagggtaagaacataattgaaaagcggtacgaccaaatacgcagcttcgaggagtacctgtgggagaacggcatcgttaccgtgaaattcttcctgcacctctccaaaggaacacaattgaaacgctttttggagcggatcgacaacaaggataaacactggaaattctcggacgcggacgtgcgtgagagaaagtattgggacgattaccaagaggcctacggggcggcgattgaggcgaccgcgagcaagaataatccgtggtacatagtccccgccgacaaaaaatggtacacgcgcgccgtgatctcaaacgtgctgctctccgtcatgaaaaaactggacccgcaatatccggccgtaacggaagaacagatggcggcattggcggaaagcaggaaaaagttggaggagttggggtaa

SEQ ID NO: 23084 - protein, 298 aa, Unknown
  Obtained from environmental sample
  DOMAIN (38)...(277): Polyphosphate kinase 2
  misc_feature (1)..(298): Xaa is any amino acid
MLYNTLITEPKMNIKKYKVNGEEKISLSDFDTGDTGGFNSADDVKEMMKDNIVEIAKLQDRLYAEGKTGLLIIFQAMDAAGKDSAIKHVMSGVNPQGVEVVSFKQPSAEELSHDYLWRAAKVLPARGKIAIFNRSYYEDVLVVKVHKLYENMNLPDRCKGKNIIEKRYDQIRSFEEYLWENGIVTVKFFLHLSKGTQLKRFLERIDNKDKHWKFSDADVRERKYWDDYQEAYGAAIEATASKNNPWYIVPADKKWYTRAVISNVLLSVMKKLDPQYPAVTEEQMAALAESRKKLEELG

SEQ ID NO: 23085 - DNA, 633 bp, Unknown
  Obtained from environmental sample
  misc_feature (1)..(633): n is a, c, g, or t
ttgggagagcgtatgaaagaggacttgtttgacgaaggctttggcgaggacatggacgacgatgccgccgaaggcgacgcgagcttgtgcgatgactgcaaggttagggaggccaacgtccacctaacgcacgtaggtgaagagggggcggagacgttccacttatgtgaggagtgcgcgcgcgagcgcggcgtacccatcccggatagcgacattatcctgaaaggtcttgaggcgcttgccggcgcggtgggggctgcgtcatcggcgggtgtcaaggtgaccgtcaagcccaagacgggcgagggcgccgggcaggcggcggcggaagaggaggatatcgtgtgccgcaaatgcggcatgaagttctcggagtttcgctccggcggaaggttggggtgcgcggagtgctacgactcttttgatacgcgcatagaccgtatactcgtccagattcacggcacgagcggccacaagggcaagcggtacggcaggtcgacgccgcggcggggcggtagggcgggtttggagcggctacagcgcgagctcgacgcggctgtgagggcggagcagtttgagcaggccgccgtcataagggacgagatacgcagcttgagcccgagcgtgaaatga

SEQ ID NO: 23086 - protein, 210 aa, Unknown
  Obtained from environmental sample
  DOMAIN (173)...(208): UvrB/uvrC motif
  misc_feature (1)..(210): Xaa is any amino acid
MGERMKEDLFDEGFGEDMDDDAAEGDASLCDDCKVREANVHLTHVGEEGAETFHLCEECARERGVPIPDSDIILKGLEALAGAVGAASSAGVKVTVKPKTGEGAGQAAAEEEDIVCRKCGMKFSEFRSGGRLGCAECYDSFDTRIDRILVQIHGTSGHKGKRYGRSTPRRGGRAGLERLQRELDAAVRAEQFEQAAVIRDEIRSLSPSVK

SEQ ID NO: 23087 - DNA, 1086 bp, Unknown
  Obtained from environmental sample
  misc_feature (1)..(1086): n is a, c, g, or t
ttgtcagcttttttaaaaccgctttttgcgttagtaatttccattctcttgtttgccggacttatctttctggcaaatggtgatttattggacgttgtagaggctcgtttttataacccttcgattgtcaataattatgttaaagaaaataatgtagacgcgcggattgttcaaaatcatattaataatcttaaaagtaagttttaccaaaccctgacagtacccgctattcgcagcagttttttatataaccaaagcccgaatgatatttttgagcgttcaaaaatgtacgggatactgctggagtcagtctccggacttcaatccgtgcagtttgtggacagtaacgggataaggcttcattattccacttcaccccgcgatataatgagtcagagccgaaattccacggcttatcgtaattataacgaaaaccccatgtccctgccctttgaaatagtgagcgtgcaggacggcggagacgccaaacttacaatggatgaacaaaatgacagaatcattttttcatttccctttagggattcaatggacgtttaccgggggacggctctttttacggtgtcaatcagaacgcttgccgaaaaacttattgaagaagggcgtttaaaagtaagcgacaatatttccgtaataaatgatccgtccggtattcttctgggggttcccgaaacatcaaaggctgttatattaaccagagtctcggaagtttggaacgaaggcgttaaagactacataacccttgacgctgaagaatcaggagcggttttttcccttatcacggcaaaaacagaccagaacatatttttcggcaaattgataaataattatttattttcaatttcagagccgatgaagcacattttaagaatttccatttttttgacattttttctgacattttttttcctgttaaatttaaagcctaactctgtaacagttgtacgaaaccgcataaaacgcctgagggaaagtttttttaaacagttagacgttaataagaccgttcaggaaaaggcgaaattgatactggaactggaacaacgccgcgataaattattacagtaa

SEQ ID NO: 23088 - protein, 361 aa, Unknown
  Obtained from environmental sample
  SIGNAL (1)...(27)
  misc_feature (1)..(361): Xaa is any amino acid
MSAFLKPLFALVISILLFAGLIFLANGDLLDVVEARFYNPSIVNNYVKENNVDARIVQNHINNLKSKFYQTLTVPAIRSSFLYNQSPNDIFERSKMYGILLESVSGLQSVQFVDSNGIRLHYSTSPRDIMSQSRNSTAYRNYNENPMSLPFEIVSVQDGGDAKLTMDEQNDRIIFSFPFRDSMDVYRGTALFTVSIRTLAEKLIEEGRLKVSDNISVINDPSGILLGVPETSKAVILTRVSEVWNEGVKDYITLDAEESGAVFSLITAKTDQNIFFGKLINNYLFSISEPMKHILRISIFLTFFLTFFFLLNLKPNSVTVVRNRIKRLRESFFKQLDVNKTVQEKAKLILELEQRRDKLLQ

SEQ ID NO: 23089 - DNA, 729 bp, Unknown
  Obtained from environmental sample
  misc_feature (1)..(729): n is a, c, g, or t
ttgcatagccaaaacaaaataaccgtatttagaaaaaggagacctgatatgcgcagacttgtactgattacggcggcggtcgcggcggcgattgcgggggctttcgccgcagagccggctttcggaacattcaccgacacaagagacgggcagacgtacaagacggtgaagatcggcaaacagacttggatggcgcagaatcttaattatgagccgcaaacgggcaaatcttggtgttatgagaacgatacttcctactgtaataaatacggtaggctgtacgattggaatacagcacgaactgtttgccccatcgggtatcatttgccgtctcgtgaggagtgggatagtttgggacgggcgatggggggtcgggggctacccgatgccggttatcttgatgcggtacccaaagatgcaatttggggtgcgatttggcacgatacgggcaagaaattgaaatcgaaaagcggttggcgttggaaccatttcgacagcgtgagcggtggcggtacggataactatggattctctgctttgccaggcggtgaacgctacgatggcagattcaaccacgccggcaacaaaggtgcttggtggacggctacggcgtgtcgtaaagattatgcctacatccgagacttggactttagatccaccttttggtatgactcctacacagaaaggagtagcggcctctccgtccgttgcgtcgccgacaccccatga

SEQ ID NO: 23090 - protein, 242 aa, Unknown
  Obtained from environmental sample
  misc_feature (1)..(242): Xaa is any amino acid
MHSQNKITVFRKRRPDMRRLVLITAAVAAAIAGAFAAEPAFGTFTDTRDGQTYKTVKIGKQTWMAQNLNYEPQTGKSWCYENDTSYCNKYGRLYDWNTARTVCPIGYHLPSREEWDSLGRAMGGRGLPDAGYLDAVPKDAIWGAIWHDTGKKLKSKSGWRWNHFDSVSGGGTDNYGFSALPGGERYDGRFNHAGNKGAWWTATACRKDYAYIRDLDFRSTFWYDSYTERSSGLSVRCVADTP

SEQ ID NO: 23091 - DNA, 1038 bp, Unknown
  Obtained from environmental sample
  misc_feature (1)..(1038): n is a, c, g, or t
ttgcggtatagaataagaatgattaaagaagcgattacgatggcggcaaagagagaggatctctcctatgaatgcgccgaaactgttatgaatgaaatcatggaagggaaagccagcgaaattcagatggcggcttaccttgcggcaatgtccgtaaaaggcgaaactatcgatgaaattaccgcgtcagccgccggaatgcgtaagcactgcgtcagggttttacatgacatggacgtactggaaattgtcggcacgggcggagatcattccaattccttcaatatatccactacttccgcgctggttatttccgcagcggggattcctgtcgcaaagcacggcaaccgcgcggcgacaagcagaacaggttcggcggacgttcttgaagccctgggcgtcgatataacgatcccgccggaacaaagtttggaacttttaaaaactataaacctttgtttcctctttgcgcagaactaccatatttcaatgaagtatgtcgctccggttaggcgcgaacttggtattcgtacaatttttaatatactcggtcctttggcaaatccggctggcgctaacatggaattgttaggcgtgtacgaacttgaactggttgaaccaatggcgaaagttttgtgcaatcttggagtaaaaagaggcatggttgttttcggtcatgacggactggacgaaatatcaattagctcgcctacgactgtctgcgaattgcgtgacgggtttatcaaaagttacgaaatagagccggaacaattcggactaacccgctgtaaaaaagaagacttgctaggaggaacaccgcctgagaacgcgcagataacaagggacattctttcaggcgttaaagggcctaaaagggacgcagttcttataaattcagcggcggctatccatatcgctaaacctgaaatttctattaaagaaggaatcgccattgccgaagaagcaatcgattcgggaaaggcaaacgaacagttaaaacagtttatcgccctgtcgcagaaaaaagacacagcctaa

SEQ ID NO: 23092 - protein, 345 aa, Unknown
  Obtained from environmental sample
  DOMAIN (7)...(72): Glycosyl transferase family, helical bundle domain
  misc_feature (1)..(345): Xaa is any amino acid
MRYRIRMIKEAITMAAKREDLSYECAETVMNEIMEGKASEIQMAAYLAAMSVKGETIDEITASAAGMRKHCVRVLHDMDVLEIVGTGGDHSNSFNISTTSALVISAAGIPVAKHGNRAATSRTGSADVLEALGVDITIPPEQSLELLKTINLCFLFAQNYHISMKYVAPVRRELGIRTIFNILGPLANPAGANMELLGVYELELVEPMAKVLCNLGVKRGMVVFGHDGLDEISISSPTTVCELRDGFIKSYEIEPEQFGLTRCKKEDLLGGTPPENAQITRDILSGVKGPKRDAVLINSAAAIHIAKPEISIKEGIAIAEEAIDSGKANEQLKQFIALSQKKDTA

SEQ ID NO: 23093 - DNA, 1140 bp, Unknown
  Obtained from environmental sample
  misc_feature (1)..(1140): n is a, c, g, or t
ttgatttatatggcatcgcagctttcaccgtatcagcttcgaaaagcgcgtgaaacctacaattatttcaatgtttttaacgcaatttcatggaatttactggtaggaatcatcataactctttttgctttacggttaggcgcttcttcaacctatataggaattctaaattcaacattttatatatctttgtttttacttcctgccgggaaactgcttgcgagacgtttctccataattagggttttcagcacgacatggattttacgatctcttggaatggccttcgctgtcgctgctccgtttcttgattatgcgggtcacaggaatttggcattgctgtttatcctgttgggagtttttattttccaaattttccggggaattggaatgataggcaataatcctgtgttaagcgaacttgcttcaggagccgacaagggcagttatatgacacagatacagatcattaacagctcaatcggaatgttcggaagttttttgatagccatggtgcttggttttgacccttcaatttttattttttcgcttttacttgttattggtgtaatcacgggagttataagcggatatgttataaaaaaagtgcctgaaccgccaagagaaaaggacataaaaaagtttaatcttgtaaatttattcaaggatacccttgctcaggatgatttaaaacattttatttttattttgttccttgttgttcttgtttctggtgttacacgggcattcgtggttgtgtatgcccgtgaagtgttcgggcacaatgacggtctgctttcgctttactctgttttcggcagtcttggctatcttatggcaggcataagcgtaaaattccttgtagacaggatcggcgcaaagccgctttatcttgtttgcgtaattttgggtcttgtcagcattgtgcccgtaatcttttttcccgccgccgctgtcgaaaatatggcaggcgctattctgttccttgcctttttgttttttatgttgaatttcggctttttaggttcggaaggaatcgctcaaacgtattttttggcgctggttccgcaggaaaaaattcttgaccttggcattatttatttttttattttcggtgtcgcaggagcctcggccatctga

SEQ ID NO: 23094 - protein, 379 aa, Unknown
  Obtained from environmental sample
  DOMAIN (20)...(376): Major Facilitator Superfamily
  misc_feature (1)..(379): Xaa is any amino acid
MIYMASQLSPYQLRKARETYNYFNVFNAISWNLLVGIIITLFALRLGASSTYIGILNSTFYISLFLLPAGKLLARRFSIIRVFSTTWILRSLGMAFAVAAPFLDYAGHRNLALLFILLGVFIFQIFRGIGMIGNNPVLSELASGADKGSYMTQIQIINSSIGMFGSFLIAMVLGFDPSIFIFSLLLVIGVITGVISGYVIKKVPEPPREKDIKKFNLVNLFKDTLAQDDLKHFIFILFLVVLVSGVTRAFVVVYAREVFGHNDGLLSLYSVFGSLGYLMAGISVKFLVDRIGAKPLYLVCVILGLVSIVPVIFFPAAAVENMAGAILFLAFLFFMLNFGFLGSEGIAQTYFLALVPQEKILDLGIIYFFIFGVAGASAI

SEQ ID NO: 23095 - DNA, 909 bp, Unknown
  Obtained from environmental sample
  misc_feature (1)..(909): n is a, c, g, or t
ttggcaaatacggaatacggacgcatcgaagttaaaataaagaatagggaggagggaagcaatagcgctctttccggtttcttaaaagggtttaaagattcctttacggcgtggatgagccacggcgacactcttactaaacttgcccccggttttaaagaatacggagtaagcggcacgggctaccccgcagttgtcgctcatgagcaaaagctgtggttcggtttacagttccaccctgaagtaacccactgcgaaggcggggacgacatacttggcgcgtttgttttcggcgtttgcggctgcaacgcaagctggagcatggaacaatatgtcgaaggactgaacaagtcgcttaaggaacgggcaggcgataatcccgtgttgctgttaatctccggcggcatcgattctaccgtagccggagccgccttgttgaaaacactgaaaagcgaacaggttcatcttatgtacatggacacaggtcttatgcgcaagaacgaaacagaagttgtccgctccagccttgaaaaactcggcgcaaaaaatttgcacataattcactgtgaggatgaattcctttcggcgttaagaggtaaaacagagccggaagaaaaacgccgcataatcggcgatttattcatcacaattcaagagcgggaagtagctcgtcttggattgccggaaagttatctccttgcgcaggggacgctgtacaccgacttgattgaaagcggtcacggagtgggaaagaaagcacatgtaataaaaagccaccacaatgtagcaagccccgcttgtaatggcaaaacgcaaagcggggaaaaattattgagccgcgggatcgtttgtacaaagacgaagtgcgcaaactggggcgtattatcggcgttgacgaggaaatcgtga

SEQ ID NO: 23096 - protein, 302 aa, Unknown
  Obtained from environmental sample
  misc_feature (1)..(302): Xaa is any amino acid
MANTEYGRIEVKIKNREEGSNSALSGFLKGFKDSFTAWMSHGDTLTKLAPGFKEYGVSGTGYPAVVAHEQKLWFGLQFHPEVTHCEGGDDILGAFVFGVCGCNASWSMEQYVEGLNKSLKERAGDNPVLLLISGGIDSTVAGAALLKTLKSEQVHLMYMDTGLMRKNETEVVRSSLEKLGAKNLHIIHCEDEFLSALRGKTEPEEKRRIIGDLFITIQEREVARLGLPESYLLAQGTLYTDLIESGHGVGKKAHVIKSHHNVASPACNGKTQSGEKLLSRGIVCTKTKCANWGVLSALTRKS

SEQ ID NO: 23097 - DNA, 462 bp, Unknown
  Obtained from environmental sample
  misc_feature (1)..(462): n is a, c, g, or t
ttgtacaaagacgaagtgcgcaaactggggcgtattatcggcgttgacgaggaaatcgtgaggcgccatcggtttccggggcccggtcttgccgtgcgcatacttggggaagtaacaagagagaagtgcgatattctgcgcgaagcagacgctatttatatagaagaactgaaaacccgccgcggcccgtcgggaaagagcctgtacgacgaaatatggcaggcattcgccatccttctgccgatacgctccgtaggcgtggcgggcgacgttcgcaaatacggctgggttctcgcgttacgcgccatcacaagcgccgacggcatgaccgcggacgtctacccctttgaaacccgcgatcttctggaaatatccacgcgcattaccaactccgtaaaagacatagggcgcgtaacctacgatatttccagcaagccgccggccacgattgagtgggagtag

SEQ ID NO: 23098 - protein, 153 aa, Unknown
  Obtained from environmental sample
  DOMAIN (54)...(152): GMP synthase C terminal domain
  misc_feature (1)..(153): Xaa is any amino acid
MYKDEVRKLGRIIGVDEEIVRRHRFPGPGLAVRILGEVTREKCDILREADAIYIEELKTRRGPSGKSLYDEIWQAFAILLPIRSVGVAGDVRKYGWVLALRAITSADGMTADVYPFETRDLLEISTRITNSVKDIGRVTYDISSKPPATIEWE

SEQ ID NO: 23099 - DNA, 324 bp, Unknown
  Obtained from environmental sample
  misc_feature (1)..(324): n is a, c, g, or t
ttgagtgggagtagggaaagaaggaattttactttgattgataccacatcggccacagaccgtatagggaaagaacctatcggccgcctgttacttgatttttccattccggcaataatcggaatgctggtaaacgctatttataatatcgttgaccgtatctacatagggcaaggcgtagacgcgctgggtatagccggcgtcggtctcgttatgcctgtgatgatgatcatacaatccgtctccatgcttgtaggcataggcgcgaattcgctcttttccatacgtttaggccagggccgatccgatgaagtgaaaaaataa

SEQ ID NO: 23100 - protein, 107 aa, Unknown
  Obtained from environmental sample
  misc_feature (1)..(107): Xaa is any amino acid
MSGSRERRNFTLIDTTSATDRIGKEPIGRLLLDFSIPAIIGMLVNAIYNIVDRIYIGQGVDALGIAGVGLVMPVMMIIQSVSMLVGIGANSLFSIRLGQGRSDEVKK

SEQ ID NO: 23101 - DNA, 738 bp, Unknown
  Obtained from environmental sample
  misc_feature (1)..(738): n is a, c, g, or t
atgcttgcctatgcgacagaaataggcatgaaggggcttgggtatatctccgttctggaagacggttcgttgaaaggcccgattgttaagttcctttccgaagaaaagcaaacagcgttgcgcaaagacttatcactgaaagaaaacgacactttgttttttattgccgatgcgcccgcagcggtaaacggtcttgccgggcagatacgcacggcgctcggtaaccagttaaatcttgttaacaagaacagctttgaactttgtttcattgtggatttcccgatgtacggtaaaagcgaagaaacaggcgcaattgagtttacacacaatcctttctctatgccgcagggcggtcttgaagtgcttgtatcgaaagacccgctcgacattcttgcatggcagtacgacattgtgtgcaacggcgtggagctttcctccggcgctgtccgtaatcatctgcccgaagttatggtgaaggcgtttgaaatcgccggatacacgcaggccgaccttgaaaataagttttcttcactgtacaacgctttccattacggagcgccgcctcacgcgggcatggctcccggtattgatcggattgtgatgcttctggcggaagaagaaaacatccgcgaagttactgttttcccgatgaacagcaacgctcaggatttgttaatggaagctccgtgcgaagtgtcggaacagcagctccgtgaggtgcatatccgcattcgatga

SEQ ID NO: 23102 - protein, 245 aa, Unknown
  Obtained from environmental sample
  DOMAIN (1)...(66): GAD domain
  misc_feature (1)..(245): Xaa is any amino acid
MLAYATEIGMKGLGYISVLEDGSLKGPIVKFLSEEKQTALRKDLSLKENDTLFFIADAPAAVNGLAGQIRTALGNQLNLVNKNSFELCFIVDFPMYGKSEETGAIEFTHNPFSMPQGGLEVLVSKDPLDILAWQYDIVCNGVELSSGAVRNHLPEVMVKAFEIAGYTQADLENKFSSLYNAFHYGAPPHAGMAPGIDRIVMLLAEEENIREVTVFPMNSNAQDLLMEAPCEVSEQQLREVHIRIR

SEQ ID NO: 23103 - DNA, 546 bp, Unknown
  Obtained from environmental sample
  misc_feature (1)..(546): n is a, c, g, or t
atggaagcctccctttacattcatatccccttttgctcaggcaagtgcgattactgcgattttttttccgtgccgctaaagccttcagacgggcggcctgaacaatttgtgaataccctgcttgccgaagccgaaaagctctttgaaaaatatccggttgaaaatgtccccacgatctttattgggggcggtacgccctctgttttgggtcccgccattatgtgccgcttgttaaagggaattttaagtttaattggacgtacccccacggaagtaacgttagaggcgaatcccgaatcggcggacgaagcttttatggaggcaatacgcggggagggggtaacgcggctttcacttggcgttcagactttttacggcccttcccgaaaggcggtgcatagggcaggggacggggcaattctggacgacaggctggcccttgccgccgcttttttcccggccgctttttccgtggacttaatctccggtcttccctttcaggataagagcgtccttctgaagacaagcaaggctcggccgatctga

SEQ ID NO: 23104 - protein, 181 aa, Unknown
  Obtained from environmental sample
  DOMAIN (6)...(179): Radical SAM superfamily
  misc_feature (1)..(181): Xaa is any amino acid
MEASLYIHIPFCSGKCDYCDFFSVPLKPSDGRPEQFVNTLLAEAEKLFEKYPVENVPTIFIGGGTPSVLGPAIMCRLLKGILSLIGRTPTEVTLEANPESADEAFMEAIRGEGVTRLSLGVQTFYGPSRKAVHRAGDGAILDDRLALAAAFFPAAFSVDLISGLPFQDKSVLLKTSKARPI

SEQ ID NO: 23105 - DNA, 792 bp, Unknown
  Obtained from environmental sample
  misc_feature (1)..(792): n is a, c, g, or t
ttgggggtgagccgcaacgcctattaccaatgggcgcgcaacggggtgtcgtggcgacacaaggcagccgacgcagaactggtacgccttattcgggaaatagcggccaggcatcatcgccggtacggcagcccgcgggtacggcgggaattgcgcgatgtctacggaaaacgggtcagtttgaaaaaagtagcccgtctgatgcgtgaaaatggcctgaacgcacgcaggcgcagaacatttatcaggacgaccgactcaaatcatgcctttgcggtctgtgaaaacatacttaaccgtgagtttcatgctgaaaaaggcgggcggaaatgggtttcagatattacatacctgcgtacggtaaacggatgggtgtacctgaccgtggtgcttgacctgtacgaccggaaggtcattggctgggcgctcagcgccggcatggaggccgctgacactgccgtcgccgctttggaaatggcggtaagaaaccggacgcctggggatgggctggtattccattcggaccggggcgtccagtattgcgcccagtcttttcgcgcggcgttatgcgaaagctgcccttcggtccgtcagagcatgagccgcaagggcaattgctgggacaatgcgtgcgccgaatcatttttcaaaacgctgaagagggaattggaaacgcttgacggaaagcatactgaggctgatgtcaggcaatcggtgtttttctacattgaggcgtattacaatcgtatccgtcggactttagtccgctgcattcgacgcttgactatgtag

SEQ ID NO: 23106 - protein, 263 aa, Unknown
  Obtained from environmental sample
  DOMAIN (103)...(261): Integrase core domain
  misc_feature (1)..(263): Xaa is any amino acid
MGVSRNAYYQWARNGVSWRHKAADAELVRLIREIAARHHRRYGSPRVRRELRDVYGKRVSLKKVARLMRENGLNARRRRTFIRTTDSNHAFAVCENILNREFHAEKGGRKWVSDITYLRTVNGWVYLTVVLDLYDRKVIGWALSAGMEAADTAVAALEMAVRNRTPGDGLVFHSDRGVQYCAQSFRAALCESCPSVRQSMSRKGNCWDNACAESFFKTLKRELETLDGKHTEADVRQSVFFYIEAYYNRIRRTLVRCIRRLTM

SEQ ID NO: 23107 - DNA, 1065 bp, Unknown
  Obtained from environmental sample
  misc_feature (1)..(1065): n is a, c, g, or t
atgaaaataacttttgattgcagacatatcgattcaagcgggggaataggagtttatatcagggaaatccttcctttttttcttgattcgggcgcttcgattattcttctgggcgatgaaaatattatacggcagccggcaaaaaatagcgccgttgaaatagtgcattgtactatcaaccccttttccctgcgtggtacttttgctttgccaaaatcaatcctgaaaaaaataaattcaggcgatgtttactatagtccccattttaatgttccgagcggtataacaattcccatatactccaccattcacgatatagtttttcttgacatgccgaaaattgtttccaaaccgggaatttggattaggatgtatttctacaaaagagcggcgcgtttttccaaagcgatttttacggtttctgaattttcaaaatcaagaattaaacattttctcggcgattcgttaaatgtaataaatgcctcaaacgcggttaatgtgccgtttcagacggatttaaaaaacctgcctgagaaaaagaaaaatatcctgtttgtcgggaatataaaaaaacacaagggacttaatatactgcttgacgcttttttacaatgcagaaaagaagggcttgattatgatcttgttattattggttcccgggataacttccggtccggagataaaaaaacttcaaaacgtcttgacagtctgaaagaatacggagttcactttttgggttatataagcgacgctgaaaaatggcggctcattgcggaaagcgctcttttggtacagccttccctgtatgaaggctttggctatccccctcttgaagccatgctgtcgggaacccaggcgctcatttcggatataagcgtttttaaggaaatttattcggattttccagtgcagttttttaacgtgggtgacagccgtgatctgcatgataaattaatggaaattctgtctggtaaaaatccgcaggctgtgtatcttaatgatacgcttatgaaaaaatatacttttgaaaagaccgcttcgattattataagggaaatgcggtga

SEQ ID NO: 23108 - protein, 354 aa, Unknown
  Obtained from environmental sample
  DOMAIN (167)...(339): Glycosyl transferases group 1
  misc_feature (1)..(354): Xaa is any amino acid
MKITFDCRHIDSSGGIGVYIREILPFFLDSGASIILLGDENIIRQPAKNSAVEIVHCTINPFSLRGTFALPKSILKKINSGDVYYSPHFNVPSGITIPIYSTIHDIVFLDMPKIVSKPGIWIRMYFYKRAARFSKAIFTVSEFSKSRIKHFLGDSLNVINASNAVNVPFQTDLKNLPEKKKNILFVGNIKKHKGLNILLDAFLQCRKEGLDYDLVIIGSRDNFRSGDKKTSKRLDSLKEYGVHFLGYISDAEKWRLIAESALLVQPSLYEGFGYPPLEAMLSGTQALISDISVFKEIYSDFPVQFFNVGDSRDLHDKLMEILSGKNPQAVYLNDTLMKKYTFEKTASIIIREMR

SEQ ID NO: 23109 - DNA, 498 bp, Unknown
  Obtained from environmental sample
  misc_feature (1)..(498): n is a, c, g, or t
atgcgtctgcgggaacgtatcattcaaataccgcngctttatttaaaattgggcgaatggtttgattttttgcgcgaaaacggcgcttatgataatacaaggataataataatcgccgatcatggcggcagtattgaaaatcttgtatcaaacaagccgttatccataaaaggtgaaatacgcgaatattataaccctgtttttttatataaagattttaatgcgcatggtacattatccataaacaatgattttatgacaaatgccgatgttcctttttttgcggttaatggtttactggaaaatccggcaaacccatttaccggcaatcctattaacacacaacccaaagaaaacggaatattaatcactacatatcacgcgccaatggccggtaatcacgggaaatatgtttttaatatcaaaaagaatcaatggatgtatcttcacgattcaatttatgaagcgtcaaactgggagaattttgaattaccatga

SEQ ID NO: 23110 - protein, 165 aa, Unknown
  Obtained from environmental sample
  misc_feature (1)..(165): Xaa is any amino acid
MRLRERIIQIPXLYLKLGEWFDFLRENGAYDNTRIIIIADHGGSIENLVSNKPLSIKGEIREYYNPVFLYKDFNAHGTLSINNDFMTNADVPFFAVNGLLENPANPFTGNPINTQPKENGILITTYHAPMAGNHGKYVFNIKKNQWMYLHDSIYEASNWENFELP

SEQ ID NO: 23111 - DNA, 1137 bp, Unknown
  Obtained from environmental sample
  misc_feature (1)..(1137): n is a, c, g, or t
atggataaagtattagaacatttaaaaaatgaaatagaaaaaaatattagtaaagaaaaattcctcgattgtatagaaagaggcaagaacgcaagtaatgaaaaattccccgcttctagcggggtgtcagcgaagctgacggggtgtgccccgccgaaggcggggaagatgtatatccgcgaaaatgcaactcgggcagcagaatacgaagcattcatatacgaacccgatggcacaaaaattcgcacaaagaacataaatccatatctaatagatgcgcccaacattttcatagaaagcagaagcaagcccttgtgcgatgtgccagaaatcggaatagggaacaagccaattgacaatggcaattatcttttcacagaaagcgaaaaggatgaatttttgaaaaaagaaccgcaagctaaaaaatggttcaaaaaatggattggctcggacgagtttataaacagacattttcgctattgcttgtggcttggcgattgttcgccagacgaattgagaaaaatgcccgaatgtataaaacgtgttgaagcggtaaggcagttcaggctggatagcaagagtgatggaacgcgaaaaatagcggaaacaccacgccgcttccacgtggaaaatatgcctaatgctgactatattgttgttcctgagacctcgtcagaaaggcgaaaatatataccaataggttttataactcccgatatactttcaagtaatgcgttaaaactaatccccaacgccaccctctaccatttcggtattttgacatccagtgtgcataacgcctggacacgggcaatttgtggtagattaaaaagtgattaccgctattcaaaggatattgtttacaacaattttatttggcctaatgcaactgatgagcaaaaagcaacgatagaaaaattggcacaatgtgttttggatgcaagggcgaaatttcctgaaagttcgcttgcggatttatacgacccattggctatgccgcctgagctgctcaaagcacatagggagcttgacaaggcggtgatgaagttgtatgggtttgggaaagatgttagcgaggcggagattgtggcggagttgatggggaggtatgggaaaattattagtggagaaaaataa

SEQ ID NO: 23112 - protein, 378 aa, Unknown
  Obtained from environmental sample
  misc_feature (1)..(378): Xaa is any amino acid
MDKVLEHLKNEIEKNISKEKFLDCIERGKNASNEKFPASSGVSAKLTGCAPPKAGKMYIRENATRAAEYEAFIYEPDGTKIRTKNINPYLIDAPNIFIESRSKPLCDVPEIGIGNKPIDNGNYLFTESEKDEFLKKEPQAKKWFKKWIGSDEFINRHFRYCLWLGDCSPDELRKMPECIKRVEAVRQFRLDSKSDGTRKIAETPRRFHVENMPNADYIVVPETSSERRKYIPIGFITPDILSSNALKLIPNATLYHFGILTSSVHNAWTRAICGRLKSDYRYSKDIVYNNFIWPNATDEQKATIEKLAQCVLDARAKFPESSLADLYDPLAMPPELLKAHRELDKAVMKLYGFGKDVSEAEIVAELMGRYGKIISGEK

SEQ ID NO: 23113 - DNA, 1275 bp, Unknown
  Obtained from environmental sample
  misc_feature (1)..(1275): n is a, c, g, or t
atgcgaggtttgcgtatgcacaacgattttaccctgtttatgaggacgtaccctaacggtacaaaggtggttttttaccacgcttacgacaaggacggaaagcgggtcggcccctggactactaacagcctgacgctgacggcggcgcgtaattactgccataagctgttagtggcgggggcgttaattcccagtaaaacaaagccgttcacctttggcgaatttgcggcggggttttgggagcgtggctcggagtatgttaaaaatcaggaaagcagggctgacattactgacacttatattaacaactgccgtaaaatgctgactaatcagattttgcctttctttgccgatacgcctttggataaaattactgataaggacgtaaacaaatggctgttgggtttccgtgaacggaaaaccgaaaatgacggaaaaacagaaatagtcaaataccagaacacttacgcaaatacggtgttcgggacgttcaatgtcatgctggcagaggccgtgaggcaggggcttttaacggctaacccctgcgacaaagttaggcggcttaaaaatgaccggaagaaaattcaaatactgacggttgaggaagtgcaaaaactgttcccgaaaaagcataaaacaatatggggagataaaacgattgcttacgccgtgtgccgcctggcttcgctgacgggcatgaggattggggaaattttaggattacgggtcgaatttgtttttgacgaatacatacacgtctgcgggcagtatggggacgaaggctataagccgtataccaaaaccaaagaagacaggaatatccccttgatacctgaaatgattgcgcttctgcggggcctaaacaacggcaatggctatgtgttttcgctgacaagcggggccgttccggttacccaagcgtatgtacgcaaggcgttccatcaagcgttaaaaaaaatcgggataaacgaggcggagattaagcgcagggctattacgatacacggctggcggcatttcctgaatacggaattgctgaaacagggcttgaccgtcatgcaggtgcagggcgttaccgggcataaatcagacaagatgactgaaatgtataaccacccttccgcaagccaaataaacgatgtcatgaaagcgcaatcggctattgccggaacgcaaaaacctgaaaaagaaaaaacgccgaaagaaaccggaaaggcagaaaacaaccagaagggtttggctattgttaaaatgcccagacggaaatccgcataa

SEQ ID NO: 23114 - protein, 424 aa, Unknown
  Obtained from environmental sample
  DOMAIN (185)...(380): Phage integrase family
  misc_feature (1)..(424): Xaa is any amino acid
MRGLRMHNDFTLFMRTYPNGTKVVFYHAYDKDGKRVGPWTTNSLTLTAARNYCHKLLVAGALIPSKTKPFTFGEFAAGFWERGSEYVKNQESRADITDTYINNCRKMLTNQILPFFADTPLDKITDKDVNKWLLGFRERKTENDGKTEIVKYQNTYANTVFGTFNVMLAEAVRQGLLTANPCDKVRRLKNDRKKIQILTVEEVQKLFPKKHKTIWGDKTIAYAVCRLASLTGMRIGEILGLRVEFVFDEYIHVCGQYGDEGYKPYTKTKEDRNIPLIPEMIALLRGLNNGNGYVFSLTSGAVPVTQAYVRKAFHQALKKIGINEAEIKRRAITIHGWRHFLNTELLKQGLTVMQVQGVTGHKSDKMTEMYNHPSASQINDVMKAQSAIAGTQKPEKEKTPKETGKAENNQKGLAIVKMPRRKSA

SEQ ID NO: 23115 - DNA, 684 bp, Unknown
  Obtained from environmental sample
  misc_feature (1)..(684): n is a, c, g, or t
gtgcattttttcaaggtacacatttgtcactggcctgccagagactatgtatgcggtaatccatattcctctgtagttttctgggtcttctgggtaatagctccaaggtccctggcaagagagaaacagggaaaaaataaccagaatagctttgaacttcatctgaataaaaatagaaatactactttatcattaactatgatgagcaacagcgaaattcaggaattaaaatcttcgctttcaataacagttgttgctaagaggcttggattgtcggttgaacgagggcatttccgttgttttttcccagagcgacacgccaatggcgatagaacgccctctgttagcattaacgaggagaaaggttatttcaaatgctttgtgtgcgaaaacgttaaaggcgatgttatttcactcgtgcaaatgtatctagggataagttttgcagaggctattaaatggcttaaaggcgatgctccttcaataaaaagggatatgcaaaaatcaaccactcaaaatccaaaaaaacaggaaaattcagaacgtccaaaatttttcaaagaaaaagtgatatttgattttttaaacttgctttcaccaataccgccaaatagcaaagctgcttggtggctcgcaaaaaggcatatctacaaacccgtttgggacaaagttcttttgcgttaa

SEQ ID NO: 23116 - protein, 227 aa, Unknown
  Obtained from environmental sample
  DOMAIN (68)...(171): CHC2 zinc finger
  misc_feature (1)..(227): Xaa is any amino acid
MHFFKVHICHWPARDYVCGNPYSSVVFWVFWVIAPRSLAREKQGKNNQNSFELHLNKNRNTTLSLTMMSNSEIQELKSSLSITVVAKRLGLSVERGHFRCFFPERHANGDRTPSVSINEEKGYFKCFVCENVKGDVISLVQMYLGISFAEAIKWLKGDAPSIKRDMQKSTTQNPKKQENSERPKFFKEKVIFDFLNLLSPIPPNSKAAWWLAKRHIYKPVWDKVLLR

SEQ ID NO: 23117 - DNA, 843 bp, Unknown
  Obtained from environmental sample
  misc_feature (1)..(843): n is a, c, g, or t
atgttaaaaattcctgcttttttatacaaaataattacaaaacgtacgattcatatacaactgcttattacggtattcacgttttttcttatggttattttaagctataattttgttaccagaatcgtacggaacaatttaatacgaaacacggaaagcgtgcttgactttgtggaagcccaaataaaatccgaccttcttgaaccgcaggcgatacttggcagttatgggcaaaccatacgcgacatgttcctgaacggggaagatgtcgtcaagatgaataattacaccaacagtatattatattttttacaggtaagggatataattgggcttgctattaacaaactttacgcttatattgaaagtcttccggaaggccccgtcttttttaatggtattaatattattccgccgggcggcttttcaccaacggatcatctttggtataaccttgcccgcgcccgtgaaggcgatattgttgaaacgccgccttacaatgacgagttaacggacgaaattattatgacgttttcatacagtctttatgataatgaaaatgaatatttaggcgttgcctgtattgacgtacgcattgactatatcgggaaaaaagttgtaaatacctcccttaccaaaggcggttacgggtttttggccgcccatgacttgacattgcttgcgcatcccaatccaaattatgaaaaaattaaattttctaatcccatgattcccctttcaatactggtggatgaattggaaaaaattcggaatggtaaaagaggctccgcttataaattcgaaaggggaagaatgcattgcttttatccgtcctctttctaa

SEQ ID NO: 23118 - protein, 280 aa, Unknown
  Obtained from environmental sample
  DOMAIN (163)...(242): Cache domain
  misc_feature (1)..(280): Xaa is any amino acid
MLKIPAFLYKIITKRTIHIQLLITVFTFFLMVILSYNFVTRIVRNNLIRNTESVLDFVEAQIKSDLLEPQAILGSYGQTIRDMFLNGEDVVKMNNYTNSILYFLQVRDIIGLAINKLYAYIESLPEGPVFFNGINIIPPGGFSPTDHLWYNLARAREGDIVETPPYNDELTDEIIMTFSYSLYDNENEYLGVACIDVRIDYIGKKVVNTSLTKGGYGFLAAHDLTLLAHPNPNYEKIKFSNPMIPLSILVDELEKIRNGKRGSAYKFERGRMHCFYPSSF

SEQ ID NO: 23119 - DNA, 759 bp, Unknown
  Obtained from environmental sample
  misc_feature (1)..(759): n is a, c, g, or t
ttggaaatccttcccatatcagttcattatcgttttggatcctggggcagtttcacactcgaatttctactaaaaaaaattgaaagggtttgcggactttccggcaggggcaggaagaaaatacctttcaccgagagggtgaagcaatgcagggctcatgtccttgaagttatagaaaggcgttaccaaatcatagcggaaacctccgccacttttgaggaacgccttgacagggttattaacacagcccttgaaaccgcggagcggatgctgggcgaaaagagcgaaggggattttttcgccagaatgtacagaatgcgccaaatatgctgggacagaatatatattccgggagttgatagttttgaaggcatgtcaaaagtccagcggagcgccgccgatctaaaggccggagaagcgtggtatatcgcacgtcatgtggagctggtggatttttgctggtactttcgcattccgcttccaacggaagaaacggtcattcatagaaaagttgaatatgttcagaacctctgggattttgccagccgctcaatgggaggtgcgttttggaaccgggtaaatatttttccgcgaaaagtaattatccatactgccggagcgattaatttaagcgagcgcctttcatcatatagcaaagataagaaggcagaaatttccctggctatgtcggacttggaaagggcatttcttgactgtattgctgaagcgaatgcttttgccgatggcaggaagaaataa

SEQ ID NO: 23120 - protein, 252 aa, Unknown
  Obtained from environmental sample
  misc_feature (1)..(252): Xaa is any amino acid
MEILPISVHYRFGSWGSFTLEFLLKKIERVCGLSGRGRKKIPFTERVKQCRAHVLEVIERRYQIIAETSATFEERLDRVINTALETAERMLGEKSEGDFFARMYRMRQICWDRIYIPGVDSFEGMSKVQRSAADLKAGEAWYIARHVELVDFCWYFRIPLPTEETVIHRKVEYVQNLWDFASRSMGGAFWNRVNIFPRKVIIHTAGAINLSERLSSYSKDKKAEISLAMSDLERAFLDCIAEANAFADGRKK

SEQ ID NO: 23121 - DNA, 507 bp, Unknown
  Obtained from environmental sample
  misc_feature (1)..(507): n is a, c, g, or t
gtgttttgggcttttcatgtcctgctcattgacgctttggtgaagaaatctgatccaataaagctttcttccgggcagtttgcttttgccggcttttacgctcttatcgccgcttttttggcggaaccgtttctttcacgttggcttttatccattgaaggaaaatatatctccaccgggcttttagcctggaaaagtttcccggccctgataagcggccttgcaagcggggaaattcccttttcgctggtctcaggcgccataattcccatactatacgggggctttgcctcagcgggtataggctacactttgcaagtggtagcccaacagtacgccccccctgcgcacgcgacaatcatcctctgcctggagggttgcttcgccgccattggaggcatcctgatgctgcgcgagccggcgggaataaggaccatcattggttttgctttcatgctttgcggaatgataattagccagctagaactaattcgcgcccaacactaa

SEQ ID NO: 23122 - protein, 168 aa, Unknown
  Obtained from environmental sample
  DOMAIN (1)...(161): Integral membrane protein DUF6
  misc_feature (1)..(168): Xaa is any amino acid
MFWAFHVLLIDALVKKSDPIKLSSGQFAFAGFYALIAAFLAEPFLSRWLLSIEGKYISTGLLAWKSFPALISGLASGEIPFSLVSGAIIPILYGGFASAGIGYTLQVVAQQYAPPAHATIILCLEGCFAAIGGILMLREPAGIRTIIGFAFMLCGMIISQLELIRAQH

SEQ ID NO: 23123 - DNA, 462 bp, Unknown
  Obtained from environmental sample
  misc_feature (1)..(462): n is a, c, g, or t
ttggagcttttggggcagaatgttaggaaaagtttttccatcagtgaacataaaagaaaattcggttttttttctccagaaatggctttgcaagtacatcgcagagttactgtgcttgatgctcttatggaaaattttccgcagccggttttggcagaagaaaaaaaaatggctttgaatttgcttgcaactttagggcttggcaacgaattgaacaaacatttgagagatttgagcgaagaagaactaagacttgccttaattgcgagagcaatttcaatgtctccagaggttctacttttagacgaaccaactcaaggtatgagcgagcagtcaaaggagaggctttttttgcttttagacaaggtgagcgagaaaacaacgcttatttttacaagccattaccccagtgaacacccaaattgcattacccataacttgcggataaattttctgaaatag

SEQ ID NO: 23124 - protein, 153 aa, Unknown
  Obtained from environmental sample
  DOMAIN (1)...(151): ABC transporter
  misc_feature (1)..(153): Xaa is any amino acid
MELLGQNVRKSFSISEHKRKFGFFSPEMALQVHRRVTVLDALMENFPQPVLAEEKKMALNLLATLGLGNELNKHLRDLSEEELRLALIARAISMSPEVLLLDEPTQGMSEQSKERLFLLLDKVSEKTTLIFTSHYPSEHPNCITHNLRINFLK

SEQ ID NO: 23125 - DNA, 756 bp, Unknown
  Obtained from environmental sample
  misc_feature (1)..(756): n is a, c, g, or t
ttggcaaaacaatgcgatgaagcgttaaatgtatttaaagaaaaatcgctggagaaaaacagcccgttaatttattttccgcaaaccgccaatctttccaatgtaaagataactacacaaggcactgattttacgctttccctcaacagtgataaaaattttgcgcatacatcgccactatcactctccattccaattcctgggaaggtgcaggcggaaaatgcgtctctcgccattgccgcgcttaaaattgcattcccgcagattggggaagacgctatctgcggcggtcttaaaaagttaaaaattccggcgcgttttgaaaaattatcgggaaccgacacgccgccgttcatcatagacggcgcacataccccggaaagccttactttgtgcatagaaactttttgtttgctttacggcgaaggcggcgttcttctcttcggttgcgccgcggacaaagattctacggcaatggcgaaaatagcgtgtccgcatttcgcgaaaatatttatcactacccctggaacttttaaagcaagcgatcctgccaacgtttacgaaacttttgcggaaatagcggggcgggagaagacggagcttgttaaggatacgcaggaagcggttaagcgggcggttttatttgcgaaggactatcgcagaggcgcagaggcgcaaagagttgaaggagtgccggtgcttgggacggggtctttttacttggtagcggagattaggagatatttttgtaaataa

SEQ ID NO: 23126 - protein, 251 aa, Unknown
  Obtained from environmental sample
  DOMAIN (103)...(189): Mur ligase family, glutamate ligase domain
  misc_feature (1)..(251): Xaa is any amino acid
MAKQCDEALNVFKEKSLEKNSPLIYFPQTANLSNVKITTQGTDFTLSLNSDKNFAHTSPLSLSIPIPGKVQAENASLAIAALKIAFPQIGEDAICGGLKKLKIPARFEKLSGTDTPPFIIDGAHTPESLTLCIETFCLLYGEGGVLLFGCAADKDSTAMAKIACPHFAKIFITTPGTFKASDPANVYETFAEIAGREKTELVKDTQEAVKRAVLFAKDYRRGAEAQRVEGVPVLGTGSFYLVAEIRRYFCK

SEQ ID NO: 23127 - DNA, 381 bp, Unknown
  Obtained from environmental sample
  misc_feature (1)..(381): n is a, c, g, or t
atgggttattcccgttacaatatcacggctggaggcggcattatacttggcggaagtttggacggtaaaggaattggtttgcgtctgctttacgtgcaggatgctgaaaattttatctttctcgaaacggttgcccaaatacgcctgtacctatcacccgaaaaagacaacacaggtattttcctgcaagcggaaggcggtattgttcttttctcgtatgaaaaatttgaaatcacaggttattcttcttttgtaggaggcataagcgcaggctggcgttttatgatgaataacaaatggtatatagaaccttttatccgaggaggctatccctacattttcggcgcaggtttttcaaccgggtttaaatttaatttttaa

SEQ ID NO: 23128 - protein, 126 aa, Unknown
  Obtained from environmental sample
  misc_feature (1)..(126): Xaa is any amino acid
MGYSRYNITAGGGIILGGSLDGKGIGLRLLYVQDAENFIFLETVAQIRLYLSPEKDNTGIFLQAEGGIVLFSYEKFEITGYSSFVGGISAGWRFMMNNKWYIEPFIRGGYPYIFGAGFSTGFKFNF

SEQ ID NO: 23129 - DNA, 654 bp, Unknown
  Obtained from environmental sample
  misc_feature (1)..(654): n is a, c, g, or t
ttggccgagactcctgaaatctgctttctttctgttgtcagtgatggggcaaacacaaagttgggtagtatttttacgccttataaatattattacgcatggaacaaggcgaacgacaatgaaaaagtaagcaacggaatatcctccttatttaccatgataaaaggcgtatttgctaaagaccgtttaactgcaattctccgcgactttatctattatcccgatgacagtaataaagaagaggcaattattacccgctatccgcagttctttgctgccaataaaatgctcgccaatataaaatgccacatgaaaccgaacggggacggcaaaggcggaacatatttcggcgctaccggctgcggcaagacctatgcaatgctttttctgtcccgcttgcttactcttagggaaagagaagtttttaataaccctacaatcgtcatcatcgaggacagggaagatttagacactcaaacatcagaaatatttgtatcatcaaaaaaatacttacatgataccaatgtcagaagcattgaaagccgtcaagaccttatggacgaactatgcaataaagcaagcggcggcgtttatataacaaccatacagaaattctgtgaaaagatgggtaatccgtcgacacttgaccagtga

SEQ ID NO: 23130 - protein, 217 aa, Unknown
  Obtained from environmental sample
  misc_feature (1)..(217): Xaa is any amino acid
MAETPEICFLSVVSDGANTKLGSIFTPYKYYYAWNKANDNEKVSNGISSLFTMIKGVFAKDRLTAILRDFIYYPDDSNKEEAIITRYPQFFAANKMLANIKCHMKPNGDGKGGTYFGATGCGKTYAMLFLSRLLTLREREVFNNPTIVIIEDREDLDTQTSEIFVSSKKYLHDTNVRSIESRQDLMDELCNKASGGVYITTIQKFCEKMGNPSTLDQ

SEQ ID NO: 23131 - DNA, 735 bp, Unknown
  Obtained from environmental sample
  misc_feature (1)..(735): n is a, c, g, or t
gtgatggaaggctttcctttgacgagggtgtatcttgaaagtttggcaacaggggatctgctagctattgccgataagctcaggatagatattccggataatccggacagaatttttatcatagaagaactgctggacttctcttccagagaagagggcagtccttttatcagcaaggaaccggaattaaatgatttgatcctgaccgaatctgtgcctttgccaaagcagtataacataacgtttatagatgttatgattcgcgaccctctttgggcatttgtgttttgggaaattaaagcatccgaaaaagaggagtttgaaaaagacgagaattttgacggctattatctaaagatttcccgcctggatgaaaagaattcagggagcgggaatgacgggctctttattgttcctgttaagagcgaggatacagcctggtacttgagtttatcgcctgcttttgaagcagatagttcatggtcagacaatagccagtttaaggtggaattctgcgccagtgtcggcgggatagaaacggcgcttgcggtatcaaaggccgtaaaactgccatatctgcccgaactgccttccattgccggaaagcatgacgcttcttcggcctggggaaatgagcttatttgtttgtccgggtacgcagattttcatgtgcttcggagaaacgaaaggcagcttcgcgtaaaaaagggagaaggcgaaagttccaatgagtaa

SEQ ID NO: 23132 - protein, 244 aa, Unknown
  Obtained from environmental sample
  misc_feature (1)..(244): Xaa is any amino acid
MMEGFPLTRVYLESLATGDLLAIADKLRIDIPDNPDRIFIIEELLDFSSREEGSPFISKEPELNDLILTESVPLPKQYNITFIDVMIRDPLWAFVFWEIKASEKEEFEKDENFDGYYLKISRLDEKNSGSGNDGLFIVPVKSEDTAWYLSLSPAFEADSSWSDNSQFKVEFCASVGGIETALAVSKAVKLPYLPELPSIAGKHDASSAWGNELICLSGYADFHVLRRNERQLRVKKGEGESSNE

SEQ ID NO: 23133 - DNA, 426 bp, Unknown
  Obtained from environmental sample
  misc_feature (1)..(426): n is a, c, g, or t
gtggacgggcgtggggccccgctgtcgctcgtcgtgaccggggcgaaccggcacgacgtcacccaggtggaggcggtgctgtcggcgctggccgtgatcggccgcgcccccgccccgggccggaggccgcgcctgtgcgccgacgcggggtacaggggcaggaaggccgaggaggccatggagcgccacgggtacgtcccaaaagtaaaggggcgcggcgatgaggcgagggagctgaaggccgacccgtcaaagagggcgaggcggtgggtggtggaggcggcccacggctggttcaacaggttccgcaagctgctggtgcgctacgagaagctggagcggtcgtacctggccctgtgccacttggccgccgccatcatcgtcttcaggaaggtcggggggaaaataaatattatttacggataa

SEQ ID NO: 23134 - protein, 141 aa, Unknown
  Obtained from environmental sample
  DOMAIN (1)...(126): Transposase DDE domain
  misc_feature (1)..(141): Xaa is any amino acid
MDGRGAPLSLVVTGANRHDVTQVEAVLSALAVIGRAPAPGRRPRLCADAGYRGRKAEEAMERHGYVPKVKGRGDEARELKADPSKRARRWVVEAAHGWFNRFRKLLVRYEKLERSYLALCHLAAAIIVFRKVGGKINIIYG

SEQ ID NO: 23135 - DNA, 696 bp, Unknown
  Obtained from environmental sample
  misc_feature (1)..(696): n is a, c, g, or t
gtggcatactatcctatgggcatggagccttggagggtagagatgagagtgcagtcatgggaagtgtcggacgagttctgggcgagggtggagccgctgatcccgaaaaaggagcgcgaccccgacaagggctataagcgccgccccggcgccgggaggaaggagaagtcaccccgcctggtgttcgagggcatcgtgcgggtgctgcggacgggctgccagtggaagtcgctgccgaaggcggcgtacggcagctccagctcgatacacaagtatttcctcgactgggagagggccgggttcttcatggacttgtggagggccgggctggccgagtatgacgagatggaaggcatagcgtggagctggcagagcatagacggcgccatggtgaaggcgccggccgcgagggaggcggtggggccaaaccccaccgacaggggaaaaaaatgggggcaagcggcacctgctggtggacgggcgtggggccccgctgtcgctcgtcgtgaccggggcgaaccggcacgacgtcacccaggtggaggcggtgctgtcggcgctggccgtgatcggccgcgcccccgccccgggccggaggccgcgcctgtgcgccgacgcggggtacaggggcaggaaggccgaggaggccatggagcgccacgggtacgtcccaaaagtaaaggggcgcggcgatga

SEQ ID NO: 23136 - protein, 231 aa, Unknown
  Obtained from environmental sample
  misc_feature (1)..(231): Xaa is any amino acid
MAYYPMGMEPWRVEMRVQSWEVSDEFWARVEPLIPKKERDPDKGYKRRPGAGRKEKSPRLVFEGIVRVLRTGCQWKSLPKAAYGSSSSIHKYFLDWERAGFFMDLWRAGLAEYDEMEGIAWSWQSIDGAMVKAPAAREAVGPNPTDRGKKWGQAAPAGGRAWGPAVARRDRGEPARRHPGGGGAVGAGRDRPRPRPGPEAAPVRRRGVQGQEGRGGHGAPRVRPKSKGARR

SEQ ID NO: 23137 - DNA, 1113 bp, Unknown
  Obtained from environmental sample
  misc_feature (1)..(1113): n is a, c, g, or t
ttgctcattgctccctgctcattgctcattattatttgtaacaaggagttaacgatgagggataaaactgacggttttcctgcatacagtttactagcgaactgcaccagcgggggctgcggggcccagattgggccgggggagctttccgctctgctgggaaagattccgaacgatnaagatgaacgcctgctggtcggctttgattgttctgacgacgcggcggtgtacgccctggataatggcaaagccatagtgtcaacccgtgattttttctccccgatgattgacgatccttttgttttcgggcagatcgcggcggctaacgcgttaagcgatgtttacgcgatggaggcgacgccgtttctggccttgaaccttgtctgctntccggaaaagtttccaaaatccatactgggcgacatactcgccggaggggcggataaaatcgcggaagccggggcggtactgggcggcggccactcgatctacgataaggaaaccaaatacggacttgccgtaaacggccttatcgaaataaaaaacattattcacaacaacacgccgcgcataggacacagtctgcttctgacaaagcccctgggcgtaggcattgtcatggccgcccaaagagtcggcgcggcaagcgctgacgccatgcaaaaggctgtgaacggcatgagaaggctgaaccgctatgctgcggaaaaaatgctcaggtttaatattagcgcctgtaccgacgtgacgggtttcgggctgctctgccatcttctggaaatgtgcggcaattcagcctcagcggagatttggccggaggctctgccgattatcaatgaagctgcggattacgcgaatgattttctgctcacggccgcggcccagcgcaaccggaatcattttggcaatcggggacaggtggaaaagctgcccttcgccgcgcaggagttgatgtttgatccccaaacatcaggcgggctgttgatctgcgttgatgccgaacagtcccaacaactgttaaacgccattcaaaaagacgatcccgacgcgaggataatcgggcgtattataaatcatcaggatgaaaaaatattatttggaggtaagaaatga

SEQ ID NO: 23138 - protein, 370 aa, Unknown
  Obtained from environmental sample
  DOMAIN (36)...(179): AIR synthase related protein, N-terminal domain
  misc_feature (1)..(370): Xaa is any amino acid
MLIAPCSLLIIICNKELTMRDKTDGFPAYSLLANCTSGGCGAQIGPGELSALLGKIPNDXDERLLVGFDCSDDAAVYALDNGKAIVSTRDFFSPMIDDPFVFGQIAAANALSDVYAMEATPFLALNLVCXPEKFPKSILGDILAGGADKIAEAGAVLGGGHSIYDKETKYGLAVNGLIEIKNIIHNNTPRIGHSLLLTKPLGVGIVMAAQRVGAASADAMQKAVNGMRRLNRYAAEKMLRFNISACTDVTGFGLLCHLLEMCGNSASAEIWPEALPIINEAADYANDFLLTAAAQRNRNHFGNRGQVEKLPFAAQELMFDPQTSGGLLICVDAEQSQQLLNAIQKDDPDARIIGRIINHQDEKILFGGKK

SEQ ID NO: 23139 - DNA, 381 bp, Unknown
  Obtained from environmental sample
  misc_feature (1)..(381): n is a, c, g, or t
atgcaggtgttaaacgacacgcttcatctgctgaaactggagggcctggaaaaacacatgccgtcccagctttcgggcggccagcagcagcgcgcggcccttgcgcggattcttgtaaacaaaccacggctgttaatgctggacgaaccgtttgcggccctggacagccatttgcgcggccagcttcgcatacagatgaaacggcttcttgaacattacggtggctctacgcttatagtgacgcataacagcgacgaagcctgtgatttatgcggacggatagcgcttatggacgccggggcaatcctgaccttaaagccaacgaaggaattgttcagggaaaaagtgactgtcacctacgaattagcaatgagcaattag

SEQ ID NO: 23140 - protein, 126 aa, Unknown
  Obtained from environmental sample
  DOMAIN (1)...(100): ABC transporter
  misc_feature (1)..(126): Xaa is any amino acid
MQVLNDTLHLLKLEGLEKHMPSQLSGGQQQRAALARILVNKPRLLMLDEPFAALDSHLRGQLRIQMKRLLEHYGGSTLIVTHNSDEACDLCGRIALMDAGAILTLKPTKELFREKVTVTYELAMSN

SEQ ID NO: 23141 - DNA, 972 bp, Unknown
  Obtained from environmental sample
  misc_feature (1)..(972): n is a, c, g, or t
atgggcaaccgtatcaacacagtcatgcaggccgcctatttcaagatttccggcatattaaccgaagccgaagcggtaaaacgcatgaaagaacatatcgaacattcctacggcaagaagggcaaagacgtagtagaaaagaactacaaaaccgtagacgagtcattaaccgccgtagaggaagtaaagtacccgtccaagaccgaaggggacatccacatgaaaaaaccctttgccacagcgaaggattcatggataaaggaagttcttggaaccatgtcagtacaggaaggcgacaccctgcctgtcagcaaactccccgaagacggaacattcccgacagcgacaacccagtacgaaaaacggtcagtcgccgagcgcgtacccatttggaacccggaagtctgtatacagtgcggtaactgtacagtagtctgcccccatgcctgtatgcgctttaagaaccttacagacgatcaagcagcgaaagcgccgaaaggatttaagactgcggaaattaagccaaaagccgtagcaggccagaaagcggctcttgttatcgcctgcgaagactgttacagttgcggcgtctgcttcaacatctgccccatgtccaataaaggccaggaaaaacccgcattgtcatggaaatcctacgcggacgaccacgtttttcacgcggaacangtagccgtatgggattacttcctttcactgcctgaaacgcccgcaggcgaactgaaaaacgcgaaagcgctggcctataaacggcctctgtttgaattctccggcgcatgcggcggctgcggcgagacaccttacgttaaacttatgtcgcagcttgtcggcgaccgggcgctcatcggcaacgcaacaggctgtacctcgatatacggcggaaacctcccccactaccccctactgcaagcgggcggacgggcgcgggccggtgtggtcaaacagcctctttga

SEQ ID NO: 23142 - protein, 323 aa, Unknown
  Obtained from environmental sample
  DOMAIN (129)...(152): 4Fe-4S binding domain
  misc_feature (1)..(323): Xaa is any amino acid
MGNRINTVMQAAYFKISGILTEAEAVKRMKEHIEHSYGKKGKDVVEKNYKTVDESLTAVEEVKYPSKTEGDIHMKKPFATAKDSWIKEVLGTMSVQEGDTLPVSKLPEDGTFPTATTQYEKRSVAERVPIWNPEVCIQCGNCTVVCPHACMRFKNLTDDQAAKAPKGFKTAEIKPKAVAGQKAALVIACEDCYSCGVCFNICPMSNKGQEKPALSWKSYADDHVFHAEXVAVWDYFLSLPETPAGELKNAKALAYKRPLFEFSGACGGCGETPYVKLMSQLVGDRALIGNATGCTSIYGGNLPHYPLLQAGGRARAGVVKQPL

SEQ ID NO: 23143 - DNA, 408 bp, Unknown
  Obtained from environmental sample
  misc_feature (1)..(408): n is a, c, g, or t
atgccgcagggcggtcttgaggcgcttacttccaagaatccgcttgatatactcgcgtggcagtatgacatcgtttgcaacggcgtggagctttcctcgggcgcagtgcgaaaccatctgcccgaagttatggtaaaagcgtttgaaattgcaggctacacacaaaacgacatagaaaccaagtttcccgctttattcaacgccttccactacggcgcacctcctcacgcgggcatggctcccggcatagatcgcattgtgatgcttcttgcggacgaagaaaatatccgcgaagtgaccgcgtttccaatgaacagcaacgcacaggatctgttaatggaagcgccgtgcgaggttacggaacaacaattgcgagaagtgcatattaagataagacaaaagcattaa

SEQ ID NO: 23144 - protein, 135 aa, Unknown
  Obtained from environmental sample
  DOMAIN (2)...(107): tRNA synthetases class II (D, K and N)
  misc_feature (1)..(135): Xaa is any amino acid
MPQGGLEALTSKNPLDILAWQYDIVCNGVELSSGAVRNHLPEVMVKAFEIAGYTQNDIETKFPALFNAFHYGAPPHAGMAPGIDRIVMLLADEENIREVTAFPMNSNAQDLLMEAPCEVTEQQLREVHIKIRQKH

SEQ ID NO: 23145 - DNA, 915 bp, Unknown
  Obtained from environmental sample
  misc_feature (1)..(915): n is a, c, g, or t
atgacgcgcgaagaacacacagagttagtcctctcacaaataatgaaaattcgcaagcccgtattccttgccgcgcttaccactttcgccggatttttgtctttttgtttcacctctgtcgcgccgtgcaaagaattcggctatttcgcgagtttaggcgtagcggtggcgttcatagtcgcgattacctttattcccgcgctgttgattatacgcggtcctaaaaagatcaacacgggtaaaaacagcaatgacgaaacatcaagtttcagcgcgtttatcgcggataatcttgtaattcttgccaagcgggaaaaaaccattgtcttcctcgccgtcctggttgtcgctttctcggtatacggactttcaaaattgatcgtcgacaatatcatggttgaatacttcaggacagataccgacatttaccgctccgatgaatttatccggcggcagttcggcggttccaaggtcgtaagcgtagtagccaaaacagacagttacgaaaaaactttaagaccggataccttagccgctatggacgggctttcaacttatttacaggagaaggtacccggagtaggcaaggtaatgggctttaccgatttagtcaaacgtatcaatcaggtctttaacgcagaggaaagccccgacggtttgcgcgtaacaagctcaaatacttccggcagtttcggcgattttggtttcggcggatttggttttggttttaacgattctccccctgccgctactgaacaaaacgtcagttccgcgggcgacagctcgggcgaaaaaatctacacgcaaagcgagatgctcgaactgtttgagcgcgcggcaagccgtttccggggcatgaacgccaacgaacttgtctgggagttaaagcggcaggaaatatgccggccgatctga

SEQ ID NO: 23146 - protein, 304 aa, Unknown
  Obtained from environmental sample
  misc_feature (1)..(304): Xaa is any amino acid
MTREEHTELVLSQIMKIRKPVFLAALTTFAGFLSFCFTSVAPCKEFGYFASLGVAVAFIVAITFIPALLIIRGPKKINTGKNSNDETSSFSAFIADNLVILAKREKTIVFLAVLVVAFSVYGLSKLIVDNIMVEYFRTDTDIYRSDEFIRRQFGGSKVVSVVAKTDSYEKTLRPDTLAAMDGLSTYLQEKVPGVGKVMGFTDLVKRINQVFNAEESPDGLRVTSSNTSGSFGDFGFGGFGFGFNDSPPAATEQNVSSAGDSSGEKIYTQSEMLELFERAASRFRGMNANELVWELKRQEICRPI

SEQ ID NO: 23147 - DNA, 1116 bp, Unknown
  Obtained from environmental sample
  misc_feature (1)..(1116): n is a, c, g, or t
atggataccaacgaaattcttgtcgtgtatggcaacgatataagcgcaatggcgattgcccttgcccgcgaagcaaaactcgccgaattgataggtgatcgtaaaaaacgaatcggcattaagcctaaccttgtaacccccaggccggcttcaggcggcgctaccacacacccggaaatagcggctgctctaatttcgtacctgaaagaaaacggctttaataatctggcgattcttgagagcgcgtgggcgggggcttccactgccgaagctttcagggtatgcaaatacagcgaactagcaagaacaaccggggtagagcttatcgatacgaaaactgacaaagaccgcgcctgcgattgcaaaggtatggaaatcaagatctgtgagagcgctctggcgattgacttcatgatcaacctgccagttatgaaaggccactgccagacccttgttacctgcgccctcaagaacaacaaagggatcattcccgattcggaaaaacgccgcttccatgccctgggcctgcacaaacccattgcccacttaaacacagtggcgcgtaacgacttcatcatcgttgacgggatatgcggcgatcttgactttgaggaagggggaaacccgctgtacgccggacgcatgttcgccgcccgcgatcctgtactgtgcgatgcctgggcgtcggcccagatgggctacatcgtgcaggatattccatatatcggcatggcggaaaaactgggaatcggaagcgccgacataagtaaggcaaaagtgcgcgagttaaacagcgccaggcaagccgccgctcccaggccgtcgggcaaggtcagccggcttgccgaatacattgcggaagacaacgcgtgcagtgcctgttacgcctcgctggttttcgccctttcgcgcattggacccaatgccgcacgtgagtggacaagctggctgaaagagaagttttgcgtaggccagggttataaaggaaagcagggaacgctcggcatcgggcagtgcacttcctcttttaagctgtactgccccggctgcccaccttcaggtgcggatgtgctgggttttctgtacgccgccttttaccgcaccgctaagaactga

SEQ ID NO: 23148 - protein, 371 aa, Unknown
  Obtained from environmental sample
  DOMAIN (17)...(258): Domain of unknown function (DUF362)
  misc_feature (1)..(371): Xaa is any amino acid
MDTNEILVVYGNDISAMAIALAREAKLAELIGDRKKRIGIKPNLVTPRPASGGATTHPEIAAALISYLKENGFNNLAILESAWAGASTAEAFRVCKYSELARTTGVELIDTKTDKDRACDCKGMEIKICESALAIDFMINLPVMKGHCQTLVTCALKNNKGIIPDSEKRRFHALGLHKPIAHLNTVARNDFIIVDGICGDLDFEEGGNPLYAGRMFAARDPVLCDAWASAQMGYIVQDIPYIGMAEKLGIGSADISKAKVRELNSARQAAAPRPSGKVSRLAEYIAEDNACSACYASLVFALSRIGPNAAREWTSWLKEKFCVGQGYKGKQGTLGIGQCTSSFKLYCPGCPPSGADVLGFLYAAFYRTAKN

SEQ ID NO: 23149 - DNA, 459 bp, Unknown
  Obtained from environmental sample
  misc_feature (1)..(459): n is a, c, g, or t
atgctggacatttggaaggaaacagaggacatacgttttgggtgcgtggatcgctccgacaggttcacgctggcgagcgtgtttaatttttttcaggaagcggccatcagccatgcggcggatcttggggtcgggcgggatgatttggtcaagtcaggacaagcctggatactttcgcggctttcgctttttattgaacgccgggcggcttacggggaaactgtcgaggtaagcacctggccgcgcagatcggaaaaactttttgccctgcgtgattatgaaattagagacgctcaggggaaagcggttgtccgtggccgcggtggctggcttgtgctggatattgaaaagcgcaggccgctcaggccgcagcagcttgtagacgctctgccacataacacggggcgtgacgcctttccggctggtcccaaagggcttgatccaagggagaacctgtaa

SEQ ID NO: 23150 - protein, 152 aa, Unknown
  Obtained from environmental sample
  DOMAIN (2)...(150): Acyl-ACP thioesterase
  misc_feature (1)..(152): Xaa is any amino acid
MLDIWKETEDIRFGCVDRSDRFTLASVFNFFQEAAISHAADLGVGRDDLVKSGQAWILSRLSLFIERRAAYGETVEVSTWPRRSEKLFALRDYEIRDAQGKAVVRGRGGWLVLDIEKRRPLRPQQLVDALPHNTGRDAFPAGPKGLDPRENL

SEQ ID NO: 23151 - DNA, 786 bp, Unknown
  Obtained from environmental sample
  misc_feature (1)..(786): n is a, c, g, or t
gtgaaccaggatcaggtaaaagaaaagctgcttgcccttgaagatgccccgctggatttttcagtgattttttccggcaagaaaagcaaaaaggtaaacggcctttacaagccggatacgcgggaaataataatccacaatcgtaacttttccgacgcaaaccttttaatgtataccgcgattcacgaatacgcccaccacctccacgcctgcgcaaggggagggcatctttcagcaagggcgcacacagcggaattttgggccatactccacggtcttcttgaaaaggccgagaagaaaaaaatctataaaaatgtgttttccggctccaaagagctggaagaacttaccgacgttatacgaaaaaagtatttgactgaaaacggaaacctaatgaaagagctgggagagctcttgttaaaagccagagagttatgttctgaaataggtggccgctacgaagactacattgacagggtactgtgtattccacggcaggccgcaaatctggccgtgcggatgcaccaatacaacctgaacccaaagaccggccccgacaatatgcggtttctggcaggtattgccaacgaggaaaaacgccaagctgcggaaaattccctgctctctggcagaagcccggatacggtcaaggttgcctttcgccaaaaaccggaacctgaagatccgcgccagggtcttgaaaaagaaaagctccgccttgaaagaaccattgcttcccttacaaagcgacttgaggaagtggagagggaattgaaggaaacttag

SEQ ID NO: 23152 - protein, 261 aa, Unknown
  Obtained from environmental sample
  misc_feature (1)..(261): Xaa is any amino acid
MNQDQVKEKLLALEDAPLDFSVIFSGKKSKKVNGLYKPDTREIIIHNRNFSDANLLMYTAIHEYAHHLHACARGGHLSARAHTAEFWAILHGLLEKAEKKKIYKNVFSGSKELEELTDVIRKKYLTENGNLMKELGELLLKARELCSEIGGRYEDYIDRVLCIPRQAANLAVRMHQYNLNPKTGPDNMRFLAGIANEEKRQAAENSLLSGRSPDTVKVAFRQKPEPEDPRQGLEKEKLRLERTIASLTKRLEEVERELKET

SEQ ID NO: 23153 - DNA, 360 bp, Unknown
  Obtained from environmental sample
  misc_feature (1)..(360): n is a, c, g, or t
atgagtatttcaacatataccgtaaaacctaagcttccgaactcattgaagcctttggaggaaattgccaggaacctgtggctttcctggaattttgatgctgttgaactttttatccgcctggattatgacgtatggcttaagtcccaccaaagtccggtgcggacactcggtatggtcagccaggaacggcttgccgaagtggccaaagatgattcttatctggccgccctgaaagaaatttacagccggtttttgaactacaagaaggcaaatacctggtacaaaggttccaaaaaggatgtagttgcgtacttctcaatggaatacggtaggagtctcggccgatctgatccctga

SEQ ID NO: 23154 - protein, 119 aa, Unknown
  Obtained from environmental sample
  misc_feature (1)..(119): Xaa is any amino acid
MSISTYTVKPKLPNSLKPLEEIARNLWLSWNFDAVELFIRLDYDVWLKSHQSPVRTLGMVSQERLAEVAKDDSYLAALKEIYSRFLNYKKANTWYKGSKKDVVAYFSMEYGRSLGRSDP

SEQ ID NO: 23155 - DNA, 585 bp, Unknown
  Obtained from environmental sample
  misc_feature (1)..(585): n is a, c, g, or t
atgatttcaggggacgcgatcttccagggagacgatgaggatcggataatagccgctcaaattatctccggacaaaaagagctgttccggcttttgattaaaaagcatgaaagggcggtttacgggatggggatgagtttcttccataacgttgaagacgcgttggattttacccaggaggtttttctaaaggtatttaacaatctttcacggtttgagggacggtcgcgattttcaacatggctgtataaaattgcctataatacggcggttaatggtgttaccagaatgaaagagtataaaagcctgactgaggatgaagttaaatgcgacaatgatactcctgagagaaaacttctcagaaaattggcttgtgatgccgtcatggaggcagtgatagagctgcctgaacgattccgggtgtgcatagacttattttttttctatggccggtcttatgaagaaatagaagctatcacgggatatccggtcaatacgatcaagtcccatgtattccgggcaaaaaaaatattacggggaaaacttgcgatttatgcaggcaataacccgggaggcgatgaatga

SEQ ID NO: 23156 - protein, 194 aa, Unknown
  Obtained from environmental sample
  DOMAIN (131)...(180): Sigma-70, region 4
  misc_feature (1)..(194): Xaa is any amino acid
MISGDAIFQGDDEDRIIAAQIISGQKELFRLLIKKHERAVYGMGMSFFHNVEDALDFTQEVFLKVFNNLSRFEGRSRFSTWLYKIAYNTAVNGVTRMKEYKSLTEDEVKCDNDTPERKLLRKLACDAVMEAVIELPERFRVCIDLFFFYGRSYEEIEAITGYPVNTIKSHVFRAKKILRGKLAIYAGNNPGGDE

SEQ ID NO: 23157 - DNA, 1140 bp, Unknown
  Obtained from environmental sample
  misc_feature (1)..(1140): n is a, c, g, or t
ttgaaccgccggcaggaagcgattacggttctttctacggcgctcagcgtaagtgaggaagaggaatttatccgcgcaattctggaagatacgcttatcacatcgactccgttggaagattcccgccgcgcaagatgggcctcctggcattttgccaacgcgaaaaattaccgcacgcgcaacttaaccgatcaggccttatttgaataccgccgcgggcttaggttaaatccattcgcgcaggacaggcgcgactacgccgaagcgcttagggtcaccggctatccgtcccgctatcttgaagagcttctttttttgaaggaacagggaaagacggacacggtgataaacgacgcgatagaagcctacggctccctgctttccaacgcgcttttcaagcagtggaacgtgaatcccgttgaacttgcggaacgccactggaaagtcgccgtcttttcgctggaaggccagtccagttttgttcacgccgacgcgggggaagtcgcggcgtcagttatcaaagaccttttaaatcacgaccgcaacataacgccggcaaatttacaattacgccagccgtctttttctcaagctttcaggcaggcaagggaaagcggcgcggattatttcatgcttgtatccgtaaccgagaacgaaagggacatttcgataaagggggaactttttacgtccagaaccggctcccccgccgccgctttctacacctaccgcacgggcacgggcagactgcgcgacgcttcgaaaggaatagcggaacaattatccgccgcccttcctttcaggggcaggctgcttttcagaaagcagggacaggcgttgattaacaaaggaagagccgacggcattcaaccagatacggtatatgatgttgtaaaacgtggccgtatgcaaaccgctaacgaaggtatcgccatcatctactcaagcgacgaacttgtaggaaaactgacaatcacaaatattgatgaagaaatagcgattggcacattggcgagaaacggtttctttgaccgtattgagccgggagacgaagtaatccttcaagccaaaaaaacaagcaagcctgcggaaagctccgcaaaccctgaattaagggcgctgttaaggacattgcgataa

SEQ ID NO: 23158 - protein, 379 aa, Unknown
  Obtained from environmental sample
  misc_feature (1)..(379): Xaa is any amino acid
MNRRQEAITVLSTALSVSEEEEFIRAILEDTLITSTPLEDSRRARWASWHFANAKNYRTRNLTDQALFEYRRGLRLNPFAQDRRDYAEALRVTGYPSRYLEELLFLKEQGKTDTVINDAIEAYGSLLSNALFKQWNVNPVELAERHWKVAVFSLEGQSSFVHADAGEVAASVIKDLLNHDRNITPANLQLRQPSFSQAFRQARESGADYFMLVSVTENERDISIKGELFTSRTGSPAAAFYTYRTGTGRLRDASKGIAEQLSAALPFRGRLLFRKQGQALINKGRADGIQPDTVYDVVKRGRMQTANEGIAIIYSSDELVGKLTITNIDEEIAIGTLARNGFFDRIEPGDEVILQAKKTSKPAESSANPELRALLRTLR

SEQ ID NO: 23159 - DNA, 381 bp, Unknown
  Obtained from environmental sample
  misc_feature (1)..(381): n is a, c, g, or t
gtggttgtgcttatcggcatattattcgcaaaacagttctggtggattgacagcgtgttggggataatcatcgccctgatgttgttttacgcggcttttacaatcttaaaagaagccataaataaaattttaggcgagcaaccggatcaggatttaataaataaattaacaaatgaaattaaaaatatatattatgatgatttaaaaatacatcatttacatattcataattatatttcccataaggaattaacttttcatataaggcttagtaaagatttaacgatagaaaccggtcatagggttgcgtcagagattgaagaaattattttagataaatttggcatgaccgcgaccatccacgtagaaccgttaaaataa

SEQ ID NO: 23160 - protein, 126 aa, Unknown
  Obtained from environmental sample
  misc_feature (1)..(126): Xaa is any amino acid
MVVLIGILFAKQFWWIDSVLGIIIALMLFYAAFTILKEAINKILGEQPDQDLINKLTNEIKNIYYDDLKIHHLHIHNYISHKELTFHIRLSKDLTIETGHRVASEIEEIILDKFGMTATIHVEPLK

SEQ ID NO: 23161 - DNA, 681 bp, Unknown
  Obtained from environmental sample
  misc_feature (1)..(681): n is a, c, g, or t
atgagcgatgaatttaggattactgtcatcgaaaaagcaggctatggatttagtgaaatttcaaatatgccaagagatatagacacattattatatgaaacaagaacagtattaaaagaagtaaatataaatccaccttatatattattttcccattctatgtctgctattgaggcattatactgggttcaatgttatcctgacgaaataaaggcaataatcggtatagatccagcttttccaccttattatgaaaaattaaatataactcccataataaaaaaaatgaaaactttatcaaaaatatttaacaaatattttaaatggcttcttccttttattgcaaaacaattatccccaataaaatacaatacattaaataaaattgatacaaaaatatgcaaggctttaaattatcatagattcttaacaaatgatatgtttaatgagtcggaaaaagtcaaagaaaatgcggagaaaatatatattgaaaaaataaacagaatacctatgctattatttatttctaattatagcaaatgggaaaatttaataagggagtatataaaagattttaatgtagaattcatattatataatgccgggcattatttacataatatttttccggaggatatatcaaatagaagcaaaatatttataaagaatatgataaaataa

SEQ ID NO: 23162 - protein, 226 aa, Unknown
  Obtained from environmental sample
  misc_feature (1)..(226): Xaa is any amino acid
MSDEFRITVIEKAGYGFSEISNMPRDIDTLLYETRTVLKEVNINPPYILFSHSMSAIEALYWVQCYPDEIKAIIGIDPAFPPYYEKLNITPIIKKMKTLSKIFNKYFKWLLPFIAKQLSPIKYNTLNKIDTKICKALNYHRFLTNDMFNESEKVKENAEKIYIEKINRIPMLLFISNYSKWENLIREYIKDFNVEFILYNAGHYLHNIFPEDISNRSKIFIKNMIK

SEQ ID NO: 23163 - DNA, 585 bp, Unknown
  Obtained from environmental sample
  misc_feature (1)..(585): n is a, c, g, or t
atgagtggtacaatgcaatgcccgtcatgcaaagaaaaaatcgatgatgattctcgttattgtgaccaatgcggagaacaaatattggtctgttcaatatgcggacgtcccggtaaaggaaaacgctgtatcttcgacggtaaagagatgattccggcgggaagcgctgggcagcagccatctcaaactgctcaagttaatcagcctgttcccgctcctgcgacaggacaggtatcccaacctgtacagcagagtcctgctgccggtgataaaataaaactttcatccaatagtcatggcattacaatcgaagtatcagatggcgacataataggtcgtaaatcaggaccgtttgccggtgtatttggcaatttttcaaccgtttcaggcactcactgcaagtttgttaaaacaaatggagcgtggtgtattcaggatatgggttccacaaacggcacattttgtaataacagccgtcttgcgcctaatacccctgtgcctctgcaagacggtacaatcataaaaatagcggatgtagaactattggttacattaaacgctaataacggaactgtcagagtatga

SEQ ID NO: 23164 - protein, 194 aa, Unknown
  Obtained from environmental sample
  DOMAIN (120)...(177): FHA domain
  misc_feature (1)..(194): Xaa is any amino acid
MSGTMQCPSCKEKIDDDSRYCDQCGEQILVCSICGRPGKGKRCIFDGKEMIPAGSAGQQPSQTAQVNQPVPAPATGQVSQPVQQSPAAGDKIKLSSNSHGITIEVSDGDIIGRKSGPFAGVFGNFSTVSGTHCKFVKTNGAWCIQDMGSTNGTFCNNSRLAPNTPVPLQDGTIIKIADVELLVTLNANNGTVRV

SEQ ID NO: 23165 - DNA, 765 bp, Unknown
  Obtained from environmental sample
  misc_feature (1)..(765): n is a, c, g, or t
atgatggccatagaccgcaataagctaacaaaacaggccgaaggacacttgtcgtctgggcatatcaaaaaagcgataaacatcttgcttgagatgttggaggacacccccaaagacatgagcctgaccaacaggataggcgacctctacctgcaaattgatgggcagagcgaagctgtggccatgttcaagcgcgccgccattggatttgaagaagacggcttcctacacaaggccatcgccgttttcaaaaagacgctgaggtcgtgccctgaagatacggacaccgccacgcgcttggcagacctctacaaacgcatcaagatgcccaaggatgcgatccaaatgcacgtccatctcgcggatgcatttttgaagaaaggggattttcagagagcactcaaggaactggccgacgtagcctcgctggaccccaagaacataaaaaacaagattcggctcgcagagctatatgccagcgaggggatgaatgagcaggccgaaaaagtatttctagaatcagcagaaatgttggccactgaaaatatgcccgccgaagccgctcaaattttggagcgggccaaatctatcgcttccacggcgaggattttcctcacccagttccgcatctcgctaatccaaaaagactttgaagtggccatcgcccacttggacgatggcctgaaagcgtacccccaaaacgccgatttgcttggcactaaggccgaagcgttgatccagcccagcagtctttggacgcgctga

SEQ ID NO: 23166 - protein, 254 aa, Unknown
  Obtained from environmental sample
  DOMAIN (114)...(147): Tetratricopeptide repeat
  misc_feature (1)..(254): Xaa is any amino acid
MMAIDRNKLTKQAEGHLSSGHIKKAINILLEMLEDTPKDMSLTNRIGDLYLQIDGQSEAVAMFKRAAIGFEEDGFLHKAIAVFKKTLRSCPEDTDTATRLADLYKRIKMPKDAIQMHVHLADAFLKKGDFQRALKELADVASLDPKNIKNKIRLAELYASEGMNEQAEKVFLESAEMLATENMPAEAAQILERAKSIASTARIFLTQFRISLIQKDFEVAIAHLDDGLKAYPQNADLLGTKAEALIQPSSLWTR

SEQ ID NO: 23167 - DNA, 492 bp, Unknown
  Obtained from environmental sample
  misc_feature (1)..(492): n is a, c, g, or t
ttgtacaaggaaagggattattccaaaataagtaaagacgcttcccagtccaatatttcacagatacgcctgttgggaaacgtacaagaaaaaactgttttcatggcggatgatcttttgggaacgggcggcactttgataaaaggcatgaggcatctgaaagaaaacggcgcacgcaaaatcatctgctctatcagcctgccgcttttttccggcaatgcaatttctcactttgacgaagcctacagcgaagggcttttttaccgcataatcgggactaacgcggtttatcaggaagaagttttaaaacgcgaatggtatgttaatgtaaacatttcccggctttttgcccatgtaatttcccgtcttcatcaaaatcaatctgtttccagcctgctggacaatgccgccattattaacaagttggtttctcaaaccctgctccctgaagcgcagaacgaattgccgttcactcaaacagacgttgaatga

SEQ ID NO: 23168 - protein, 163 aa, Unknown
  Obtained from environmental sample
  misc_feature (1)..(163): Xaa is any amino acid
MYKERDYSKISKDASQSNISQIRLLGNVQEKTVFMADDLLGTGGTLIKGMRHLKENGARKIICSISLPLFSGNAISHFDEAYSEGLFYRIIGTNAVYQEEVLKREWYVNVNISRLFAHVISRLHQNQSVSSLLDNAAIINKLVSQTLLPEAQNELPFTQTDVE

SEQ ID NO: 23169 - DNA, 522 bp, Unknown
  Obtained from environmental sample
  misc_feature (1)..(522): n is a, c, g, or t
atggccgggggcggcatttcttgtacatctctggctctttttgtttcggaatacttttccggacggcccggcaactatcgaaatgacgcggagatgggctggtttgacgcgatgttcatcggactgcttcagggtattgccatagcccccggtatatcccgctctggccttaccttgtccggggccttgtcccggaaactggaacgtgatttggcggtcaagttttcttttctcctttcaattccggcaattttaggcgccctgcttcttcaaatacgggagttgtatcagttgcttaatttccaaagcgttaaccctgaagcatccatcggtttttttatgggtataaatcccgctttctttattgcgggaacattaactgcggccctggtagggttttgcgcggtaacgctgatacttaaaataatccggaaacgatcccttgtcggatttggagtctataccgccctgctgggttcattaatcttactggatcagtatatttttcataaagtgttctga

SEQ ID NO: 23170 - protein, 173 aa, Unknown
  Obtained from environmental sample
  DOMAIN (2)...(162): Bacitracin resistance protein BacA
  misc_feature (1)..(173): Xaa is any amino acid
MAGGGISCTSLALFVSEYFSGRPGNYRNDAEMGWFDAMFIGLLQGIAIAPGISRSGLTLSGALSRKLERDLAVKFSFLLSIPAILGALLLQIRELYQLLNFQSVNPEASIGFFMGINPAFFIAGTLTAALVGFCAVTLILKIIRKRSLVGFGVYTALLGSLILLDQYIFHKVF

SEQ ID NO: 23171 - DNA, 765 bp, Unknown
  Obtained from environmental sample
  misc_feature (1)..(765): n is a, c, g, or t
gtgcgtcagggagcgaacctccgctacgacatcgaaataccctttaaagacgcggtattcggcaccaaggtggaaatccaatacaccaaaaacgacgcttgtccttcttgcaagggtaccggggccgcagaaggttccggcaaaaaagtctgctccgtctgtcagggttcgggccagatacggcacagccaaggctttttttccgtggcatctacctgccacaactgccgcggcgaaggctacattattgagcagccttgccgggactgcggcggcggcggaacccagcggaagcggcagaagatcatggttacaatccccgctggagtggaaaacggcaagcgtgtggtgatcccccatcagggcgatgcgggccccggcggcggacctccgggagacctctatgttttcatacggatcaagccacacgaatactttgaacggcaggactttgacctgtactgcgcggtgcctatttccattacccaggctgccttgggggcggaaatccatgtaagcaccctggatgggaaaaaactaaaagtaaaaataccgccgggtacttccaacggcaaaatgctccgtatccgggacgagggagttccttccggcagtaaaaaagggtctttctggatcaagctgattgttaaaacaccggaaaaactgtccaggcggggccgggaactcctggaagaattttcccggacagagggagaaaatgacgctccaaaacccattcccctttctgaaatggcggagcagtag

SEQ ID NO: 23172 - protein, 254 aa, Unknown
  Obtained from environmental sample
  DOMAIN (21)...(101): DnaJ central domain (4 repeats)
  misc_feature (1)..(254): Xaa is any amino acid
MRQGANLRYDIEIPFKDAVFGTKVEIQYTKNDACPSCKGTGAAEGSGKKVCSVCQGSGQIRHSQGFFSVASTCHNCRGEGYIIEQPCRDCGGGGTQRKRQKIMVTIPAGVENGKRVVIPHQGDAGPGGGPPGDLYVFIRIKPHEYFERQDFDLYCAVPISITQAALGAEIHVSTLDGKKLKVKIPPGTSNGKMLRIRDEGVPSGSKKGSFWIKLIVKTPEKLSRRGRELLEEFSRTEGENDAPKPIPLSEMAEQ

SEQ ID NO: 23173 - DNA, 1122 bp, Unknown
  Obtained from environmental sample
  misc_feature (1)..(1122): n is a, c, g, or t
atggaaacttttatttcatgtatcatctgtattgccgacatgaatatagtccccctcgtggatcaagtgcttaccgatcttgagcttcccgaagtttttgtacaacgtgccaagcaaacatttcttcaggacaaacgcgagcttcttggtcttcgctccgttactaaacttgatgaaagccgcgcgttaatttacagagtgtacgttccggcgatgtatgaagaaagtgttatgcgccgtattatcgaggcgactgatcttggaatgggcggacgcggcagtattttttcccagcatatcgacattttaagggggacgcctttttcttttgacatggaaaaactcagtaaactctgtaaaaaaaacgatgtactttcccatgaggaacacgcccttatcagttgtaccgttccccgcggctcaggggattcccttgcccaggcgatactggaactgggcgttggcgtaccggttgttttttatggtaacggcgcgggtctccgcgacaaattgggccttatgagaatcaccattccggttgaaaaggaaattatctggtttattgtcccccgttccgacgccgaactggttgaaaaaaccctcattccccgcgcccgtcttgatgttcccggcaacggctttttataccggtgttttgttcatgcgccggtagtcaatctgcggatcaggcatggcaggcgatttcatgccgcaaccatggaacaggttattgccgcgctggacgcggttcagggttccagcgactggcggcgttttggatcgcgaaaacaggaacataaaggcggcgataaaaagtccggcagcgttaagggacttttttttatcggcgaggaagaggaagtcgatactttccgcaaagcggcaatagaaaacggcgctcgcggcgcaacatttaacccgcttgaaatgcgttcctattctactacccatgggcaggccatggaatcccactcccgccaactctgcgacattatcacttctcccgatattgagaagaagattcgtcattctgacactctggccggtcttttgggcaaagggaaatcttgtattcttaaaacttttgatgtagagatgccgtctgttattcaccggagttga

SEQ ID NO: 23174 - protein, 373 aa, Unknown
  Obtained from environmental sample
  misc_feature (1)..(373): Xaa is any amino acid
METFISCIICIADMNIVPLVDQVLTDLELPEVFVQRAKQTFLQDKRELLGLRSVTKLDESRALIYRVYVPAMYEESVMRRIIEATDLGMGGRGSIFSQHIDILRGTPFSFDMEKLSKLCKKNDVLSHEEHALISCTVPRGSGDSLAQAILELGVGVPVVFYGNGAGLRDKLGLMRITIPVEKEIIWFIVPRSDAELVEKTLIPRARLDVPGNGFLYRCFVHAPVVNLRIRHGRRFHAATMEQVIAALDAVQGSSDWRRFGSRKQEHKGGDKKSGSVKGLFFIGEEEEVDTFRKAAIENGARGATFNPLEMRSYSTTHGQAMESHSRQLCDIITSPDIEKKIRHSDTLAGLLGKGKSCILKTFDVEMPSVIHRS

SEQ ID NO: 23175 - DNA, 669 bp, Unknown
  Obtained from environmental sample
  misc_feature (1)..(669): n is a, c, g, or t
atggatcacaagggcctgggagggctgcccctgggtactgccggacggggcctcctgcttctttcggggggcatagattccccggtcgccggcttccttatggcctcgcgcggcatgggcatagacgcggtgcatttccacgcctacccctacacctcggcggaagcgcaggaaaaagtgatccgcctttccaaaattctgggcgcctacacaatgggcatacgcctgtttattgtcggctttaccaaagtgcagatgcggataaaggaagcctcgccattgccctggtcaacgattctgctccgcatggcgatgatggactgcgccgaaaaaatagcccgtaaaataaaatgcaaatgcctgattaccggggagagcctgtcccaggtggcgagccagaccatagaaaaccttacctgcactcaaagccgtataaggcttcccgtgttaaggcctctgatcggcgcggacaaaaacgccatcaccagaaaggcgaaacaaatcggcacatattcaacgtcgattgaaccttacgaggactgctgcgtcctgttcagccccccccacctcatccttcacggcgatccggcggaggcggttacgctctacgaatcgcttgatctggaaccccttattgacgaggctntgcgcgacagcgaaagccaataa

SEQ ID NO: 23176 - protein, 222 aa, Unknown
  Obtained from environmental sample
  DOMAIN (16)...(169): ExsB
  misc_feature (1)..(222): Xaa is any amino acid
MDHKGLGGLPLGTAGRGLLLLSGGIDSPVAGFLMASRGMGIDAVHFHAYPYTSAEAQEKVIRLSKILGAYTMGIRLFIVGFTKVQMRIKEASPLPWSTILLRMAMMDCAEKIARKIKCKCLITGESLSQVASQTIENLTCTQSRIRLPVLRPLIGADKNAITRKAKQIGTYSTSIEPYEDCCVLFSPPHLILHGDPAEAVTLYESLDLEPLIDEAXRDSESQ

SEQ ID NO: 23177 - DNA, 744 bp, Unknown
  Obtained from environmental sample
  misc_feature (1)..(744): n is a, c, g, or t
atgtcgtccaaggcgcgtgcggatcacctggttttcgagcagggtttggccccgagccgggagcaggcccggcggctcatcatggccggccgcgtgtcgacgggcatcccgcccgtgcgggtggaaaaacccggccacgcatatgcggcggaaaccttgtttgcgctgtccgagccggaacgcttcgtcagccggggcgcatacaaattattgacggcgctggagcattttgccatccgcccggacggttgggtctgcctggacgccggcgcctccaccggaggttttacggattgcctgctccagcacggcgcggcccgcgtgtatgccgtggatgtcgggcgggcgcagttgcatgaacggctgcaacgcgacgcgcgcgtcatcggccgggaggggatcaacctgcgcacggccccggcggactgtatccccgaaccggtggacttgctggtggcggatctttccttcatttcccttacgctggcgctgccgaactgcatgcagtggctgaaagcgggggcgctggtcgtcgcgcttgtcaaaccgcagtttgagcttgccccgcaccaggtgaaaaaaggcgtggtgcgggaagaagccctgcaacggcaggcggtggacggagtatgcgctttctgtgaagcggaactggggctgcgccggcttggcgtcgtgcctgccgccattcgcggccccaagggcaaccaggagtatttggtctgttttcggcgggaatcgtag

SEQ ID NO: 23178 - protein, 247 aa, Unknown
  Obtained from environmental sample
  DOMAIN (62)...(247): FtsJ-like methyltransferase
  misc_feature (1)..(247): Xaa is any amino acid
MSSKARADHLVFEQGLAPSREQARRLIMAGRVSTGIPPVRVEKPGHAYAAETLFALSEPERFVSRGAYKLLTALEHFAIRPDGWVCLDAGASTGGFTDCLLQHGAARVYAVDVGRAQLHERLQRDARVIGREGINLRTAPADCIPEPVDLLVADLSFISLTLALPNCMQWLKAGALVVALVKPQFELAPHQVKKGVVREEALQRQAVDGVCAFCEAELGLRRLGVVPAAIRGPKGNQEYLVCFRRES

SEQ ID NO: 23179 - DNA, 480 bp, Unknown
  Obtained from environmental sample
  misc_feature (1)..(480): n is a, c, g, or t
atgagtggaagtggcatctccgatgttattctcaaaagcccgcccgttttacaccggaggaatacatcgttatgcagaaccacactctttacggcgcaagctctttttgaagatacccagtccgcggtggatgtgcttgccagagatattgccctgacccaccatgaaaattgggacggtaccggctatccgggctgggtcgatccgatcagcagaatccccgtaaaggccgatgataccggaaaaccgctgggcagaaaaggcgaggaaataccccttggaggaaggatcgtagcccttgccgacgtatttgacgcgctgtgctcaaagcgggtctacaaggaaccctggaacgaagagcaggtgttgggagaaatgcgccagcttgcgggcaccaaattcgatcccgaactggtggacattttctttgagatactgcccaatatcaagcagacacagagcatgtacccggaggaatag

SEQ ID NO: 23180 - protein, 159 aa, Unknown
  Obtained from environmental sample
  misc_feature (1)..(159): Xaa is any amino acid
MSGSGISDVILKSPPVLHRRNTSLCRTTLFTAQALFEDTQSAVDVLARDIALTHHENWDGTGYPGWVDPISRIPVKADDTGKPLGRKGEEIPLGGRIVALADVFDALCSKRVYKEPWNEEQVLGEMRQLAGTKFDPELVDIFFEILPNIKQTQSMYPEE

SEQ ID NO: 23181 - DNA, 315 bp, Unknown
  Obtained from environmental sample
  misc_feature (1)..(315): n is a, c, g, or t
atggagatatgccctcccggcgataattccgccgacaaccggatcgtggaactggcgcaatcaggcgacattgttatcagccgggatgtccccctggcaaagcggctgattgaaaaaggagtttcggtaattgacgaccggggccgcgtttttacccctgataatatcaacgagctgctttctttgcgtaattttatggtgggtctggccgaaaacggcctgggcatggaacggaaatcaaactacgggaaaaaagaacttaaaaatttcgcggatagcctggaccgtatcctgggcaaattaacccgcatgtaa

SEQ ID NO: 23182 - protein, 104 aa, Unknown
  Obtained from environmental sample
  DOMAIN (1)...(100): Uncharacterized BCR, YaiI/YqxD family COG1671
  misc_feature (1)..(104): Xaa is any amino acid
MEICPPGDNSADNRIVELAQSGDIVISRDVPLAKRLIEKGVSVIDDRGRVFTPDNINELLSLRNFMVGLAENGLGMERKSNYGKKELKNFADSLDRILGKLTRM

SEQ ID NO: 23183 - DNA, 537 bp, Unknown
  Obtained from environmental sample
  misc_feature (1)..(537): n is a, c, g, or t
ttgacaggtcaattgctggaaaccagggtcgcgaaggccattgagtatgttgaacgggtaaccggggaaaacaacgccctgcttaaaaaagaagcggaactgcggacaaaactggactcgtatcaaaaacggattgacgagcttgaagtcgttgtcatgcgtttcaaggaagaccagagccgcattgaggatggaatcctggcggccctggaccggcttaaccagtttgaggaagctgttgaaaagagccttaatgaaaaggctaatagcccgaccgacgggaaaaagacggcaagtcccgcaaaacctgacaaaccgcaagcgccgcctgtacaggccaaagagccgactcgggctaatagcccagctaatagccaggccaatggccagtctgctaccgggcaacccgctaccagtcaggccgcttccggggaaatgttctttgaaattcccgaagcccaaacagaacagaacattgcagatccagcgaccgatgaggattccctttccccggaaggtgaactggatattttttag

SEQ ID NO: 23184 - protein, 178 aa, Unknown
  Obtained from environmental sample
  misc_feature (1)..(178): Xaa is any amino acid
MTGQLLETRVAKAIEYVERVTGENNALLKKEAELRTKLDSYQKRIDELEVVVMRFKEDQSRIEDGILAALDRLNQFEEAVEKSLNEKANSPTDGKKTASPAKPDKPQAPPVQAKEPTRANSPANSQANGQSATGQPATSQAASGEMFFEIPEAQTEQNIADPATDEDSLSPEGELDIF

SEQ ID NO: 23185 - DNA, 321 bp, Unknown
  Obtained from environmental sample
  misc_feature (1)..(321): n is a, c, g, or t
atggccaatgaactttgcctggacattctgggaacttcttttaccataacggcggacgaagacgaggtttatttacaggatattttggatcaataccggaccgctgtcgaaaatacgcaaaccatctcaggcatcaacgatccccttaatgtcgccgttttgacaggctttctgttgtgcgacgagatcaacaaaatccggctgcggctgggcgaggacgaaacccggcgaaaagaagaggcgctggaagcggaacagcgaacccgcagccttatcgccagactcgatcaggtactggaaaaagaaacccgcaatggctga

SEQ ID NO: 23186 - protein, 106 aa, Unknown
  Obtained from environmental sample
  misc_feature (1)..(106): Xaa is any amino acid
MANELCLDILGTSFTITADEDEVYLQDILDQYRTAVENTQTISGINDPLNVAVLTGFLLCDEINKIRLRLGEDETRRKEEALEAEQRTRSLIARLDQVLEKETRNG

SEQ ID NO: 23187 - DNA, 828 bp, Unknown
  Obtained from environmental sample
  misc_feature (1)..(828): n is a, c, g, or t
atgaggatgcaattttctaaactcgcgttggcggcaaccttcgggcttgctatggcttttacattcactgcttgcatgacccatctcgctggccttacagaaactcaagctcaaaaagagcgtagggaggaaagttctagggaacatcagcggaaatataaagcgacttatgatagtttaagagccatatatgatcgagatactgttgttatgatgactataggcgataaggcttacaaaacagttatgataggtcagactgtttggatggcagaaaatctcaatagggaaataggtaactcagtatgctacgaaaacaaggaagaaaactgcgaccgatgcgggcggctttatgattatgaaacagctatgaggaaagcctgcccaagcggttggcgtttaggaggaccttcggaggtgagttgggatactccattttctagatctactaagaaagcaactggagcagaactaagagcgaaaagcggatgggataataacagcaacggcgaagataaatacggattttccgcactcccttgcggtgcttattacgttattagtactactgggcaacaggcagcttatgctagagaaaaaagtggtggaggtaatgacgctgtaataaatatgttaaccgcagctcagaaacctcgtttcagcggttacggctcttccgcatctttttggtatagtgcgcacccaactatgaataaagcctattacagtgagttaaacagtaatcggctagaaagaaaagacggcgacatagctagcatgttcagtgtccgttgtgttctagatgcctacaactataatagcaaatga

SEQ ID NO: 23188 - protein, 275 aa, Unknown
  Obtained from environmental sample
  SIGNAL (1)...(29)
  misc_feature (1)..(275): Xaa is any amino acid
MRMQFSKLALAATFGLAMAFTFTACMTHLAGLTETQAQKERREESSREHQRKYKATYDSLRAIYDRDTVVMMTIGDKAYKTVMIGQTVWMAENLNREIGNSVCYENKEENCDRCGRLYDYETAMRKACPSGWRLGGPSEVSWDTPFSRSTKKATGAELRAKSGWDNNSNGEDKYGFSALPCGAYYVISTTGQQAAYAREKSGGGNDAVINMLTAAQKPRFSGYGSSASFWYSAHPTMNKAYYSELNSNRLERKDGDIASMFSVRCVLDAYNYNSK

SEQ ID NO: 23189 - DNA, 690 bp, Unknown
  Obtained from environmental sample
  misc_feature (1)..(690): n is a, c, g, or t
ttgatggtcaccggggccggccccgtggtcaagggcgttctcttggccctcctggccttctccctgttctcctgggccatcatcctggccaaggccgtgcagctcagccgggccgcacgcaactccaacgccttcctggactccttctggcagagccgctcattggccaacctctacgccgaagccgccggcttcggctcctcccccatcgcccagatattccgggtgggctaccaggaacttggccgggtccacaaggcccggctggaccaacggacggccatggaaaacgtccagcgggctctccggcgttccggggcggccgaaagcacccgcctgttcaaatacctgcctttcctggccacctgcggcaatgccgcgcccttcatcggccttttcggcacggtctggggcatcatggattccttccatgaaataggccaggccggcacggccaacctggccaccgtggccccgggcatttccgaggccctggtggccacggccgtgggcctggccgcggccattccggcagtcatttttttcaactacttcaacagccgggttcgggaactggaagcggaaatgggcaatttcaacgctgatttcatcaatatcctggaacgcgacctgttgaagcgcggccccgccgccccccagccgggccggcccggccccaaggaggcctaa

SEQ ID NO: 23190 - protein, 229 aa, Unknown
  Obtained from environmental sample
  SIGNAL (1)...(26)
  DOMAIN (66)...(201): MotA/TolQ/ExbB proton channel family
  misc_feature (1)..(229): Xaa is any amino acid
MMVTGAGPVVKGVLLALLAFSLFSWAIILAKAVQLSRAARNSNAFLDSFWQSRSLANLYAEAAGFGSSPIAQIFRVGYQELGRVHKARLDQRTAMENVQRALRRSGAAESTRLFKYLPFLATCGNAAPFIGLFGTVWGIMDSFHEIGQAGTANLATVAPGISEALVATAVGLAAAIPAVIFFNYFNSRVRELEAEMGNFNADFINILERDLLKRGPAAPQPGRPGPKEA

SEQ ID NO: 23191 - DNA, 648 bp, Unknown
  Obtained from environmental sample
  misc_feature (1)..(648): n is a, c, g, or t
atggccttcgattccggcggcggccaaggcgggcggcccggcatgatgagcgagatcaacgtcacgcccctggtggacgtgatgctggtcttgctcatcattttcatggtaacggcccccatgatgacccagggcctggatgtggaactgccgaaagtcgatgcccaggccctgcggaccgaagaacggcagaccgttctcaccataacggcggatggcacggtatttttggatgaacatgcggtaagcggggccaacctggcctaccaggtggcccagctcatgagagtcaagggaaaccagacggttttcctgaaggctgaccataacgtggcctacggggcggtggccggggtcatggcccaattgcggcaggccggcatcaccagcatcggcttggtcaccgagccggcggatcgatcggcccccggggttcccacccgaccagcccggccgcgggtgaccgccgggcttagcggccgcacgatcaagcggatactaaaatggacgatgtttccactgacgatcggacggggaaccccgcacctgtttcggttttttgctaccccgggcctccagggctttggggcggttcccgcttttttcggccccctgggccgaaccgaaaaaaggaattcccaaggttaa

SEQ ID NO: 23192 - protein, 215 aa, Unknown
  Obtained from environmental sample
  DOMAIN (12)...(138): Biopolymer transport protein ExbD/TolR
  misc_feature (1)..(215): Xaa is any amino acid
MAFDSGGGQGGRPGMMSEINVTPLVDVMLVLLIIFMVTAPMMTQGLDVELPKVDAQALRTEERQTVLTITADGTVFLDEHAVSGANLAYQVAQLMRVKGNQTVFLKADHNVAYGAVAGVMAQLRQAGITSIGLVTEPADRSAPGVPTRPARPRVTAGLSGRTIKRILKWTMFPLTIGRGTPHLFRFFATPGLQGFGAVPAFFGPLGRTEKRNSQG

SEQ ID NO: 23193 - DNA, 606 bp, Unknown
  Obtained from environmental sample
  misc_feature (1)..(606): n is a, c, g, or t
ttggctgatgtagtgagtatgcttaaattagtctttgtaaccggaacgcgggctgattacggaaaattgaaatctttaatgcgtgtttgtgatatggatcccgaaaccgagacatacatttatgtaacaggcatgcacttactgcctgaatatgggctgacgtataatgatattttatcagatggatataaaaacatccgtactcatcaaggaaataattattccgccaggatggacgaaaatctcgcatatactgttttgtctttttccggttttgttaaggaagttacgcctgatttgattgttgtgcatggggaccgcattgaacctctagccgctgctattgtaggtgtactcaacaatgtaaaggttgctcatattgaaggcggggaaataaccggaaccgctgatgaatttatgcgccacgcaatatcaaagctcagcagccttcattttgttgcaaacaacgagtcgaagtatcgtttaattcaacttggtgagcatgaaaaaaatatttttgttatcggctctcctgacattgatattatgctttcagataatttaccggggattgatagtgttaaagctaaatataaaattatttga

SEQ ID NO: 23194 - protein, 201 aa, Unknown
  Obtained from environmental sample
  DOMAIN (28)...(201): UDP-N-acetylglucosamine 2-epimerase
  misc_feature (1)..(201): Xaa is any amino acid
MADVVSMLKLVFVTGTRADYGKLKSLMRVCDMDPETETYIYVTGMHLLPEYGLTYNDILSDGYKNIRTHQGNNYSARMDENLAYTVLSFSGFVKEVTPDLIVVHGDRIEPLAAAIVGVLNNVKVAHIEGGEITGTADEFMRHAISKLSSLHFVANNESKYRLIQLGEHEKNIFVIGSPDIDIMLSDNLPGIDSVKAKYKII

SEQ ID NO: 23195 - DNA, 831 bp, Unknown
  Obtained from environmental sample
  misc_feature (1)..(831): n is a, c, g, or t
ttgtatgtcaaacgtcctgtgattgtcgcagggtcttctatacgtacatcaggcagcttggatgtgttttataaacttgtcgataaattaaaacttccggttatttgtccgacaagtacggtggatgttatggctccctgcgataattattactatgggatgtttggcggttttggcggacggacgggtaattttatcattcagaacgccgatttaattatttctctaggcgcaagattatcattcaaacaaattggttttaattatgaaaaatttgcgccagacgcaaggaaaattgttgttgatattgattccgaggaattaaaaaaaccgacaattaaaattgatatgcctgtttgtatggatgtggctgatgttattaacggactttacgaatacgattttaattgcgaaaatacggcaaaaaaggattggcttgattattgtgagtttttaaaacataaattcaatttacccgccaagacatttagaagaacatcaataagcgcgtatcaatttgcagataagttctttgagaagctgggtgacaacgctttaattgttttaggaaataattgcgcggcagtgtctgtgcttcaatacggtataaggcttcgcgggcagcgattatatggaaacgtaaactgcggcacgatgggttatgatttgcctgccgcgttaggcgccgctgtcgcatcaggagatactgttttttgtcttacaggcgacggcagttttcagatgaatattcaggaattgcagacaatcgttcatcataacctccctgtaaaaattgtcgtttttacaataattcgtaccangcgattgtaa

SEQ ID NO: 23196 - protein, 276 aa, Unknown
  Obtained from environmental sample
  DOMAIN (190)...(276): Thiamine pyrophosphate enzyme, C-terminal TPP binding domain
  misc_feature (1)..(276): Xaa is any amino acid
MYVKRPVIVAGSSIRTSGSLDVFYKLVDKLKLPVICPTSTVDVMAPCDNYYYGMFGGFGGRTGNFIIQNADLIISLGARLSFKQIGFNYEKFAPDARKIVVDIDSEELKKPTIKIDMPVCMDVADVINGLYEYDFNCENTAKKDWLDYCEFLKHKFNLPAKTFRRTSISAYQFADKFFEKLGDNALIVLGNNCAAVSVLQYGIRLRGQRLYGNVNCGTMGYDLPAALGAAVASGDTVFCLTGDGSFQMNIQELQTIVHHNLPVKIVVFTIIRTXRL

SEQ ID NO: 23197 - DNA, 954 bp, Unknown
  Obtained from environmental sample
  misc_feature (1)..(954): n is a, c, g, or t
ttgctacaagagcaggggaaccttgccgccgcccttgatgaatcgattaaggtgtgtacggtcgatttgcggaatccggtcgcgttgcggatgctggccgatatttacctcatgcagggccgcgccggcgcggctggcagtttgtacgccattctctccgacatggagcctgacaacgccgagctgaggatttgcgcggccaaaaacaagcagcgggagaggggcaccgccgccgagatattgggaataaagcccgcggcggctgcgccctccgcgaattactctaaaccggcggcgccggcggcgcacgtcgaggccagcatagaaagccagatcgaaagccagttagattcccttttcagcgacaaaatgcaatcgtcgtccgtccaggcgcccggcaacgtcgtcggtccggctccgggcggattttctcctcccggcggcgcggctctcccggcggcgccggatcagttcagcggcgacgacgtagccggtcagctcgacgaaattttcggcgagatatcggagcaagcggcgcctatgcctatgcagatgccgccgcaaatgcctatggcggcgcaaatgcccccgccgatgccgccgccgatgcctatggcggcgcaaatgcccccgccgatgccgccgcccatgccgatggcgccgcccatgcccgcgtccgcgcaggactacgatgccgcggcggcgggttccgtagaaagccatcccagcggcgacgacgtcgccggacacctcgacgccctcttcggcgcggatggagagcagcaggattcgatgccggccaacgtgccgaccgacgatattgtcatcggcaccgcccccgaccaagagggccaactcagcggcgacgacgtagcccgacacctcgactccctctttggcgaccccaggcggagatgttggcgggatcggcgctatccgacgcgcccgtgttga

SEQ ID NO: 23198 - protein, 317 aa, Unknown
  Obtained from environmental sample
  misc_feature (1)..(317): Xaa is any amino acid
MLQEQGNLAAALDESIKVCTVDLRNPVALRMLADIYLMQGRAGAAGSLYAILSDMEPDNAELRICAAKNKQRERGTAAEILGIKPAAAAPSANYSKPAAPAAHVEASIESQIESQLDSLFSDKMQSSSVQAPGNVVGPAPGGFSPPGGAALPAAPDQFSGDDVAGQLDEIFGEISEQAAPMPMQMPPQMPMAAQMPPPMPPPMPMAAQMPPPMPPPMPMAPPMPASAQDYDAAAAGSVESHPSGDDVAGHLDALFGADGEQQDSMPANVPTDDIVIGTAPDQEGQLSGDDVARHLDSLFGDPRRRCWRDRRYPTRPC

SEQ ID NO: 23199 - DNA, 537 bp, Unknown
  Obtained from environmental sample
  misc_feature (1)..(537): n is a, c, g, or t
gtgtcgggctacgtcgtcgccgctgagttggccctcttggtcgggggcggtgccgatgacaatatcgtcggtcggcacgttggccggcatcgaatcctgctgctctccatccgcgccgaagagggcgtcgaggtgtccggcgacgtcgtcgccgctgggatggctttctacggaacccgccgccgcggcatcgtagtcctgcgcggacgcgggcatgggcggcgccatcggcatgggcggcggcatcggcgggggcatttgcgccgccataggcatcggcggcggcatcggcgggggcatttgcgccgccataggcatttgcggcggcatctgcataggcataggcgccgcttgctccgatatctcgccgaaaatttcgtcgagctgaccggctacgtcgtcgccgctgaactgatccggcgccgccgggagagccgcgccgccgggaggagaaaatccgcccggagccggaccgacgacgttgccgggcgcctggacggacgacgattgcattttgtcgctgaaaagggaatctaa

SEQ ID NO: 23200 - protein, 178 aa, Unknown
  Obtained from environmental sample
  misc_feature (1)..(178): Xaa is any amino acid
MSGYVVAAELALLVGGGADDNIVGRHVGRHRILLLSIRAEEGVEVSGDVVAAGMAFYGTRRRGIVVLRGRGHGRRHRHGRRHRRGHLRRHRHRRRHRRGHLRRHRHLRRHLHRHRRRLLRYLAENFVELTGYVVAAELIRRRRESRAAGRRKSARSRTDDVAGRLDGRRLHFVAEKGI

SEQ ID NO: 23201 - DNA, 396 bp, Unknown
  Obtained from environmental sample
  misc_feature (1)..(396): n is a, c, g, or t
ttggaatccaacgcgtctgaggaaataaaatacaaagcccgtatgataatatcaaacatggaaattcccggttttgataattttaaaatggcggacaatccttcttacgctgacataataaaagaacccgccctttacagggacgtatatgtaatctggaaaggtatggcgactaaccatgagattatcggggactctgtccgctttgatttccttgtaggctatgatacgcgcaaaaaacttgaaggtataataccggttatgtttgacacgcctgttttggttaatacggaacgtccgttggaagtattgggaaaaattaaaatagataatgaaaccatgaacataatgctcgaaggcgaggctatacatcaatccggcaaactggagaattaa

SEQ ID NO: 23202 - protein, 131 aa, Unknown
  Obtained from environmental sample
  misc_feature (1)..(131): Xaa is any amino acid
MESNASEEIKYKARMIISNMEIPGFDNFKMADNPSYADIIKEPALYRDVYVIWKGMATNHEIIGDSVRFDFLVGYDTRKKLEGIIPVMFDTPVLVNTERPLEVLGKIKIDNETMNIMLEGEAIHQSGKLEN

SEQ ID NO: 23203 - DNA, 834 bp, Unknown
  Obtained from environmental sample
  misc_feature (1)..(834): n is a, c, g, or t
atgaatgaatttattgtctgttctacccggtccatgcacaattacgcttcaaaagtaattacctgcctttcacagtatctgagttttaataaaatcgctgaacagattaatggggttgatttgcttcataccgaccgtttcgcggacggagaaactgaagttaccgtaagttcatccatacgcggcaaggatgttataattttttcttcaagcgcccgtaacgaggcgggaatatgcgtagatgaggctaaaaatgagttgtaccatgccgttgacgcattaaaacgcgcccaggcgcataaaatcatcgtttttgaaccttatatttcctgttcgcgctctgaccgcacgacccgcagaagttctgtgggcttgtgggtacacttgaagaccctctccggtctgggcgcgaaacatattgttacattccagcttcattcggataaatcgcaaaccatggttgatcccgccgtcagcgcaatagacaatattcccgccctgaccctgttggaacgctacctctgcgacacttacataaaaacaaccgaaaaacttgaaagcgaagttcagaataattgggcgttttgttcggcggacgcgggcggtgaaaaactggcgcgtactttcgccaattcattcggcgcccatttagtggtagcccataaacaacgtgattattcaaagccaaacacggttgagtccatacacattctttccgcccaccctgttgagggaaaaagcctttggattgtagacgacatgatagacacaggcggctccgtggaaacccttatccatgcccttgcgcctttaaaactaaggatatcaatgtaa

SEQ ID NO: 23204 - protein, 277 aa, Unknown
  Obtained from environmental sample
  misc_feature (1)..(277): Xaa is any amino acid
MNEFIVCSTRSMHNYASKVITCLSQYLSFNKIAEQINGVDLLHTDRFADGETEVTVSSSIRGKDVIIFSSSARNEAGICVDEAKNELYHAVDALKRAQAHKIIVFEPYISCSRSDRTTRRSSVGLWVHLKTLSGLGAKHIVTFQLHSDKSQTMVDPAVSAIDNIPALTLLERYLCDTYIKTTEKLESEVQNNWAFCSADAGGEKLARTFANSFGAHLVVAHKQRDYSKPNTVESIHILSAHPVEGKSLWIVDDMIDTGGSVETLIHALAPLKLRISM

SEQ ID NO: 23205 - DNA, 999 bp, Unknown
  Obtained from environmental sample
  misc_feature (1)..(999): n is a, c, g, or t
gtgaatttcggctttgataacgtatttatatttatctgcgctttttttatcattccgttagccttaattattttttcacgcatgaaagacccgtttgtggcggcaatcccgttgggcgcgcccggcggaactccttttaaaacttcgcatataaacggcattgtcagattactgaagtttttggaattggcgggattatttttgcttttcttcagcgcggcgggtccttcaatgaagactgcggaaattgtctggctaaatcggggcgcagatattatttttatttttgatgtcagtccaagtatggcggcaatcgacatggacggaaaaaatcgttacgaaaccggtaaaagattgattgaggaattcgcgaacagacgtcctacagacagcgtagggctggttgcgttcggcgaagacgccgcattgcttctcccacccacttcagacaggtacgcgcttgatntgcgccttgaacagcttcgcataggagagttcggagacggaaccgctctcggcatgggaatcgcagtcgccgcgtatcaccttgataaatccgccgccaggcgaaagatcgcagttttaattacagacggagaaagcaacgccggttctatacatcctgaaacagcggcggatttgttacgcgaacttggcatttcattttgggttattgccgtaggctcaatgggagaagtgccgatagattatgtcgatccgtacacaaaaatacggcgaacaggcatttttgattcccgttatgacacggaaagcctgcgtcgcctatgcgccgccggcggcggcgtttttttaaccgccgtaaacgcggacgcttttgccgccgctttctcgcagttagacgacgctgaaatcacagtacagaggtcgcgcgtcataaaccgcatgacttccgtatcttttcaatttttactggccgccgtcgtcctgttggcgcttgtaaaaataacaaggcgttttttactgagggctgttatatga

SEQ ID NO: 23206 - protein, 332 aa, Unknown
  Obtained from environmental sample
  DOMAIN (91)...(286): von Willebrand factor type A domain
  misc_feature (1)..(332): Xaa is any amino acid
MNFGFDNVFIFICAFFIIPLALIIFSRMKDPFVAAIPLGAPGGTPFKTSHINGIVRLLKFLELAGLFLLFFSAAGPSMKTAEIVWLNRGADIIFIFDVSPSMAAIDMDGKNRYETGKRLIEEFANRRPTDSVGLVAFGEDAALLLPPTSDRYALDXRLEQLRIGEFGDGTALGMGIAVAAYHLDKSAARRKIAVLITDGESNAGSIHPETAADLLRELGISFWVIAVGSMGEVPIDYVDPYTKIRRTGIFDSRYDTESLRRLCAAGGGVFLTAVNADAFAAAFSQLDDAEITVQRSRVINRMTSVSFQFLLAAVVLLALVKITRRFLLRAVI

SEQ ID NO: 23207 - DNA, 927 bp, Unknown
  Obtained from environmental sample
  misc_feature (1)..(927): n is a, c, g, or t
atggatgttgtgctttacggcagctatactgtccgttcgctgccgcttggcgtttcgtttgatcgcctctatacaatgcccttacatgacatcttaagactggcaggagacaaattcccgcgccggtattttgacatcgagcctcaatattacagggacaaccgcaggcttgttgctcagattcgcgggaacattaaaggtctaaagtttgcagatgacggagcaattgatgaaaacggaaattatgtctttattgaaactttaaagctccaaagacccgcttctgcggggcttaactgttccggttttgttaaatggcttatagacggcattcttcgccctgttaccggagcaaggctttccataacgccgttaaaagccccgttcggagagcgcggttcttccttcaccgaactttgggaagagagacgcgatccttatttcggtcttgactggatcaggaatcttgcatctgaagcaaacggaaccctgcgctcgccttcttaccgcgcgcttaaagaatttgaagtccgcagcgaaaatttctcgcttgtactggtaaacgaaaacagaacctttgtcacaaataactatccgggctttttggaagaagccggatacggcattgaaggaattcatccgttgctttacacactcgctgttgataaaccgtactctttttatcttgccgcagtaaacacagaaatagccgctcctgtaatcagaaccaatatgagaggaactcccccattacgtcaatatttccatgtagcggcgctattcccctattttgatgaatacggcgtttttcaggtagccgtatttgaaagcgccgaagagacttcatttaacgccttcaaaacccgctatccggggcaattcatcaacctgcttcgcattcccatagacggctcatttaatccttaa

SEQ ID NO: 23208 - protein, 308 aa, Unknown
  Obtained from environmental sample
  misc_feature (1)..(308): Xaa is any amino acid
MDVVLYGSYTVRSLPLGVSFDRLYTMPLHDILRLAGDKFPRRYFDIEPQYYRDNRRLVAQIRGNIKGLKFADDGAIDENGNYVFIETLKLQRPASAGLNCSGFVKWLIDGILRPVTGARLSITPLKAPFGERGSSFTELWEERRDPYFGLDWIRNLASEANGTLRSPSYRALKEFEVRSENFSLVLVNENRTFVTNNYPGFLEEAGYGIEGIHPLLYTLAVDKPYSFYLAAVNTEIAAPVIRTNMRGTPPLRQYFHVAALFPYFDEYGVFQVAVFESAEETSFNAFKTRYPGQFINLLRIPIDGSFNP

SEQ ID NO: 23209 - DNA, 840 bp, Unknown
  Obtained from environmental sample
  misc_feature (1)..(840): n is a, c, g, or t
gtggtggtccacctggtcagtgaaagcctgcgccggggcctggacccgctttcggcggtgcgggcgaccctgccccttttggaaggggccttcgccctggtttttctcttcgccggccggccggacctcctcataggcgcccgtcagggggtgcccctggccttgggcgaaggtgatgatcttctggccctgggctcggacgccttggccttggggccggtctgccgccgtctggcctatcttgaggacggggatctggcgctcatcgaaggcggccgggccgccctcttcaaccggcgccatgaaccggtcgaacggccttggcggccttcctccctggcttcggccgacctgggcaagggcggtttccggcactacatgctcaaggagatccacgaacagccccaggttatcggcgacaccctgaacaccatgatcaacccggtctccggccgtctgaccctgcccaacctaccggaactcaagcgggcctcccgcctggttctggtggcctgcggcacttcctattacgccgccctggccggcaaatacctcattgaaaaactggctcgcctgccggtggaagtggaagtggcttcggaattccgctaccgggaaccggtgcttagcccgggccaggtggctttgttcatctcccagtccggggagaccgccgacaccttggcggccttgaggctctgccgggaagccggattggggcttttgagcatcgtcaacgtgcccgaaagcaccatcgcccgggaatcggacgccgtgctgcccacggtggccgggccggaattcggggtggcctcccaccaggctttccacgcccgttga

SEQ ID NO: 23210 - protein, 279 aa, Unknown
  Obtained from environmental sample
  DOMAIN (158)...(279): SIS domain
  misc_feature (1)..(279): Xaa is any amino acid
MVVHLVSESLRRGLDPLSAVRATLPLLEGAFALVFLFAGRPDLLIGARQGVPLALGEGDDLLALGSDALALGPVCRRLAYLEDGDLALIEGGRAALFNRRHEPVERPWRPSSLASADLGKGGFRHYMLKEIHEQPQVIGDTLNTMINPVSGRLTLPNLPELKRASRLVLVACGTSYYAALAGKYLIEKLARLPVEVEVASEFRYREPVLSPGQVALFISQSGETADTLAALRLCREAGLGLLSIVNVPESTIARESDAVLPTVAGPEFGVASHQAFHAR

SEQ ID NO: 23211 - DNA, 330 bp, Unknown
  Obtained from environmental sample
  misc_feature (1)..(330): n is a, c, g, or t
atgccggcgaacgcccaggaagtgaactgcctgcgggtgatggtgcggccgcacctgaaccacaccgtggtcaagatgctgggccaggacattctcagggcctgcgagtttctaagccagaacggcggccacaacaagccccccgccttcattgcgagaaaaaaggaagcccggcccagtgttgacggcgcgcagctcgttgctcctcgccattatcgggcaacagccttatttcttattttaatccacaatccgcatggagctttttcattttgtccgccatatccggcggcctgtatgcggccatgttttcttttcttccatctatga

SEQ ID NO: 23212 - protein, 109 aa, Unknown
  Obtained from environmental sample
  misc_feature (1)..(109): Xaa is any amino acid
MPANAQEVNCLRVMVRPHLNHTVVKMLGQDILRACEFLSQNGGHNKPPAFIARKKEARPSVDGAQLVAPRHYRATALFLILIHNPHGAFSFCPPYPAACMRPCFLFFHL

SEQ ID NO: 23213 - DNA, 357 bp, Unknown
  Obtained from environmental sample
  misc_feature (1)..(357): n is a, c, g, or t
ttgaccggcggggaggaaaatgacgcgccggcagggcgtcttttacttgaaacggttggcaagcgggaaaataccgttccggcgcttatggacagagcctatgcggatttcaaaacgcgttttacagcgcggagcctgtgctttacggctgttgtcccgcctaaatcaaacgcaacgcatcaatggggctacgataaggaattatacaaaaaacgtaatgggatagaacgtttcttccgcagattaaaagagttcagagccgttttcacccgttatgacaaacttgataccatttttgcatcttttgttactttcgctgctatcattatacttttgcgttgtgtgaacgcgccctag

SEQ ID NO: 23214 - protein, 118 aa, Unknown
  Obtained from environmental sample
  misc_feature (1)..(118): Xaa is any amino acid
MTGGEENDAPAGRLLLETVGKRENTVPALMDRAYADFKTRFTARSLCFTAVVPPKSNATHQWGYDKELYKKRNGIERFFRRLKEFRAVFTRYDKLDTIFASFVTFAAIIILLRCVNAP

SEQ ID NO: 23215 - DNA, 810 bp, Unknown
  Obtained from environmental sample
  misc_feature (1)..(810): n is a, c, g, or t
ttgagcgggcttttattgcagagcatttttagaaacccgcttgcaggtccctttgtgctcggcataagttccggtgcttcgcttggggttgcgttttttttgctcgctggttttggtctaggctcgctgggcttgctctctgcggcagctttgggagctatggcagttctcgccttcatagccaccttctcaaaatttatcccgggcaaaacaagtcttttggtgcttggtttaatggcaggttattttgcagatgccattgtttcaattttaatacacggcacacactcagaagccttgcgaggttttatatcttggggctttggttcttttggcaggttgcgttgggaagagttgccgtatttcgcaggttgcgttttgcttgggcttgcgttgtctgttttttgcgtgaagtatttgaacgcgatagctctcggtgatgacggcgcaaaaagtttaggcataaacgttaagcaaaagcgactgctttcgcttttggcggcagcggttttagctgcaaccgccacttcgttttgcggtccgataggttttataggaatggcaactccgcatttggcgaggggttttttcaatagcgataatcagaggattttaattcccgcttcgcttttgacaggtgctttgcttgcgcttgcggcagggcttttgtcgcaagggttgtggggaattcccccgcttcccttaaatgcggtggctagtttgatgggggcccccggggggatttgggggttggggaagaaaaagtttggaaccccgattcccccaattttcaggattttcccgatttaa

SEQ ID NO: 23216 - protein, 269 aa, Unknown
  Obtained from environmental sample
  DOMAIN (1)...(253): FecCD transport family
  misc_feature (1)..(269): Xaa is any amino acid
MSGLLLQSIFRNPLAGPFVLGISSGASLGVAFFLLAGFGLGSLGLLSAAALGAMAVLAFIATFSKFIPGKTSLLVLGLMAGYFADAIVSILIHGTHSEALRGFISWGFGSFGRLRWEELPYFAGCVLLGLALSVFCVKYLNAIALGDDGAKSLGINVKQKRLLSLLAAAVLAATATSFCGPIGFIGMATPHLARGFFNSDNQRILIPASLLTGALLALAAGLLSQGLWGIPPLPLNAVASLMGAPGGIWGLGKKKFGTPIPPIFRIFPI

SEQ ID NO: 23217 - DNA, 804 bp, Unknown
  Obtained from environmental sample
  misc_feature (1)..(804): n is a, c, g, or t
ttgaggcatgccatttcccacagcaaaagagggactattgaatggaagatttggattgaaaaaggggagggcgacgaggtctggctggtctcttccgttttggatcccggccaggaaattagtcctgatgaagtcgacaagctgttccttgattattccagccttgacacgcagaagaagcgctcctcggaagggacgggcctgggcctttcactgacgaagaaaattatagatctgatgaagggctccatcgccgtgcaaaactccttcggtaaaggaacgctttttacggtgaggttattgcataagtttgttaacgacgatcttatcagcgccgaagctttgggaaaactgaagagctttaaatcttcagaaggcaggaggcaggacgatctttccgatatgcagcgcgtccagatagccgatgcccgcgtgcttgtggtagatgacgtggaaataaaccttgaagtcgccaaggggcttcttgagccttatgggatgaaagttgactgcgtcttaagctgcaaagaagcgattgaacttgtccgcaggggcgaaccccgctacaacgctatttttatgaaccgctggatgcctgaaatggacggcattgcggccgtgcgtataattcgaaatgaaattgaaggcgattacgcgaagacagtgccgataatagcccttaccgcaaacgcggtcatcggcaacaacacttttttcacgcaatccggtttccaggaagtgctttcaaaaccaatcagcataaacaggctggatgaagtcgtaaacgagtggatcaaaaaataa

SEQ ID NO: 23218 - protein, 267 aa, Unknown
  Obtained from environmental sample
  DOMAIN (3)...(103): Histidine kinase-, DNA gyrase B-, and HSP90-like ATPase
  misc_feature (1)..(267): Xaa is any amino acid
MRHAISHSKRGTIEWKIWIEKGEGDEVWLVSSVLDPGQEISPDEVDKLFLDYSSLDTQKKRSSEGTGLGLSLTKKIIDLMKGSIAVQNSFGKGTLFTVRLLHKFVNDDLISAEALGKLKSFKSSEGRRQDDLSDMQRVQIADARVLVVDDVEINLEVAKGLLEPYGMKVDCVLSCKEAIELVRRGEPRYNAIFMNRWMPEMDGIAAVRIIRNEIEGDYAKTVPIIALTANAVIGNNTFFTQSGFQEVLSKPISINRLDEVVNEWIKK

SEQ ID NO: 23219 - DNA, 468 bp, Unknown
  Obtained from environmental sample
  misc_feature (1)..(468): n is a, c, g, or t
ttgggaagttccattacaaaaggaataggctctcccttaaatatcgtcttttccattataaaaccggtaagtacgccgaataaaattcccaataaatacaagctgctcattaccagcgcggaatgttttggaaagaaagcggcggcaaatattgcgtatatcggaactttcgcgctgcagctcataaacggcgtaagaaggattgtcatttttttatcgcgctcgctggcgagagtccgcgtcgccataatcgcgggaactgaacagccgaaacccattagcataggaacaaaactgcgcccggaaagcccgattttgcgtaacggcttgtccatcacaaacgccacacgcgccatatatccggaatcttccagcagggacaggaagaaaaacagcacgatgattatgggaataaaacttaagaccgcgcccactcccgcaaaaatgccgttaattataagggagtga

SEQ ID NO: 23220 - protein, 155 aa, Unknown
  Obtained from environmental sample
  misc_feature (1)..(155): Xaa is any amino acid
MGSSITKGIGSPLNIVFSIIKPVSTPNKIPNKYKLLITSAECFGKKAAANIAYIGTFALQLINGVRRIVIFLSRSLARVRVAIIAGTEQPKPISIGTKLRPESPILRNGLSITNATRAIYPESSSRDRKKNSTMIMGIKLKTAPTPAKMPLIIRE

SEQ ID NO: 23221 - DNA, 333 bp, Unknown
  Obtained from environmental sample
  misc_feature (1)..(333): n is a, c, g, or t
atgaaattggcaattattggaagcagaagtatagcaaatttggatttagatgattttattaaagaaaaacctgatattattatcagcggaggtgcaaaaggtatcgacacaattgcatggaaatgggcattgcaaaacagtatagaaataattgtgcatagaccggattacaataaatatggaaaatatgctgcccttaaaagaaatgatataataataaatgaagcagataaagtaattgcattttgggatgggaaaagcaagggaacaaaatatgtaatagaaaaaacaataaaattgaataaactattggaaatagtatatataaattaa

SEQ ID NO: 23222 - protein, 110 aa, Unknown
  Obtained from environmental sample
  misc_feature (1)..(110): Xaa is any amino acid
MKLAIIGSRSIANLDLDDFIKEKPDIIISGGAKGIDTIAWKWALQNSIEIIVHRPDYNKYGKYAALKRNDIIINEADKVIAFWDGKSKGTKYVIEKTIKLNKLLEIVYIN

SEQ ID NO: 23223 - DNA, 1695 bp, Unknown
  Obtained from environmental sample
  misc_feature (1)..(1695): n is a, c, g, or t
atgaagacacgcgctttcttaaccatagatgtcacagatagtggcaatggcataaagcaagaagatttagagaaactgtttggcgagtttgtgcaaattgatttaaaatctcacaaaggcgttgaaggcactgggcttggtcttgtgataacgaaaaaacttgtgaatgccatgggcggagatataaatgttcaatcggaatacggcaagggcagcacatttaccattactctctcgcaaaaaatatgctccccagaacctatggcagcaattgaaaaacccgaagaaaaaagcgttctcgtttatgagaaaaataaaatatatgccgactccatagttcacacagtggacaatttaggcgtggtttgccacagagcagaaaacgattatgaactgcgtgaaaagttgcaagctaaagattatacatttttattcgtctcttattctatattggtaaatgccaaagcaataataaaggaactcaaatccaaaaccgaaatagttgtactagcagaatttggaaatgttccatcgggcataaatttagagatattggctatgcctgtgcattccatatccgttgcaaatatattgaatggcgtgtccgatcgtttttcttatggctcagatgaaaatatatctgtggtgcagttcagtgcgcccaaagccaagattctcattgtagacgacataggtacaaacttaaaagtagccgagggcttgatgctaccttacaatatgcaaattgatttatgctatagcggagcgacagcaattgagtttgtgaaaaaaacccaatacgacttggtattcatggaccacatgatgccagaaatggatggcatagaaactacaaagctcataagggaaatgggtagcgaagatccgcgttatgcaaatttgccgattgtcgcactgactgctaacgctgtttctggcacaagggaaatgtttctctcaaatggttttaacgattttttatcaaaacccatagacatagttaagctggatgccgttttgacgaaatggcttccaaaggaaaagcaagaaaaactggaggcaaagataactgatgccgatgctcctgaagttatagagatagaaattggcggtattgatgtcaaaaaaggcatttctatgacaggcgggtcgcttaaaatctatatgcaaacccttgccgtattccataaagacgggattcagaaaatagctgaaatcaagaaaagtttggaaacagataactattctttatacacaacttatgtccatgcgttgaagagcgcaagcgcaagcataggggcactggatttatcagaaaccgcaaaatccttggaagcagcggggaaaaaaagagattcagcatttattaaacagcaaaacgcccattttttaatggctttggaaattcttttaaataatataaacacggttctttcagcgaacaagaaaaatgacaaaaaagttcccgttgattttgaaactttgaagaacgaactcaataatctaaaagtagcaattggcatttttgattccgatgccattgacaaggcagcgaactctttgncaaaattcacgcaagcggcagacataggtgatagcattgaaaatattatgcagaaaattttaatcggagaatatgatgaaactgtggttatgatagatgatttaactggacaaatctttcagcagaattaa

SEQ ID NO: 23224 - protein, 564 aa, Unknown
  Obtained from environmental sample
  DOMAIN (390)...(480): Hpt domain
  misc_feature (1)..(564): Xaa is any amino acid
MKTRAFLTIDVTDSGNGIKQEDLEKLFGEFVQIDLKSHKGVEGTGLGLVITKKLVNAMGGDINVQSEYGKGSTFTITLSQKICSPEPMAAIEKPEEKSVLVYEKNKIYADSIVHTVDNLGVVCHRAENDYELREKLQAKDYTFLFVSYSILVNAKAIIKELKSKTEIVVLAEFGNVPSGINLEILAMPVHSISVANILNGVSDRFSYGSDENISVVQFSAPKAKILIVDDIGTNLKVAEGLMLPYNMQIDLCYSGATAIEFVKKTQYDLVFMDHMMPEMDGIETTKLIREMGSEDPRYANLPIVALTANAVSGTREMFLSNGFNDFLSKPIDIVKLDAVLTKWLPKEKQEKLEAKITDADAPEVIEIEIGGIDVKKGISMTGGSLKIYMQTLAVFHKDGIQKIAEIKKSLETDNYSLYTTYVHALKSASASIGALDLSETAKSLEAAGKKRDSAFIKQQNAHFLMALEILLNNINTVLSANKKNDKKVPVDFETLKNELNNLKVAIGIFDSDAIDKAANSLXKFTQAADIGDSIENIMQKILIGEYDETVVMIDDLTGQIFQQN

SEQ ID NO: 23225 - DNA, 1002 bp, Unknown
  Obtained from environmental sample
  misc_feature (1)..(1002): n is a, c, g, or t
ttgcgagatttgcgcggcgggtgcgggaacatagggcttgtggatttcgatgtggtagacgagtccaatcttcagcggcagataattcacagcacccgcgatgtaggaagaccaaaaaccgcgtccgcaaaagacagaatcaagggaataaaccctcttgttaatgtggtgatgcataacgaaatgcttacaagtaaaaacgcactggaacttttcgccggttacgatattatcgctgacggaaccgataattttcagacgcgttatcttgtaaacgacgcctgcgtatttttgggcaaactcaatgtttacggctctgtgtttcaattcgacgggcaggcgtctgttttcggcgctaaagacggtccatgttaccgctgcctttacccttccccgccgccgccggggcttgtaccttcttgcgcagaaggcggtgtaatgggcgtactgcccggtattatcggaaccattcaagcggcggaaacgataaaacttatcgttggcggagcaaagccgcttataggccgtctgcttttattcgatgcatggcgtatggcgttccgcgagttaaaacttgaaaaaaatcccgactgccccgtatgcgggaaaaatccttcaattcatgaattaattgattatgaacaattttgcggtttgaaaaaaaataccgacagtaaaccgatagataccataaccgctctcgatttaaaaaaacgacttgataacggagaaaaaatacaatttatagatatacgcgaacctcatgaacgcgccattgttaaatttcctgaggcaaaagtaataccgcttggtcagttggaaaggcgcatggaagaattagacccgtctgtagacgcggtatttctatgtaaaatcggacagcgcagtattttgggaatacgggctttgcaggatgccggttaccatggcaaattgctgaatctgcaagacggcctcaacgcctgggcaagatacgtagataaaaccatgcctatttattga

SEQ ID NO: 23226 - protein, 333 aa, Unknown
  Obtained from environmental sample
  DOMAIN (232)...(325): Rhodanese-like domain
  misc_feature (1)..(333): Xaa is any amino acid
MRDLRGGCGNIGLVDFDVVDESNLQRQIIHSTRDVGRPKTASAKDRIKGINPLVNVVMHNEMLTSKNALELFAGYDIIADGTDNFQTRYLVNDACVFLGKLNVYGSVFQFDGQASVFGAKDGPCYRCLYPSPPPPGLVPSCAEGGVMGVLPGIIGTIQAAETIKLIVGGAKPLIGRLLLFDAWRMAFRELKLEKNPDCPVCGKNPSIHELIDYEQFCGLKKNTDSKPIDTITALDLKKRLDNGEKIQFIDIREPHERAIVKFPEAKVIPLGQLERRMEELDPSVDAVFLCKIGQRSILGIRALQDAGYHGKLLNLQDGLNAWARYVDKTMPIY

SEQ ID NO: 23227 - DNA, 360 bp, Unknown
  Obtained from environmental sample
  misc_feature (1)..(360): n is a, c, g, or t
atgcctgtaagtgctgaaaatccccttcccttcttaaaggaagctcttttggaataccaaaaaaaaatgaaacgcaggatcactttggaaatggtacttttgaaagggcttaacaccggcgtttccgatgcaaaggccgtgcgggaatttgccagcggacttgatacgataatcaacctcattccctggaacgcggtagagggcctggaatttgagggccttcctttatgcacaccgacccaaaaggaagttaccgattacgccgccgcccttgaaaaagaaggcctgaaagttacaatgcggataaaaaaaggccgaggcatttcaggcgcgtgcggtcaattgggaagtacaacgtga

SEQ ID NO: 23228 - protein, 119 aa, Unknown
  Obtained from environmental sample
  misc_feature (1)..(119): Xaa is any amino acid
MPVSAENPLPFLKEALLEYQKKMKRRITLEMVLLKGLNTGVSDAKAVREFASGLDTIINLIPWNAVEGLEFEGLPLCTPTQKEVTDYAAALEKEGLKVTMRIKKGRGISGACGQLGSTT

SEQ ID NO: 23229 - DNA, 900 bp, Unknown
  Obtained from environmental sample
  misc_feature (1)..(900): n is a, c, g, or t
gtgtttatggatcatatgatgctgacatgggatggcatgagggtaacacacgcgatacgcgatctcggtgggcgctgcgcctcgctgcccattgtcgcgttaacagccaatgccgccgccgggatgcgcgaattgtatattaccaaccaatttaatgattttcttaccaagccaatggatattgttaaactgaataaaattctgctccactgcattcctgcggaaaagcggataaaaagaatgctgcaaacaaattttgcgcaggaggaaacgaaagcaactgaatatccgccactgaagggagtggatgttgggcatggcgtcaccatgacaggcgggacatttgcgggctacaaacaggttcttgatatgttttgtaaagacgcgacggcacggagtgatttcttacgcgaaaattcccttacccatgaatctctgcccggttttatcacacagtttcattccttaaggagcgcatccggcagcctgggcgcggcgaatttttcaaaagaagccgcagctctcgaagaagtaggcagagaaggtgatctggcgcatatgcgggaagacttgccggggtttattgagcatctggacactctggttgatgaaatttcgaactgggtgcattcactcgaaacgtgtggctttatgcaggccgaagcccagaaacccgagtccttcaattcagagacgctgctcccgattttcaataaacttctggattcgctcaaatcccgggatattgccaatattgatggtataataaatgcgcttagcagaaaagtattggaagcgaaaacagatcagactgtaaaaaccatttccgatcagattctgatggcggaatatgatgaagccgtgaatacaattgaagcgttattgcattcagccggttaa

SEQ ID NO: 23230 - protein, 299 aa, Unknown
  Obtained from environmental sample
  DOMAIN (120)...(208): Hpt domain
  misc_feature (1)..(299): Xaa is any amino acid
MFMDHMMLTWDGMRVTHAIRDLGGRCASLPIVALTANAAAGMRELYITNQFNDFLTKPMDIVKLNKILLHCIPAEKRIKRMLQTNFAQEETKATEYPPLKGVDVGHGVTMTGGTFAGYKQVLDMFCKDATARSDFLRENSLTHESLPGFITQFHSLRSASGSLGAANFSKEAAALEEVGREGDLAHMREDLPGFIEHLDTLVDEISNWVHSLETCGFMQAEAQKPESFNSETLLPIFNKLLDSLKSRDIANIDGIINALSRKVLEAKTDQTVKTISDQILMAEYDEAVNTIEALLHSAG

SEQ ID NO: 23231 - DNA, 405 bp, Unknown
  Obtained from environmental sample
  misc_feature (1)..(405): n is a, c, g, or t
gtgataaacgcgggtgcgcgttacagcatacccactttgggtgttatcgctgtggggaaaaacatggagcggacagaccagtattttaaactggcgacccgcattgtggcggagcttggcgcgaatatcgtaaaaacttactactgcgataagttcgaggaaattgtagccgcgtgtcctgttcccattgtggtagcaggcggcaagaaactgccggaaaaggaagcgcttacaatggcatatcattcaatgcagggcggcgcgcgcggtcttgatatgggcagaaatattttccaaagttaccaccccgcggaaatggcggatgctatcggaaaaatagtgcataacaaatataccgacaaggaagcgtgggagtattactgcgagagaacaaagactaaataa

SEQ ID NO: 23232 - protein, 134 aa, Unknown
  Obtained from environmental sample
  misc_feature (1)..(134): Xaa is any amino acid
MINAGARYSIPTLGVIAVGKNMERTDQYFKLATRIVAELGANIVKTYYCDKFEEIVAACPVPIVVAGGKKLPEKEALTMAYHSMQGGARGLDMGRNIFQSYHPAEMADAIGKIVHNKYTDKEAWEYYCERTKTK

SEQ ID NO: 23233 - DNA, 444 bp, Unknown
  Obtained from environmental sample
  misc_feature (1)..(444): n is a, c, g, or t
atggaaaatatagaatgggcaacaatattaagaaccggtaaaaataaattgttaaacgaaactaatgagttaatacgctattctgaaatagataaatatctgcataaaaaattcagggactgttctacaggaatgaaaaagaaggtgcanatcgtcgtaagcctgattggagaaattgataccattatttgggacgagccgaatgacgggcttgacataatttcaaatatgaaaataaagaaccttcttaagcattacaaaagtaaaaataccacgatacttttttccagtcatgtcatcgaatttttgaatgattttgtagacacttgcgttttattgcacgaaggaaatattattgaaaataaaaatatacaggatattaattcactggaaacattgtttctaaacaatttgcctcaaaatgttttagagataaatttttaa

SEQ ID NO: 23234 - protein, 147 aa, Unknown
  Obtained from environmental sample
  DOMAIN (1)...(116): ABC transporter
  misc_feature (1)..(147): Xaa is any amino acid
MENIEWATILRTGKNKLLNETNELIRYSEIDKYLHKKFRDCSTGMKKKVXIVVSLIGEIDTIIWDEPNDGLDIISNMKIKNLLKHYKSKNTTILFSSHVIEFLNDFVDTCVLLHEGNIIENKNIQDINSLETLFLNNLPQNVLEINF

SEQ ID NO: 23235 - DNA, 1419 bp, Unknown
  Obtained from environmental sample
  misc_feature (1)..(1419): n is a, c, g, or t
gtgtttatggcgctaacaaattatgtaacctggcaatggagacgggctgtttccccagtttccggcgctgttaatttctaccgcaatgggtattgtgtaacaagggccgccgcgtccggcagtctgcctaaacagatattggagcaaattctatacaagggttcaatcgtctattggatatgttccgctgttcttgtgttcctttcggtcctgccgggtttcccgtggtatgttcttattcccatggcggctcttatcgccgctcacgcgtacagaataggaagaaggcaaaaaatagaagcaagcaataaagagatgatgataaaaaccagagatcgcaaagacgagaaaacgggtgagatatctcccgttgtcccgcttgacgccctttcgctggaactcggttacgggcttgtcccgcttgtcgaaaaagaaaaaggcgcggaactattggaaagggtgcagggcataaggcgtcaatgcgcccttgatctggggcttgtcattcctatggtaaggataatcgacaattcaacgctggagccttcggaatactgttttaaaattaagggagtggattcgggcaggggaaaaatccgcattggatattacctttgtataaacccgggaaccgtaacaaccgaaatggccggtgaaaaaaccgtggatccggctttcgggcttccggcaatctggatagatcaggacaagcgggacgaagcggaaaggtgcggctataccgtagtggatccgccgtccataatcgcgacacatttaaccgaaattatccgccgccacgccgcggatattttgggcttgcaggacactcagaagattctgaacgaactgaagaaagagtatccggctgttgttgaagaagttttaagggacggcaagggcttaaggattacggaaatacaaaagatactgcacggcttgttacgcgaaagagttcaaatccgcaacatggtaaccattctggaaaccatcgccgattacgcgcctgtatccaaaggaagcatatggttccttacggagaaagcgcgtcaggcccttgccagccagatatgcagccagtatgccgatgatgaccgcaggctccgcgttcttactattgatcacgctcttgagcaaaagatcatcgaatccagatatgaaacctcgtccggcgtaatatccgccatggaccccctcttccataaaatgtggatcgaggccgtaagaaaagccgtaacgacagtaagggaaaagggctggatgcccgttatcatctgttcggaacaggcgcgtttccttgtaaaaaattcaaccgaccgcgaaatgccggatttagcggttttgtccagtcttgaaatagtgcaggatgtgattccggaggcggtgggaatgatacgtatggaaaataattcaacggagtaa

SEQ ID NO: 23236 - protein, 472 aa, Unknown
  Obtained from environmental sample
  DOMAIN (2)...(457): FHIPEP family
  misc_feature (1)..(472): Xaa is any amino acid
MFMALTNYVTWQWRRAVSPVSGAVNFYRNGYCVTRAAASGSLPKQILEQILYKGSIVYWICSAVLVFLSVLPGFPWYVLIPMAALIAAHAYRIGRRQKIEASNKEMMIKTRDRKDEKTGEISPVVPLDALSLELGYGLVPLVEKEKGAELLERVQGIRRQCALDLGLVIPMVRIIDNSTLEPSEYCFKIKGVDSGRGKIRIGYYLCINPGTVTTEMAGEKTVDPAFGLPAIWIDQDKRDEAERCGYTVVDPPSIIATHLTEIIRRHAADILGLQDTQKILNELKKEYPAVVEEVLRDGKGLRITEIQKILHGLLRERVQIRNMVTILETIADYAPVSKGSIWFLTEKARQALASQICSQYADDDRRLRVLTIDHALEQKIIESRYETSSGVISAMDPLFHKMWIEAVRKAVTTVREKGWMPVIICSEQARFLVKNSTDREMPDLAVLSSLEIVQDVIPEAVGMIRMENNSTE

SEQ ID NO: 23237 - DNA, 756 bp, Unknown
  Obtained from environmental sample
  misc_feature (1)..(756): n is a, c, g, or t
ttgcataccgccggatcaatgttctccgaagacggttttgggaataggatttccataagcgtcgagcaaataatggagaatgtaaaggctattcagttgcgtaataatatggctgacgcgaccgcgcgttttcatggtatggatttttctgtggaaatggaaactgggactggaaaaacttatgtatatttgcgcacaatctatgaactaaacaaattgtacggttttcgcaaatttgtgattgtggtgccatccatagccatccgcgaaggtgtgttgaagaatctgcaaatcacgcacgagcattttcaatcgttgtatgacaaaacaagcctgaactttgaggtttatgacagcaaaaaggtgtcaaacctgcgtaacttcgctttgagcaacgccgtccaagtgttggtgctgaatatcgattcatttgccaaagacgaaaatatcatcaacaagccgaaagagatcgaatccgactgcggcgtagttttcagcggacgaatcaagaacaagcgggagaggcaaaaaataaattaccgcaaaggttttgagcttgaccccaaatttttggagatttgggataaaatcaagtacaaaaccaaatacagcgtgacgtacaaaacggacgaactgatagcccttgccggtaaagccgtcggggagatgcctaaatgtacgcgtccgagcgtgtacagcgagcgcgtcggcgtgaaaattacgatgaanngcgttccngcgaattgctgcgagtga

SEQ ID NO: 23238 - protein, 251 aa, Unknown
  Obtained from environmental sample
  DOMAIN (30)...(156): Type III restriction enzyme, res subunit
  misc_feature (1)..(251): Xaa is any amino acid
MHTAGSMFSEDGFGNRISISVEQIMENVKAIQLRNNMADATARFHGMDFSVEMETGTGKTYVYLRTIYELNKLYGFRKFVIVVPSIAIREGVLKNLQITHEHFQSLYDKTSLNFEVYDSKKVSNLRNFALSNAVQVLVLNIDSFAKDENIINKPKEIESDCGVVFSGRIKNKRERQKINYRKGFELDPKFLEIWDKIKYKTKYSVTYKTDELIALAGKAVGEMPKCTRPSVYSERVGVKITMXXVPANCCE

SEQ ID NO: 23239 - DNA, 1119 bp, Unknown
  Obtained from environmental sample
  misc_feature (1)..(1119): n is a, c, g, or t
atggctattgtggtagcgttagctacaacggtaatggtacagcgggcgactaaaatagccaaggagctgaccaaagataaagtcacgtatcttgtgcgtcagcgctgtgagtattggagcggccgtgtagacggctttttccaggtcctgcacacgatatccaacaacatgaattactatgaaaacgtggatgtgaaccagaggcgggagcagtacgaaggcaccataaattctatttttgaggacgtgcccgattttatccggttgttcaccatctggaagcctaacgcccttgacggcatggacagccgttacataggccgcaccggctcaaccgccacagggcagttcgcttatgccctgtcaagagaaactggacagatagtgcctacaaccagcctcgttgttcnagacgcgatgacatttatgaactcangatcgaggaatgatgacgcggctcatcccgtcaccgcaacagtgcaggggaaacaagtcaatcagatgagattgatggtccccattattaataaacgcaatgaagtagtcggagtcgtaggcgcccaggtaaatcttgaaatgttacagccccggatagatgccactatgaaaaacttcgatgaaatttccgcgatatccatgtactccagcaacgggtttgttatggcgagctacgccatggatcgggtaggaaaaatgatgcctgacgtggaggtgcaattcggcaaatacttaaacgaagccttcgagtccgttaaaaagggcgaaccatttgagtgctacagttacgcgcctgtttttaagggatacttacaaatcgccgttgaaccgattaaaatcgggacttcgaatatatcatggtcgatgatggccggtacggaagactggtacacaatgagggatatttacccgatgatcacattcgccgttattatcgcgctgatagcgatagcgatttcgtcggtaattatattcattgttctggacagaacaaccaaaccaatcggtatagtagccgacaccttngaaatcgcggccgaaggcgatctgacgaagcaggtaacccgtcatacaaacgacgaaataggcgggcttgccaagactttaacttacgatgaataa

SEQ ID NO: 23240 - protein, 372 aa, Unknown
  Obtained from environmental sample
  misc_feature (1)..(372): Xaa is any amino acid
MAIVVALATTVMVQRATKIAKELTKDKVTYLVRQRCEYWSGRVDGFFQVLHTISNNMNYYENVDVNQRREQYEGTINSIFEDVPDFIRLFTIWKPNALDGMDSRYIGRTGSTATGQFAYALSRETGQIVPTTSLVVXDAMTFMNSXSRNDDAAHPVTATVQGKQVNQMRLMVPIINKRNEVVGVVGAQVNLEMLQPRIDATMKNFDEISAISMYSSNGFVMASYAMDRVGKMMPDVEVQFGKYLNEAFESVKKGEPFECYSYAPVFKGYLQIAVEPIKIGTSNISWSMMAGTEDWYTMRDIYPMITFAVIIALIAIAISSVIIFIVLDRTTKPIGIVADTXEIAAEGDLTKQVTRHTNDEIGGLAKTLTYDE

SEQ ID NO: 23241 - DNA, 417 bp, Unknown
  Obtained from environmental sample
  misc_feature (1)..(417): n is a, c, g, or t
atgtcccgcaggcggcttatggattccagtatttgccttccgccctgttcctgctcttccatcgcgtttaagatgttttcctcatgctgggaaactgtttttacgctttcgtctatggccccgaaacgctccagcacttcgtcggatgatttggtgatgctgtctatggacgcttttatttttttaagcattgtcgcggtggtttttgactgcccgcttgatgattcggcaagtttgcggatttcatcggcgactacggcaaaacccctgcccgcttccccggcgtgggccgcctcaatcgcggcgttcattgaaagcaggttggtctggctggcgatattgttcattacggcgtttatttccaacaacccctcggagtctttcgatatttcctgtatcttctgcgccacagtctga

SEQ ID NO: 23242 - protein, 138 aa, Unknown
  Obtained from environmental sample
  SIGNAL (1)...(24)
  misc_feature (1)..(138): Xaa is any amino acid
MSRRRLMDSSICLPPCSCSSIAFKMFSSCWETVFTLSSMAPKRSSTSSDDLVMLSMDAFIFLSIVAVVFDCPLDDSASLRISSATTAKPLPASPAWAASIAAFIESRLVWLAILFITAFISNNPSESFDISCIFCATV

SEQ ID NO: 23243 - DNA, 645 bp, Unknown
  Obtained from environmental sample
  misc_feature (1)..(645): n is a, c, g, or t
atgagcgccctattcgctattctgctgactgttcccgccggcgttttaagcgccgtaaaaaggcacaccgctattgaccgcattatttcagcatttatgatcttttgcgtgtcctcgcccgtttttcttaacgccattttactgatgttgatctttgtctttaagcttaagtggtttccggcgtttggagccggacgcggttttacggaaaatctgtaccatttattccttcccgcttttgccctaagccttaatttggtcgctctcataggcagaataatccgtgaccgtatgattgtggaattcaaatccaattatgctttggccctttcagccaaaggaacgccttttcgccgtatcgtgatgacccattgttttaaaaacacgttgattcctgttatcacagtcggtggagtgcaaatcggcgctatggttataggtgcggtactggtggaaaatgtttttgcccttggtggaatcggcgctttgttgattgaggggattcaagcgtcggattatcctgtggtgcagagtataatgttgtttctcgttgccctgtttctcattcttaatttgatagtggatatggtctactttatcattgatcccagaattcgagcttccggaaataccggtagaaattga

SEQ ID NO: 23244 - protein, 214 aa, Unknown
  Obtained from environmental sample
  SIGNAL (1)...(17)
  DOMAIN (1)...(207): Binding-protein-dependent transport system inner membrane component
  misc_feature (1)..(214): Xaa is any amino acid
MSALFAILLTVPAGVLSAVKRHTAIDRIISAFMIFCVSSPVFLNAILLMLIFVFKLKWFPAFGAGRGFTENLYHLFLPAFALSLNLVALIGRIIRDRMIVEFKSNYALALSAKGTPFRRIVMTHCFKNTLIPVITVGGVQIGAMVIGAVLVENVFALGGIGALLIEGIQASDYPVVQSIMLFLVALFLILNLIVDMVYFIIDPRIRASGNTGRN

SEQ ID NO: 23245 - DNA, 1686 bp, Unknown
  Obtained from environmental sample
  misc_feature (1)..(1686): n is a, c, g, or t
ttgacaaaaaccaaaagcggcgcggaattggacaacggcgtacatatattaagtatcagcgtgaaagactctttaggtaatgggtcagagactgattctacaatcggcggtttaaaaaaggacatagcgtttttaattgataagagcgttccagtattaaaggttactgattatcccgataaagcaattaataagacggaaaaatttaagggaaaaataactgaaactatcaatgtaaaacagctaaccgtaaaactcggcaacgatgaaatcgcgaccattgatgtagaaaataataccccccctaaatacccgcttgtaaatggaaatcaatatggagtaagtatcaaagtaactccaactccaggtaccggtatgtcttttgactttgaagttgaaataaacccggccgtcggcggtcttgaagacggacctaaatcgcttatgttcagcgccgtcggttcctcgggccaatcgggaatgacgacaagcagttttacactcgacactaaaggaccgtccattgctattggggcgccgatcagcggcaacgtttatgttacaaaccctgagtggggaattcttgaatatgcggttattgaagatgatttttcttcagcatcttctgtagattcgatctacaacgaagtatttgccgccagaataaaagacataagtccctctttcgcgttaacctttaccgacgaagcgtcgtttgtttttgtaacaggaaaagacaaattctggtacaaatttgataacgattcctcatggttacccgtaacagtaggttcttctgaccttaacaaaacatcggtgagtttaagtctgcctctgcccgcagataagcagaaagacggcgtacaccgcgttagtattcgcgctacggactctcttggtaatggttatgataacttaaaagcagatactgcccctgaaaaagaaaacggagtaggttatcagagcaatcttgtctttatgatcgacaccggcataccggagctttttgttaaagacaataatggtaaaaaagtacccagcgaagcccaagattttggaatacacaacaaatcatttaacatcagcggagaaattaacaaaacttatgacgttcaggacttgagcgtaaaaataggttcaacagttgtcgcgcaaagaacaaacaacggcgcaactatgaataatatgacctttaccaaaaaaccaaacggcaagagaacttattactttacaaatgttaacattgatccgttattaggcgcgtctataacggacggcagtaaggatggttcatacacaataagcgtatccgttaaaggttcttccgagcagtcggttagtaatgtaagcaccgttacccttgacacacaggggccgaagattacggttaacgcgcctatcaaggagaagatatacctgtcagattcccaaagaggcacaattgaagacgctattacagctaacaatattgaatcgctgaaaaacgtgactttcaccggtaataccacaactactcttgagaaagtgtactacgatcttctcaggtacaatgttaaagacgcttcttcaaaactttccggcagttttgccgatacatattcggatgtaggaacccaatactggtacaagtttaataacggatcgtgggaaacgggaaatacaataataaccaatgccggtaattga

SEQ ID NO: 23246 - protein, 561 aa, Unknown
  Obtained from environmental sample
  misc_feature (1)..(561): Xaa is any amino acid
MTKTKSGAELDNGVHILSISVKDSLGNGSETDSTIGGLKKDIAFLIDKSVPVLKVTDYPDKAINKTEKFKGKITETINVKQLTVKLGNDEIATIDVENNTPPKYPLVNGNQYGVSIKVTPTPGTGMSFDFEVEINPAVGGLEDGPKSLMFSAVGSSGQSGMTTSSFTLDTKGPSIAIGAPISGNVYVTNPEWGILEYAVIEDDFSSASSVDSIYNEVFAARIKDISPSFALTFTDEASFVFVTGKDKFWYKFDNDSSWLPVTVGSSDLNKTSVSLSLPLPADKQKDGVHRVSIRATDSLGNGYDNLKADTAPEKENGVGYQSNLVFMIDTGIPELFVKDNNGKKVPSEAQDFGIHNKSFNISGEINKTYDVQDLSVKIGSTVVAQRTNNGATMNNMTFTKKPNGKRTYYFTNVNIDPLLGASITDGSKDGSYTISVSVKGSSEQSVSNVSTVTLDTQGPKITVNAPIKEKIYLSDSQRGTIEDAITANNIESLKNVTFTGNTTTTLEKVYYDLLRYNVKDASSKLSGSFADTYSDVGTQYWYKFNNGSWETGNTIITNAGN

SEQ ID NO: 23247 - DNA, 735 bp, Unknown
  Obtained from environmental sample
  misc_feature (1)..(735): n is a, c, g, or t
atgctgcttttctttgttcctgatgaatacttatcacctgaactatgcgccctggcaacaggaagggaaggcagggcgctcaaatatgtcccccctcaaatgagaaaccagaaaatgtacaaacaggcggtatttaacatttcttacgcgcttgagttcgtagacgaagatgaaaaaaccgaagagctatgccaaatggcggtaaagcaggatggagaaaccctcgaatttgtacctgaaaaatttaaaacagctaaactctgtctggaagccgtgaaaaatgacaaatgggcttttgagtttgtgcctgagaaattgaaaaccaaagagctttgcgccgaggcggtaaagaaagaacacagtatgcttaaatttgtgccggaagccttaaaaacaaaaaagctgtgcataattgccctgtctcctgaaaacaaagagactcttgtggactcaaaagaagggatacattgccctcttgcctatgttccccacaagtttattacaaaaaaactctgccttgacgcggttacaaatgattcggaagcccttaaattcctgcccgataaattcaaaattccgaaaatataccttgcggcggtaaaagagtatggatgggcgctggaacatgttccggaagaattaaaaacctataaactctgccttgccgcggtaaaagaacacgggcgcgcgctggaatttgttccggaaaaatataaaaccgcggaagctgcttga

SEQ ID NO: 23248 - protein, 244 aa, Unknown
  Obtained from environmental sample
  misc_feature (1)..(244): Xaa is any amino acid
MLLFFVPDEYLSPELCALATGREGRALKYVPPQMRNQKMYKQAVFNISYALEFVDEDEKTEELCQMAVKQDGETLEFVPEKFKTAKLCLEAVKNDKWAFEFVPEKLKTKELCAEAVKKEHSMLKFVPEALKTKKLCIIALSPENKETLVDSKEGIHCPLAYVPHKFITKKLCLDAVTNDSEALKFLPDKFKIPKIYLAAVKEYGWALEHVPEELKTYKLCLAAVKEHGRALEFVPEKYKTAEAA

SEQ ID NO: 23249 - DNA, 354 bp, Unknown
  Obtained from environmental sample
  misc_feature (1)..(354): n is a, c, g, or t
ttgaccaaagagctttccgaagaagccttcgcgtcaaatgtcttaatattacaactcatacccaaagaatttatcacagcgcaaatgtgcgaagaagcggtactgggagacgaatttgcctttatacacgttcctgcggaattccgttcggaaaaacttattaccgcagcgcttaaaaactatgggctttcgctgagttatcttgacgacaggcaaaaaacagaacggctctgccttttggcggtaaagaatcacggcggagcgctcaaatatgtaccctatcagttacgcacagcggaattatgccttgaggcggttaagtgttttggccacgctttagccgcatgtgcctga

SEQ ID NO: 23250 - protein, 117 aa, Unknown
  Obtained from environmental sample
  misc_feature (1)..(117): Xaa is any amino acid
MTKELSEEAFASNVLILQLIPKEFITAQMCEEAVLGDEFAFIHVPAEFRSEKLITAALKNYGLSLSYLDDRQKTERLCLLAVKNHGGALKYVPYQLRTAELCLEAVKCFGHALAACA

SEQ ID NO: 23251 - DNA, 1566 bp, Unknown
  Obtained from environmental sample
  misc_feature (1)..(1566): n is a, c, g, or t
ttgatagaatactgctacagtaccggtagcattaccggcactagcggggctttcggcatatcgggaagcaataccgccggaagcaccgtgcgaaactgcgtagcgctcagtcctaagctaaccacgagcaacagcgcgtctgtcggcagaattgcaagcgattccggcactctcaccaacaacaaagcccgtcaagatatgaaaaccggctttagcggttcagaggcggcagtaccctcaagtcaaacaggagtaaatcactttaacggcgcagatgtcagtttgggcagttcgacatcactgtcctctgttttcagcggctgggataccgcagtttggaatatcaacagcagtttgaatactattgcaggcggtgcattgcccacgctcataacaaatacgcaaagccccgctcccacgcttccggcgggagataactctacgcccggcaatggcacggctggcagtcccttcctcgttgccaccgaagccgatctccgcaaagtcggcactgaaacaaccgccggaggctggacgccctcggcccactacaaacagacggcgaacatcgcattgacgtcatccaacaattttataccgattggctcaagcgccaccccattcaccggatcgtatgacggggatggaaaaaccattaccaacttgaccgttaatcgggataacaattatgtagggttatttgccttaatcggcgcaggcggcacggtgaaaaacgtgagcgttagcggcacggtaacacagaactttacaaattcgaatgtcggcggcatagccggagagaataacggcacggttgaaaactgctcctttagcggaactgtaaccggcgatacaaccagcaatcaggtcggcggcattgtggggcagaacaacggcacggtgaagaacagcagaagcagcgcaacggtaactggcaaagatcaggtcggcggcattgccggaacgaatcagggcaagattgacgaaagttacaacaccggaaacgttaccggaagccagcaagtaggcggtatcgccggaaccaatgtcggcagcggcaattacataaagaactcctataacacaggcagtgtaaccagcaccgcaggctcaagctccaatgccggaggcattacagggtttaaccagcaaagcgcgcttttggaatactgctacaacacaggttatgttgccggttcaagtgcggtcggcggtattgtgggaaacaacaactcaggatgcaccgtacaaaactgcatatcactcagcgcaaagttaaccggagccaccagtaccaatcgtgtgattggacttgctaacggcactatgacaaacaacaaagcccgccaagacatgaaaatcggcaccggcggcgcggaagcgacagtatcaggagccgcaactaactcaaacggcgaaaataccgcagtaggaacatcagtgcagaccgtattcagcagctttgatgcgaatatttggtatatatggaacttagccatgaacgaaggcggaaatttacccacattaagggaaaaagagcaatcacccgcccccacgcttccgtga

SEQ ID NO: 23252 - protein, 521 aa, Unknown
  Obtained from environmental sample
  DOMAIN (338)...(366): The GLUG motif
  misc_feature (1)..(521): Xaa is any amino acid
MIEYCYSTGSITGTSGAFGISGSNTAGSTVRNCVALSPKLTTSNSASVGRIASDSGTLTNNKARQDMKTGFSGSEAAVPSSQTGVNHFNGADVSLGSSTSLSSVFSGWDTAVWNINSSLNTIAGGALPTLITNTQSPAPTLPAGDNSTPGNGTAGSPFLVATEADLRKVGTETTAGGWTPSAHYKQTANIALTSSNNFIPIGSSATPFTGSYDGDGKTITNLTVNRDNNYVGLFALIGAGGTVKNVSVSGTVTQNFTNSNVGGIAGENNGTVENCSFSGTVTGDTTSNQVGGIVGQNNGTVKNSRSSATVTGKDQVGGIAGTNQGKIDESYNTGNVTGSQQVGGIAGTNVGSGNYIKNSYNTGSVTSTAGSSSNAGGITGFNQQSALLEYCYNTGYVAGSSAVGGIVGNNNSGCTVQNCISLSAKLTGATSTNRVIGLANGTMTNNKARQDMKIGTGGAEATVSGAATNSNGENTAVGTSVQTVFSSFDANIWYIWNLAMNEGGNLPTLREKEQSPAPTLP

SEQ ID NO: 23253 - DNA, 360 bp, Unknown
  Obtained from environmental sample
  misc_feature (1)..(360): n is a, c, g, or t
gtgggtattcagtccgccctgggaatttttcttgaggcaaacaccgagcttatggacggcggatccggcaaggaattataccaggctgtttttgacgcggtaaagtcggttgaggaagcgggaaacccccaccgcgtgcggatgcgccgtattgccggcaagtgggacattgacatagatattgaggttcccccgaacatgaaagttatagaagctcactggatcgcgtacagggttgaaaccgccattaaagaacggatagagaatgtttatgatattatgatccatgtcgaacctgccggaaacattgaaaacgaaggctacggcctctcggaagaaattctgaataatgaggaatga

SEQ ID NO: 23254 - protein, 119 aa, Unknown
  Obtained from environmental sample
  misc_feature (1)..(119): Xaa is any amino acid
MGIQSALGIFLEANTELMDGGSGKELYQAVFDAVKSVEEAGNPHRVRMRRIAGKWDIDIDIEVPPNMKVIEAHWIAYRVETAIKERIENVYDIMIHVEPAGNIENEGYGLSEEILNNEE

SEQ ID NO: 23255 - DNA, 474 bp, Unknown
  Obtained from environmental sample
  misc_feature (1)..(474): n is a, c, g, or t
atggggacgctctcaaaaggacttggaacatgcggcggttatcttgcgggaaagcgggaattaattgaatatcttcgctatatgctgccgggttttatattttcagtcggcctgagcccggcgcttgccgccgccacgattgaatcgatacggattatcaggaaagataattcgcttgtcagacaattgcaggaaaacgttagctattttgtttccaaagccaaggagaaaggctttaacctctgtaaagcgggagaaagcccgattgcccccgtatttatcggcaaagattccgacgcttttgatctttcacaagccatgtttgaaaaaggcgtctttgtccctcccgcggtttaccccgcggtccctgtaaacatggcgcgtctgcgtttctgcctgacaagctgccacaataaaaagcaaatagactacgcccttgatactctgcaggaattgattaagaatagggcgtag

SEQ ID NO: 23256 - protein, 157 aa, Unknown
  Obtained from environmental sample
  misc_feature (1)..(157): Xaa is any amino acid
MGTLSKGLGTCGGYLAGKRELIEYLRYMLPGFIFSVGLSPALAAATIESIRIIRKDNSLVRQLQENVSYFVSKAKEKGFNLCKAGESPIAPVFIGKDSDAFDLSQAMFEKGVFVPPAVYPAVPVNMARLRFCLTSCHNKKQIDYALDTLQELIKNRA

SEQ ID NO: 23257 - DNA, 834 bp, Unknown
  Obtained from environmental sample
  misc_feature (1)..(834): n is a, c, g, or t
ttgccgatgggattatcggcgatagatgcgccggactctcctccctggggcgcggatgcggtacctgacctgtatgcccccaatttggccgggccgggagcctttaccacccgtaccggcggcgcaccgaccagcgctattaaccccgcccaggggggcgaagcccagcggattatttttgatgtcggttatttgggccttgcagggctgggtgaagaagagggttacggacacgcggcggagatagggaccctgtttcccacccgctacggggtctttggcggttctttgcgggttattagcagtccctttgactcgttcccggttcaaacggttttttcggggaatttaaacgccgcaaaagagatttaccctcggttgtctctgggagcgggattaaatttcggcttcgactttgattcgctgtggatgctttccggcgatttgggtatcttttaccgtgttggcaaggttggtcctctggaaaactttacctgggcggcggttttgcggagcatgggcaaaagctggactcccagttggtttaccccgatgggaggagtgtcatttgacgtactgcgcgtccacggcaaagaaggaaaacgcgacccctttgcggtaaataccgcggtggatatgggaattccttccgtcatagatttcgaccaaatcagtttgattctnncagctgggattacgcgtggaaatagcgaaaatgatcaatctttccttttctggccgggcgcttcagggctgaatgtccgccaactggtggtgtacgatggggcgaaaatgtttaccccctaccctcggtgggtttgggggtcaacataa

SEQ ID NO: 23258 - protein, 277 aa, Unknown
  Obtained from environmental sample
  misc_feature (1)..(277): Xaa is any amino acid
MPMGLSAIDAPDSPPWGADAVPDLYAPNLAGPGAFTTRTGGAPTSAINPAQGGEAQRIIFDVGYLGLAGLGEEEGYGHAAEIGTLFPTRYGVFGGSLRVISSPFDSFPVQTVFSGNLNAAKEIYPRLSLGAGLNFGFDFDSLWMLSGDLGIFYRVGKVGPLENFTWAAVLRSMGKSWTPSWFTPMGGVSFDVLRVHGKEGKRDPFAVNTAVDMGIPSVIDFDQISLILXAGITRGNSENDQSFLFWPGASGLNVRQLVVYDGAKMFTPYPRWVWGST

SEQ ID NO: 23259 - DNA, 798 bp, Unknown
  Obtained from environmental sample
  misc_feature (1)..(798): n is a, c, g, or t
ttgagcgaatggcaaaatatgatgcaaaaagttgcaacaagaaacagagaagtttgcattgccattgtaggaaaatacgtgcaactccacgatgcatatctctccattattgaaagtttgaaccacgcaggatttgaagtgggtgcaaaagtgaaaataagttggatagacagcaaaaacataactaatgaaaatgccaaagaaatattgaacggaatagatggaatgattgttccgggtggttttggcgatagaggcattgacggaaaaatagccgcttgccgctatgcaagagaaaacaatgtgccgtatttgggtatttgcctaggaatgcaaattgccgttattgaatttgcacgcaatgtttgtgaactcaaagatgctcattccagcgaatttgacgaaacttctccgcaccgcgtaattgaccttatgccagaccaagcgggcttggtggggagcggcggcacaatgcgtttgggtgcctacccttgcaaaaccgcaccgggttccctcttaaacaaactctacggccgtgacgaaataagcgaaaggcaccgccaccgctttgaattcaacaacgaataccgcgaagctctcacgagcaaaggtcttgtgatttgcggaacatcgctaaacggcaaccttgttgaagcaatagaactgccgagagatagcttttttgtgggagttcaatttcatccagaattcacaagccgcccaaataaaccgcatccgctgtttgtgggcttgctgagggcggcactcagcacaagaggaggcagcaatgaactttaa

SEQ ID NO: 23260 - protein, 265 aa, Unknown
  Obtained from environmental sample
  DOMAIN (20)...(236): Peptidase C26
  misc_feature (1)..(265): Xaa is any amino acid
MSEWQNMMQKVATRNREVCIAIVGKYVQLHDAYLSIIESLNHAGFEVGAKVKISWIDSKNITNENAKEILNGIDGMIVPGGFGDRGIDGKIAACRYARENNVPYLGICLGMQIAVIEFARNVCELKDAHSSEFDETSPHRVIDLMPDQAGLVGSGGTMRLGAYPCKTAPGSLLNKLYGRDEISERHRHRFEFNNEYREALTSKGLVICGTSLNGNLVEAIELPRDSFFVGVQFHPEFTSRPNKPHPLFVGLLRAALSTRGGSNEL

SEQ ID NO: 23261 - DNA, 393 bp, Unknown
  Obtained from environmental sample
  misc_feature (1)..(393): n is a, c, g, or t
atggaaatttttgatattttcttcccgatattcgtgctagggcttatggctgtggctgttccgtttggaatgatgtttgcaaattgggtgctttcaccgcaaactcagttgaaaaacaaggttaaaacagatgcttatgaatgtgggctttcaaaagtgataggctctgcctcggagagattcccagttaaatattatgtggtggcaatgctctttttggtttttgatttggaagtggcttttctctaccctctcgccattgaatttttgcacggcggttgggatttattcgttattttaatggtattcctgcttattttagaagcaggctacctttatattttacgcaaagatgttttgaattggtcaaagataagcgatagaattgaataa

SEQ ID NO: 23262 - protein, 130 aa, Unknown
  Obtained from environmental sample
  DOMAIN (19)...(122): NADH-ubiquinone/plastoquinone oxidoreductase, chain 3
  misc_feature (1)..(130): Xaa is any amino acid
MEIFDIFFPIFVLGLMAVAVPFGMMFANWVLSPQTQLKNKVKTDAYECGLSKVIGSASERFPVKYYVVAMLFLVFDLEVAFLYPLAIEFLHGGWDLFVILMVFLLILEAGYLYILRKDVLNWSKISDRIE

SEQ ID NO: 23263 - DNA, 423 bp, Unknown
  Obtained from environmental sample
  misc_feature (1)..(423): n is a, c, g, or t
gtgtttctctccaatggcccaggcgaacctgccgctgttggctatgccattgaaaatgtgcgaaaatgnataggcaaggttccgattatgggaatttgtttgggtcaccagattatagggcttgcgctcggcggcaaaactcaaaaactcaaattcgggcatcacggttgcaaccatccggttatggacacttctagcaactgcattgaaatttcttcacaaaaccacaactatatgattatgccgcagggaattgaagacaaggcggagataacctacctaaacctaaacgatggcagcgttgaaggcttgaagctgaaaaacgaaaacgtattttccattcaattccaccccgaagccgccccaggccctcacgattctctgcatttgttcaagaagttcagggagaatttatctcgctaa

SEQ ID NO: 23264 - protein, 140 aa, Unknown
  Obtained from environmental sample
  DOMAIN (2)...(137): Glutamine amidotransferase class-I
  misc_feature (1)..(140): Xaa is any amino acid
MFLSNGPGEPAAVGYAIENVRKXIGKVPIMGICLGHQIIGLALGGKTQKLKFGHHGCNHPVMDTSSNCIEISSQNHNYMIMPQGIEDKAEITYLNLNDGSVEGLKLKNENVFSIQFHPEAAPGPHDSLHLFKKFRENLSR

SEQ ID NO: 23265 - DNA, 489 bp, Unknown
  Obtained from environmental sample
  misc_feature (1)..(489): n is a, c, g, or t
atggaattgatagactttattgaacccttcgtagaagtcactatcgccaccttcaaagattttgtcggcctggaagcgagtccgagccaccctcattatctggagccggacaaagagtatgactgggacatttcttcagtcatcggcctttccggatcagtccggggggccgtgattatttccatgaaaaccgaactgtcgttgaaactggccgacgcgcttgtcggaaccacccatacggagatagacgccgacgtgacagactgcgtcggagaaatagtgaacatcatcgccggaaacatcaaacccaaagttccgaacggagacaagatagtaatatccattcctaccgttatcaagggaaagaaaatttccttcgtatggcccagcaagcagacgcggatactgtgtattccccacaaagtttataaaaatgactttttccatcttttagttgccattgatatggataatgaagtacagatttag

SEQ ID NO: 23266 - protein, 162 aa, Unknown
  Obtained from environmental sample
  misc_feature (1)..(162): Xaa is any amino acid
MELIDFIEPFVEVTIATFKDFVGLEASPSHPHYLEPDKEYDWDISSVIGLSGSVRGAVIISMKTELSLKLADALVGTTHTEIDADVTDCVGEIVNIIAGNIKPKVPNGDKIVISIPTVIKGKKISFVWPSKQTRILCIPHKVYKNDFFHLLVAIDMDNEVQI

SEQ ID NO: 23267 - DNA, 954 bp, Unknown
  Obtained from environmental sample
  misc_feature (1)..(954): n is a, c, g, or t
atgaagcatgtatttatatttgatcctaaatcttttcgcagccagcaatggaaaatggataacatatttgacgatatagggcaatttttcagaacgcaggaaaagtccgatttttccatacaaatctcccaccacccgcgcgacgcgattgtgcttattcaaaaagaagcggaaaccgccaaaaacggcgacagggtgcgggtctacgctataggaggggatgagatactctatgactgcctgaacggtgtcgccgaacttccgaatacggaacttgcggcggttccatacggggaaacaagctattttctgcggaacttcggagaaggtaaagacgcgttgttcaggaacataccgtctcttgtgcagcagggcgaggccattcccactgatataattaattggggcgtaaattacgcgctcaattcatgttatatagggcttaataccgccattgccggcaagttaagagggtataagtcgacgcttaacaagggcagttttatccttttgtccaaaatctcgtattttatgaataattttttaacggcatttgacagtgagatagccgcccaaaaatataaaataaccatagacgacaaggattacagcgggagttacagtcttattcatattgccaacgggccgtatttcgcgggcaagacgacagggctttcaacaagggccatgccggatgacggctttttggatgtcgcgctggttaaatcgtcccatcccctgaaaacaatgtggtcgctgagccgttacgctcagggcaagattccctcaaattgtattgtcatgcaggcaaaaaaaattacggttcaatctgacaagcaaatgtggattcaactggacaatgaatatatccgggataccgacatcaacattagggttgttccccacgcggtacanatggttgcgctggaaaatttatcctaccaaaagctttag

SEQ ID NO: 23268 - protein, 317 aa, Unknown
  Obtained from environmental sample
  DOMAIN (2)...(135): Diacylglycerol kinase catalytic domain (presumed)
  misc_feature (1)..(317): Xaa is any amino acid
MKHVFIFDPKSFRSQQWKMDNIFDDIGQFFRTQEKSDFSIQISHHPRDAIVLIQKEAETAKNGDRVRVYAIGGDEILYDCLNGVAELPNTELAAVPYGETSYFLRNFGEGKDALFRNIPSLVQQGEAIPTDIINWGVNYALNSCYIGLNTAIAGKLRGYKSTLNKGSFILLSKISYFMNNFLTAFDSEIAAQKYKITIDDKDYSGSYSLIHIANGPYFAGKTTGLSTRAMPDDGFLDVALVKSSHPLKTMWSLSRYAQGKIPSNCIVMQAKKITVQSDKQMWIQLDNEYIRDTDINIRVVPHAVXMVALENLSYQKL

SEQ ID NO: 23269 - DNA, 1665 bp, Unknown
  Obtained from environmental sample
  misc_feature (1)..(1665): n is a, c, g, or t
atgtggatcagaaaaaaaattgtctacgccagcaagactctgtcacagctgggcatggttgaggaacagacgcttgtccagggacgcccccttatcgatctttttcccggaagaagcctgaagctctacgcgggaaaaatgctcaatcagaaagaagattacgccgaagactgggaattttcgctgaacgggcaaaaacggtatttcaaggcggcttcacacgctctgccgggaggccatgacagcggcaccctcatcaatctgtacgacatgacttatctcgcggaacgggatgaaatcgccgccatgaaagacagcatgaaaatcggccttttcttcatgaactcaaattatgttattcaggatcattattccaggtatctggaggagctgctgtccgagactgaccttttcgggaggacttttaccgatgtaatcggggattcggttaccgaaaatgaattgcagactatcaaggattatttcggcatggtagttgagcagaagtacgatcaggaaattctggacgatataaaccctctgaatgaactgcactacatcaacaaaaacaacggctccagaaaagtattccaatgcggttttgccattgtggaacgggggcgcggagagatctttattctggtaacggtctatgacataaccgccagggtggaactgcagaagcggcttgaggaagagcaaaacaagcggcaggaagagatgcagtcagttttcgagcttattcaggttgatccggccgtatttagcgactttatggaagacattggacaggaattcgacgccattgacaaagtattaaagaataaagaactgtccacccatgacgcattggttaaaatttatcaatccattcacgccataaaatccaacgcggtaatccttggattaaatgtgtttggcggcaaggttcacgctctggagtcagcgataaaaaaactgcgcgagcaggaagaagaagtacccttctctgaaatgctgaacctgaccatgaatatagaaaaactttccaatgaaagggaaggattcaaagtaattcttgacaaactccagtcccacacaaaaggaggcggcgacaaaaaacagaatgtgaatatcctgattgagtctctcgccaaaacagttgaaaaggccgccgccgatatggaaaagaaagtacggtttatcagcagcgatgtggatctggcggcgattgaaaaaggccccaggcgcgtcatgaaagagatactaatgcagttaatccgtaactctgtcgctcacggaatcgaaaagccccaggcacgcgccgccaaaggcaaaaacgaaaccggcattgtaaaactttcaattaaaatggcaaataacattatccatatagtgttgatggacgacggcggagggcttgattacaaaaaaatcagcgaaaaagcggtacgcagtaaagtaatcaaaaaggaagacgccgccaataaagaaatgcttctaaaagctatatttgcgcctggatttagcaccgcggaaaatgagggaatgcacgccggcaggggcataggcctgaatctggtccgcgaccgcttaaaagaagttcgcggggtgattaaagtacgttccgaacccaacaagggaacggcgtttataatggccattcctgtggcaaagaaagcatag

SEQ ID NO: 23270 - protein, 554 aa, Unknown
  Obtained from environmental sample
  DOMAIN (407)...(551): Histidine kinase-, DNA gyrase B-, and HSP90-like ATPase
  misc_feature (1)..(554): Xaa is any amino acid
MWIRKKIVYASKTLSQLGMVEEQTLVQGRPLIDLFPGRSLKLYAGKMLNQKEDYAEDWEFSLNGQKRYFKAASHALPGGHDSGTLINLYDMTYLAERDEIAAMKDSMKIGLFFMNSNYVIQDHYSRYLEELLSETDLFGRTFTDVIGDSVTENELQTIKDYFGMVVEQKYDQEILDDINPLNELHYINKNNGSRKVFQCGFAIVERGRGEIFILVTVYDITARVELQKRLEEEQNKRQEEMQSVFELIQVDPAVFSDFMEDIGQEFDAIDKVLKNKELSTHDALVKIYQSIHAIKSNAVILGLNVFGGKVHALESAIKKLREQEEEVPFSEMLNLTMNIEKLSNEREGFKVILDKLQSHTKGGGDKKQNVNILIESLAKTVEKAAADMEKKVRFISSDVDLAAIEKGPRRVMKEILMQLIRNSVAHGIEKPQARAAKGKNETGIVKLSIKMANNIIHIVLMDDGGGLDYKKISEKAVRSKVIKKEDAANKEMLLKAIFAPGFSTAENEGMHAGRGIGLNLVRDRLKEVRGVIKVRSEPNKGTAFIMAIPVAKKA

SEQ ID NO: 23271 - DNA, 462 bp, Unknown
  Obtained from environmental sample
  misc_feature (1)..(462): n is a, c, g, or t
atggaaaacgctttgatagtttctagctccgacaaaagcgttgcgttctttaccgaaatgcttaacgcggcttcttgcggtgcggtcacagttcttaagaccggcgcggaagcgcggagcgttctttccgagcgcgaattcgacattgtgataatctacgtcccgctacccgacgaatcgggcgagagcctctcgcggcatatagcctcaaaagaaacatcgcaaatcatactggttgtaaagagcgaatatttcgacgagatgtgcgccgtcacggaagacgccggcgttctcgtagtccccagaccggtcgacagagcgatcttccggtcgtcgctcaggctcgccaaatcgacgcacggcaagctgaagaaattgcgttcggagaattgcgaactcaagcagaaaattgaggatatcaagataatagaccgcgctaagtatatcctgatctctacctaa

SEQ ID NO: 23272 - protein, 153 aa, Unknown
  Obtained from environmental sample
  DOMAIN (2)...(114): Response regulator receiver domain
  misc_feature (1)..(153): Xaa is any amino acid
MENALIVSSSDKSVAFFTEMLNAASCGAVTVLKTGAEARSVLSEREFDIVIIYVPLPDESGESLSRHIASKETSQIILVVKSEYFDEMCAVTEDAGVLVVPRPVDRAIFRSSLRLAKSTHGKLKKLRSENCELKQKIEDIKIIDRAKYILIST

SEQ ID NO: 23273 - DNA, 720 bp, Unknown
  Obtained from environmental sample
  misc_feature (1)..(720): n is a, c, g, or t
atgaacattgcggcacacaatcttgatttcaaggaactgaacagccggataaggtccgccaaagaagcagtctgtatagacggttgttacgggcaaaggtttatcgcaagcgggatgaccggaaaaaatctgacgattaacggaacgcccggaaacgcgttaggcgcttactttaacggaggaaccattatggtaaacggcaacgcgcaggatgccgtaggcgacacgatgaatgacggtaaaataatcattcacggtaacgcgggcgacgctctcggctacgctatgcggggcggagaaatttatgtccgcgacaacgccggatacagaaccggtatccacatgaaagaatacaaagagaaaaaaccggtaatcgtcattggcggcagggcgggcagtttcctgggcgaataccttgccggcggactcattgtggttctgggaataggctgccatcatgatgtccctgtctggtattttacaggaaccggcatgcacggcgggaaaatttttatcaggacggacaaggagctatcgaaactgccggagcaggtagcgatagagaacgcttccggcgaggatttgaaggagatagagccctacgtttcagagttcgccgaccgcttcggcatgaaggcggcggcgcttttgaaagacaagttttacgtgcttaggccgaacgcgaaaaatccgtataagcagctgtatacggcaaattaa

SEQ ID NO: 23274 - protein, 239 aa, Unknown
  Obtained from environmental sample
  DOMAIN (1)...(211): GXGXG motif
  misc_feature (1)..(239): Xaa is any amino acid
MNIAAHNLDFKELNSRIRSAKEAVCIDGCYGQRFIASGMTGKNLTINGTPGNALGAYFNGGTIMVNGNAQDAVGDTMNDGKIIIHGNAGDALGYAMRGGEIYVRDNAGYRTGIHMKEYKEKKPVIVIGGRAGSFLGEYLAGGLIVVLGIGCHHDVPVWYFTGTGMHGGKIFIRTDKELSKLPEQVAIENASGEDLKEIEPYVSEFADRFGMKAAALLKDKFYVLRPNAKNPYKQLYTAN

SEQ ID NO: 23275 - DNA, 750 bp, Unknown
  Obtained from environmental sample
  misc_feature (1)..(750): n is a, c, g, or t
ttgtcaccgttatggttgcggagccggcgggctaccgccttaacaagaccgtttgtaaccgttgcaactgatgtgttgctactagaccaagtgacggtcttgttggtggcattgctcggggcgatggtcgctgttagttgctcctctccgccagtcgtcagggcgagagctgttttgttcagggacacgccagtgacaggaacagtggccgctgtgacggtcacggcgcaggtggctgtcttgctgccatcggcggttgtgacggtaattgtcgctgtaccgttggcaaccgccgtgacggtggcattgaggccgctgcccgaaaccgtggcaacgccaggggcgctgctggcccaagtgaccgtcttgtccgtggcgttgctcggggctatggtcgccgcgaggctgccggctgcgccgcccaccgtgagcgccatcgtggccttgtcaagcgtgacgccggtaacgggcacgactaccgtcacggtggcggtgccgctctttgtggtgtcggcctggctggtcgcggtgacggtgtacgtccccgctgtcgcaggtgcggtgtatgtgccaccgccggttatagacccgccgccagcgctgacgctccatgtgacggccgtgttgcccgtgccgccggtgacagtggccgcgaacgtctgtgtgccgcctgtaggcagtgtcaccgtgttcggggagacgttgacggctatcccgtccacaaccgtcacggcgcaggtggcgtcttag

SEQ ID NO: 23276 - protein, 249 aa, Unknown
  Obtained from environmental sample
  misc_feature (1)..(249): Xaa is any amino acid
MSPLWLRSRRATALTRPFVTVATDVLLLDQVTVLLVALLGAMVAVSCSSPPVVRARAVLFRDTPVTGTVAAVTVTAQVAVLLPSAVVTVIVAVPLATAVTVALRPLPETVATPGALLAQVTVLSVALLGAMVAARLPAAPPTVSAIVALSSVTPVTGTTTVTVAVPLFVVSAWLVAVTVYVPAVAGAVYVPPPVIDPPPALTLHVTAVLPVPPVTVAANVCVPPVGSVTVFGETLTAIPSTTVTAQVAS

SEQ ID NO: 23277 - DNA, 726 bp, Unknown
  Obtained from environmental sample
  misc_feature (1)..(726): n is a, c, g, or t
atgtctggacattcaaagtgggctaccattaaacgcaaaaaagcaaaaaccgatgttggcagggcaactgcttggaataaattgataaaagaaatttccgttgccgcaaaaatgggtggcggaaacccagatgccaaccctcgccttagaacagcaatactgaaagccaaggggcaaagcttgcccgcaaaaaacatagagagcgcaatagcaaaaggcataggcggaaattccggtgcaaatatggaagagcctatgtacgagggctatggccccgcaggttgcgcaattcttgtgcaatgcctaaccgataaccgcacccgctccgttgcagacataagaaacatattcagcaagaacggcgggaacatgggcaccgaaggctctgttagctggaatttcaaaaagaaagggattgtggtggtggactcctccgcttgccccgaagacaaaattatggatttggttttggaagctggcgcaaacgacctagctacagaagacggagtttacgaaattgaaacaacaccagaaacttttgaggcggttaccaaggctctggaaaacgcaaaaatagaaatgctctctgcagaaataacctacgccgcagagaacaccgttaaattagaaggcgaagatgctcagaagctgctcaaaatgattgataaactagaagacaacgaagatgtgcaagatgttttcacaatgcggagctaccgaagataa

SEQ ID NO: 23278 - protein, 241 aa, Unknown
  Obtained from environmental sample
  DOMAIN (5)...(238): Domain of unknown function DUF28
  misc_feature (1)..(241): Xaa is any amino acid
MSGHSKWATIKRKKAKTDVGRATAWNKLIKEISVAAKMGGGNPDANPRLRTAILKAKGQSLPAKNIESAIAKGIGGNSGANMEEPMYEGYGPAGCAILVQCLTDNRTRSVADIRNIFSKNGGNMGTEGSVSWNFKKKGIVVVDSSACPEDKIMDLVLEAGANDLATEDGVYEIETTPETFEAVTKALENAKIEMLSAEITYAAENTVKLEGEDAQKLLKMIDKLEDNEDVQDVFTMRSYRR

SEQ ID NO: 23279 - DNA, 483 bp, Unknown
  Obtained from environmental sample
  misc_feature (1)..(483): n is a, c, g, or t
gtgcaaaactccataaggaatttcgcaacaatgttccgaggcagaaccataatgaatgctataatcccattgctccttttctgctttcttgcagccattgcagaagagattgtattcgttttgcctgaaagcatagttcaacgcggtgaaacggagagcaatgaaagaatgcttgaaataagaagctccgactgggaaggcaaaaatctctccctagccgatgtgctggctacttatgctggaatccaaacgaggcagatgggcggtatgggcagctttcaaagcatatccataaggggaatgccgggcaagcagattgctttggcgatagatggagtggttttgcaaagctttggtgcggcagacttaggcagcatagatttgaaccaatatgaaaaagtggaagtatataagggatttatacctgcgaaattcgcggctaacggaatgggcgggcttctcgtgccgctcgtgccgatctga

SEQ ID NO: 23280 - protein, 160 aa, Unknown
  Obtained from environmental sample
  DOMAIN (53)...(153): TonB-dependent Receptor Plug Domain
  misc_feature (1)..(160): Xaa is any amino acid
MQNSIRNFATMFRGRTIMNAIIPLLLFCFLAAIAEEIVFVLPESIVQRGETESNERMLEIRSSDWEGKNLSLADVLATYAGIQTRQMGGMGSFQSISIRGMPGKQIALAIDGVVLQSFGAADLGSIDLNQYEKVEVYKGFIPAKFAANGMGGLLVPLVPI

SEQ ID NO: 23281 - DNA, 705 bp, Unknown
  Obtained from environmental sample
  misc_feature (1)..(705): n is a, c, g, or t
ttggcgcttgacgaagcgctggcaatagggcttttcatcgaacgcgccgaagaattaacaaattggataaccaaagaccggggcgacagggaacaggaaacaggcggcagacagaaacttcttgccatgcttgacggggaaactttgccgaactgtacgcctaccgcttcggaaattttcaggataatagacagagaaggcaatttacgcgatcttccggagttacgtgcaataaaaaaacgcataaacgcgctggaaaaagagcttaaaacggcggtctcccggtatacagcgcaggatgaatacaaacggatgctgcaatcgcctcttccgtcgcaaagagacggaaggacggtgctggccgtaaaagccaattaccggggacgaatcaacgggattgtgcatgaactttcatccagcgggcagaccgtttttattgaacctcttgacgtggtggaaaaaaacaacgatatcctcctggaaaaacgaaacctcgacgcggaagtgcaaaaaatcctgcgcgaattaacggaaaaaataaacgcccacgctgaaaatctaagaactttgcatacaacaatcatagagcttgaatgtttaagggcgagggcaaaatattcgcttgcgataaagggacatttcgccagagacggaaacgccgaacatgaaacgctcattctaaaaaagcgcgccaccccatgctga

SEQ ID NO: 23282 - protein, 234 aa, Unknown
  Obtained from environmental sample
  misc_feature (1)..(234): Xaa is any amino acid
MALDEALAIGLFIERAEELTNWITKDRGDREQETGGRQKLLAMLDGETLPNCTPTASEIFRIIDREGNLRDLPELRAIKKRINALEKELKTAVSRYTAQDEYKRMLQSPLPSQRDGRTVLAVKANYRGRINGIVHELSSSGQTVFIEPLDVVEKNNDILLEKRNLDAEVQKILRELTEKINAHAENLRTLHTTIIELECLRARAKYSLAIKGHFARDGNAEHETLILKKRATPC

SEQ ID NO: 23283 - DNA, 462 bp, Unknown
  Obtained from environmental sample
  misc_feature (1)..(462): n is a, c, g, or t
gtggaaatctctccttccgctgtttacgcaaaaaacgagcgcaaactggatgtgcgcaatattccgctggaagaaaatcatttccccgataacagcttcgatgtaatacttgcctctcatttaattgaacacctaaacgagccgaaaatatttttggaagaaacctaccgtattttaaaaaacaacggcagtatttttataacaacccccgacataagcggtttccaatcccgtcttttcggcagccgctggcgttccgcgatttttgatcacctttatttattttcccggcgcacattgtcaaaaatgctaaagaccgtcggctttaaagttgaaagctgtcactcatggggcggacttgcggcgggtattgcgcccaagccggtaaaaaggatagccgactttctcgcgaagcgcttaaattgcggcgatgttatgataattcgcgctaggaagttttaa

SEQ ID NO: 23284 - protein, 153 aa, Unknown
  Obtained from environmental sample
  DOMAIN (1)...(67): Methyltransferase domain
  misc_feature (1)..(153): Xaa is any amino acid
MEISPSAVYAKNERKLDVRNIPLEENHFPDNSFDVILASHLIEHLNEPKIFLEETYRILKNNGSIFITTPDISGFQSRLFGSRWRSAIFDHLYLFSRRTLSKMLKTVGFKVESCHSWGGLAAGIAPKPVKRIADFLAKRLNCGDVMIIRARKF

SEQ ID NO: 23285 - DNA, 921 bp, Unknown
  Obtained from environmental sample
  misc_feature (1)..(921): n is a, c, g, or t
atggacagtttaattaaaatatatcttcgattactgcaagaaacagatgaaaaaatattcagatatttatatccgaatattgattggagcgagcgttgtgtcgctattatcggtgcaaaaggtgttggaaaaacaactatgttgttacaacatattaaggctactttcgagaacaagaacgaggcactatacgcaagtttagacaatgcttggtttgctaatcatacaatttttgaattagcagaccaattttatatgaatggcggtacgtacttatttttagacgaaatccaccattatccgaattggacaacagaaataaaaaacatttacgacagttttccaaaattgaacgttgtattcacaggttcttcacttttgcaaatttacaaatcaaccaccgacctttcaagaagagttgtttatgaaacattggaaggcttatcgtttagagaatttcttaaatttgaaaatgtcggagattttcctgtttattctttatcggaaattgtagaaaatcaccaaaatattgcttttgaaattacagaacgtataaagataatgccattgtttaaaaaataccttaaaacaggattttatttattttacaagcaaggattaaaaaaatatgattacaaactgcaagaggcgataaataatgtgatagacgttgatattcctgcagttgaaaacattgagtttgcttctcggcacaaaataaaaagattgttcgccgtattgtcggaattagtcccatatacgccaaaaattgctgatttaagtcatgctattgacacgaacagaaacaatacggtaaagtatttatcgctattggccaaatgcaaattgctgaatttaatatcgcacaaaaacaaaaccattggtgatttaactaaaccccgacaaagttttgttaaataa

SEQ ID NO: 23286 - protein, 306 aa, Unknown
  Obtained from environmental sample
  misc_feature (1)..(306): Xaa is any amino acid
MDSLIKIYLRLLQETDEKIFRYLYPNIDWSERCVAIIGAKGVGKTTMLLQHIKATFENKNEALYASLDNAWFANHTIFELADQFYMNGGTYLFLDEIHHYPNWTTEIKNIYDSFPKLNVVFTGSSLLQIYKSTTDLSRRVVYETLEGLSFREFLKFENVGDFPVYSLSEIVENHQNIAFEITERIKIMPLFKKYLKTGFYLFYKQGLKKYDYKLQEAINNVIDVDIPAVENIEFASRHKIKRLFAVLSELVPYTPKIADLSHAIDTNRNNTVKYLSLLAKCKLLNLISHKNKTIGDLTKPRQSFVK

SEQ ID NO: 23287 - DNA, 408 bp, Unknown
  Obtained from environmental sample
  misc_feature (1)..(408): n is a, c, g, or t
ttgaaaggtatcttgcccccaacgggaagaacatttacaagcgtagcgatgggaacggtaagcgccgaaacaatgattgaaagcgccaagaaagcaaacagcgcgtttacctggctgctccgtattatcggaatcattctggtagtcatggctatcaaaatgatattcaaaattcttcccacgctgttcaaagtattgcctcctcttgcaacaatagtgggagccggcgtaacgcttgtctgctctgtcggcggtttcgcgtggtcgttgatagtcatttccctcgcgtggctgttttaccgcccgcttatcggcattcctatgctgcttcttgcagccgcctttggaatttggttcctcaggaagaaggcaaaagaaaaagcggcgttagcgccggtaaaacaatag

SEQ ID NO: 23288 - protein, 135 aa, Unknown
  Obtained from environmental sample
  SIGNAL (1)...(22)
  misc_feature (1)..(135): Xaa is any amino acid
MKGILPPTGRTFTSVAMGTVSAETMIESAKKANSAFTWLLRIIGIILVVMAIKMIFKILPTLFKVLPPLATIVGAGVTLVCSVGGFAWSLIVISLAWLFYRPLIGIPMLLLAAAFGIWFLRKKAKEKAALAPVKQ

SEQ ID NO: 23289 - DNA, 369 bp, Unknown
  Obtained from environmental sample
  misc_feature (1)..(369): n is a, c, g, or t
gtggtcgttgatagtcatttccctcgcgtggctgttttaccgcccgcttatcggcattcctatgctgcttcttgcagccgcctttggaatttggttcctcaggaagaaggcaaaagaaaaagcggcgttagcgccggtaaaacaatagttgagtcgggcaaacttacaggccctgcggcggacggctggacttgcgcctgcggcacggtaaacaaaggcaaattctgcgttgactgcggcaagcctaaaccggcgggcgttcctcaatacaaatgcgacaaatgcggctgggaaccgcaggacaaggcgcatccgccgaaattctgcccgacctgcggcgatccgtttgacaacggggatattgtttag

SEQ ID NO: 23290 - protein, 122 aa, Unknown
  Obtained from environmental sample
  misc_feature (1)..(122): Xaa is any amino acid
MVVDSHFPRVAVLPPAYRHSYAASCSRLWNLVPQEEGKRKSGVSAGKTIVESGKLTGPAADGWTCACGTVNKGKFCVDCGKPKPAGVPQYKCDKCGWEPQDKAHPPKFCPTCGDPFDNGDIV

SEQ ID NO: 23291 - DNA, 804 bp, Unknown
  Obtained from environmental sample
  misc_feature (1)..(804): n is a, c, g, or t
gtgtgcggtttttcggataatgggtttataaataggcaatttccaatccccgaagatgcaaagaactggattgaaacggtggtgaagccgtatcgtgtgcaatgggaagcaaagcagcgggaagctgagttgttggcgcaacttgaggaagcgaagaaacgggaagcagaattgttggcacagcttgaggcagcaaaatcaacctccattctacactcattacccgtgctatcaacttttaccgaccctagagatggaaaagtttatagaaccgtaaagataggcaatcaagtgtggatggctgagaatttgaattatgaaacaaaagtaaaaggtatatttggaatttcccgttctgaaggtagtaaatgttataacaatgatccggaaaacgccataaaatacgggaggctttatgactgggacaccgctatgaaagccagccctccaggttggcatttgccaagcaacgaggaatggcaaacacttgtggatttcgtaggcggtgaaaaaattgctggtacgaagctcaaatctaaaattggttggaataaaaacggcaacggcacggatgacttcggcttttccgccctgcctggcggctacggctattccggtggcagtttccgcagtgtcggctacctcggccgctggtggagctctagcgagaacggtagcaacgacgcctacagccggtatatgctctacgactacgagtacgcttactactacgacgacgacgataagagctacctgttgtacagtgttcgttgtttgcaggactatggcgaagcccgccgctag

SEQ ID NO: 23292 - protein, 267 aa, Unknown
  Obtained from environmental sample
  misc_feature (1)..(267): Xaa is any amino acid
MCGFSDNGFINRQFPIPEDAKNWIETVVKPYRVQWEAKQREAELLAQLEEAKKREAELLAQLEAAKSTSILHSLPVLSTFTDPRDGKVYRTVKIGNQVWMAENLNYETKVKGIFGISRSEGSKCYNNDPENAIKYGRLYDWDTAMKASPPGWHLPSNEEWQTLVDFVGGEKIAGTKLKSKIGWNKNGNGTDDFGFSALPGGYGYSGGSFRSVGYLGRWWSSSENGSNDAYSRYMLYDYEYAYYYDDDDKSYLLYSVRCLQDYGEARR

SEQ ID NO: 23293 - DNA, 624 bp, Unknown
  Obtained from environmental sample
  misc_feature (1)..(624): n is a, c, g, or t
atgacagtaagcacctttaaacgggggttaaagctcaatacccaaaaacatgcaacagaaggtaaagcggtagaacaagcgcccttgccaaaacaggttgtgattccaataaaccagcattttggcgcacccaataaagccctggtaagtgtcggggataaggtcaggcgggggcaggttatcgcagacggaatggcccccgggcccatgactgtgcccgtccacgcttcaataagcggagtagtaaagaaaattgagcccaggcctcaatcgaataacacaacaggaatgtgcatcatcatcgaagctgaagataaaaatatagatgaggaatttttaccccctatcgatccttatatctgttcaaaacaggacgcccttgcgcggatacgggaagccggcatagtcggaatgggcggcgcgggatttccggcccatgtaaaacttttgcctccgcctgacaaacacatagatacaatcatcgccaacggagcggagtgcgagccttaccttaccaccgacgaagccgcgctgatttcacggccgcacctgcttgtaaaaggattggcaatcgtaatgcacataacgggcgtaaaaaagcgattatcggaatcgaagatataa

SEQ ID NO: 23294 - protein, 207 aa, Unknown
  Obtained from environmental sample
  misc_feature (1)..(207): Xaa is any amino acid
MTVSTFKRGLKLNTQKHATEGKAVEQAPLPKQVVIPINQHFGAPNKALVSVGDKVRRGQVIADGMAPGPMTVPVHASISGVVKKIEPRPQSNNTTGMCIIIEAEDKNIDEEFLPPIDPYICSKQDALARIREAGIVGMGGAGFPAHVKLLPPPDKHIDTIIANGAECEPYLTTDEAALISRPHLLVKGLAIVMHITGVKKRLSESKI

SEQ ID NO: 23295 - DNA, 813 bp, Unknown
  Obtained from environmental sample
  misc_feature (1)..(813): n is a, c, g, or t
atgggaatccccaagggagtaatactgacgcacaggaaccttgtctcggattgttatcttgctcagggaacgccgcttatagttttacataccgacgtattttacgcgatattgccaattcatcattcatacacgatgcttgcggtattcatagaaacaatttcaacgggagccgaagttgtttttggaaaacgaatggtaacaacgcaaattttaaaggaccttaaagaagcgaagatcaccatgttattaggcgtacccatgctttttaataaagttcttgccggaatcttacgcggattaaaagccaaaggtccgattgtttacggacttatatcatttttaatgggcatctccggccttataaaaaaagtttttaaagttaatcccggcaaaaaaatgtttgggttcgttctggacaaggcgagtcttacaacgatacgtatttgtatctgcggcggcggtccgctcgcgccaagcatatttagaaaatacaaccagcttggcatcgactttgttcaaggctacggtcttaccgaaacttctcccattatcgcgattaatcccattgaagcgtacaaggaaaccagcgtaggccgcccatgcccaggggtagacatgaaaatcttaaatcccgatgagcgcggagttggcgaagtaattgttaaaggtccgatggtaatgaaggggtattatcaattgccggaagaatcagcggccgcttttaccgccgatggttatctgaaaacaggcgatttgggttatatggacaacgaacattatttgtatctgacggggcgggcgaaaacatga

SEQ ID NO: 23296 - protein, 270 aa, Unknown
  Obtained from environmental sample
  DOMAIN (1)...(270): AMP-binding enzyme
  misc_feature (1)..(270): Xaa is any amino acid
MGIPKGVILTHRNLVSDCYLAQGTPLIVLHTDVFYAILPIHHSYTMLAVFIETISTGAEVVFGKRMVTTQILKDLKEAKITMLLGVPMLFNKVLAGILRGLKAKGPIVYGLISFLMGISGLIKKVFKVNPGKKMFGFVLDKASLTTIRICICGGGPLAPSIFRKYNQLGIDFVQGYGLTETSPIIAINPIEAYKETSVGRPCPGVDMKILNPDERGVGEVIVKGPMVMKGYYQLPEESAAAFTADGYLKTGDLGYMDNEHYLYLTGRAKT

SEQ ID NO: 23297 - DNA, 420 bp, Unknown
  Obtained from environmental sample
  misc_feature (1)..(420): n is a, c, g, or t
gtgcaccgcctggggagtatgcccgcaagggtgaaactcanaggaattgacgggggcccgcacaagcggtggagcatgtggtttaattcgatgatacgcgaggaaccttacctgggtttgacatgggggggaaatggcgcggagacncgccaaccggggcaaccgggcccctgtgcaggtgctgcatggctgtcgtcagctcgtgccgtgaggtgttgggttaagtcccgcaacgagcgcaacccctactgccagttaccagcaagtcgtgttggggactctggcggaactgccggtgacaaaccggaggaaggtggggatgacgtcaagtcatcatggcccttatgtccagggctacacacgtgctacaatgggcggtacaaagcggagcgaagccgcgaggcacaagcgaatcgctga

SEQ ID NO: 23298 - protein, 139 aa, Unknown
  Obtained from environmental sample
  misc_feature (1)..(139): Xaa is any amino acid
MHRLGSMPARVKLXGIDGGPHKRWSMWFNSMIREEPYLGLTWGGNGAETRQPGQPGPCAGAAWLSSARAVRCWVKSRNERNPYCQLPASRVGDSGGTAGDKPEEGGDDVKSSWPLCPGLHTCYNGRYKAERSREAQANR

SEQ ID NO: 23299 - DNA, 1119 bp, Unknown
  Obtained from environmental sample
  misc_feature (1)..(1119): n is a, c, g, or t
atggcggaaagttctaatctaaccaaactggcctctgtcttgtcaattgaggagcggcaggatcttcttgacaaattaaaatcccagtccgtcttatcaggtacactgctctacagagatgaagacgacaaacatcattcttatgacatagaaaccgcatattccagactaccctggtattctcacctttggttttttttgttgagtcttttcaagtccacctcacctataaagatctttgaagacgataaaatatcaacactggcagctataatagaagagaaagccccaggtctatacgaccatcagaagggcatacttctgccgcccttttacaggtatatggtaaaactcaaagaagcggctcattttttttactccgcactggattcgagcgttaaccgcgacaggggggctttttttgcctatcttggttcccttgagatgccagatgttcacaggattctgcagaacgaagcaaaccccatagcctttgccaaatcgcatcctggaatatcggatattgaactgcgccaggtagccttaaaaagaatggaagaagcgtttgcgatgatagtagaagaaaaacggaatgcaatgtattttgacgcccgctgccttaacatccttaaagagctttcttcatttttgtacgacagggtgatcctggcctttagtcacgatgcgtcggagaacggagagacctgttccaccggtattgtgagggatctcctaataaacctaaataacatcttactgtctctgaaaatagtcccgccaatggagcttttgggatcgctttttattttcatactacaagatagggttggggaacagggatttgatatcaaccgcgagagccacctgctattagccaaagcggagcaatctttggccgtaatacaggaatttaatagcaatatacctttaacgttactactccgctgttgtacgcgggacatgacgcttacgccacaagaattgagcggcggtgaagattggtatgcggtttacagggattactggaaaaaacggattgaatccctttacgccgaatacttgagggaaagccgccagagtgaactgattgaatctttcagcgttttcctaaaggactaa

SEQ ID NO: 23300 - protein, 372 aa, Unknown
  Obtained from environmental sample
  misc_feature (1)..(372): Xaa is any amino acid
MAESSNLTKLASVLSIEERQDLLDKLKSQSVLSGTLLYRDEDDKHHSYDIETAYSRLPWYSHLWFFLLSLFKSTSPIKIFEDDKISTLAAIIEEKAPGLYDHQKGILLPPFYRYMVKLKEAAHFFYSALDSSVNRDRGAFFAYLGSLEMPDVHRILQNEANPIAFAKSHPGISDIELRQVALKRMEEAFAMIVEEKRNAMYFDARCLNILKELSSFLYDRVILAFSHDASENGETCSTGIVRDLLINLNNILLSLKIVPPMELLGSLFIFILQDRVGEQGFDINRESHLLLAKAEQSLAVIQEFNSNIPLTLLLRCCTRDMTLTPQELSGGEDWYAVYRDYWKKRIESLYAEYLRESRQSELIESFSVFLKD

SEQ ID NO: 23301 - DNA, 1104 bp, Unknown
  Obtained from environmental sample
  misc_feature (1)..(1104): n is a, c, g, or t
atgccggtctcaacgcgggaggatctttcgcttgcctacactcccggcgtcgcccaaccctgccttgaaataagtaaaaatcctgaaaaaagctgggagctcacgggacgctggaatacggtcgccgttgtaaccgacggcactgccgttctgggacttggcgatattggccctgaagccgcaatgcccgtaatggaaggaaaatgcgtactgtttaaagcctttggcggagtggacgcaattccgctttgcatacgctcaaaagaagttgatgtaattgtagaaaccgcagcgcttcttgcggggagttttggcggcatcaatctggaagatatttccgcgccgcgttgttttgaaatagagcgaaaattaaaagtacgttgcgacattcccatttttcacgatgatcaacacgggaccgcggtagtagtgcttgcggcgctgcttaacgcgttaaagctgacaggaaaaaaacttgagaatatcagcgttgttactttgggcgcgggcgcggcgggtattgccgtaatcaggcttttactggcgctgggattgtccgacgtggtactgtgcgaccgtcagggggcaatttacaggggcagacccgggcttaacagcgaaaaaattgaaatggctgaagtttcaaacagacaaatgaaaaagggaagccttgccgacgtgctgcggggagccgatgtttttatcggcgtttcagcgcccggcatggtaactcaggaaatggtaaaatctatggctcctaatgcaattttgtttccaatgtctaacccgacgcccgaaatcatgccggatgaggctcttgccgcgggagctgcggtagtgggaacagggcgcagtgattttgcaaaccaaattaacaatgttcttgccttccccggcattttccgcggagcgctggacgtgcgcgcaagcgacattaacgatgaaatgaaaattgcgtcggcatacgctcttgccggtcttgtaagcgaaaacgaattacgcaatgattacatcattcccgcggcttttgatccaagaataaaagacgcagtggctaacgccgcagcgcaggcggcgaaaaaaagcggagttgcaagaatataa

SEQ ID NO: 23302 - protein, 367 aa, Unknown
  Obtained from environmental sample
  DOMAIN (1)...(135): Malic enzyme, N-terminal domain
  misc_feature (1)..(367): Xaa is any amino acid
MPVSTREDLSLAYTPGVAQPCLEISKNPEKSWELTGRWNTVAVVTDGTAVLGLGDIGPEAAMPVMEGKCVLFKAFGGVDAIPLCIRSKEVDVIVETAALLAGSFGGINLEDISAPRCFEIERKLKVRCDIPIFHDDQHGTAVVVLAALLNALKLTGKKLENISVVTLGAGAAGIAVIRLLLALGLSDVVLCDRQGAIYRGRPGLNSEKIEMAEVSNRQMKKGSLADVLRGADVFIGVSAPGMVTQEMVKSMAPNAILFPMSNPTPEIMPDEALAAGAAVVGTGRSDFANQINNVLAFPGIFRGALDVRASDINDEMKIASAYALAGLVSENELRNDYIIPAAFDPRIKDAVANAAAQAAKKSGVARI

SEQ ID NO: 23303 - DNA, 360 bp, Unknown
  Obtained from environmental sample
  misc_feature (1)..(360): n is a, c, g, or t
atgggaatgtcgcaacgtacttttaattttcgctctatttcaaaacaacgcggcgcggaaatatcttccagattgatgccgccaaaactccccgcaagaagcgctgcggtttctacaattacatcaacttcttttgagcgtatgcaaagcggaattgcgtccactccgccaaaggctttaaacagtacgcattttccttccattacgggcattgcggcttcagggccaatatcgccaagtcccagaacggcagtgccgtcggttacaacggcgaccgtattccagcgtcccgtgagctcccagcttttttcaggatttttacttatttcaaggcagggttgggcgacgccgggagtgtag

SEQ ID NO: 23304 - protein, 119 aa, Unknown
  Obtained from environmental sample
  misc_feature (1)..(119): Xaa is any amino acid
MGMSQRTFNFRSISKQRGAEISSRLMPPKLPARSAAVSTITSTSFERMQSGIASTPPKALNSTHFPSITGIAASGPISPSPRTAVPSVTTATVFQRPVSSQLFSGFLLISRQGWATPGV

SEQ ID NO: 23305 - DNA, 438 bp, Unknown
  Obtained from environmental sample
  misc_feature (1)..(438): n is a, c, g, or t
gtggcccataaacaggggggcgatccggcggcggtggttttcgacgcgctggaagccgcaatgtcgtccggcgcggacgtcgttatcgccgataccgccggaaggatgcacacaaaatccgcgctggtggaagaattgcgcaagatagacagggtagtggagcaaaaagcgcaatccgcgcgttatttgaaataccttgtgctggacgcgaccaccggcagaaacgccttcgctcaggccgaggtttttcattcggcggtcgctttggacggagtaatactgaccaagtacgattcgagcgccaagggcggagtggttttctcccttgcttcggaattacatttacctgtggtgtatctttgcacaggagaaaagtacggggacattgaaatttttgatccccaaaaatatgcgaaagaatttacgggaattcggtaa

SEQ ID NO: 23306 - protein, 145 aa, Unknown
  Obtained from environmental sample
  DOMAIN (1)...(143): SRP54-type protein, GTPase domain
  misc_feature (1)..(145): Xaa is any amino acid
MAHKQGGDPAAVVFDALEAAMSSGADVVIADTAGRMHTKSALVEELRKIDRVVEQKAQSARYLKYLVLDATTGRNAFAQAEVFHSAVALDGVILTKYDSSAKGGVVFSLASELHLPVVYLCTGEKYGDIEIFDPQKYAKEFTGIR

SEQ ID NO: 23307 - DNA, 411 bp, Unknown
  Obtained from environmental sample
  misc_feature (1)..(411): n is a, c, g, or t
atgagaaaaatcgtagtaaatacaatgtttaccaccggcgccgcatttgtcattctggcggtattttttatgatatttgatcttaaatttatccttgttcctactgtttttcagatattcacggcaaacattgtgattaatgcgggcctctttttaatcagtaaatttgaaagccgttacgctattgtagagtattttctggatattagttacataatcgccgttcttgtcgtatttggggcgatttttgactggtattccgctgtaccggtttgggttcttattgttatggcaatagttatttacctgtttgctataataatttccatgaataaactgcgaaatgacacaaaaaaaataaacgaattactgcaaaaacgcagggagaaagacaccggtactgcatcttag

SEQ ID NO: 23308 - protein, 136 aa, Unknown
  Obtained from environmental sample
  misc_feature (1)..(136): Xaa is any amino acid
MRKIVVNTMFTTGAAFVILAVFFMIFDLKFILVPTVFQIFTANIVINAGLFLISKFESRYAIVEYFLDISYIIAVLVVFGAIFDWYSAVPVWVLIVMAIVIYLFAIIISMNKLRNDTKKINELLQKRREKDTGTAS

SEQ ID NO: 23309 - DNA, 654 bp, Unknown
  Obtained from environmental sample
  misc_feature (1)..(654): n is a, c, g, or t
atgcgcggactttttttggaaaggcagtcggaacaaggaaaaagatggtcgctttcgcaatgtacgcgcacgttagttgaaaacattgattactggagttaccttgtccttgaacacggaaaagacgagaagaaagcccgctggaaaaatagtaacattgagtattttatcagaatgatagacaactgggaaacagaccccgacaattttgattcggggctttatgactggcttaacaggatcagccttatcacaagagacgacggtgaggacgacaacaaggacaaagtaaacttaatgacgattcacgccgcaaaggggcttgagtttccggtggtttttatcgcgggggcggaagaggggcttatcccgcacgaaaaaagtatcggcgaagacagcgaagacgaagcgggaagtattgaggaagaacgccgtcttttttatgtcgcgattacaagggcgagggaaaaattgtacataacaagctgtcaaaaacgccgcaccctgcaaaacacaagggagtgctccccttccccatttattgatgaaatccctaaagaactgataaaaattcacgagccggaaaaagaaactgttgacgaaggttccgcggacaggtttatggaacaattaaagtcgattttaaaggattaa

SEQ ID NO: 23310 - protein, 217 aa, Unknown
  Obtained from environmental sample
  misc_feature (1)..(217): Xaa is any amino acid
MRGLFLERQSEQGKRWSLSQCTRTLVENIDYWSYLVLEHGKDEKKARWKNSNIEYFIRMIDNWETDPDNFDSGLYDWLNRISLITRDDGEDDNKDKVNLMTIHAAKGLEFPVVFIAGAEEGLIPHEKSIGEDSEDEAGSIEEERRLFYVAITRAREKLYITSCQKRRTLQNTRECSPSPFIDEIPKELIKIHEPEKETVDEGSADRFMEQLKSILKD

SEQ ID NO: 23311 - DNA, 435 bp, Unknown
  Obtained from environmental sample
  misc_feature (1)..(435): n is a, c, g, or t
atgcagttcgtcaataaagaggattattttcccctcggcggactgaacttcgtgtatcagcgctttcaggcgttcctcaaattcgccccggaactttgtccccgcgacaagctggcccaaatccagggcaaggagctttttgtctttcaagccctccggcacatcccccgcgactatgcgccttgcaagcccctcaacaatggcggtcttgcctacgcccggctcgcctatcagtatcgggttgttctttgttcgtctggacagcacctgcatacagcggcgtatttcctcatcgcgcccgatgacagggtcgattttttcctgtctcgcaagagcggtaaggtcgcggcaatagcgttccagcacctggtattttccctcggggttttgatcggtcacgcgctggttgccgcggacttgcctgagcgcgtctaa

SEQ ID NO: 23312 - protein, 144 aa, Unknown
  Obtained from environmental sample
  misc_feature (1)..(144): Xaa is any amino acid
MQFVNKEDYFPLGGLNFVYQRFQAFLKFAPELCPRDKLAQIQGKELFVFQALRHIPRDYAPCKPLNNGGLAYARLAYQYRVVLCSSGQHLHTAAYFLIAPDDRVDFFLSRKSGKVAAIAFQHLVFSLGVLIGHALVAADLPERV

SEQ ID NO: 23313 - DNA, 831 bp, Unknown
  Obtained from environmental sample
  misc_feature (1)..(831): n is a, c, g, or t
ttgaggcccgcaggccgaaaagcccggcggtacttgcgcaggtttcccggaactgtatatttccggggcattgtcaaaggcaagcggaaagttgttgtagaagacgcatttggcagggaagcttcacatttaattcccatgaacaagagactgcttgtacgggacggcgacacggtagaatccggtgaacagctttgtatgggagcgattaacccgcacgaagttctttacatacagggcgagagcatgttgcagcgttatttaatggacgagattcaacaggtttaccgcctgcagggtgtgtccataaacgacaaacatatcggcgtaatcatccggcagatgatgcgcaaagtggaaatccgcaaagtcggcgacaccaaatttattcagggttcttccgtggacaagtaccgtttccacgaggaaaacgccagggtaatctcggaaggcggtcagccggcaatagcgcttccgatgttccagggaattaccaaggcttcgcttaacattgattcgttcctttcggcggcaagctttcaggaaactacgcgggtacttacggacgctgccatcaaaagctcgacagattatcttcgcggcttaaaggagaatattatcatcggtcatcctattccggcgggtacgggtattaagcgttaccgcaatgtaaagctctttgatgaggatagtcaggatttggatgagtatatgcatgagattctggataaacgcagacaggaagcggaagagcaggcggaagcggcggttacccaacaggaagaatttactgtgaagataccgatgataaccgctctcggccgattctga

SEQ ID NO: 23314 - protein, 276 aa, Unknown
  Obtained from environmental sample
  DOMAIN (5)...(177): RNA polymerase Rpb1, domain 5
  misc_feature (1)..(276): Xaa is any amino acid
MRPAGRKARRYLRRFPGTVYFRGIVKGKRKVVVEDAFGREASHLIPMNKRLLVRDGDTVESGEQLCMGAINPHEVLYIQGESMLQRYLMDEIQQVYRLQGVSINDKHIGVIIRQMMRKVEIRKVGDTKFIQGSSVDKYRFHEENARVISEGGQPAIALPMFQGITKASLNIDSFLSAASFQETTRVLTDAAIKSSTDYLRGLKENIIIGHPIPAGTGIKRYRNVKLFDEDSQDLDEYMHEILDKRRQEAEEQAEAAVTQQEEFTVKIPMITALGRF

SEQ ID NO: 23315 - DNA, 1101 bp, Unknown
  Obtained from environmental sample
  misc_feature (1)..(1101): n is a, c, g, or t
gtgcgcataagaacggtcttaacctgcgaagcgaaatacggcgtatgccggaaatgctacggacgcaaccttgccacaaaccgcaccgtggaaataggagaagccgtcggaacaatcgcggcgcagtctatcggccagcccggcacgcagcttacaatgcgcaccttccacatcggcggcgttgcgaccaaggccagcgaggaaagcagaatcactttgaaatatccggtatatatcagaaatgtcgccggaacgcacctgacgcttgataacggccacttgctctttacccgccgcggacattctattgtcaacaaggtaatgaaagaatacaaaattgaaaaaggcgacagacttgccgccgtggacggaaagaaaatcaaccggggagatgtaattatccatagaggcggtcaggacattgtttcatcggaaatagcgtatgccatgattctgaagaataatgatgaagaaacgctttacttaatcggtccggatcaaaaaatagaaatcaggaacggttccgattttgaggcccaaatagggacagttgttgacgccgaaaaaacaatcgccacgttcgacccgttctccgacccgattatcgcggaaaaaggcggaacggtaaaatttgaggatataattctcggtactactcttaatgaggtaatagacgaagaaaccggcaatacagaaaagcgtataacagaatcccagcacgagaaacagccgcgtatttttattgtagacgacaatgaanacgaagtcgcgtcttatcctatgccgggcggcgcttacatcctggttgatgaaggcgaaaaaatacgcgcgggaagaactatagccaagacattaaaagaatccgcaaaggcgatggacataacttccggtcttccgcgcgtcagcgagctttttgaggcccgcaggccgaaaagcccggcggtacttgcgcaggtttcccggaactgtatatttccggggcattgtcaaaggcaagcggaaagttgttgtagaagacgcatttggcagggaagcttcacatttaattcccatgaacaagagactgcttgtacgggacggcgacacggtagaatccggtga

SEQ ID NO: 23316 - protein, 366 aa, Unknown
  Obtained from environmental sample
  DOMAIN (14)...(306): RNA polymerase Rpb1, domain 5
  misc_feature (1)..(366): Xaa is any amino acid
MRIRTVLTCEAKYGVCRKCYGRNLATNRTVEIGEAVGTIAAQSIGQPGTQLTMRTFHIGGVATKASEESRITLKYPVYIRNVAGTHLTLDNGHLLFTRRGHSIVNKVMKEYKIEKGDRLAAVDGKKINRGDVIIHRGGQDIVSSEIAYAMILKNNDEETLYLIGPDQKIEIRNGSDFEAQIGTVVDAEKTIATFDPFSDPIIAEKGGTVKFEDIILGTTLNEVIDEETGNTEKRITESQHEKQPRIFIVDDNEXEVASYPMPGGAYILVDEGEKIRAGRTIAKTLKESAKAMDITSGLPRVSELFEARRPKSPAVLAQVSRNCIFPGHCQRQAESCCRRRIWQGSFTFNSHEQETACTGRRHGRIR

SEQ ID NO: 23317 - DNA, 1314 bp, Unknown
  Obtained from environmental sample
  misc_feature (1)..(1314): n is a, c, g, or t
ttgtgcacgcgncttttcgacgatgtggagagcaggatggatttttattttttcaacgccgacggggaagttacaggatcgagggatattgagctcatatcggctaaggagaaaataaacgacgtgatggcctttgtgtgcgggggcgtcttggacgtcgcgaagagcctcgcgccgggcgaaacgcgggcgctcgccttgcctcgcgggaacattgtgatcggcacaattccgcaactcaaatggtattctatcgtctataagcctgacagcatagaggattataaaacctcgatgaccgtgctgttccttgtggtgcttgtcgttatgctgctgatattcgtcatcttcaacgtctttgtcgcctctttcctcaaatcccagctcaggacaatggcttcccttgaacaagccagaaacgaggcggagatggccaatcgcagcaagtcgaattttctcaccacaatgtcccacgaaatccgtacgccgatgaacgcgattatcggtatagcgcaggtgttgctgcaacgcaaggatttgccggacgactacgcgaccgcgcttcaaacgatatacagttccgccaacagccagctgggtatcgtcaacgatcttttggatatgtccaagatcgaaaccggcaagatggtgttggttccggtggagtatgacacgccgagcctgataaacgacgcggtgcagctcaacgtcgtccgaatcgggtcaaagcaaatcgagttcacggttgacatcgacgagaatttgccgtctaaactttacggcgacgagttgcggattaagcagatactgaacaatctgctttccaacgctataaagtataccggcagagggagcgtgaaattgtcgataggttattcgatggatagtgacgacgtgatgttgcgcttttccatagaggataccggtcagggcatgaagccggaggacaaggagcgtctcttttcggagtatatgcgcttcaacgctcaggccaaccgcgccaccgagggtacggggctcggtttgaacatcaccaaaaggttggtggagatgatggacggcactatagacgtgaagagcgaatacggcaaaggcagcgtattcaccgtggccgtccggcagaaggcggtggaaggccccgcgataggcgcgagcgttgtaaagcagctgcgcaaattcgcgttcgccggcgacaggcacgcggcgaatttgcagatagccgccgagcctatgccgtacggcagcgtgcttgtggtggacgacgtggccactaatctatatgtggccgaagggctgctggggctctatcagtga

SEQ ID NO: 23318 - protein, 437 aa, Unknown
  Obtained from environmental sample
  DOMAIN (148)...(214): His Kinase A (phosphoacceptor) domain
  misc_feature (1)..(437): Xaa is any amino acid
MCTRLFDDVESRMDFYFFNADGEVTGSRDIELISAKEKINDVMAFVCGGVLDVAKSLAPGETRALALPRGNIVIGTIPQLKWYSIVYKPDSIEDYKTSMTVLFLVVLVVMLLIFVIFNVFVASFLKSQLRTMASLEQARNEAEMANRSKSNFLTTMSHEIRTPMNAIIGIAQVLLQRKDLPDDYATALQTIYSSANSQLGIVNDLLDMSKIETGKMVLVPVEYDTPSLINDAVQLNVVRIGSKQIEFTVDIDENLPSKLYGDELRIKQILNNLLSNAIKYTGRGSVKLSIGYSMDSDDVMLRFSIEDTGQGMKPEDKERLFSEYMRFNAQANRATEGTGLGLNITKRLVEMMDGTIDVKSEYGKGSVFTVAVRQKAVEGPAIGASVVKQLRKFAFAGDRHAANLQIAAEPMPYGSVLVVDDVATNLYVAEGLLGLYQ

SEQ ID NO: 23319 - DNA, 327 bp, Unknown
  Obtained from environmental sample
  misc_feature (1)..(327): n is a, c, g, or t
atgcgggctattggtcacgcttttaccactgaggcctacaccacgaccaagggggcggtaacccttttgaccaaggcaatcgctgtccgttatgcgaaagacaatatccgctgcaacagcatccatccaagtacggtgaacaccccgcttgtgcaggagctgttcaaagacccggtaaaaaaacagcagcgttatggcgaggtgcctttaggccgccttgctaccgaagcggatgtggccaacgccgctttgttctttgcctctgatgaggcggcttttctaaacggcgttgctttgccggtcgatggtggaactactgcggactaa

SEQ ID NO: 23320 - protein, 108 aa, Unknown
  Obtained from environmental sample
  misc_feature (1)..(108): Xaa is any amino acid
MRAIGHAFTTEAYTTTKGAVTLLTKAIAVRYAKDNIRCNSIHPSTVNTPLVQELFKDPVKKQQRYGEVPLGRLATEADVANAALFFASDEAAFLNGVALPVDGGTTAD

SEQ ID NO: 23321 - DNA, 816 bp, Unknown
  Obtained from environmental sample
  misc_feature (1)..(816): n is a, c, g, or t
atgatggccgagaacggcgtttctcatcctggccctctttttctcgttctttttggttttccctttataataacttttgttatgtcttttaagtcccaggcggattatatgatgggcaattactggggtctccccaaaaaaatattctttggcaatatacagaaagttctcttctccagatttaatcgttattttctcaacagcatatttgtctccggacttgcggttactctcactatcctgttcgcgtcattggcaagttacgctttcgccaagatgaagttccgtctttcggcgctggtattcaccctttttattatcgggatgatgatccctgtccacacaaccctgatacccatttatcagctcacaaaggccatgcaccttacagacagtcttttgggcctcgtaaccccttacatcagtataggtctgccagtggcaatctatatcataaccagcttttttaaggaagtgcccgccagtattcaggaatccgcccacatcgacggcgcgtccgcgttgcgtgtttactggagtatcatgctgcccatttcggtgcctgccttatcgaccgttgcaatattgaattttttaacctactggaatgaattcatttatgcccttacgctgattaataccacatcaaagagaaccgttcccctaggcatcaaggaattttacggacaggaaatggtaaatattcctgggatttttgccaccatcctcgtggcttccctccctgttataattttctatatgttcgcgcaggacaaggtcatcaacggactttcagccggagcggtaaaaggttag

SEQ ID NO: 23322 - protein, 271 aa, Unknown
  Obtained from environmental sample
  DOMAIN (61)...(266): Binding-protein-dependent transport system inner membrane component
  misc_feature (1)..(271): Xaa is any amino acid
MMAENGVSHPGPLFLVLFGFPFIITFVMSFKSQADYMMGNYWGLPKKIFFGNIQKVLFSRFNRYFLNSIFVSGLAVTLTILFASLASYAFAKMKFRLSALVFTLFIIGMMIPVHTTLIPIYQLTKAMHLTDSLLGLVTPYISIGLPVAIYIITSFFKEVPASIQESAHIDGASALRVYWSIMLPISVPALSTVAILNFLTYWNEFIYALTLINTTSKRTVPLGIKEFYGQEMVNIPGIFATILVASLPVIIFYMFAQDKVINGLSAGAVKG

SEQ ID NO: 23323 - DNA, 381 bp, Unknown
  Obtained from environmental sample
  misc_feature (1)..(381): n is a, c, g, or t
atgtcacactttacgcaagttgccactaaactttccaataaagaaatgctgctgcgggttttgcaggaaatggggtttgaagtccaggaaaaaactcagatcagaggatatcgcggccaggaaacttatgccgatattgccgttcggatgaaaaaaggctatgacgtcggttttttgctcaataatgacggtacatatagttttgttgccgattggtttggcgtcgagggttatacgcaggagcagtttgtgagcggcgtccagcggcaatacgctttggcgacagtgaaagaacaaactttccggcaggggtttaatttggtggaagaacaaaaaaacgcggacggttccatcagagtcgttgtgcgccggtggatttaa

SEQ ID NO: 23324 - protein, 126 aa, Unknown
  Obtained from environmental sample
  DOMAIN (1)...(121): Protein of unknown function (DUF1257)
  misc_feature (1)..(126): Xaa is any amino acid
MSHFTQVATKLSNKEMLLRVLQEMGFEVQEKTQIRGYRGQETYADIAVRMKKGYDVGFLLNNDGTYSFVADWFGVEGYTQEQFVSGVQRQYALATVKEQTFRQGFNLVEEQKNADGSIRVVVRRWI

SEQ ID NO: 23325 - DNA, 912 bp, Unknown
  Obtained from environmental sample
  misc_feature (1)..(912): n is a, c, g, or t
atggcatggcaattgtccatattaggcctgacatttactttgctgctcagttcaattttgattcgcattatcaacgctaagggacgttcggataaactaatacatagcaaaaatctagagttggaagaggtagcgcataggtataaatctattctcaatgctgtgcctttgccgattactgttaccgatttagataaaaaatggacatttatcaataccacctcagagaaagtttttggaataccctataaagatgctataggcaagccttgcagcaactggaacatcagtatttgcaatactgtaaactgcggcatagaatgtgtaaaacgcggtttaaagcaatcatttttttcgtataaagattcttcgtacaaggtggatgttgaagttctaaaaaatgttgaaaataaggttattggatatatagaggctattcaggatataaccaaagtagagcagatggcaaaagcggaagcggatagtgccaacaaggcaaagtccttatttttggcgaagatgagccacgaaattcgcacgccgatgaatgccattatgggtgctgttgaaattcaaatacaggacgaaacgttgcctccgcatgtaagggaatcttttgcgatgatttataattccagcaatttattgctcggaattataaacgatatacttgacttgtccaaaatagaagctggaaaaatggaacttgtgcctaccaaatacgagattgccagtttggtcaatgatacggtgcaattgaatattatgcgtaatagcaagcacataacatttgagcttttcatagatgagaatgcacctgctaaactgataggcgatgaaattcgcatcaagcagatattgaacaatctgctctccaatgcttttaaatatacggaagcgggcaaaatctag

SEQ ID NO: 23326 - protein, 303 aa, Unknown
  Obtained from environmental sample
  SIGNAL (1)...(26)
  DOMAIN (52)...(154): PAS fold
  misc_feature (1)..(303): Xaa is any amino acid
MAWQLSILGLTFTLLLSSILIRIINAKGRSDKLIHSKNLELEEVAHRYKSILNAVPLPITVTDLDKKWTFINTTSEKVFGIPYKDAIGKPCSNWNISICNTVNCGIECVKRGLKQSFFSYKDSSYKVDVEVLKNVENKVIGYIEAIQDITKVEQMAKAEADSANKAKSLFLAKMSHEIRTPMNAIMGAVEIQIQDETLPPHVRESFAMIYNSSNLLLGIINDILDLSKIEAGKMELVPTKYEIASLVNDTVQLNIMRNSKHITFELFIDENAPAKLIGDEIRIKQILNNLLSNAFKYTEAGKI

SEQ ID NO: 23327 - DNA, 783 bp, Unknown
  Obtained from environmental sample
  misc_feature (1)..(783): n is a, c, g, or t
atgagcgtaaataaagaaagtaaactaatcgccataaccggaaagggcggtgtaggtaaaaccaccgtcagcgcgcttttaattaaaagtttattggccgccggaaagtctcccgtacttgcgattgacgcggaccctaatagctgtcttgacgcggcgttaggtgtatgtgtcaccgataccgtaggcagggcgagggaagacgttcgtaattcagcgggggcggacgttaatgtttccaaacgggagcttttgcgcttaaaattggagagcgcccttgtcgaggaaaagggatttgatcttatcgccatgggaaggccggagggtgaaggctgttattgttatgcgaataatgttcttaaggaaattatcgctgaaatttcatcgggatacccctatgtggtgctggataacgaggcgggacttgaaaacctttcgcggcggatagttcaaaaagttgaccttatgatattggtttccgacgcttccaattcaggactgcaaactttgctgaggctttttgaactggcttgcgaaatgaaaatgatttacggcaaacttgcgcttgtggttaataaattgcgaagcgataaacttcccgatagaatgaaagagattcgtgaaaagaccaatgcggatattgtcatcggtcttcccgacgatgatgaggtttcgctatttgcgcaggaaagcaggagttttttagggatttccgattcaaaccctgtatataaaaaagtaatggaattagccgttaattatgaaaaccgttgtaatcattga

SEQ ID NO: 23328 - protein, 260 aa, Unknown
  Obtained from environmental sample
  DOMAIN (9)...(226): CobQ/CobB/MinD/ParA nucleotide binding domain
  misc_feature (1)..(260): Xaa is any amino acid
MSVNKESKLIAITGKGGVGKTTVSALLIKSLLAAGKSPVLAIDADPNSCLDAALGVCVTDTVGRAREDVRNSAGADVNVSKRELLRLKLESALVEEKGFDLIAMGRPEGEGCYCYANNVLKEIIAEISSGYPYVVLDNEAGLENLSRRIVQKVDLMILVSDASNSGLQTLLRLFELACEMKMIYGKLALVVNKLRSDKLPDRMKEIREKTNADIVIGLPDDDEVSLFAQESRSFLGISDSNPVYKKVMELAVNYENRCNH

SEQ ID NO: 23329 - DNA, 1308 bp, Unknown
  Obtained from environmental sample
  misc_feature (1)..(1308): n is a, c, g, or t
atgcagacgactaaccacgcgaaattcggcaacggagcgatcaaagacggcgaggatgaaaacgtccgcgtgtggatagacgttatgaacgaggccggcggaagatcgattctcccctttgaaagcatgatagccgccgacgcctttctttgggccgcttaccgcgatgacgccctgttggttgaaaaactgaaggacattacacagcggagttacggcggcgtccgggggcgctacgggacaataggcagccgcgcggttattaaaagctgcgccatcataaaggacgcggcggtcggcgcccacgcttacataaaaggcgcgaataaacttaaaaacattacgatactttcatcggctgacgagccgacccagataggcgagggcgtggaactggtgaacggcattgtcggctacgcctgccatgttttttacggcgccaaagcggtgcgctttgtcatcgggcgtaactgcaacctgaaatacggggcgcggctgattcattcggtgttaggcgataattcgacggtgtcctgctgtgagattctcaataacctgatatttcccgtgcacgagcagcaccacaacaactcttttttaatcgccagcctgatacaggggcagtccaacatcgcggctgccgcgactattggcagcaaccacaacagcagagccaacgacggcgaattgcgcgcgaaacggggtttttggcccgggctggcggttaccctaaaacaccccagcgtttttgcctcgtttgtcattatcgccaaaggggaatacccctcggaactcaatatacccctgccgttctccctggttgccaacaatgtccataaagacaggctggaactgtcgcccgcgtacttctggcttcacaacctctacgcccttgagcgcaattcatggaaatcccgcgcccgcgaccggcggataaacaagatccagaattttgagacggattatttggcccccgataccgccgaggagataatttgcggcctttccattctggaaggctggcttgccgatgcgggttattcgccaatggatttgcacgggcatgaagaggcccatgacatacgcgtgatcccctgccacagtctggaacacagcaggcgcggccaggtgattaagcatcctctcagggcgattgccgcctaccgcatgatgcttcgctggtatgcggccaaaaccatcgccgttttctttgatacccggcccaatttggactatgagggcctccgctcgctgttgggcggggaaggggaaagggtaagtgactgggtgaatatgggcgggcaataa

SEQ ID NO: 23330 - protein, 435 aa, Unknown
  Obtained from environmental sample
  misc_feature (1)..(435): Xaa is any amino acid
MQTTNHAKFGNGAIKDGEDENVRVWIDVMNEAGGRSILPFESMIAADAFLWAAYRDDALLVEKLKDITQRSYGGVRGRYGTIGSRAVIKSCAIIKDAAVGAHAYIKGANKLKNITILSSADEPTQIGEGVELVNGIVGYACHVFYGAKAVRFVIGRNCNLKYGARLIHSVLGDNSTVSCCEILNNLIFPVHEQHHNNSFLIASLIQGQSNIAAAATIGSNHNSRANDGELRAKRGFWPGLAVTLKHPSVFASFVIIAKGEYPSELNIPLPFSLVANNVHKDRLELSPAYFWLHNLYALERNSWKSRARDRRINKIQNFETDYLAPDTAEEIICGLSILEGWLADAGYSPMDLHGHEEAHDIRVIPCHSLEHSRRGQVIKHPLRAIAAYRMMLRWYAAKTIAVFFDTRPNLDYEGLRSLLGGEGERVSDWVNMGGQ

SEQ ID NO: 23331 - DNA, 1323 bp, Unknown
  Obtained from environmental sample
  misc_feature (1)..(1323): n is a, c, g, or t
gtggacgccctgaccggggaaaagttcagccgtatggggaaaaccgtcatttacccggccagtcactatgtaacggatagggacaatctgtgccgcgcggcgggggatatacgggaagaactgcgggagcggctcgcctggttcagttcccaaaataagctcctggaggcccagcgcctggagcagcgcacggtcatggatctggagatgatggaagaaatgggctactgcaagggcatcgaaaactactcgcgccatctggacggccggggcccgggcacagcgccttcgtgtctcctggattattttccgaaggattttgtgctgtttgtggatgaatcgcacattaccgtgccgcaggtcggggccatgtacaagggcgaccagtcgcgcaaaaaaacgcttgtggattacggtttccgtctcccttcagccctggataacaggcccttgtgttttgaggagtttctggagcgcatcacccagacggtgtatgtgtccgcaacccccggcccctgggaactggaacgctcccagggccttgtggtcgagcagattatccggccaaccgggcttgttgacccccttgtggaggtccgccccgtcacgggccagatggaagacctgatggccgaatgcgcgctgagggcgaaacaggatgagcgcgtgttggtcacaaccctcacaaagcgcatggccgaggatttgacggagtatctccgctccatgggcgtgcgggcgcggtatctgcattcggatattgacacccttgagcgcatggccctcatcaacgcgttgcgcaggagagacttcgatgtactcgtaggaatcaacctgctgcgggaaggaatagacctgccggaagtgtctttcatcgccattctggacgcggacaaaatcggctttctaaggtcgcttaccagcctcgtgcagatcatcggcagggcggcgcgtaacgcggctggcaaggtgatcatgtacgcggacaggatgagcgacgccatgcgggaggcaataagcgaaactgaacgccgccgcgtagcgcagatggaatacaacaagaagcacggtatcacccccactacggtgaaaaaagcgattgcaaacatcctggaacgccacgccgaggaggaaagagacgcggcggcggcggccgtcgaagtccttaaaaaagcccacaacgtccttgtgccggcggagcggaagaaactcatttccgccctggaaagggagatgctggaacacgccaaaaaactggaattcgagcaggctgcggcaatccgtgatgaaattgcaaaaataaaacagattggagtcaaataa

SEQ ID NO: 23332 - protein, 440 aa, Unknown
  Obtained from environmental sample
  DOMAIN (402)...(437): UvrB/uvrC motif
  misc_feature (1)..(440): Xaa is any amino acid
MDALTGEKFSRMGKTVIYPASHYVTDRDNLCRAAGDIREELRERLAWFSSQNKLLEAQRLEQRTVMDLEMMEEMGYCKGIENYSRHLDGRGPGTAPSCLLDYFPKDFVLFVDESHITVPQVGAMYKGDQSRKKTLVDYGFRLPSALDNRPLCFEEFLERITQTVYVSATPGPWELERSQGLVVEQIIRPTGLVDPLVEVRPVTGQMEDLMAECALRAKQDERVLVTTLTKRMAEDLTEYLRSMGVRARYLHSDIDTLERMALINALRRRDFDVLVGINLLREGIDLPEVSFIAILDADKIGFLRSLTSLVQIIGRAARNAAGKVIMYADRMSDAMREAISETERRRVAQMEYNKKHGITPTTVKKAIANILERHAEEERDAAAAAVEVLKKAHNVLVPAERKKLISALEREMLEHAKKLEFEQAAAIRDEIAKIKQIGVK

SEQ ID NO: 23333 - DNA, 396 bp, Unknown
  Obtained from environmental sample
  misc_feature (1)..(396): n is a, c, g, or t
ttgatggccgaggtggggagatcacgcgctcgatataataagcgccgacaatataattttcggcggcgagggcctaataaccaaagtttcagaggcggtggcgaagtgagcaaataccattctataataaagtgcccctccatcacggagaagaacaccgtgttgcgcaccgaccagaacaagtacgtgttcgaggtcgcgttaaacgccaccaaggccgacattaaagaggctgtccataagctcttcagcgtcgacgtggaggcggtcaacaccatggtggtcaagggcaagaggaagcgcgtggggcgcggcgtagggtatcggtcggataggaagaaggccatagtcaaggtcaaggccggccagaatatagctaaattcggcgaagtttaa

SEQ ID NO: 23334 - protein, 131 aa, Unknown
  Obtained from environmental sample
  DOMAIN (40)...(131): Ribosomal protein L23
  misc_feature (1)..(131): Xaa is any amino acid
MMAEVGRSRARYNKRRQYNFRRRGPNNQSFRGGGEVSKYHSIIKCPSITEKNTVLRTDQNKYVFEVALNATKADIKEAVHKLFSVDVEAVNTMVVKGKRKRVGRGVGYRSDRKKAIVKVKAGQNIAKFGEV

SEQ ID NO: 23335 - DNA, 942 bp, Unknown
  Obtained from environmental sample
  misc_feature (1)..(942): n is a, c, g, or t
ttgagaaaaggtgagtttatgtcgttaaaaaagtacaggccgacgacgccgacgctcaggtacaagacgaccaccgtcttcgaccagatcacaaccgatacgccccataagccgctccttgtcgccaagcgcaggacgaacggccgcaacaacaggggtgtcatcaccgtgcgtcatcgcggcggcgggcagaagcgcttcatccgcattatcgatttcaagcgcgacaagatcaatatccccggggtggtcgaaacgatcgagtacgatcccaaccgttcggcttttatcgcgcttgtcaaatatgttgacggcgagcgccgttacatcttggctaccgtgaatatgaaggtcggtcagaagataatggccggagacaaagccgagattgccgacggtaactgtatggcgcttgcaaacattcccttgggtactcaggtgcacaacatagagttgcgcgagaagaagggcggccagatcgcgcgtagcgcgggcgcgtacgccgaggtcgtagccaaagagaacaagatggtgcagataaagtttccgtcgagcgaggttcgcaacgtccgcgagggttgcgcggcgaccataggcagggtgagcaacgccgaccacatagacgtttgcataggttccgccggccgcaagcgccacatgggcatacgccccacggtgcgcggcgtggccatgaacccggtcgaccacccgatgggcggcggcgagggtaagacatccggcggtgggcacccggtgtcgccttgnggtcagaaggctaaggggctcaagactcgcgatcgcaagaaaccgtccggtaaatacattgtaaggcggaggtcaaagtanactatggcgcgttccgtaaagaaggggccgtttgtagacggccatttggtgaagaagttgatgactcgaacaagagcggtcaaaagaaggtcataa

SEQ ID NO: 23336 - protein, 313 aa, Unknown
  Obtained from environmental sample
  DOMAIN (48)...(124): Ribosomal Proteins L2, RNA binding domain
  misc_feature (1)..(313): Xaa is any amino acid
MRKGEFMSLKKYRPTTPTLRYKTTTVFDQITTDTPHKPLLVAKRRTNGRNNRGVITVRHRGGGQKRFIRIIDFKRDKINIPGVVETIEYDPNRSAFIALVKYVDGERRYILATVNMKVGQKIMAGDKAEIADGNCMALANIPLGTQVHNIELREKKGGQIARSAGAYAEVVAKENKMVQIKFPSSEVRNVREGCAATIGRVSNADHIDVCIGSAGRKRHMGIRPTVRGVAMNPVDHPMGGGEGKTSGGGHPVSPXGQKAKGLKTRDRKKPSGKYIVRRRSKXTMARSVKKGPFVDGHLVKKLMTRTRAVKRRS

SEQ ID NO: 23337 - DNA, 726 bp, Unknown
  Obtained from environmental sample
  misc_feature (1)..(726): n is a, c, g, or t
gtgcccaccgccggatgtcttaccctcgccgccgcccatcgggtggtcgaccgggttcatggccacgccgcgcaccgtggggcgtatgcccatgtggcgcttgcggccggcggaacctatgcaaacgtctatgtggtcggcgttgctcaccctgcctatggtcgccgcgcaaccctcgcggacgttgcgaacctcgctcgacggaaactttatctgcaccatcttgttctctttggctacgacctcggcgtacgcgcccgcgctacgcgcgatctggccgcccttcttctcgcgcaactctatgttgtgcacctgagtacccaagggaatgtttgcaagcgccatacagttaccgtcggcaatctcggctttgtctccggccattatcttctgaccgaccttcatattcacggtagccaagatgtaacggcgctcgccgtcaacatatttgacaagcgcgataaaagccgaacggttgggatcgtactcgatcgtttcgaccaccccggggatattgatcttgtcgcgcttgaaatcgataatgcggatgaagcgcttctgcccgccgccgcgatgacgcacggtgatgacacccctgttgttgcggccgttcgtcctgcgcttggcgacaaggagcggcttatggggcgtatcggttgtgatctggtcgaagacggtggtcgtcttgtacctgagcgtcggcgtcgtcggcctgtacttttttaa

SEQ ID NO: 23338 - protein, 241 aa, Unknown
  Obtained from environmental sample
  misc_feature (1)..(241): Xaa is any amino acid
MPTAGCLTLAAAHRVVDRVHGHAAHRGAYAHVALAAGGTYANVYVVGVAHPAYGRRATLADVANLARRKLYLHHLVLFGYDLGVRARATRDLAALLLAQLYVVHLSTQGNVCKRHTVTVGNLGFVSGHYLLTDLHIHGSQDVTALAVNIFDKRDKSRTVGIVLDRFDHPGDIDLVALEIDNADEALLPAAAMTHGDDTPVVAAVRPALGDKERLMGRIGCDLVEDGGRLVPERRRRRPVLF

SEQ ID NO: 23339 - DNA, 492 bp, Unknown
  Obtained from environmental sample
  misc_feature (1)..(492): n is a, c, g, or t
atgatcagatcggccgagcggccgagtcttttcgttaagaatggtcttagcccgcgcaatatctctcttgatagtacgcaactgaatcgggttcgtgagctgacccatcttcgcctgaaacctcaaattgaaaaactcctcctcgaggctgtcgactttcttcacgatctcctccggggagagctccctaatttcattagccttaaccattatatctgtttctccaattcaatgaaacgcgtgagtacgggcagcttatgcgcggcgagcctcatggcctccttcgcgatgtcggcccttatcccgccgatctcgaacatcaccgtgcctggcctcaccacggcaacccaaccctccggcgcgccctttcccgaacccatgcgggactcggcggggtgcttggtaatgggcttgtccggaaatatacggatccacaccttgccgccgcgcttgatgaaacgggtcatagcgatacgagccgcctcgatctga

SEQ ID NO: 23340 - protein, 163 aa, Unknown
  Obtained from environmental sample
  misc_feature (1)..(163): Xaa is any amino acid
MIRSAERPSLFVKNGLSPRNISLDSTQLNRVRELTHLRLKPQIEKLLLEAVDFLHDLLRGELPNFISLNHYICFSNSMKRVSTGSLCAASLMASFAMSALIPPISNITVPGLTTATQPSGAPFPEPMRDSAGCLVMGLSGNIRIHTLPPRLMKRVIAIRAASI

SEQ ID NO: 23341 - DNA, 417 bp, Unknown
  Obtained from environmental sample
  misc_feature (1)..(417): n is a, c, g, or t
atgttatcgcctaaaaaggtaaagtggagaaagacgcagcgcggcagtatgggcggggtggcccagcggtgcaacgaggtgtctttcggtgagttcgggttgcagtctacggaaccgggatgggtcaacaaccgtcagatcgaggcggctcgtatcgctatgacccgtttcatcaagcgcggcggcaaggtgtggatccgtatatttccggacaagcccattaccaagcaccccgccgagtcccgcatgggttcgggaaagggcgcgccggagggttgggttgccgtggtgaggccaggcacggtgatgttcgagatcggcgggataagggccgacatcgcgaaggaggccatgaggctcgccgcgcataagctgcccgtactcacgcgtttcattgaattggagaaacagatataa

SEQ ID NO: 23342 - protein, 138 aa, Unknown
  Obtained from environmental sample
  DOMAIN (2)...(137): Ribosomal L10
  misc_feature (1)..(138): Xaa is any amino acid
MLSPKKVKWRKTQRGSMGGVAQRCNEVSFGEFGLQSTEPGWVNNRQIEAARIAMTRFIKRGGKVWIRIFPDKPITKHPAESRMGSGKGAPEGWVAVVRPGTVMFEIGGIRADIAKEAMRLAAHKLPVLTRFIELEKQI

SEQ ID NO: 23343 - DNA, 366 bp, Unknown
  Obtained from environmental sample
  misc_feature (1)..(366): n is a, c, g, or t
atgcgcggcgagcctcatggcctccttcgcgatgtcggcccttatcccgccgatctcgaacatcaccgtgcctggcctcaccacggcaacccaaccctccggcgcgccctttcccgaacccatgcgggactcggcggggtgcttggtaatgggcttgtccggaaatatacggatccacaccttgccgccgcgcttgatgaaacgggtcatagcgatacgagccgcctcgatctgacggttgttgacccatcccggttccgtagactgcaacccgaactcaccgaaagacacctcgttgcaccgctgggccaccccgcccatactgccgcgctgcgtctttctccactttacctttttaggcgataa

SEQ ID NO: 23344 - protein, 121 aa, Unknown
  Obtained from environmental sample
  misc_feature (1)..(121): Xaa is any amino acid
MRGEPHGLLRDVGPYPADLEHHRAWPHHGNPTLRRALSRTHAGLGGVLGNGLVRKYTDPHLAAALDETGHSDTSRLDLTVVDPSRFRRLQPELTERHLVAPLGHPAHTAALRLSPLYLFRR

SEQ ID NO: 23345 - DNA, 717 bp, Unknown
  Obtained from environmental sample
  misc_feature (1)..(717): n is a, c, g, or t
gtgccatatttccgtcatcttatcgaattaacgggaggggttgtgggtcagaagactaatccggtcggtttgcggttgggcatcacgaggtcgtggtgttcgaattggttcgccaaggggcagttcgccgattggctgtatgaagatattgttctgaggaagtatctccgcaagcgccttgagcacggcgggatcagcgctatagacatagagcgcacggcgaagcgcgtgacggtgggcgtccacacgtcgcgccccggcatagtgatcggaaagaagggcgaggaggtcgagaggctgaagggcgagttgcagcatctcacccagaaagagatacagataaacatccgcgaagtcaaaaagcctgagatggactcacagcttgtggccgacaacatagcgcgccaagtggaaaagcgcgtttcttacaaaaaagcgataaagaaggcgatctccaccgcgatgcgtatgggcgccgagggaataaagataatggtttcgggccggttgaacggcgccgagatcgcccgtaccgagactttcaaggagggtcgcattccgttgcacactctccgcgccgatatagactacgcgacggcgacgtcgcacacgacctacggctgcataggaatcaaggtgtggatatgcaaaggcgaggttatgtcgcgtgcgatggcgatggcgaaggccaacgccgaagcggctaacaaaagttga

SEQ ID NO: 23346 - protein, 238 aa, Unknown
  Obtained from environmental sample
  DOMAIN (76)...(130): KH domain
  misc_feature (1)..(238): Xaa is any amino acid
MPYFRHLIELTGGVVGQKTNPVGLRLGITRSWCSNWFAKGQFADWLYEDIVLRKYLRKRLEHGGISAIDIERTAKRVTVGVHTSRPGIVIGKKGEEVERLKGELQHLTQKEIQINIREVKKPEMDSQLVADNIARQVEKRVSYKKAIKKAISTAMRMGAEGIKIMVSGRLNGAEIARTETFKEGRIPLHTLRADIDYATATSHTTYGCIGIKVWICKGEVMSRAMAMAKANAEAANKS

SEQ ID NO: 23347 - DNA, 342 bp, Unknown
  Obtained from environmental sample
  misc_feature (1)..(342): n is a, c, g, or t
atggaatcaaaggcagtgttacggaatttaaggtcgacgccgcgcaaggcgcgtattgttgccgatgcggttcggggcaagaacgtgagcgaggcgctgaacctgcttaggttcggcataaagaaagaggtggcggaggatgtcgcgaagttgatcagttcggcggtcgcgaatctttcgaataacagcgacaacgcggatatagaggtggacgcgcttcgcgtcaaagagatccgtgtggacgacggtgttgtcatgaagcgtttccgtccgcgcgccaagggcagcgcggcggcggttctcaagcgctcgtgccatatttccgtcatcttatcgaattaa

SEQ ID NO: 23348 - protein, 113 aa, Unknown
  Obtained from environmental sample
  DOMAIN (5)...(113): Ribosomal protein L22p/L17e
  misc_feature (1)..(113): Xaa is any amino acid
MESKAVLRNLRSTPRKARIVADAVRGKNVSEALNLLRFGIKKEVAEDVAKLISSAVANLSNNSDNADIEVDALRVKEIRVDDGVVMKRFRPRAKGSAAAVLKRSCHISVILSN

SEQ ID NO: 23349 - DNA, 672 bp, Unknown
  Obtained from environmental sample
  misc_feature (1)..(672): n is a, c, g, or t
atgaggatcgctacaacagcttcctgcgtatccatgacgaactttcaggtaagaatgatgcagactgaaaaaagtattttattacaaaaaacattaaaactccttgaattcaatacgatactggagcgggtcgcctcacgctccatgagcgaggaagcctcgctgatcatcagggaagaaagcccctgcggcgaacccgctgctgtcgcaaaaataaaaaaacaggtacagtctatatgcctgcgacttggttcaggggataatgatccgcgccgttatttgccgtcgattggttttcttcttccaaagcttaaagtggaaggcattgcccttgaacttgacgaagcctgcgccatcggcctttttcttgaacgcggcgaggaattaaggaaatggctgagccacgaatcaatgcctgcggatatgttaggcgagatacaaggcgctacgccctctgtttgcggtgaactagcctcggagattttcagggttattgacaaagagggaaagctccgcgatctgccggaactcagacagataaggcagcggataagcaggcttaaagccgcgctggacacggccgtctcccgctatctttccgatgaggaaacaaggcgcatgctgcaatcaacccgccttcgcagagagacggcaggacagtgctggcgttaa

SEQ ID NO: 23350 - protein, 223 aa, Unknown
  Obtained from environmental sample
  misc_feature (1)..(223): Xaa is any amino acid
MRIATTASCVSMTNFQVRMMQTEKSILLQKTLKLLEFNTILERVASRSMSEEASLIIREESPCGEPAAVAKIKKQVQSICLRLGSGDNDPRRYLPSIGFLLPKLKVEGIALELDEACAIGLFLERGEELRKWLSHESMPADMLGEIQGATPSVCGELASEIFRVIDKEGKLRDLPELRQIRQRISRLKAALDTAVSRYLSDEETRRMLQSTRLRRETAGQCWR

SEQ ID NO: 23351 - DNA, 381 bp, Unknown
  Obtained from environmental sample
  misc_feature (1)..(381): n is a, c, g, or t
gtggaaaagtcgagccttattaacgcgctgatgccggatatatacctagaaaccgggaccattaatgagaaatacgaccgtggcaatcacacaaccaccttatcttccatggtggagataaatgataatacatggataattgacacgccgggcatacgccgctttattcccgacggaatcggggcggaagacctgatcatgaacatgagggaatttgccccccttgccggaaagtgcagctttggtctatcctgttcccatcgcagcgaacccggatgcaagataatggaagccgttaacgccggcgtaatccatgaggatcgctacaacagcttcctgcgtatccatgacgaactttcaggtaagaatgatgcagactga

SEQ ID NO: 23352 - protein, 126 aa, Unknown
  Obtained from environmental sample
  DOMAIN (1)...(117): Protein of unknown function, DUF258
  misc_feature (1)..(126): Xaa is any amino acid
MEKSSLINALMPDIYLETGTINEKYDRGNHTTTLSSMVEINDNTWIIDTPGIRRFIPDGIGAEDLIMNMREFAPLAGKCSFGLSCSHRSEPGCKIMEAVNAGVIHEDRYNSFLRIHDELSGKNDAD

SEQ ID NO: 23353 - DNA, 1389 bp, Unknown
  Obtained from environmental sample
  misc_feature (1)..(1389): n is a, c, g, or t
atgtataatggaatacgcatgaaagagtacccgtcagctatcaacgatcctgctttggacagatccagtcgcctgaccgccctggagtccctggcggcagaagcgccaaaaggtattttccgcgattttcagaggtctatggcggaaataaacaaccacattcacacgatttacagttttagcccctatagccccagcatggcggccctgctggcgatggacgcggggcttggcgcggcaggttccgtcgaccacgattccatcgccgccgcagaggagatgctttcagcctgcgctattttgggcatcggaggctgtgcgggctttgaggtcagggcgagcttcaaaaccaatgcggacgggaaaaccagcccattcgcgtcaaggaagatcaacaacccggattcagtgggatacgcctatatgaccgttcagggcattccaaagcaggcgattcaaaagacggctgaattccttatgcccatcagagcgaaacggctcgaacgcaccaaggcgatgaccaagttggctaactccctgctattggaggcggggctttccgaaatagactttgatgcggatgttttagaccaatcaaaatacgacgagggaggagaaataaccgagcgccatcttttaaaggcggttgccgataagatcattttgaaattcggaaaggggccggagcttggcgaagggctcaagtcaaaaatgggaattgcgattccccctaaacaaattgccatgttcgccgacgcaaacaatccccattacatatacgatttattgggaattttaaaaaccgaatttctcccaaagatatttattcagcctgatgaggaggagtgtattccggctgcaagggttaccgcttttgcccaatccattgccgccattccagcttacgcctaccttggcgatgtgggcgactcgccaacaggcgataaaaaagctgaaaaattcgaggacgactatatagaagaactctttgccgaaatttccaggcttggctttaaagctgttacatatatgcctccaagaaacacccaggaacagttgcgcaatataagacggctttcagccgaatggggttttatggaaatctccggagtagacataaacagttcccgccagtcctttaactgtccagaagttttaaagcctgaattccgccatcttttggataccacctgggctctaatcgcccatgagcggcttgcatcggtagatacttgctacgggcttttttcggataagaatccaatcgcttcaatgaatctcgcggaacggctcggggtttatgcagacatgggaaaaaagcttaatcttcatcaccctgatgaatccgcaattatgctgtctaaagaaattgataagggtgatatttaa

SEQ ID NO: 23354 - protein, 462 aa, Unknown
  Obtained from environmental sample
  misc_feature (1)..(462): Xaa is any amino acid
MYNGIRMKEYPSAINDPALDRSSRLTALESLAAEAPKGIFRDFQRSMAEINNHIHTIYSFSPYSPSMAALLAMDAGLGAAGSVDHDSIAAAEEMLSACAILGIGGCAGFEVRASFKTNADGKTSPFASRKINNPDSVGYAYMTVQGIPKQAIQKTAEFLMPIRAKRLERTKAMTKLANSLLLEAGLSEIDFDADVLDQSKYDEGGEITERHLLKAVADKIILKFGKGPELGEGLKSKMGIAIPPKQIAMFADANNPHYIYDLLGILKTEFLPKIFIQPDEEECIPAARVTAFAQSIAAIPAYAYLGDVGDSPTGDKKAEKFEDDYIEELFAEISRLGFKAVTYMPPRNTQEQLRNIRRLSAEWGFMEISGVDINSSRQSFNCPEVLKPEFRHLLDTTWALIAHERLASVDTCYGLFSDKNPIASMNLAERLGVYADMGKKLNLHHPDESAIMLSKEIDKGDI

SEQ ID NO: 23355 - DNA, 420 bp, Unknown
  Obtained from environmental sample
  misc_feature (1)..(420): n is a, c, g, or t
atggttggctgcatgtatatgctgaagctccaccaccttgttgacgacaagatgcatgcccgctccacagggccttattcgctggtaacgcagcagcctttgggcggcaaggcgcagttcggcggccagaggctcggcgaaatggaggtgtgggccctggaagcctacggcgcggccaacactctccaggaactcctgaccataaaatccgacgatatgacgggccgggcaaagatatacgagagcatcgtcaagggcgagccttccacagcggcgggcgtccccgaatcctttaacgtacttgtacaggaactgcggggacttgcccttgatatatccatccgcgattcaaaaggcaaagctattcctcttaccgaaagggacgaggaacttatcaaccggcagggaagcaatttctag

SEQ ID NO: 23356 - protein, 139 aa, Unknown
  Obtained from environmental sample
  DOMAIN (41)...(117): RNA polymerase Rpb2, domain 7
  misc_feature (1)..(139): Xaa is any amino acid
MVGCMYMLKLHHLVDDKMHARSTGPYSLVTQQPLGGKAQFGGQRLGEMEVWALEAYGAANTLQELLTIKSDDMTGRAKIYESIVKGEPSTAAGVPESFNVLVQELRGLALDISIRDSKGKAIPLTERDEELINRQGSNF

SEQ ID NO: 23357 - DNA, 933 bp, Unknown
  Obtained from environmental sample
  misc_feature (1)..(933): n is a, c, g, or t
atgtactacctgtccaaagacaagacgggcgcgcggggtacggggaagaggtttagctgcgtggaggaagtttttttggcgctcgactctgacgcgatcgagtatggcgcgctgataaaagttccctacaagggcgaattgctcgaaaccacggcgggccgccttcttatgaacgagggcttccccgacagtgttccctacatcaattacactatggacgacaaggcgatcaagaacgttatcgcgaaggtctatgcggagcagggcgcctcgacaacggtgcgtatgctcgactccatcaaagatttgggctttaagtacgccaccgtgttcggcgccactatcggcgtgggggatgttcttattcccgatgttaaaaaagatatgatagaaaaagccaacgccgaggtcgccgggatccaggagcagtaccagcacggccatattacccaggaagaacgctacagccgcgttgtggatgtttggtcgaagaccaatgatgagcttaccgccgagatgatgaaagaactcaaggaggaccagggcgggtttaaccctgtctatatgatggcaaactccggcgcgcggggatccaaaagtcagatacgccagcttgccggtatgcgcggccttatggcaaagccttcgggggacatcatcgagctgcccatcaggtcgaacttcaaagaggggctttctgttatcgagttctttatttcaaccaatggcgcccgcaagggacttgccgataccgccctcaagacggcggacgccggatacctaacgcgccgccttgtggatatcgcgcaggacgttgttgtcaatgaagaggattgcggcacgataaacggaatagaaatgcaagccctgaaagaaaacgaggaaattatcgaaagcctcaaagaccgtatgccggctctcggccgattctga

SEQ ID NO: 23358 - protein, 310 aa, Unknown
  Obtained from environmental sample
  DOMAIN (1)...(120): RNA polymerase Rpb1, domain 3
  misc_feature (1)..(310): Xaa is any amino acid
MYYLSKDKTGARGTGKRFSCVEEVFLALDSDAIEYGALIKVPYKGELLETTAGRLLMNEGFPDSVPYINYTMDDKAIKNVIAKVYAEQGASTTVRMLDSIKDLGFKYATVFGATIGVGDVLIPDVKKDMIEKANAEVAGIQEQYQHGHITQEERYSRVVDVWSKTNDELTAEMMKELKEDQGGFNPVYMMANSGARGSKSQIRQLAGMRGLMAKPSGDIIELPIRSNFKEGLSVIEFFISTNGARKGLADTALKTADAGYLTRRLVDIAQDVVVNEEDCGTINGIEMQALKENEEIIESLKDRMPALGRF

SEQ ID NO: 23359 - DNA, 303 bp, Unknown
  Obtained from environmental sample
  misc_feature (1)..(303): n is a, c, g, or t
ttgaggctttcgataatttcctcgttttctttcagggcttgcatttctattccgtttatcgtgccgcaatcctcttcattgacaacaacgtcctgcgcgatatccacaaggcggcgcgttaggtatccggcgtccgccgtcttgagggcggtatcggcaagtcccttgcgggcgccattggttgaaataaagaactcgataacagaaagcccctctttgaagttcgacctgatgggcagctcgatgatgtcccccgaaggctttgccataaggccgcgcataccggcaagctggcgtatctga

SEQ ID NO: 23360 - protein, 100 aa, Unknown
  Obtained from environmental sample
  SIGNAL (1)...(26)
  misc_feature (1)..(100): Xaa is any amino acid
MRLSIISSFSFRACISIPFIVPQSSSLTTTSCAISTRRRVRYPASAVLRAVSASPLRAPLVEIKNSITESPSLKFDLMGSSMMSPEGFAIRPRIPASWRI

SEQ ID NO: 23361 - DNA, 699 bp, Unknown
  Obtained from environmental sample
  misc_feature (1)..(699): n is a, c, g, or t
atggcaggcataaacgccgcgatgaaactgcttggccgtccgccgctggtgcttacaagagctgatgcctatatcggcgtgctggtggacgatcttaccaccctgggaacgaaagagccgtaccggatgttcaccagccgcgccgaacaccgcctcgttctgcgccacgataccgccgatacaaggctctgtcccaaaggccgcgatgttggcctggttgacgacaaacgctgggaaattttccaaaagaaaaccggggcgttagacgaaatcagagaacttctggcgcagcggaaattttctccctcggctgacaaaaccggaaacgaagctcttgtttcccacgccggagagagccttgagcgctgtcttaccgacacccgcatagagttagccgacattctcccctttactccggagctttccgcctaccccgccgaatggcttgaacgggcccggctggacatccgctacgccggttatatagaaaaggaaaaccgcgccgcggcaaaggcggcaaaaatggacgcgataaagctggacccggacctcaactacgcggcccttaccggcctttcctcggaagcaagggaaaaactaaaaaccgtaaggccaattaccgttggccaggcggcgcgcatacccggcgtaaggcagggggacatagctctgttgatggtggtagcggcaaagaaataa

SEQ ID NO: 23362 - protein, 232 aa, Unknown
  Obtained from environmental sample
  misc_feature (1)..(232): Xaa is any amino acid
MAGINAAMKLLGRPPLVLTRADAYIGVLVDDLTTLGTKEPYRMFTSRAEHRLVLRHDTADTRLCPKGRDVGLVDDKRWEIFQKKTGALDEIRELLAQRKFSPSADKTGNEALVSHAGESLERCLTDTRIELADILPFTPELSAYPAEWLERARLDIRYAGYIEKENRAAAKAAKMDAIKLDPDLNYAALTGLSSEAREKLKTVRPITVGQAARIPGVRQGDIALLMVVAAKK

SEQ ID NO: 23363 - DNA, 495 bp, Unknown
  Obtained from environmental sample
  misc_feature (1)..(495): n is a, c, g, or t
gtgatgaagtggttcgccaaagaccagggctttgacgatgaggcggaattttggggaattgtcggccttctgcacgacatcgactttgaaatgttccctgatcagcactgcctcaaggcgcctgaacttctgcgagcgggcggcgtaagcgaagattcgatccgcgccgtatgctcccacggctacggccttaccagcgtggacgccaagcccgaacatcatatggaaaaaatcctctatgccgcggacgaacttacgggccttgtctgggcggtcgcgatcatacggccttcaaaaagcgtcatggacatggaagtaaaatccgtgaaaaagaaattcaaaaccccggcttttgccgcaggctgttcccgcccggttatcgaaaaaggcgcggaagttctgggatgggaactggatacgcttatcgagaaaacgatactcgccatgcgttcctgtgaagcccaagtgaacgccgcaatggcggatataaaataa

SEQ ID NO: 23364 - protein, 164 aa, Unknown
  Obtained from environmental sample
  misc_feature (1)..(164): Xaa is any amino acid
MMKWFAKDQGFDDEAEFWGIVGLLHDIDFEMFPDQHCLKAPELLRAGGVSEDSIRAVCSHGYGLTSVDAKPEHHMEKILYAADELTGLVWAVAIIRPSKSVMDMEVKSVKKKFKTPAFAAGCSRPVIEKGAEVLGWELDTLIEKTILAMRSCEAQVNAAMADIK

SEQ ID NO: 23365 - DNA, 507 bp, Unknown
  Obtained from environmental sample
  misc_feature (1)..(507): n is a, c, g, or t
gtggtaaagttcgcccccatagccatcgccaaccccaacgactacgaggccagggcggaactaatgatggccgcctccttcagtcataatgaactaaccagcattggccgcagcggcaatcggggcggggaacaccctttagagcaccagttatccggccactacgacacagcccacggcgcggggcttgcggttatcatgcccgcctggcttcagtacatagcggataacggcacgaaagagcaggttgagcgagtcgcccaattcggcgccaaagtcttcgccttcaaagcggacacagccaaagccacagcaaacgccggactcgacgccttccgcgcctggctgcgctcaatcggtatgcctctgacacttgccaagctgggcattccaaaagcggatcttgaagccgtaataaagcgcgcggttgataccaacaagggaaagatctccggctatatcgatctggacgaaaaagcgataagagccatatattcatcgatgtaa

SEQ ID NO: 23366 - protein, 168 aa, Unknown
  Obtained from environmental sample
  misc_feature (1)..(168): Xaa is any amino acid
MVKFAPIAIANPNDYEARAELMMAASFSHNELTSIGRSGNRGGEHPLEHQLSGHYDTAHGAGLAVIMPAWLQYIADNGTKEQVERVAQFGAKVFAFKADTAKATANAGLDAFRAWLRSIGMPLTLAKLGIPKADLEAVIKRAVDTNKGKISGYIDLDEKAIRAIYSSM

SEQ ID NO: 23367 - DNA, 882 bp, Unknown
  Obtained from environmental sample
  misc_feature (1)..(882): n is a, c, g, or t
atgcttgattatgaccagtgggataaaaataccgaatctatccgcgcccaacttgatagttttgtcagttttgacggcaaaaccgcttttacggctaataataaagactggcttgccaacttaaactatatcgacttcttgcgcgacatcggaaagcatttttccgtaaaccgtatgctcagttttgaagcttacaaaatgagaatggaaacggggctttcttttattgaatttaattatcagcttttacagagttatgattttctggaattgtaccgccgttacggttgccgtttgcaaattggtggcgatgatcaatgggggaacattgtcgcgggcgtggagcttgtccgccgtgttgaaggcgttgaagttttcgggctgacatttccccttgttaccacggctgacggaaagaaaatgggcaagaccgagaaaggcgcgctcttccttgactccgcaattacctccccttacgacttttttcaatactggcgcaatgtacaggatcaggatattctacgctttttacttatgtttacatttttgcctgttgatgaatgccgtatcctgtgcgaacctggaaaaaatccaaatgacgcaaaggaacggctggcatgggaagttacggccttaattcacggtaaagaggaagccgacaaggctttgtcgggtgcaaaagcggcttttggcagtcaggctggcggcgataaatcggcaatgccgcattcggaaatagcccactcaaaattggaagccggttacaatgtggtagaccttttctctgatacggggcttgttccaaccaagagcgaaggccgccgccttgttcaacaggggggggcttttgtttcaagtaacgatggtgaacttccgcaataa

SEQ ID NO: 23368 - protein, 293 aa, Unknown
  Obtained from environmental sample
  DOMAIN (1)...(231): tRNA synthetases class I (W and Y)
  misc_feature (1)..(293): Xaa is any amino acid
MLDYDQWDKNTESIRAQLDSFVSFDGKTAFTANNKDWLANLNYIDFLRDIGKHFSVNRMLSFEAYKMRMETGLSFIEFNYQLLQSYDFLELYRRYGCRLQIGGDDQWGNIVAGVELVRRVEGVEVFGLTFPLVTTADGKKMGKTEKGALFLDSAITSPYDFFQYWRNVQDQDILRFLLMFTFLPVDECRILCEPGKNPNDAKERLAWEVTALIHGKEEADKALSGAKAAFGSQAGGDKSAMPHSEIAHSKLEAGYNVVDLFSDTGLVPTKSEGRRLVQQGGAFVSSNDGELPQ

SEQ ID NO: 23369 - DNA, 660 bp, Unknown
  Obtained from environmental sample
  misc_feature (1)..(660): n is a, c, g, or t
ttgccagacgcggtaatattcccattgtctcaggcggcacgggtttttaccctagggaaccttgtcttgggtctgccggaagctccgccttccgatcaggcgattcgtgacgctcttaaacttgagcttcaggaaaaaggcgccgccgccctcatggaggagcttgcctgcctcgaccctgtgagcgcgggaaaaatccacctgaatgacgaataccgccttttgcgcgctctggaagtacagcgcctctgcggacggcctttaagctcgttcaacatgtcaacaggaggcggcgcctcaggatacgattttcgtatcattggcctttaccgtcccagagaagaactgtaccgccgcattaacgagcgctgcgcctccatgtttgccaaaggcctgcctgacgaggtgcagaaactgtatgatgcgggatacaccccgcgcgatcccggtttacgggcaataggctaccgtgagttttttgtggaagacccgccaacatccggagttttccgtctttcgagtgatattgacggtgttcaagcgttagtcgccatgaacagccgccgttatgccaaacgccagatcacttttttttcctcgttgcctggagcgaagtggataaatccaaatgagcaattaacaattagcaatgaacaatga

SEQ ID NO: 23370 - protein, 219 aa, Unknown
  Obtained from environmental sample
  DOMAIN (2)...(210): IPP transferase
  misc_feature (1)..(219): Xaa is any amino acid
MPDAVIFPLSQAARVFTLGNLVLGLPEAPPSDQAIRDALKLELQEKGAAALMEELACLDPVSAGKIHLNDEYRLLRALEVQRLCGRPLSSFNMSTGGGASGYDFRIIGLYRPREELYRRINERCASMFAKGLPDEVQKLYDAGYTPRDPGLRAIGYREFFVEDPPTSGVFRLSSDIDGVQALVAMNSRRYAKRQITFFSSLPGAKWINPNEQLTISNEQ

SEQ ID NO: 23371 - DNA, 360 bp, Unknown
  Obtained from environmental sample
  misc_feature (1)..(360): n is a, c, g, or t
atgaaacttgaaagggtaaagcgggtcatatcggcaggcctcggcgagctgccgcttcaggaaaagggggcgacgttcaagcccgccgggacgaagcgcgagaccaaggcgggcgaggtgccggaaaacaccggctacaccgaaagccagacgttcgcgtcgctaaagctgaagctcaacgcgacgggcaagctgggcgtcgaagagcttagcggcatgggcgaggacaccctcacgatcttcaccacgggcggcaagcagtacatgatgcccaacgcatgggtcgtggagcccggcgagctgggcgacgccgaaatggatgtcgagtacaactcggcgaccagcccgaggctggcgtag

SEQ ID NO: 23372 - protein, 119 aa, Unknown
  Obtained from environmental sample
  misc_feature (1)..(119): Xaa is any amino acid
MKLERVKRVISAGLGELPLQEKGATFKPAGTKRETKAGEVPENTGYTESQTFASLKLKLNATGKLGVEELSGMGEDTLTIFTTGGKQYMMPNAWVVEPGELGDAEMDVEYNSATSPRLA

SEQ ID NO: 23373 - DNA, 654 bp, Unknown
  Obtained from environmental sample
  misc_feature (1)..(654): n is a, c, g, or t
ttgacttttatcatagacgcaaactcgccgcacatcgtccttttgccgaggggcgaaaaccccgacctgccctgcgcgtgggccgccgcgtggtgcgcggtcgcatgccgcatacttgccgacgatcccgccgccaacacctgcgacacaaaagtaaccggcctaaccggcggacagggcttctctttttgggaaaggcaaaagctgctcgaagccggaatcgcaacctaccgcctggacacgacgggcaacgtgctcatcgagcggctggttaccagctacaccgaaaacacagacggcgggagggacaccagctacctcgacgtgcaggttccggaaaccgtggacgcggtccggacctacatcaacgccgaggcgaagaagaggttcaagacctggaagctggcaagcacggaagagaacttcggctcgggctcaaaggttatgacctgcggcgtgtggcgctcgtaccttgcggaactctacagcgaggtgttcatcaaggccaggcagtggtgccaggactttgagggctacaaaaaatccatcctggtcgagatcaaaaaagacagcaagaccaggctcgagtattcgcaccagccgaaccttataggccagttctatatcggcgccgggctgctgcagttcaaatag

SEQ ID NO: 23374 - protein, 217 aa, Unknown
  Obtained from environmental sample
  misc_feature (1)..(217): Xaa is any amino acid
MTFIIDANSPHIVLLPRGENPDLPCAWAAAWCAVACRILADDPAANTCDTKVTGLTGGQGFSFWERQKLLEAGIATYRLDTTGNVLIERLVTSYTENTDGGRDTSYLDVQVPETVDAVRTYINAEAKKRFKTWKLASTEENFGSGSKVMTCGVWRSYLAELYSEVFIKARQWCQDFEGYKKSILVEIKKDSKTRLEYSHQPNLIGQFYIGAGLLQFK

SEQ ID NO: 23375 - DNA, 837 bp, Unknown
  Obtained from environmental sample
  misc_feature (1)..(837): n is a, c, g, or t
gtggttgttttctgcgccatgggggtaaagaacgacgtggcgcgcttcttcctggatgactttgagcgatccggcgtattgtcaaatgtggtaattttcctctcgcttgcggacgccccttctcttgagcgcctgatagcccctcgctgcgctcttaccgccgccgaataccttgcctacgaaaaagacatgcatgtccttgtggtaatgacggacatgacaaactactgcgaagccctgcgggaagtttcatcaatacgtggggaagtccccagccgcaaaggctatcccggctacctttactcggatctagcttcattgtacgagcgggcgggaaaaataaagaattcatccggttccattacccaactgccgattcttaccatgcccaatgatgatattagccaccctatccccgacctttcaggctatataacagaaggccagatagtccttgaccgcgagcttttccaaaggggcatctacccgccggtcgccggcctgcccagcctttcacggcttatgaaagacggcataggccccggaatgacccgcgaggatcacaaggatgtggccagccagcttttcgccgcctattcaaaggtaaagcaggtccgcaacctcgtgtctatcatcggcgaggaagaactgtccgaaaccgacaaatgttatctaaaatacggtgaggattttgagcgtatgtttctaatccagggtgataatgaaaaccgtacgattgcccaaacgcttgatctgggctgggaggtcttaagaacgctgccccgtgacgaactgctaaggataaatcaggagttccttaaaaaatatttaccataa

SEQ ID NO: 23376 - protein, 278 aa, Unknown
  Obtained from environmental sample
  DOMAIN (189)...(278): ATP synthase alpha/beta chain, C terminal domain
  misc_feature (1)..(278): Xaa is any amino acid
MVVFCAMGVKNDVARFFLDDFERSGVLSNVVIFLSLADAPSLERLIAPRCALTAAEYLAYEKDMHVLVVMTDMTNYCEALREVSSIRGEVPSRKGYPGYLYSDLASLYERAGKIKNSSGSITQLPILTMPNDDISHPIPDLSGYITEGQIVLDRELFQRGIYPPVAGLPSLSRLMKDGIGPGMTREDHKDVASQLFAAYSKVKQVRNLVSIIGEEELSETDKCYLKYGEDFERMFLIQGDNENRTIAQTLDLGWEVLRTLPRDELLRINQEFLKKYLP

SEQ ID NO: 23377 - DNA, 777 bp, Unknown
  Obtained from environmental sample
  misc_feature (1)..(777): n is a, c, g, or t
ttgggctgcgatattcttttgacggccgagccttcatattctttggaattgaaaaaaaagggcctgcttcaccgctatttctccgatcaggccggtaatcttgcttttggctatgacagggaaggttactggtatccggtcagggcttccgtcatggttttggcgtataaccctgaaaaaaacgccagaaacgatgttccaaattctttttttgaattcgccaataattcaggctttaaagacgccgtatcaatgagcgatcctcttgtctccggaacgaccatggccgcggccgcggctcttagggataaatacggttatggttattttgaggcccttggcaaccagaatataacgattgaaccaagttcgacagccctgacaaaactggaaaccggagagtacaaagcgatcatgactctggaagaatcggttttaaagaaacagcaggaagattcatccaaactggagatcatttacccaacggacggcgccgttattattccttctacaattatgattatcgcgggcaagtggagcgccaacaacaactgcaaatcggccgaaataattaccgactggttcctgagtccctatgggcaaaaagccattgtagccggctggatgcgttcggtcaggaaagattttgaaatcgctcccaacggctcgattcctaccggccggcttcaggcaatgcctctgaattgggagaatattttccgtcagcgggaagatatacaggtcaagtttgaagaactcgcggtatacagaaaataa

SEQ ID NO: 23378 - protein, 258 aa, Unknown
  Obtained from environmental sample
  misc_feature (1)..(258): Xaa is any amino acid
MGCDILLTAEPSYSLELKKKGLLHRYFSDQAGNLAFGYDREGYWYPVRASVMVLAYNPEKNARNDVPNSFFEFANNSGFKDAVSMSDPLVSGTTMAAAAALRDKYGYGYFEALGNQNITIEPSSTALTKLETGEYKAIMTLEESVLKKQQEDSSKLEIIYPTDGAVIIPSTIMIIAGKWSANNNCKSAEIITDWFLSPYGQKAIVAGWMRSVRKDFEIAPNGSIPTGRLQAMPLNWENIFRQREDIQVKFEELAVYRK

SEQ ID NO: 23379 - DNA, 1116 bp, Unknown
  Obtained from environmental sample
  misc_feature (1)..(1116): n is a, c, g, or t
gtgcgcgacaagacaggccgcaaaatgagcaagtcgctcggcaactccatagacccgctcgaaatcatccccgtctacggcacagacgcgctgcgcttctccatggtgatgatcacggcgcaaggcgcggacgtgttcctgagtaaagacacattcgacataggccgcaacttcgccaacaaactatggaacgcgtcgcgattcttaataagcaatatcaaaaccgagaaattaacaggcgcgattccgccggtcgatagattgaaagcggaggataagtggatattatccaaattgcagcgcgtgatcggcgatatggactccgcaataagcacgtaccgcttcaacgaggcctgccacatcatctacgatttcacatggcacgagttttgcgattggtacgtagaggcgaaaaaagcggacttctaccaggaggacgacccgcagcgcaagacagactcgctgtcgctatgcggatacgtgttagcgtccatactgaaactcctccacccgataatgcccttcatcaccgaggagatctggtcgttcctgcgcgagaagatgtcgttcgacaaagtcatagacgcggagtcgataatgctcgcctcatatcccgacccgataccctcgcttgtcaacgagaaactggagagcgatttcgatctgctgaagagttgcatagtggcgctgagaaccatccgttccgagaacaacgtcccgccggacaaaacggggaccgccgtgatcatccccgccgataaagaggcggaaacgtggctgtcgtcgcaaacgccggcaatcaacctcttcgccaaattgtctgagacgactgtcggcatagacgcgaaaaaacccggattcgcgggatcgtcggttatcagaggcaatcagatattcttgagtcttgaaggattgattgacaagcaagtagagatcgaccgtttgacaaaagaggcggcgagactgaaatcgatggccgacggcgcgaaggcgcggctggaaagcgagagcttcgtttcccgcgctcctaaagaggtcgttgaaaaggagagggagaagtatcagggaatccttgtcaaccttgagaagacggagaaggcgttggcgagcctttga

SEQ ID NO: 23380 - protein, 371 aa, Unknown
  Obtained from environmental sample
  DOMAIN (92)...(251): Anticodon-binding domain
  misc_feature (1)..(371): Xaa is any amino acid
MRDKTGRKMSKSLGNSIDPLEIIPVYGTDALRFSMVMITAQGADVFLSKDTFDIGRNFANKLWNASRFLISNIKTEKLTGAIPPVDRLKAEDKWILSKLQRVIGDMDSAISTYRFNEACHIIYDFTWHEFCDWYVEAKKADFYQEDDPQRKTDSLSLCGYVLASILKLLHPIMPFITEEIWSFLREKMSFDKVIDAESIMLASYPDPIPSLVNEKLESDFDLLKSCIVALRTIRSENNVPPDKTGTAVIIPADKEAETWLSSQTPAINLFAKLSETTVGIDAKKPGFAGSSVIRGNQIFLSLEGLIDKQVEIDRLTKEAARLKSMADGAKARLESESFVSRAPKEVVEKEREKYQGILVNLEKTEKALASL

SEQ ID NO: 23381 - DNA, 759 bp, Unknown
  Obtained from environmental sample
  misc_feature (1)..(759): n is a, c, g, or t
ttgatgaaatcggaaaacctgggaacagggcatataggaggggcgatgtccatcgtggaccttttggccttgctgtattcccaccgcatgaaggttgatccgaaaaatccacgttgggaagagcgggatcaacttgttgtttccaaggggcactcgggacccgccgtttacgcgacgctcgcgctcaagggctattttcccctggattggcttaaaaccctgaacaaaggcggcaccaaactgccaagccactgcgaccgcaacaagactcccggcatcgacatgacgaccggctctctggggcaggggttttccgcggccatcggtattgccgtcggtttaagaatggataaaaaaacttctaccgtgtatacgattataggggacggcgagtccgacgaagggcaaatttgggaaggcgcgctctttgccggttttcacaaactttccaaccttatcgcttttaccgattacaacaaacagcagctcgacggcttttcaaaggatattcttgatctaggcaatcttcccgcaaagtgggccgcctttgactggttcacgcaggaagtagacgggcacgatgtcgcctcgattgacgccgcgattgaaaaagcgctggctcagaaagaaaagccgtccatgattatcatgcacacaatcaagggaaagggctgtaattttgcggaaggcgtagagaaaaatcacagcatggcctttaacatggaaaaagccaaagaagccatagcggcgttaggttaa

SEQ ID NO: 23382 - protein, 252 aa, Unknown
  Obtained from environmental sample
  DOMAIN (77)...(217): Thiamine pyrophosphate enzyme, C-terminal TPP binding domain
  misc_feature (1)..(252): Xaa is any amino acid
MMKSENLGTGHIGGAMSIVDLLALLYSHRMKVDPKNPRWEERDQLVVSKGHSGPAVYATLALKGYFPLDWLKTLNKGGTKLPSHCDRNKTPGIDMTTGSLGQGFSAAIGIAVGLRMDKKTSTVYTIIGDGESDEGQIWEGALFAGFHKLSNLIAFTDYNKQQLDGFSKDILDLGNLPAKWAAFDWFTQEVDGHDVASIDAAIEKALAQKEKPSMIIMHTIKGKGCNFAEGVEKNHSMAFNMEKAKEAIAALG

SEQ ID NO: 23383 - DNA, 672 bp, Unknown
  Obtained from environmental sample
  misc_feature (1)..(672): n is a, c, g, or t
atggacagatgctgcaagaaaaatccccagccttgtttttgtctggctttaagcgtatctgctttgtttgctcaaacctttccccgcggagccatccttgacgatgaactttacgacagccttccgcaaaaagcggttcaactttcccgttcctatacttcaattcctcaagcctattcattaaaacaatacgccccccagcccggaaatcaaaacccctacggtacttgtacagggtgggcctgcgcctacgccgcccgtactatttcagaatccattgctctaaaccggagagatgtattcttaaccaccagtaatgttttttcagctatttttgcgtataaaggttcttttacggttattaatatcaatcctaccggacatgaaggtcaggctatctcccgtgttctggactttatgaagaaagaaggggcggtaaaaaggccggactttgaaaaaactatgagtttccggttgattttactttcaaggtatgcagacagccggcgttatcctattgaaggaaatattggttataatcgtcttttttcaagtgttcggtttgatttttacgtgaggcactacggggggaagaaaaaattagaaatgatgaatagacttcctgtcacaatttgtgaccttacttgttttgttaaatcagactataattaa

SEQ ID NO: 23384 - protein, 223 aa, Unknown
  Obtained from environmental sample
  SIGNAL (1)...(24)
  misc_feature (1)..(223): Xaa is any amino acid
MDRCCKKNPQPCFCLALSVSALFAQTFPRGAILDDELYDSLPQKAVQLSRSYTSIPQAYSLKQYAPQPGNQNPYGTCTGWACAYAARTISESIALNRRDVFLTTSNVFSAIFAYKGSFTVININPTGHEGQAISRVLDFMKKEGAVKRPDFEKTMSFRLILLSRYADSRRYPIEGNIGYNRLFSSVRFDFYVRHYGGKKKLEMMNRLPVTICDLTCFVKSDYN

SEQ ID NO: 23385 - DNA, 801 bp, Unknown
  Obtained from environmental sample
  misc_feature (1)..(801): n is a, c, g, or t
ttgacagattcggccgagtcgcgtgtttccctccgatgtggatataggtggatttacgtttttatggcttattccgtggactttttactattcggtgggcgggtctttgctgtattccccgttaatgctggttcttgtccctctgctttggacgacccagacgctgggcctgtcttttttcatcgactgtataagaaaataccgccgctggtatattattatcccttcaatcccggcggccgcggccttgcccttaatcgcctcctcggtatggtgggcgttttattcccagcagactcagatagcctgcctgtttctcttcgcgaacattatccccgcgctggtttcgataatggtggaatggggcgcccaaaggagatatttaatatgaacattgatttggaacaagtccggaactattttaaaaacgaccgttttgccgcgggaagcggaattgttattgattcagccgctgaggattgtgtggtgtgcggtatggaattgcgcgcggaacacaggaatgccgccggaggcgtgcagggcggcgctattttcacgctggcggattttgcctttgccgttcactgcaatctggcgatggtttgcggcgagaatgtcaagctgacggtagggcagtcgtgcagtatttcttttttgaaatcttcaaaaggccgccggctgaccgcgacatcaacatgcgtctccaaaggccgcagtatatccgtttacataatccgcattgaggatgatctcggcgtaggaatagcggaaatgcttgcgaacggatttacaacgccgtga

SEQ ID NO: 23386 - protein, 266 aa, Unknown
  Obtained from environmental sample
  DOMAIN (176)...(256): Thioesterase superfamily
  misc_feature (1)..(266): Xaa is any amino acid
MTDSAESRVSLRCGYRWIYVFMAYSVDFLLFGGRVFAVFPVNAGSCPSALDDPDAGPVFFHRLYKKIPPLVYYYPFNPGGRGLALNRLLGMVGVLFPADSDSLPVSLREHYPRAGFDNGGMGRPKEIFNMNIDLEQVRNYFKNDRFAAGSGIVIDSAAEDCVVCGMELRAEHRNAAGGVQGGAIFTLADFAFAVHCNLAMVCGENVKLTVGQSCSISFLKSSKGRRLTATSTCVSKGRSISVYIIRIEDDLGVGIAEMLANGFTTP

SEQ ID NO: 23387 - DNA, 954 bp, Unknown
  Obtained from environmental sample
  misc_feature (1)..(954): n is a, c, g, or t
atggaatttatagaaaagactctcagtcaagttttaaaagataaaaccgccgcgcatccggatcacgatttccttgtctattcagaccgtaaccttcgctttacttacgcggaatttgataaaagggtggacgatttcgcgaagggactgctctccatcggcgtaaaaaagggcgataacgtgggtatttgggcgacaaatgtgcctgactggaacaccgtgctttttgcctgcgccagaatcggcgccgttcttgttactgtaaataccggctacaaaacccatgaactggaatacgtacttcagcaatctgacatggtttgcctgtgccttacaaacggctggcgcgattccgactatatcggaatggtaaacgatcttgtaccggaacttaaaacggcgcaaagagggcaggttaattccgccagattcccgttcttaaaatatgtcgtacatataggccagcaaaaacaccgcggcatgtatacctcaagcgaagtactactgctcggccagcacaccgattcggcgcagttacatgaaatcgaagccacgctcgataccaacgatgtcgtgaatatgcagtatacgtcgggcactacgggtttccccaagggggtaatgcttacgcacagaaacattcttaacaacgggcttggcatcggtgacaatcagcgccttacggagaaagacattgtatgcctgcccgtgcctctgttccactgtttcgggcttgtgcttggaatgatggcgatactgacccacggctccaccgtcgcgatgatagagtggttcgatccccctgctgtgcttgctacaatccagaaggaaaatgcaccgcagtttacggggtgccgacnnatgtcatcgcggagcttaccaccccatgttcaagatgttcgatctttccagcttgcgtacaggtattatggcgggttctccctgcccgattga

SEQ ID NO: 23388 - protein, 317 aa, Unknown
  Obtained from environmental sample
  DOMAIN (35)...(317): AMP-binding enzyme
  misc_feature (1)..(317): Xaa is any amino acid
MEFIEKTLSQVLKDKTAAHPDHDFLVYSDRNLRFTYAEFDKRVDDFAKGLLSIGVKKGDNVGIWATNVPDWNTVLFACARIGAVLVTVNTGYKTHELEYVLQQSDMVCLCLTNGWRDSDYIGMVNDLVPELKTAQRGQVNSARFPFLKYVVHIGQQKHRGMYTSSEVLLLGQHTDSAQLHEIEATLDTNDVVNMQYTSGTTGFPKGVMLTHRNILNNGLGIGDNQRLTEKDIVCLPVPLFHCFGLVLGMMAILTHGSTVAMIEWFDPPAVLATIQKENAPQFTGCRXMSSRSLPPHVQDVRSFQLAYRYYGGFSLPD

SEQ ID NO: 23389 - DNA, 831 bp, Unknown
  Obtained from environmental sample
  misc_feature (1)..(831): n is a, c, g, or t
ttgctacaatccagaaggaaaatgcaccgcagtttacggggtgccgacnnatgtcatcgcggagcttaccaccccatgttcaagatgttcgatctttccagcttgcgtacaggtattatggcgggttctccctgcccgattgaagcaatgcgccgggtaattgatcttatgtttatgaaggaagttactatctgttacggactgacagaatcatcgcctgttatgactcagactcgttatgatgacgatattatcgtaaaagttgaaacagtaggccgcgctctgccgggagttgaagttacaatccgcgaccccgaaacaggcgaggaatgctccgacggagtacacggagagttctgctgccggggttataacaccatgaagggatattacaaattgcctgaagctaccgctcagtgtattgatgaaaagggctggcttcattcgggcgatcgcggggttaaagacgaaaatggtaacttcaaggtaacaggccgcataaaggacatgattatacgaggcggagaaaatatttcgcccaaagaagtagaggattttttgtataccatgccaggtatcaaggatgtgcagatagtcggaattgccagcgaaaaatatggcgaagaagtaggcgcttttgttatacttcatcccgatttgaaaatgaatgtggaagatgtccgcgactattgcagagataaaataggcaggtataaaatccccaaatatgtgttttttgtcgacagttttcctcttacatccagcggaaaaatacaaaagtacctgttacgtgaaatgggaaataaaatggctaaagagcagggagtgtag

SEQ ID NO: 23390 - protein, 276 aa, Unknown
  Obtained from environmental sample
  DOMAIN (1)...(198): AMP-binding enzyme
  misc_feature (1)..(276): Xaa is any amino acid
MLQSRRKMHRSLRGADXCHRGAYHPMFKMFDLSSLRTGIMAGSPCPIEAMRRVIDLMFMKEVTICYGLTESSPVMTQTRYDDDIIVKVETVGRALPGVEVTIRDPETGEECSDGVHGEFCCRGYNTMKGYYKLPEATAQCIDEKGWLHSGDRGVKDENGNFKVTGRIKDMIIRGGENISPKEVEDFLYTMPGIKDVQIVGIASEKYGEEVGAFVILHPDLKMNVEDVRDYCRDKIGRYKIPKYVFFVDSFPLTSSGKIQKYLLREMGNKMAKEQGV

SEQ ID NO: 23391 - DNA, 387 bp, Unknown
  Obtained from environmental sample
  misc_feature (1)..(387): n is a, c, g, or t
atgaacgaaaacgcattatcatatctatccgtcccccttgacgtttcattaacaggaataccgcttttttccggctttgatgaaaatgaatataataccgtttctaatttgttaaaacttgtttatgcaaaaaaagacgatgtaattttcaaagaaggcgataaaggtgaaaacatgtttatccttttatccggttccttaagcgcgtttggcgatcaatccgatgggaatcaaaagtggttatttgacataaaacctaatgactttttcggcgaaatgtcgattattgcccatgaaccgcgatccgcgacgatatgcgcgaaggatgattccgttgtaatgatgctgaacaatgtgactttttcagaatatttccgattcccataa

SEQ ID NO: 23392 - protein, 128 aa, Unknown
  Obtained from environmental sample
  DOMAIN (40)...(128): Cyclic nucleotide-binding domain
  misc_feature (1)..(128): Xaa is any amino acid
MNENALSYLSVPLDVSLTGIPLFSGFDENEYNTVSNLLKLVYAKKDDVIFKEGDKGENMFILLSGSLSAFGDQSDGNQKWLFDIKPNDFFGEMSIIAHEPRSATICAKDDSVVMMLNNVTFSEYFRFP

SEQ ID NO: 23393 - DNA, 936 bp, Unknown
  Obtained from environmental sample
  misc_feature (1)..(936): n is a, c, g, or t
ttgccgaacgggaacgccggtatggggggaccattctggtattatcaaggtgaaaaagggtcgatgctttttgccattggccgaaaggcggaacagttttacatgcttctggaagggagtattcatgtccgtaaaccgcgggacgacggaggctttgatgatttggcgaggtacgcgccgggagatatcatcggggattttgactttgcccgcaatgcccaatacgacgccaacgcggaagcggcggaagattcggttctggctatgtttcccgcaacgggactgaccatggatgacattgtcaaagaggagcccttcattgtctcccgaattttccttaattctattataatgataacgggcagggtaaaatcatcccataagctgttgttggaaaacctgtcctgggtaaacgaactccaccgcagggcatacgaagaccccggcacggggctgtggaagcaggcattaataactgatgaaatcaatcgtatcctggaagaaccaatggccctgatcatgcttaaaccggaccggtttaaaatacttgtcgattcaaggggacacagcgcgggagatgcggctatgatcagaatagctataatactaaaaaacattacaaggcaaatcgggcatggctgggcgatgcgttttaaaagcaatgaagtcggacttattgttaataactgcgatgccgtacaggcggaagaaattgcccatgaattgtatgaatttgttaacgatatggactccgttccccctgaaggtgatattcccgaatttagtttttccgcgacaatatcatgggcaatctggccaactgacggcgctgattgggaaacgttttttagcggaaattacagctctcttttggacaactggaaagacggcggcgacagggtagtacattatacgggaggggcggcgcaaacatga

SEQ ID NO: 23394 - protein, 311 aa, Unknown
  Obtained from environmental sample
  DOMAIN (140)...(300): GGDEF domain
  misc_feature (1)..(311): Xaa is any amino acid
MPNGNAGMGGPFWYYQGEKGSMLFAIGRKAEQFYMLLEGSIHVRKPRDDGGFDDLARYAPGDIIGDFDFARNAQYDANAEAAEDSVLAMFPATGLTMDDIVKEEPFIVSRIFLNSIIMITGRVKSSHKLLLENLSWVNELHRRAYEDPGTGLWKQALITDEINRILEEPMALIMLKPDRFKILVDSRGHSAGDAAMIRIAIILKNITRQIGHGWAMRFKSNEVGLIVNNCDAVQAEEIAHELYEFVNDMDSVPPEGDIPEFSFSATISWAIWPTDGADWETFFSGNYSSLLDNWKDGGDRVVHYTGGAAQT

SEQ ID NO: 23395 - DNA, 1050 bp, Unknown
  Obtained from environmental sample
  misc_feature (1)..(1050): n is a, c, g, or t
atgaaaaagcctttgatgcgaagcattattatagtcgtgatggctgctgtattgcttgaacttgcgtggttattgcgcagcgccctctatccgtttatcgccgcgcttgtgatagcctatctcttggatcccatagtcctgtttttccagcgaaccctgaaaataaagcgtctgcccgctctccttatggtttttgctctctttctcctgatttttgctcttataattgctttggttttcccgctgcttatcaatggagtgttctcgatcactcaaatactcagtacagacaaggaatcggtagatgagtcgataaatgaggttatccaggatattattgttcattttaagaagatacatctgcccattgatcacgagaaaatcgtaatggggttgtattccgagacaagagactttttcagtcagctttttgacggcattgccacattcgcgctctccgtaattgagagcgttccgctcatgatcattatcccgctgatcgttttttatctcctgaaagacaagattgcgatttttgtgtctctgaagcgcttcttcagcaaagaaagcgaagccaccgtgcgcgctctcttcgaaagtgtaaactggagactgggcggctatatcaaggggcagttcctcatcagcctgctggtaactgttgttacctatatcgccctgttgatctttggtataccctacgcgcttttgattgccatcgccaacggggtattgaatgtcattccctattttgggcctgtcatcggcgcgattccgccggttgttttcgcgcttgtcacttttacatccccggggtatttcctcgcggttctgattttctttgtcgtgatgaacgtccttgtcaccatgctcgcgtcccccaagatcttcgcgaaaaccacaaatctccatcccgttatggtgctttttgcgctctatatcggcgccgcgattatgggtatgctgggcgtgctcctcgccgtgccgtgcgcgttagtctttcaaaccctgttccgcatcatttttgacaaatatatctgggagatctag

SEQ ID NO: 23396 - protein, 349 aa, Unknown
  Obtained from environmental sample
  SIGNAL (1)...(22)
  DOMAIN (5)...(342): Domain of unknown function DUF20
  misc_feature (1)..(349): Xaa is any amino acid
MKKPLMRSIIIVVMAAVLLELAWLLRSALYPFIAALVIAYLLDPIVLFFQRTLKIKRLPALLMVFALFLLIFALIIALVFPLLINGVFSITQILSTDKESVDESINEVIQDIIVHFKKIHLPIDHEKIVMGLYSETRDFFSQLFDGIATFALSVIESVPLMIIIPLIVFYLLKDKIAIFVSLKRFFSKESEATVRALFESVNWRLGGYIKGQFLISLLVTVVTYIALLIFGIPYALLIAIANGVLNVIPYFGPVIGAIPPVVFALVTFTSPGYFLAVLIFFVVMNVLVTMLASPKIFAKTTNLHPVMVLFALYIGAAIMGMLGVLLAVPCALVFQTLFRIIFDKYIWEI

SEQ ID NO: 23397 - DNA, 831 bp, Unknown
  Obtained from environmental sample
  misc_feature (1)..(831): n is a, c, g, or t
ttgaaaaacggggaaaatgtgcgccggtttatccgggaaaaagggccgattaaggccgtactgtccataggcggttggggtgcgggcggtttttcgccggcagtagccacggaggaacgcagggaggtttttgcccagtccctggcggatattgtaaataattacgggtttgacggcgcagacatggactgggaatacccctgcgacggctctgcgggcatagagttttcacctgatgacaaaccgaactttaccgcactggtggctctgctgcgggaaaaactgggaaaagataaaatcgtctccatggcggcaggcgcgagcgaaagctgtgtccgtagcctggaaattgacaagctcgttcccctgatggatctgttcaacattatgacctacgacatggcgaaatggtcggtgtcaagccaccataccagtctttatgaatccgatattagccattccatgtatggggacaaggcgatcaagttataccgggaggcaggggtgcctcgggagaaaattaccctgggctctgctttttacgcgcggattttccataacgtggacggcataaattgtgcagctaacggagaagcgccgggattttccggcgggtatcccgacactatggcgaaagtaaatgcggcgggtgggcttttatatgacgaaaaagccgaagcgccatatgcgtacaacgcgaaggaaagaacctttattacctttgataatgagcgttcccttaaggccaagcgcaaatatgttaaaaccgaagggctggcagggatcatgttttgggagtattcctgcgatgatagccagagtacttgctaa

SEQ ID NO: 23398 - protein, 276 aa, Unknown
  Obtained from environmental sample
  DOMAIN (4)...(270): Glycosyl hydrolases family 18
  misc_feature (1)..(276): Xaa is any amino acid
MKNGENVRRFIREKGPIKAVLSIGGWGAGGFSPAVATEERREVFAQSLADIVNNYGFDGADMDWEYPCDGSAGIEFSPDDKPNFTALVALLREKLGKDKIVSMAAGASESCVRSLEIDKLVPLMDLFNIMTYDMAKWSVSSHHTSLYESDISHSMYGDKAIKLYREAGVPREKITLGSAFYARIFHNVDGINCAANGEAPGFSGGYPDTMAKVNAAGGLLYDEKAEAPYAYNAKERTFITFDNERSLKAKRKYVKTEGLAGIMFWEYSCDDSQSTC

SEQ ID NO: 23399 - DNA, 759 bp, Unknown
  Obtained from environmental sample
  misc_feature (1)..(759): n is a, c, g, or t
gtgaatataggctttgaaaacgcctccggggagtttatcgccaccctgaacaacgacatggtcgtggaaccgtcgtggttagatcaaccgatggctttgctcaaagaccggtcggtcgggatagtcagttgcagacagatgaactattatgaccgctctaaggtcgacgggctttatcactatgtaacgaaagtgcttgatttgacgccttttgcgagcgggtgtttgtatcacgaagatgatctcttctcaatgcccgggtatgttataagcgccaacggcggttcggcggttataagggcggaagttttcagggctttgggcggatacgacgcggatttcttcggttatatggaggagacggatttctgtatgcgggcttttttgcgcgggtggcgctgcgtgtacgcgccgtccgccgtcgtgtaccacatggacgggttcagttttaagaaaaacagcgcgtataggtattatctttgccagagaaaccgcgtgtggtttttgtataagaatattccggcggcgaatattttttggcggttgctatatctgttcgttatggaattgcgcgttatcagggtttttacgataaaaatcaaaaagccttttttatactttaaagcaagatttgacgcgtttgccggattgaggcggtatcgcaaaattcgtaaggaaaatacggcgttgtttaaggctcaaagagatatgtttcggcgctttgaaaagtataaaaaactgaatttggacgcttcctga

SEQ ID NO: 23400 - protein, 252 aa, Unknown
  Obtained from environmental sample
  misc_feature (1)..(252): Xaa is any amino acid
MNIGFENASGEFIATLNNDMVVEPSWLDQPMALLKDRSVGIVSCRQMNYYDRSKVDGLYHYVTKVLDLTPFASGCLYHEDDLFSMPGYVISANGGSAVIRAEVFRALGGYDADFFGYMEETDFCMRAFLRGWRCVYAPSAVVYHMDGFSFKKNSAYRYYLCQRNRVWFLYKNIPAANIFWRLLYLFVMELRVIRVFTIKIKKPFLYFKARFDAFAGLRRYRKIRKENTALFKAQRDMFRRFEKYKKLNLDAS

SEQ ID NO: 23401 - DNA, 1131 bp, Unknown
  Obtained from environmental sample
  misc_feature (1)..(1131): n is a, c, g, or t
atgacaaaacaacccaagcccaataccaatttcacctacgcaaaatggcaaaaagccggagggccccctgaaatacagcggcaggatcgcctgacaagcgctctatattccggcctggcgtcccaggcggggattattgtcatcgcgcttatcgccctcttggttcttgtgttattggcctgcatactcagcaaaacaccgacaaggacattgttctttttctttataggcccgttccgtaatgtctacaatttcggcaatatgctgaacagcgctgtccccctgatcttaggagggcttggcgtcagcatcgcgatgcaaacaggcagcctgaacctgggcggagaaggacagatatattcgggtgcttttatcgcgacaatcgccgctttgccgctggcgtttttaggtttttcaggcggccttataagtatacttgccggggcgtttttcgccggggcattggcggctctgtcaggctttttcaaggcgcgctggaacacaaacgagcttatcacctcattccttttatcaaatgccatgatacttattgttaattaccttgttaccggccccttccatgatcctgaaacaaatttgcagtcaacaaaaaaaatcgccgcaaacctgagactgccactgcttctgcctccatcgaatttaaacatggcgcttgtgattgcgattgccgccgtcgccatcgtgtatatttttcttaaaaaaaccagactgggatatgaattcaggatcagcggaaacaacgaggtttttgcacgttatggcggaatcaatacacagttgaatacggtgctggcgatgtttttaagcggcgcgctgtacggccttgccggagggctttgcgtctttggctcttattaccagacggtgaaggaattttcagtggggcttggctggaacggccttgcggcggcgcttgtcgcgggctttaatcctgtggctgtaataccggcgagccttttcttcgcgtggatttcctcgggcgcgagaatcgccatgcagaattcggatgttacctttgaaatcgcctccattgtccagtcggtaattttctttcttgctaccagcatggttctgagaaacctgttcagtaaaaaggagaaacgacagtga

SEQ ID NO: 23402 - protein, 376 aa, Unknown
  Obtained from environmental sample
  DOMAIN (84)...(361): Branched-chain amino acid transport system / permease component
  misc_feature (1)..(376): Xaa is any amino acid
MTKQPKPNTNFTYAKWQKAGGPPEIQRQDRLTSALYSGLASQAGIIVIALIALLVLVLLACILSKTPTRTLFFFFIGPFRNVYNFGNMLNSAVPLILGGLGVSIAMQTGSLNLGGEGQIYSGAFIATIAALPLAFLGFSGGLISILAGAFFAGALAALSGFFKARWNTNELITSFLLSNAMILIVNYLVTGPFHDPETNLQSTKKIAANLRLPLLLPPSNLNMALVIAIAAVAIVYIFLKKTRLGYEFRISGNNEVFARYGGINTQLNTVLAMFLSGALYGLAGGLCVFGSYYQTVKEFSVGLGWNGLAAALVAGFNPVAVIPASLFFAWISSGARIAMQNSDVTFEIASIVQSVIFFLATSMVLRNLFSKKEKRQ

SEQ ID NO: 23403 - DNA, 654 bp, Unknown
  Obtained from environmental sample
  misc_feature (1)..(654): n is a, c, g, or t
ttgttgtatcttactttgctatctgctctctgctatttgctatttgttatatgggggcagaaaatggaaaaacaaacaggggcgatggatttttcagacttggaaaaagttatcgtatcggtcaaagggcagaatgttatcattgacagcgacgtggcgagtatctacggtgttttaacgaaagaggtaaatcaagccgtaaagaacaatcctgataagtttccccacggttacattattgaagctgacagggacgaactggtcaaaatatttgaccggttcaaaaacttgaaacactcttcaattcaaccaaaggcatttaccgaaaaaggcttatatatgcttgcaactatcctgaaaagcccgcaagcaacagcggcgactattgcaattattgaggcttttgcgaaattacgtgaattgtcgcatataatcgcaaagctggcagacgctaaagaaaagccggaacaacaatctcttatgcaaagaagcggagaaattttctctgaattgatagcctccgatatgcctgtatcgggaacagaaacgacctttgagataaattttgctgtaatgaaattcaagcacaccataaaaaaagagcaagcgccaacaaagttggcgagagcagggagcaatgagccaattcaatga

SEQ ID NO: 23404 - protein, 217 aa, Unknown
  Obtained from environmental sample
  misc_feature (1)..(217): Xaa is any amino acid
MLYLTLLSALCYLLFVIWGQKMEKQTGAMDFSDLEKVIVSVKGQNVIIDSDVASIYGVLTKEVNQAVKNNPDKFPHGYIIEADRDELVKIFDRFKNLKHSSIQPKAFTEKGLYMLATILKSPQATAATIAIIEAFAKLRELSHIIAKLADAKEKPEQQSLMQRSGEIFSELIASDMPVSGTETTFEINFAVMKFKHTIKKEQAPTKLARAGSNEPIQ

SEQ ID NO: 23405 - DNA, 1041 bp, Unknown
  Obtained from environmental sample
  misc_feature (1)..(1041): n is a, c, g, or t
atggagaaaaaaagcgcaaacgcgggtatcgcacaccccgacccccttcccgaagaagacgccaacgatataagcctgcgcccccggatgctttccgaatttctggggcagcagacaatgaaggacaatctttcggtttttatttccgcggcgaaggggcgcaaggaaaaccttgaccatctttttttgattggcccgccggggctgggaaaaaccacgctggcgcaaattgtcgcaaacgaacttgaaaccggctttgtgcagacttccgcgcccgcgctggacaaacccaaagacctggtggggctgcttaccaacctgaaaaaaaacgacgtattttttatcgacgaaattcaccggcttaagcccgccattgaagagctgctctatatcgccatggaagactacggccttgactggatcgtggggcaggggccgatggcgcggactctccgtatacccattcagccgtttacgctggttggggcgaccaccaaggcgggaattgtgtcgggtcccctgataagccgtttcggcatcacctgccgtttttcattttaccaacaggaggacatggaagcgattgtgcgccgttccgcanaactcctcaacgtaaaagttgaagcggactccgccgcgctgttggcaaagtcctcaaggggcacgccccgtgtggttaaccgtctgctcaggcgcatgagggattatgcccagcacgcgggcagtaccggtattacgttaaccgttgttaaagaggggttaacaaaacttgagattgacgcgctggggcttgaaaagcaggatagggacatattaaaaatcatcatcgaacgctatcagggcgggccggttggcgctgaaaccctcgccatttccataggcgagtccgtggagaccctggaggattattacgagccctacctcatacaaagcggcctgttacagcgcaccccccgcggaaggatggtgacatcccttgcctacggccacctgggtcttacgccggttaattcaggtagcggagaggtttcgctgttttaa

SEQ ID NO: 23406 - protein, 346 aa, Unknown
  Obtained from environmental sample
  DOMAIN (60)...(186): ATPase family associated with various cellular activities (AAA)
  misc_feature (1)..(346): Xaa is any amino acid
MEKKSANAGIAHPDPLPEEDANDISLRPRMLSEFLGQQTMKDNLSVFISAAKGRKENLDHLFLIGPPGLGKTTLAQIVANELETGFVQTSAPALDKPKDLVGLLTNLKKNDVFFIDEIHRLKPAIEELLYIAMEDYGLDWIVGQGPMARTLRIPIQPFTLVGATTKAGIVSGPLISRFGITCRFSFYQQEDMEAIVRRSAXLLNVKVEADSAALLAKSSRGTPRVVNRLLRRMRDYAQHAGSTGITLTVVKEGLTKLEIDALGLEKQDRDILKIIIERYQGGPVGAETLAISIGESVETLEDYYEPYLIQSGLLQRTPRGRMVTSLAYGHLGLTPVNSGSGEVSLF

SEQ ID NO: 23407 - DNA, 306 bp, Unknown
  Obtained from environmental sample
  misc_feature (1)..(306): n is a, c, g, or t
atgaagaccagtgatttttactttgagctttctgaagggcttatagcccagcacccgcctgaaaaacgggggcagagcaggcttatgcttcttgaccgccagaaaggtaaatgttcgcaccgcatggtggaggaactgccggagattttgtgcggcccggaattccgtggcaaagacgggggattgcccctgctggtattcaataattcaaaagtccgcaaaacccgtcttgtangcgtatcgcgggagacaggggcgaaagccgagtttttgctagtagaacaaataattancatgagccattag

SEQ ID NO: 23408 - protein, 101 aa, Unknown
  Obtained from environmental sample
  misc_feature (1)..(101): Xaa is any amino acid
MKTSDFYFELSEGLIAQHPPEKRGQSRLMLLDRQKGKCSHRMVEELPEILCGPEFRGKDGGLPLLVFNNSKVRKTRLVXVSRETGAKAEFLLVEQIIXMSH

SEQ ID NO: 23409 - DNA, 1533 bp, Unknown
  Obtained from environmental sample
  misc_feature (1)..(1533): n is a, c, g, or t
ttggcacgaggaatctgtacgcttcttgtaaccatgccagggcttccgatgttcggccacggccaaatcgaaggctttgaagaaaagtacggcatggagtaccgccgctcttacagggacgaaacgccggattggaaccttgtaaaccgccacgaatgggaaatattccccctgatgaaaaagcggcacatcttttccggcagcgcgaatttttgcctttatgatttttttgatccgaatgggcatgtaaatgaaaatgtctttgcctattccaacagcgccggtgaagaacgggctctgattttctacaacaactgctattatcaaacgtcaggctggatacgcaggggcgcggtggcaattccccaaaagaacggtacattcaggcaggattttctttctgaagctctcggcctgcacgaagaaagcaggtttttctcaatctttagggaacagcgcagcaatctctggtatgtaagatcatcaaaggacatagccgagcgcgggctttttgccgcccttaacggctacgagactcaggtctttctggatttccaggagaaggaagacgctgatggagcccagcctggtatctgggaaagcagatgggctttactgaaccacgagcttaatggccggggagtcagaagccttgacgaagccttgctggatattttcctgaaagatatttactcccccgtcagggaaatactttcaaaaagccgttttgaaacgcttgtaaaaatttttagcgcanagccaaaaaagtcccaggacgcgggtcttgattttatcgaatctttcagagagccggtaaaaaacttcgaggcggcggcaaaaaaatatatggacggagcggacggaatattcgagccgtgggggaaaagcggattgaaatccggcgaaaaaaaatcaggcggaaaaacaaagcggaaggttaattcaaacaaagatgcctttaatgaatggtccttgttctttgaaaaccttctggctcttagtaaaaaccagaccggaaaagaaaataaatttgcgcggggattgaaaaagaaaattgcaggacagccaagcctgcttcttatggcctttggctacaaaactctgtccctgttgaggtcaacagtggaggacaattcgggtaaggcggcggcttctttggcgcttcattggcagcttgaccgcatccttgcggattgctgggagagcatcggcgttccttccgcagaagcccggcgggcggcggagattgccatagcgcttctggcccgcacgggctcgtccattcccgaatcatacagaaaggcaaaaccgccatccgctgtagccgctgcgctgatcctggaaaattacgatgaaggcgatttcagaaaaatcctggcagtaaaccgctttgaaggcataacatggtttaacaaggaagcctttgaagaagccttgcttttagtctctttcttcctttatctggaaacgcccgaagctttcggcaaagagtcagaaagccccgacgtaaggcaagaacgcacgaaacaatag

SEQ ID NO: 23410 - protein, 510 aa, Unknown
  Obtained from environmental sample
  misc_feature (1)..(510): Xaa is any amino acid
MARGICTLLVTMPGLPMFGHGQIEGFEEKYGMEYRRSYRDETPDWNLVNRHEWEIFPLMKKRHIFSGSANFCLYDFFDPNGHVNENVFAYSNSAGEERALIFYNNCYYQTSGWIRRGAVAIPQKNGTFRQDFLSEALGLHEESRFFSIFREQRSNLWYVRSSKDIAERGLFAALNGYETQVFLDFQEKEDADGAQPGIWESRWALLNHELNGRGVRSLDEALLDIFLKDIYSPVREILSKSRFETLVKIFSAXPKKSQDAGLDFIESFREPVKNFEAAAKKYMDGADGIFEPWGKSGLKSGEKKSGGKTKRKVNSNKDAFNEWSLFFENLLALSKNQTGKENKFARGLKKKIAGQPSLLLMAFGYKTLSLLRSTVEDNSGKAAASLALHWQLDRILADCWESIGVPSAEARRAAEIAIALLARTGSSIPESYRKAKPPSAVAAALILENYDEGDFRKILAVNRFEGITWFNKEAFEEALLLVSFFLYLETPEAFGKESESPDVRQERTKQ

SEQ ID NO: 23411 - DNA, 1245 bp, Unknown
  Obtained from environmental sample
  misc_feature (1)..(1245): n is a, c, g, or t
gtgattatcgccgatactacggaagaacttttgcatcccgacgtgctgcaggctgtggataatctttccgcttacctgaccgcgaatgttccggacgtgggcaaagttgtcggctttacggatattatcaagcgtatcaatcaggtgttcaacgtcggcgaaagccctgagggactgcaaaacactatgtcgcataacgcaggtgatggttttggttttagtgataacgcctccggagattttggttttggtaattttgattctgatgacactcattatattgaaacccagcggcaggaaaacggctttcaagaaagcggttttaatataacccaatacaacacggcggatattttacggtttttggacagcgcggcgggaaaatcgccccatctgagcggcagtgaattagtgcgggaactgaaacgccttactaattatgacggcatggcttattatgagattccctcaaatccccggcgctatggaaaagaaacgccggaggaacttcagcggctgattgcaaattatctcgttctgctttccggcgatgacgattccgggtattccaatgacccgcttgaacccacggcgatcaggacaatggtgcaaatgcgcacgacgggaagcagggattcccaggctgttattgacacgataaatgaatttattgccgtaaactttcccaaaaacgtggaggttataatcggcggtggcgtaacctatgaaatggcggttaccgatctgatttttaactctcaaatcatatcaatttttatttccgtgcttattgtgtttcttattatcgcgatttccaacaaatcgctgattgccggagtcataggcgccgttccgttaacattggcgatcctgtgcaactttgcggtgatgggttttcttggaatcaagttaagcctgggaaccgcccttatttcaagcctggcggtcgacattggtattgactataccattcattttattgaattctttaagcatgagtatcagacaggaaacccggggttccttcgcctgacatttattggctgcggaaaagccattttgattaacgctctggctgtgggagcgggattcggagtgcttgcgttttcacagtttaaaatcattgcggagcttggcttgcttatcgctttaagtatgctgataaccgcttttgtcagtcttaccgtgataccggctctgcttatggtacttaaaccgaaatttatttatggggtgagtaaatga

SEQ ID NO: 23412 - protein, 414 aa, Unknown
  Obtained from environmental sample
  misc_feature (1)..(414): Xaa is any amino acid
MIIADTTEELLHPDVLQAVDNLSAYLTANVPDVGKVVGFTDIIKRINQVFNVGESPEGLQNTMSHNAGDGFGFSDNASGDFGFGNFDSDDTHYIETQRQENGFQESGFNITQYNTADILRFLDSAAGKSPHLSGSELVRELKRLTNYDGMAYYEIPSNPRRYGKETPEELQRLIANYLVLLSGDDDSGYSNDPLEPTAIRTMVQMRTTGSRDSQAVIDTINEFIAVNFPKNVEVIIGGGVTYEMAVTDLIFNSQIISIFISVLIVFLIIAISNKSLIAGVIGAVPLTLAILCNFAVMGFLGIKLSLGTALISSLAVDIGIDYTIHFIEFFKHEYQTGNPGFLRLTFIGCGKAILINALAVGAGFGVLAFSQFKIIAELGLLIALSMLITAFVSLTVIPALLMVLKPKFIYGVSK

SEQ ID NO: 23413 - DNA, 831 bp, Unknown
  Obtained from environmental sample
  misc_feature (1)..(831): n is a, c, g, or t
ttgctcaagcaaaagtgtgatggggatatagtgcctaaatttacaataggtcaaaaatggacgagcaaaacggagccggaattgggtgtggggcaagttattaaaacggattttaggactgtaactttgctttttattgtttctggcgaactgaggatttacaattccaaagatgagccgccgctaaaccgttatattttaaaaataggggaaaaagccacttcaattaaaggcgtatctctttttgttgaaaaaattacggaagaaaatgggcttttatattacagaagtaaggataaggtgatttctgaagatactcttggatttaagcaacaaggcgaagatagttctgcggaaattttagataaattgcttgctaaaaatttttccagcaattttgatttttgtttaaaggaacaagccgcaaagctacgtggaacatgggagtcgtcattagttaaagggatgcttggtccaaagctgagaatgttgccgcatcagctttatttgggttttagagcgacgagagatgtttctctgccaagactgatgctctccgatgaggttgggcttggcaaaactatagaaagcggtttgatttggaatattcttcaaaccgagggtaaaataaaaagaactttgataattgtcccagagcatttgaaaaatcaatggataattgaatttgggaaaaaatttaatcattggttttcaaacatagatgaagattatatttatgagtatagaagaaatgtttcggatttgcagaatgtgtttttgctccacgacactattttatgctcgctggaatttgctgcgaatccgcgataa

SEQ ID NO: 23414 - protein, 276 aa, Unknown
  Obtained from environmental sample
  misc_feature (1)..(276): Xaa is any amino acid
MLKQKCDGDIVPKFTIGQKWTSKTEPELGVGQVIKTDFRTVTLLFIVSGELRIYNSKDEPPLNRYILKIGEKATSIKGVSLFVEKITEENGLLYYRSKDKVISEDTLGFKQQGEDSSAEILDKLLAKNFSSNFDFCLKEQAAKLRGTWESSLVKGMLGPKLRMLPHQLYLGFRATRDVSLPRLMLSDEVGLGKTIESGLIWNILQTEGKIKRTLIIVPEHLKNQWIIEFGKKFNHWFSNIDEDYIYEYRRNVSDLQNVFLLHDTILCSLEFAANPR

SEQ ID NO: 23415 - DNA, 393 bp, Unknown
  Obtained from environmental sample
  misc_feature (1)..(393): n is a, c, g, or t
ttggcggaaaaaatcgcggcctatgtctcggcttcttacgcaatcgtggttgatgagtcaaaaaccgtcgagcgcctgggtgtaaattgttctgtgccggtagaggtagtcggcgaggcgagggtaagcgtaacgctggcccttgaaagtttgggcgcggaggtaacgctcaggcaggccctgcgcaaagccgggccggtcgtcaccgaccatggcaaccttcttttggacatacgcttcgccaaggcccccgatccggttcttatggaaagggaaatcaaccgtatccccggcgtggtcgaaaacggtttcttcaccggcccgctcgacaggcccctgcgcccggttgtttttattgcccatgcggacggtagggtcgagaagcgggtttag

SEQ ID NO: 23416 - protein, 130 aa, Unknown
  Obtained from environmental sample
  DOMAIN (1)...(126): Ribose 5-phosphate isomerase A (phosphoriboisomerase A)
  misc_feature (1)..(130): Xaa is any amino acid
MAEKIAAYVSASYAIVVDESKTVERLGVNCSVPVEVVGEARVSVTLALESLGAEVTLRQALRKAGPVVTDHGNLLLDIRFAKAPDPVLMEREINRIPGVVENGFFTGPLDRPLRPVVFIAHADGRVEKRV

SEQ ID NO: 23417 - DNA, 642 bp, Unknown
  Obtained from environmental sample
  misc_feature (1)..(642): n is a, c, g, or t
gtgcccagcgcggctccggcgaccgttccgacagcgtcagcaagcagggcctcttttactttggggatttttccgttcttgtctatcaaacccgcctgggtagttacacctaccagggttcccacggtgtcaaaaatatcaacaaacagaaaggtaaaaaagacgataaaaaatttaaaggtaagtatggattcgagtttgaaatcaaaggcaaagagcaggggcgcgtcgggtgtgcctaccggtgaccagccctggggaattttggttacaccaaagggaattcctattaccgtggtgattatgatgcccaaaagaatcgaaccgggaactttgagtgtaaacagaacaaacatgatgataagacccagcaacgccagcaaaggctcgcccgatgttacatttcccaatccaattaccgtaccggtgtcaccgacaacaatacccgcattggcaaagccgatcagggcgataaaaagaccgatacccaccgccaccgcttttctcaagttcaccggaattgcgttgataatcgcctcgcgtattttgaacaaagacagaatgatgaataaaataccttcaaaaaaaaccgcggtcagggcgagctgccatgagtaccccattcccaatacacctgtataa

SEQ ID NO: 23418 - protein, 213 aa, Unknown
  Obtained from environmental sample
  misc_feature (1)..(213): Xaa is any amino acid
MPSAAPATVPTASASRASFTLGIFPFLSIKPAWVVTPTRVPTVSKISTNRKVKKTIKNLKVSMDSSLKSKAKSRGASGVPTGDQPWGILVTPKGIPITVVIMMPKRIEPGTLSVNRTNMMIRPSNASKGSPDVTFPNPITVPVSPTTIPALAKPIRAIKRPIPTATAFLKFTGIALIIASRILNKDRMMNKIPSKKTAVRASCHEYPIPNTPV

SEQ ID NO: 23419 - DNA, 1056 bp, Unknown
  Obtained from environmental sample
  misc_feature (1)..(1056): n is a, c, g, or t
gtggcggtgaatgatcttgccgcggccatgaattacgtcaacgctaaacccggccgctatattctcgcgatcaacgcggatataggcgccggggcgcagggttttcccgcacagcaagccgccctgcggatccttggcttgggcaaaacgcgcgccatcgcctatacgggcggcggaaacggcactctgttttcaccgcgcgcaaacagcgggacgctcaccattggaaccaatatcgttttgaataatctcgccgccatgcaggatatacgcgcgggcgcctttatgatgggcagcccgatctcggagagaagccttgggcggaaggaagatgaactgcagcatagggtgcagatcaccaaaaacttttccattgggaaatatccggttacgcaggagttgtaccgctttgttatgggcgaaaatccaagccgttttcagcagtctgccccccagggagagcgggcggaacggcgtccggtggatacggtgtgtttttatgacgcgctggttttttgcaacaggctcagccgtcttgagggtctcactcccgtatatagtataagcgggaacgcggatccgtccggctggggaaaaatacccgcgaattataacgatacatggaacgctgtcgccatggatatatgggcaaacggataccggctgcccaccgaagcggaatgggagtatgcctgccgcgcgggaacgacgaccgcgtataacaccggggctggcgtcagtgataccaccggatggtacgcggccaacagcaaaaacacaacacatgaaacagggttaaaaagcgcgaatgtctggggtttgtatgatacgcacgggaatgtctatgagtggtgctgggactggtgggcgccctttgcggataaagatgaaatggatcccacaggcccgtcgtcttcgcctataaaacggcgggtgatgcgcagcggttcgtggggcaatgcgtccgcgcgtattcgttcggcatatagggattacggcgatccataccataagtgttacgccgacggcttccgccttgtgcggagcgcgcagtaa

SEQ ID NO: 23420 - protein, 351 aa, Unknown
  Obtained from environmental sample
  DOMAIN (83)...(348): Domain of unknown function (DUF323)
  misc_feature (1)..(351): Xaa is any amino acid
MAVNDLAAAMNYVNAKPGRYILAINADIGAGAQGFPAQQAALRILGLGKTRAIAYTGGGNGTLFSPRANSGTLTIGTNIVLNNLAAMQDIRAGAFMMGSPISERSLGRKEDELQHRVQITKNFSIGKYPVTQELYRFVMGENPSRFQQSAPQGERAERRPVDTVCFYDALVFCNRLSRLEGLTPVYSISGNADPSGWGKIPANYNDTWNAVAMDIWANGYRLPTEAEWEYACRAGTTTAYNTGAGVSDTTGWYAANSKNTTHETGLKSANVWGLYDTHGNVYEWCWDWWAPFADKDEMDPTGPSSSPIKRRVMRSGSWGNASARIRSAYRDYGDPYHKCYADGFRLVRSAQ

SEQ ID NO: 23421 - DNA, 444 bp, Unknown
  Obtained from environmental sample
  misc_feature (1)..(444): n is a, c, g, or t
atgaaccagaatattattgaaagagcgaaagattatatttctaaggaaaaagacgcgtcctttaaacaggaagtggaaaaacttctgaatgacggcggggaagccgcgcaaaaagagcttgaagaccgtttttatcaaaatctggaattcggtaccggcggtcttcgcggagtaatcggcggcggctacaaccgcatgaataccctcgtggtaaaaagtgccactcaggggcttgcgacatatcttataaaaacatttccccaaaaagccgcanaaagcggcgaattaaaagcggtaatcgcctttgacagccgccattattcggcggaattttcggaagcctgcgctttaattttcgctgctaacggcataaagacatatctcttttcatctctgcgtcccacgcccggaattatccttcgccattcgccatcttggctgtga

SEQ ID NO: 23422 - protein, 147 aa, Unknown
  Obtained from environmental sample
  DOMAIN (47)...(145): Phosphoglucomutase/phosphomannomutase, alpha/beta/alpha domain I
  misc_feature (1)..(147): Xaa is any amino acid
MNQNIIERAKDYISKEKDASFKQEVEKLLNDGGEAAQKELEDRFYQNLEFGTGGLRGVIGGGYNRMNTLVVKSATQGLATYLIKTFPQKAAXSGELKAVIAFDSRHYSAEFSEACALIFAANGIKTYLFSSLRPTPGIILRHSPSWL

SEQ ID NO: 23423 - DNA, 384 bp, Unknown
  Obtained from environmental sample
  misc_feature (1)..(384): n is a, c, g, or t
gtgtctgtatcattatttgggcggtctttgcttacacttttggatttttccccggaggaaattcagtatctattgaagatttccatgcaagttaaaacagaggcaaaaaagggaaagaaattcaggcgttttgaaggtaaaactcttgccatgctttttgaaaaacgctccacccgcacaagatgcgcttttgagaccgctttcggcgaagaaggcggacacccggtattcctttccaccgcggatattcatcttggcgtaaaagaagagctaaaagacactgcccgcgtattcggcaggatgttcagcgcaatccagttccggggttttaaacaggaaactgtgaaacgctggcggaatttcgggaatccctcggccatctga

SEQ ID NO: 23424 - protein, 127 aa, Unknown
  Obtained from environmental sample
  DOMAIN (8)...(123): Aspartate/ornithine carbamoyltransferase, carbamoyl-P binding domain
  misc_feature (1)..(127): Xaa is any amino acid
MSVSLFGRSLLTLLDFSPEEIQYLLKISMQVKTEAKKGKKFRRFEGKTLAMLFEKRSTRTRCAFETAFGEEGGHPVFLSTADIHLGVKEELKDTARVFGRMFSAIQFRGFKQETVKRWRNFGNPSAI

SEQ ID NO: 23425 - DNA, 687 bp, Unknown
  Obtained from environmental sample
  misc_feature (1)..(687): n is a, c, g, or t
atgccggtaaaaaaaacaaaaacaaaagcaaaagcaaaacccgcggtaaaatcgaaagccgcggctaaaacttcggcaaaggcaaaacctgccgcaaagtctgttgccaagcctgccgcaaaaccttcatcatctaaagttcccgtttatgacgaatcaaaaattaaaactttgtcctcgctcgagcacatcaggctgcggacgggaatgtatatagggcggcttggagacggttccaatcccgatgacggcatttacgttttattaaaagaagtaattgacaacggcgttgatgaattcatcatgggcaacggaaaaaacattgaggtttcgataaaggacatcgcgaaagccggcggggcgaccgtaaaagtgcgcgacttcgggcgcggaatcccgcttggaaaacttgtcgagtgtgtttccgtaattaatacaggcgcgaaatacaacgacgacgtgtttcagttttcggtaggccttaacggagtgggaacaaaggcggttaacgcgctttccgttcacttcagggtagtcgcaatacgcaacggcgaatttgcggaagcggtttttcaaagaggaaaattattaaacaaccgtcagggtaagttaaaagaaagactcanagacgggacaatggttgaattcactcccgaccccggaaattttcaaagattatttgtttga

SEQ ID NO: 23426 - protein, 228 aa, Unknown
  Obtained from environmental sample
  DOMAIN (80)...(221): Histidine kinase-, DNA gyrase B-, and HSP90-like ATPase
  misc_feature (1)..(228): Xaa is any amino acid
MPVKKTKTKAKAKPAVKSKAAAKTSAKAKPAAKSVAKPAAKPSSSKVPVYDESKIKTLSSLEHIRLRTGMYIGRLGDGSNPDDGIYVLLKEVIDNGVDEFIMGNGKNIEVSIKDIAKAGGATVKVRDFGRGIPLGKLVECVSVINTGAKYNDDVFQFSVGLNGVGTKAVNALSVHFRVVAIRNGEFAEAVFQRGKLLNNRQGKLKERLXDGTMVEFTPDPGNFQRLFV

SEQ ID NO: 23427 - DNA, 783 bp, Unknown
  Obtained from environmental sample
  misc_feature (1)..(783): n is a, c, g, or t
ttgcaagcagcaaacaaaaacgaactcatagataaaatacntgaacttgtaagaaaaatgcagattgagatagagaacgtagtcaaaaacacaacaccctcagtaccagaagccgcaaagacgcattttgaaaggggcaaactatttgtagaccggaacgacttagataccgccatattggaatataccgatgcgatccgccttgcccctgattattctgaagcttactatcaacgcggcagagcgtatcatattaagaaagattatgaccgcgccataactgactatacacaagcaattcgtattaatcctaattatgctaatgcgtataacaatcgcggcaatgtgtatgctgcaaaggaagattatgaccgcgccatagctgactatacacaagcaattcgtattaatcctgctgatgctgatgcgtattataactgcggcatagcgtatattgcaaaggaagattatgaccgcgccatagctgactatacacaggcaattcgtattaatcctgatttagcttctgcgtataacaatcgcggcaatgcgtattatcgaaagaaagattatgatcgcgccatagctgaccatacacagacaattcgtattaatcctgatttagcttctgcgtataacaatcgcggcgctgcgtattatcaaaagggcgattacaataaagcgatagctgattttgaagccgctttacgaattaatcctaattatatcaatgcaaaggataatcttgaattagccagaaatgcgcaaaaacaaaagcgttaa

SEQ ID NO: 23428 - protein, 260 aa, Unknown
  Obtained from environmental sample
  DOMAIN (39)...(72): Tetratricopeptide repeat
  misc_feature (1)..(260): Xaa is any amino acid
MQAANKNELIDKIXELVRKMQIEIENVVKNTTPSVPEAAKTHFERGKLFVDRNDLDTAILEYTDAIRLAPDYSEAYYQRGRAYHIKKDYDRAITDYTQAIRINPNYANAYNNRGNVYAAKEDYDRAIADYTQAIRINPADADAYYNCGIAYIAKEDYDRAIADYTQAIRINPDLASAYNNRGNAYYRKKDYDRAIADHTQTIRINPDLASAYNNRGAAYYQKGDYNKAIADFEAALRINPNYINAKDNLELARNAQKQKR

SEQ ID NO: 23429 - DNA, 1038 bp, Unknown
  Obtained from environmental sample
  misc_feature (1)..(1038): n is a, c, g, or t
atgcgcgcggcggaacgctgggacagcggcatcccgaatatttcgcgcaagattgaaggcgccgaaaatatctatccctattttgaaaggctgacagagatgatcaaaaagggctttgcccccaagctcgtcgattgtctcaactgtgaaatggggtgcaacggcgggacagccaccggaaacgcgcatatggcgcaggatgaactggaggcggcggtggaacggcgcaatcaggaggtgcagcggcgctatggcaaaaagggcaatcctccggacgagaaagacaagaaagcgctccatgcccttattgagcgatactggcgcccgggtttatatgatcgctcgtataccgatcgctcgcgcagcgtcaatctcaagaccccaagcgcgcaggaaatcagcgccatctataagactatggggaaggagagcgccgaggatatttatgactgcaacggctgcggttacggaagctgcgagcgtatggcggtcgctatccataatgggctgaataaatcggataattgtttccactattatctttccggcgccgcgcagaaaggtattgtggacaagctgtttgcgcgtatgactatactctcgggcaagattgatacgcaggataaggcgtatgagctcttaaaggattgcatcacagaagcctcgaataccattaaggaatttgcgcctgtcgcggtttccgttaaggatatatcctcaaaaaccaatatgctctctctcaacgcgggcattgaggccgcgcgcgcgggcgaggcgggcgccggatttgcgattgtggcgcgggaggtgcgtgtcctcgcgggcctctccaggcaggaggcggatcggtttggcccgctctttgataagattcagggtatcttcaccactctgcacacagaactggatctggcattaaaagacagttatgaaacgcgggatgttgtcgccaagatcaaggatggtatccacaacctcgcgaataagggcaaagaccggcaggaggattcttttgcgctttccgaagatgaagtgtaa

SEQ ID NO: 23430 - protein, 345 aa, Unknown
  Obtained from environmental sample
  DOMAIN (142)...(344): Methyl-accepting chemotaxis protein (MCP) signaling domain
  misc_feature (1)..(345): Xaa is any amino acid
MRAAERWDSGIPNISRKIEGAENIYPYFERLTEMIKKGFAPKLVDCLNCEMGCNGGTATGNAHMAQDELEAAVERRNQEVQRRYGKKGNPPDEKDKKALHALIERYWRPGLYDRSYTDRSRSVNLKTPSAQEISAIYKTMGKESAEDIYDCNGCGYGSCERMAVAIHNGLNKSDNCFHYYLSGAAQKGIVDKLFARMTILSGKIDTQDKAYELLKDCITEASNTIKEFAPVAVSVKDISSKTNMLSLNAGIEAARAGEAGAGFAIVAREVRVLAGLSRQEADRFGPLFDKIQGIFTTLHTELDLALKDSYETRDVVAKIKDGIHNLANKGKDRQEDSFALSEDEV

SEQ ID NO: 23431 - DNA, 1293 bp, Unknown
  Obtained from environmental sample
  misc_feature (1)..(1293): n is a, c, g, or t
atggcttatgaggaaacggacggaattgaagtgggagacagggtaatcgcccttggtagccgtcttgaagtgcctgtttccgacaagcttttagggcgcgttatagacgctcttggaaacccattggacgacaaaggtgaaatttcgtccatttgttcctatcccgcgcttgcaagcgcccctgatccgctaaaaagaagacggattacggagcgcataacaacgggcgttcgcgccattgacggtcttcttgccgttggcaaggggcaaaggctcggcattttttccggttcaggcgttggaaagtcaacccttcttggaatgattgcgcgtaacacttcagccgatgttaacgtggtggccctaataggtgagcgcgggcgtgaagtgaacgattttatagaatacgatcttggccctgaagggcttaaacgcagcgtactgatagtaaccccgtccaattccccgccccttgcccgtcttcgcggagcatacgtggcgaccgccgtcgccgaatatttccgcgatcagggaaatgacgttatgcttttgtttgactccgttacgcgctttgcccgcgctatgagggaaatagggcttgccgccggggaacctcccgcgcaaaggggcttcccaccaagcatgtttgattccatgccgaaacttcttgaaaggtcaggcacttccgacaagggaagcataactggtttttatacggttcttgtagacggcgatgatatggacgaacctgtagcggataccgtgcgcggtattctggacgggcatatcgttctttcaaggaatctggcccatgcttatcattacccggccattgacatattgccaagcatttcccgtctctctccaaaagtatcgggacctgaaagcaggagggccgcgggcattatccgcaaaaatatggcgtcttacgccgccgccgaagaccttatcaatgtaggcgcgtatcatcagggttccaatccggaaattgacgaggcaatcgcaaagcatggcccaattgaagattttcttattcaggaagtggacgagccttcgtctttggaagaaactcttatggcaatgtcaaaaataaccggcgttcaaatccctcctgaagaaatgaccgatacgaataagatgcttgtaaaaatagtaagtcaaaaaataaaacctgatatgcctaaaatcgcggaaaaaccgtctaatacggaggatactaagatggcgcttaacagcgtggcggctttattttcttcaatgccggggataaatattttggatggtgacaactga

SEQ ID NO: 23432 - protein, 430 aa, Unknown
  Obtained from environmental sample
  DOMAIN (75)...(285): ATP synthase alpha/beta family, nucleotide-binding domain
  misc_feature (1)..(430): Xaa is any amino acid
MAYEETDGIEVGDRVIALGSRLEVPVSDKLLGRVIDALGNPLDDKGEISSICSYPALASAPDPLKRRRITERITTGVRAIDGLLAVGKGQRLGIFSGSGVGKSTLLGMIARNTSADVNVVALIGERGREVNDFIEYDLGPEGLKRSVLIVTPSNSPPLARLRGAYVATAVAEYFRDQGNDVMLLFDSVTRFARAMREIGLAAGEPPAQRGFPPSMFDSMPKLLERSGTSDKGSITGFYTVLVDGDDMDEPVADTVRGILDGHIVLSRNLAHAYHYPAIDILPSISRLSPKVSGPESRRAAGIIRKNMASYAAAEDLINVGAYHQGSNPEIDEAIAKHGPIEDFLIQEVDEPSSLEETLMAMSKITGVQIPPEEMTDTNKMLVKIVSQKIKPDMPKIAEKPSNTEDTKMALNSVAALFSSMPGINILDGDN

SEQ ID NO: 23433 - DNA, 303 bp, Unknown
  Obtained from environmental sample
  misc_feature (1)..(303): n is a, c, g, or t
ttggacggggttactatcagtacgctgcgtttaagcccttcagggccaagatcgtattctataaaatcgttcacttcacgcccgcgctcacctattagggccaccacgttaacatcggctgaagtgttacgcgcaatcattccaagaagggttgactttccaacgcctgaaccggaaaaaatgccgagcctttgccccttgccaacggcaagaagaccgtcaatggcgcgaacgcccgttgttatgcgctccgtaatccgtcttctttttagcggatcaggggcgcttgcaagcgcgggatag

SEQ ID NO: 23434 - protein, 100 aa, Unknown
  Obtained from environmental sample
  misc_feature (1)..(100): Xaa is any amino acid
MDGVTISTLRLSPSGPRSYSIKSFTSRPRSPIRATTLTSAEVLRAIIPRRVDFPTPEPEKMPSLCPLPTARRPSMARTPVVMRSVIRLLFSGSGALASAG

SEQ ID NO: 23435 - DNA, 687 bp, Unknown
  Obtained from environmental sample
  misc_feature (1)..(687): n is a, c, g, or t
ttgttaaggcgcaacgcgagtactcctcctgtttttggaatactccccatcgggcgcggcaatgatttttccgctacgccggcaataccgcaggatgtcgaaaaagcgcttcaattgctgaccactggaaacgcgaagcccatggatgccggttttgtaaagggcggatttttccctgacggacgctattttataaacggaattggaatcggttttgataccaaggttggctttgaggcggcgaaattaaaaataaaaagcggcatttcctatgccgtcggcgccataattaccgttatccgctacgaaccttcgcccgttttacagattaaatttgatgacaaggaagtaacgcttccggcggtccttgtttccgtagtaaacggaaggcgtatgggcggaagtttctacatgggaccaaacgcgttgcttgacgacggacttttggacatctgctatgtggaacatcagaaatcaagatttgaccttcttaaaattatttctcattatacgaaaggaacccagggtgaatgtaagggggtaaattttgccagagggacgcatttccatttaaaggcgcttgagggaggaatggcggcacactgtgatggggaaaccgtctgttatgaaggtaaggaattggagataacctgcattcctaacgccctgcgtctaattggagaataa

SEQ ID NO: 23436 - protein, 228 aa, Unknown
  Obtained from environmental sample
  misc_feature (1)..(228): Xaa is any amino acid
MLRRNASTPPVFGILPIGRGNDFSATPAIPQDVEKALQLLTTGNAKPMDAGFVKGGFFPDGRYFINGIGIGFDTKVGFEAAKLKIKSGISYAVGAIITVIRYEPSPVLQIKFDDKEVTLPAVLVSVVNGRRMGGSFYMGPNALLDDGLLDICYVEHQKSRFDLLKIISHYTKGTQGECKGVNFARGTHFHLKALEGGMAAHCDGETVCYEGKELEITCIPNALRLIGE

SEQ ID NO: 23437 - DNA, 810 bp, Unknown
  Obtained from environmental sample
  misc_feature (1)..(810): n is a, c, g, or t
atgcaggcaaaacgaataatcccatgccttgatgttgacgacggaagggtagtaaagggcgttaaattcaagggcatacaggacgccggagatccgagagaactcgcccgccgctacaacgacgacggcgccgacgaactcactttcctcgatataggcgcgtcatacaaaagccgcgcgacactgcttgacgttgtgcgaacagttgccgccgaaagttttatccccttatgcgtaggcggcggcatacgcgtaattgacgacatgcgcgacgcaatgaacgccggcgcggacaaagtttcagtctgcacttccgccnttagccgccccgaattgttacgcgaaatggcaaacgcctacggcagtcagtgtgtcgtgctttcgatagacgcaaaacgcgtcgatggcggcggagacttgcgctggcacgccttttcccacggcggcagaaccgacacgggaattgacgccattgaatgggcaattcgcgccgtagaactcggcgcaggcgaaatacttctcaactcaatcgacgcagacggaacaggcggcggctacgatttagaactgaaccgccgaatactgaacgccgttcccgtccctgtaatcgcctctggcggcgcggggacgctggatcaaatagcggaggttttgctcagtaccgcgtcggcggaaatgccgcagggactcgcgccggaagaagcgccgggagcggacgccgcgctgatagcgtcgcttttgcattttgggaagacgacaattcaggagattaagaaacacgctgaggcgaagggcgtttgcgttagatag

SEQ ID NO: 23438 - protein, 269 aa, Unknown
  Obtained from environmental sample
  DOMAIN (5)...(253): Histidine biosynthesis protein
  misc_feature (1)..(269): Xaa is any amino acid
MQAKRIIPCLDVDDGRVVKGVKFKGIQDAGDPRELARRYNDDGADELTFLDIGASYKSRATLLDVVRTVAAESFIPLCVGGGIRVIDDMRDAMNAGADKVSVCTSAXSRPELLREMANAYGSQCVVLSIDAKRVDGGGDLRWHAFSHGGRTDTGIDAIEWAIRAVELGAGEILLNSIDADGTGGGYDLELNRRILNAVPVPVIASGGAGTLDQIAEVLLSTASAEMPQGLAPEEAPGADAALIASLLHFGKTTIQEIKKHAEAKGVCVR

SEQ ID NO: 23439 - DNA, 609 bp, Unknown
  Obtained from environmental sample
  misc_feature (1)..(609): n is a, c, g, or t
atgataggcgtaattgattacggcgcgggaaatctcggctctgttatgaacgcattaaagcggctttccgttccggcgcgctttgcggaagatccgcaggagctttcacctgcatcttcgccgtttgaaaaaattatttttcccggagacggccatttcgctacggcaatggcgtcgattaataaatcgggttacgcgcaggcgataaaggaatggataaaagcggacaaaccctttttgggaatctgcataggcttacagttgttatttgaaacttccgaagaggcgccgaatacgcagggactttctgttatttccggagcagtgcggcgttttcccgggcgcaaggttccgcagattggctggaatcagactaacgcgcgaaaagaatcaaaaattttcaaaggtttaacagataacagttttttttattatatacattcatactatgccgatccctcggatgattctgtgagcgccgcgcagacggaatactatgtccgctactgctgcgctgttgaacaaggcgcgttagccgctgtgcagtttcaccctgaaaaatccggcgcggcgggtattgccctccttaaaaattgggcggagggataa

SEQ ID NO: 23440 - protein, 202 aa, Unknown
  Obtained from environmental sample
  DOMAIN (40)...(155): CobB/CobQ-like glutamine amidotransferase domain
  misc_feature (1)..(202): Xaa is any amino acid
MIGVIDYGAGNLGSVMNALKRLSVPARFAEDPQELSPASSPFEKIIFPGDGHFATAMASINKSGYAQAIKEWIKADKPFLGICIGLQLLFETSEEAPNTQGLSVISGAVRRFPGRKVPQIGWNQTNARKESKIFKGLTDNSFFYYIHSYYADPSDDSVSAAQTEYYVRYCCAVEQGALAAVQFHPEKSGAAGIALLKNWAEG

SEQ ID NO: 23441 - DNA, 711 bp, Unknown
  Obtained from environmental sample
  misc_feature (1)..(711): n is a, c, g, or t
ttgattattactatgctgcccaattcgccccatgtcaaagaagcggttctgggatcaggcggcgtgattgaagggtgcagggcaggacagatcgtggtagacatgagctctatcgcgccggcagcgtcgcaagagctggaagctgcactgaaggcaaagggcgtcgccttccttgacgcgccggtctcaggcggcgagcccaaggcggttgacgggacgcttgcaattatggtcggcggcgatcagaaaactttcgacgcagtaaaaccggttttggaaaagatgggatcttcggtcgttctgaccggagacgtaggcgcgggaaacgtaacgaagctcgcgaatcagattatcgtggcgcttaacatcgccgccgtatcagaggcctttgtgctggcggcgaaatccggcgttgacccggtaaaagtttttgacgcgatcaagggcgggctcgcgggttcaaccgtgatgaacgcgaaggtgccgatgatccttgacggcaacttcaagcccggcttccgcatcgagcttcatgctaaagatttgcagaacgccctggataccgggcataaagtgaacgcgccgcttccccttacggcaaacgtaatggaaacgctgcaggcgctcaccgttgacggcatggggaaaagcgatcacagcgccattgtccgtttttatgagaagctcgcacaaattgaagtgcgaaagtag

SEQ ID NO: 23442 - protein, 236 aa, Unknown
  Obtained from environmental sample
  DOMAIN (1)...(104): NAD binding domain of 6-phosphogluconate dehydrogenase
  misc_feature (1)..(236): Xaa is any amino acid
MIITMLPNSPHVKEAVLGSGGVIEGCRAGQIVVDMSSIAPAASQELEAALKAKGVAFLDAPVSGGEPKAVDGTLAIMVGGDQKTFDAVKPVLEKMGSSVVLTGDVGAGNVTKLANQIIVALNIAAVSEAFVLAAKSGVDPVKVFDAIKGGLAGSTVMNAKVPMILDGNFKPGFRIELHAKDLQNALDTGHKVNAPLPLTANVMETLQALTVDGMGKSDHSAIVRFYEKLAQIEVRK

SEQ ID NO: 23443 - DNA, 411 bp, Unknown
  Obtained from environmental sample
  misc_feature (1)..(411): n is a, c, g, or t
atgggaactgttcgcgcggaaattaccttgaaaaacatccttgatgttatgaattgcaggcggaaccaaatgaaagagtctgaaatccgtcaagctgttgtagaggccgtggttgataccggggctatgaacctggttatcaatgagaaactgcgccgtcagttggggcttaaggtggtgggaaccagagaggcgacattggcggacagtaccaaaagaacgttaaaaatagccgaagcggtagaaattcgctggaaaaaccgtttcatgacctgcaacccctgggtcgttgtttccggaaatgtccttttaggcgtgatacctcttgagcacatggacttaatggcggatcccgtcagccaaacgctggtaggcgctcacggcgaaagagaagaagcgctgctgttgtaa

SEQ ID NO: 23444 - protein, 136 aa, Unknown
  Obtained from environmental sample
  misc_feature (1)..(136): Xaa is any amino acid
MGTVRAEITLKNILDVMNCRRNQMKESEIRQAVVEAVVDTGAMNLVINEKLRRQLGLKVVGTREATLADSTKRTLKIAEAVEIRWKNRFMTCNPWVVVSGNVLLGVIPLEHMDLMADPVSQTLVGAHGEREEALLL

SEQ ID NO: 23445 - DNA, 705 bp, Unknown
  Obtained from environmental sample
  misc_feature (1)..(705): n is a, c, g, or t
atgtctgaccagatagtgcctatagatcaacttcttcccaataaactgccgctggtagcccttatgggcaggcctattttcccggggatttttaccccgataatgataggaaacccggtcgacgtcaaagtgattgacgacgccgtagccggcgacgcgatgatcgggttggtgatgctgcaaaatgagaccgaaacgccctccatcgcggacctttacaaagtggggacagcggccaaaatcgtaaaaaaaattaaccttccggacggcggggtgaatatctttatatccacgcttaagcgtttcaaggttaaaaagaccctccacgccagcaaccccatagtggcggcggtggagtacctgaatgaggaagaggacgacaccagcgagggtaaaggccccttacagggcgctcatctcggaaatgaagcagatctccgaaaacacccccctgttttccgaggaaatgcgcctcaatatgataaacatagatcatcccggcaagattgcggattttatcgccagtattctgaatatcgacaaggcggagatgcagaagattctggaaatcctcaacgtgcgaaagcgcatggaacaggtgctggtgttcatcaaaaaagaacaggaactcctgcggattcaaaaaaagatacagaaagagataaacgaaaaaatagaaaaatcgcagagggattatttccttaa

SEQ ID NO: 23446 - protein, 234 aa, Unknown
  Obtained from environmental sample
  misc_feature (1)..(234): Xaa is any amino acid
MSDQIVPIDQLLPNKLPLVALMGRPIFPGIFTPIMIGNPVDVKVIDDAVAGDAMIGLVMLQNETETPSIADLYKVGTAAKIVKKINLPDGGVNIFISTLKRFKVKKTLHASNPIVAAVEYLNEEEDDTSEGKGPLQGAHLGNEADLRKHPPVFRGNAPQYDKHRSSRQDCGFYRQYSEYRQGGDAEDSGNPQRAKAHGTGAGVHQKRTGTPADSKKDTERDKRKNRKIAEGLFP

SEQ ID NO: 23447 - DNA, 942 bp, Unknown
  Obtained from environmental sample
  misc_feature (1)..(942): n is a, c, g, or t
atgatcagatggccgagactgaactcgcggcggttttttttccgccgtgggttccttattcgccgttccctgttccttgttccctgttcccgcgccaacttcgttggcgagttccgttccagcttcgggcgtagaagatgtcgccgcaggctggacaggcgcggcttcgacaggcacgggttgagcgctttcggcgttataagtccgcagttttctcacggccaggtattccgtgatgcggttcttcacgtcctcaaggccgtaatgatccgcttccagaatctccctggcgtttttcatgctgaaattttccggttcggggtctttccagggaaggcttacgataaggtcgaggtaattgcgcgtaacaacgaattcgggcgagttaggctccatcaggttgaatttttcaagctcctgctctacggcttcctttacctcgccttcaaatttaaagccctcaataatgtccttgaagcgctggtagtcggagcttttggcgtcggttgtcattcccagctcgccttttatcgccttcaactcctctttaaggaaataatccctctgcgatttttctattttttcgtttatctctttctgtatctttttttgaatccgcaggagttcctgttcttttttgatgaacaccagcacctgttccatgcgctttcgcacgttgaggatttccagaatcttctgcatctccgccttgtcgatattcagaatactggcgataaaatccgcaatcttgccgggatgatctatgtttatcatattgaggcgcatttcctcggaaaacaggggggtgttttcggagatctgcttcatttccgagatgagcgccctgtaaggggcctttaccctcgctggtgtcgtcctcttcctcattcaggtactccaccgccgccactatggggttgctggcgtggagggtctttttaa

SEQ ID NO: 23448 - protein, 313 aa, Unknown
  Obtained from environmental sample
  misc_feature (1)..(313): Xaa is any amino acid
MIRWPRLNSRRFFFRRGFLIRRSLFLVPCSRANFVGEFRSSFGRRRCRRRLDRRGFDRHGLSAFGVISPQFSHGQVFRDAVLHVLKAVMIRFQNLPGVFHAEIFRFGVFPGKAYDKVEVIARNNEFGRVRLHQVEFFKLLLYGFLYLAFKFKALNNVLEALVVGAFGVGCHSQLAFYRLQLLFKEIIPLRFFYFFVYLFLYLFLNPQEFLFFFDEHQHLFHALSHVEDFQNLLHLRLVDIQNTGDKIRNLAGMIYVYHIEAHFLGKQGGVFGDLLHFRDERPVRGLYPRWCRPLPHSGTPPPPLWGCWRGGSF

SEQ ID NO: 23449 - DNA, 1089 bp, Unknown
  Obtained from environmental sample
  misc_feature (1)..(1089): n is a, c, g, or t
atggctgacggcgacagcaaatcgtctggcaaaacgtctatagcagagttccgttcactgtttccgtattttcgacaatactcgctaagttatgctgtcggctttttctttctcattatcgtggatgccgctcaggtgatactgccccaattcatccgtcaggcggttgatatcgcttcttccggcgtatntgagataaaagaagttataatcccatgcgccgtcatggtgggtcttatggggatagtctccctggggcgctttttttggcgttactttattcacggttcttcccggcgtattgagacagagctgcgtaaaaagctttttgagcacctgctttccctttcttatgatttttaccagaaaaacaagataggcgatcttatggcgcgcgctaccaacgacctgaacgccgtaagggaatccattggcatggggcttgtggccctggttgacggtacggtgatggccgccgcgatcttggtcatcattttcattcaggatacacgtaccgccgctttcgccgttcttcctttgccgctgataactgttttgatcctcctctttggcaacgtcattgggaaacgttttcgccgcgcccaggagacatactcggcgttgagcgacagcgttcaggaaaccttttccggcgtcagagtggttaagtcctttgtaaaggaatggtggttcattaaaaaattcgccgacaccaacgacgactaccgcgacgcgaacatggaattggttaagctctttggaatattttttcctttgatcactttcctttcgggcctcactgttttaatagtgcttttggtgggaggaataggcgtaaccgagggcagtatgagtccgggaagcctggtggccctgttccgttaccttggcatgctgatctggccgcttatgggagcgggctttgtcgtgaacatgattcagcggggcgcggtttcccttggaagggtaaacgaagtaatgcaggcaaagcctttaatttcctcgccgcctgaaacattcgataacaataatgataatggcgcgccctcatccgtgcccggagcgcctcttgttgactgcggtatttaa

SEQ ID NO: 23450 - protein, 362 aa, Unknown
  Obtained from environmental sample
  DOMAIN (31)...(303): ABC transporter transmembrane region
  misc_feature (1)..(362): Xaa is any amino acid
MADGDSKSSGKTSIAEFRSLFPYFRQYSLSYAVGFFFLIIVDAAQVILPQFIRQAVDIASSGVXEIKEVIIPCAVMVGLMGIVSLGRFFWRYFIHGSSRRIETELRKKLFEHLLSLSYDFYQKNKIGDLMARATNDLNAVRESIGMGLVALVDGTVMAAAILVIIFIQDTRTAAFAVLPLPLITVLILLFGNVIGKRFRRAQETYSALSDSVQETFSGVRVVKSFVKEWWFIKKFADTNDDYRDANMELVKLFGIFFPLITFLSGLTVLIVLLVGGIGVTEGSMSPGSLVALFRYLGMLIWPLMGAGFVVNMIQRGAVSLGRVNEVMQAKPLISSPPETFDNNNDNGAPSSVPGAPLVDCGI

SEQ ID NO: 23451 - DNA, 654 bp, Unknown
  Obtained from environmental sample
  misc_feature (1)..(654): n is a, c, g, or t
ttgggcaacagctattactacacatttctggaagacgaatcgcctgaggcagccgagattgaaaaacttcagagcaggatgaaagacctggttaagcaggatctgcccatagaatgccgttacatggcctatgcggaagcaatggaaacctttacgaaaaaccgccaggacgacaccgcccttttgctgaacgaaagaagcgaagcaaaggtaatggtgaacgaatgcgccggtttcatcgatctttacatatcgccgcttttaaaccgcaccgggcttcttgacgtttttgagctcatgccctacgaagacggcttcctccttcgctttcccgccattggaagcggaaggaagctcgagccttttgaggacagcccgaaaatcttttccgtatacaacgaatacaaaaaatggggccgcatagtcggcgttcattcggtgggaaggctgaaccgcctggtatcggatcaaaggatcatggaatatatccacatagccgaagcctttcaggaaaaaaagctcgacgaaattgcggcgaagatttacgattgcaaagacacggttagggcgatcctcatcgcgggtccttcaagctcggggaaaaccaccaccgccaaaaggctttccatcgccctagggtctcggccgatctga

SEQ ID NO: 23452 - protein, 217 aa, Unknown
  Obtained from environmental sample
  misc_feature (1)..(217): Xaa is any amino acid
MGNSYYYTFLEDESPEAAEIEKLQSRMKDLVKQDLPIECRYMAYAEAMETFTKNRQDDTALLLNERSEAKVMVNECAGFIDLYISPLLNRTGLLDVFELMPYEDGFLLRFPAIGSGRKLEPFEDSPKIFSVYNEYKKWGRIVGVHSVGRLNRLVSDQRIMEYIHIAEAFQEKKLDEIAAKIYDCKDTVRAILIAGPSSSGKTTTAKRLSIALGSRPI

SEQ ID NO: 23453 - DNA, 1572 bp, Unknown
  Obtained from environmental sample
  misc_feature (1)..(1572): n is a, c, g, or t
atggcggccggaacgggacgggcagaaagccaaaaaaataaaaaacttgttgaaattattaaggaggccatgacccagcctcccatccgccttttcatctttattttgcttatggtggctcttgtatccggcgtgtccagaacattcctcgtggtttacggccgtgaaatttttgctcagagtgacggcatggtttttctgtacgctgtgtttggcggactcggaaatttaatggttggcctgctcattaaattccttgtagacaggattggtgcaaaacctatattcagcttctgcgtgattctgggcgttgtaggcatgattccggttatttttttcccggcgtcaatcggcgataattttaccaccgtaaccctatatcttacgttcatgttctttatgctgaatttcggctggcttggggcggaaggaataatgcagacttactttatgggcctcgtaccatcggaacagatggtagatatgggaatactttatttcttcggctttggcatagcaggcgcaggcggatcggttttaagcggtatatttctcgataccgccaccgcgattagcggatcttcaatcatttctttcaggctcctctacataatccttattgtcatcggcggaataacgctgtttcttatgcggaagctggtaccccttggggcgatgcctttcaaaggcgcgctggaagtgatgttttcttacagggaactcaaggctataagccttctggacaagctgaacaaaacaaacgattcgggcatggaagaggaaattctgggggagttgcaggactccccttccggcctggcaattaagggccttcttgcaagggttaagtccccgcgtctgcccgtgcgtatggaaagcatccgcgccattgacgctttgccggagctggacgaagacgccgagcgcgccctgatagacgacattataaacaacccctttactactgcatacaggtcagcccgtacattagggaatcaccgcgtcttcgccgccatacctcttttacgggaacttgccgtttccagcgattatatgcttgcaggcgaagcaatgatcgccctggctaaattaaaggacgttgcgtttaagccgcagttggaacagatcatcatggaaacgcaaaaccccaggctgagaattgcgggggtagaggccattgggatttacggctttaccgactccctgcccattctgcttgatatactaagggtagcgaatccgcctccatacctccgggatgaagtggtcatggccatggcaagcatcctggacatagataacaagtattattcgctcttgatccgttttctggcaaatgaatccctggttgttaccctggccatggatgaggctgaatcggcctatgagcattgcatgtccatacatagccacaagcgtgccaaaaaagaccctgacctggccagcctaaaaaaccatgcgaaggcttttcaaagcgccgtttcagaatacatgcaaggctcaaaaggtgaacaactttaccgctggatcatgggtctccctgacgatctgataacgaggccttggcaataa

SEQ ID NO: 23454 - protein, 523 aa, Unknown
  Obtained from environmental sample
  misc_feature (1)..(523): Xaa is any amino acid
MAAGTGRAESQKNKKLVEIIKEAMTQPPIRLFIFILLMVALVSGVSRTFLVVYGREIFAQSDGMVFLYAVFGGLGNLMVGLLIKFLVDRIGAKPIFSFCVILGVVGMIPVIFFPASIGDNFTTVTLYLTFMFFMLNFGWLGAEGIMQTYFMGLVPSEQMVDMGILYFFGFGIAGAGGSVLSGIFLDTATAISGSSIISFRLLYIILIVIGGITLFLMRKLVPLGAMPFKGALEVMFSYRELKAISLLDKLNKTNDSGMEEEILGELQDSPSGLAIKGLLARVKSPRLPVRMESIRAIDALPELDEDAERALIDDIINNPFTTAYRSARTLGNHRVFAAIPLLRELAVSSDYMLAGEAMIALAKLKDVAFKPQLEQIIMETQNPRLRIAGVEAIGIYGFTDSLPILLDILRVANPPPYLRDEVVMAMASILDIDNKYYSLLIRFLANESLVVTLAMDEAESAYEHCMSIHSHKRAKKDPDLASLKNHAKAFQSAVSEYMQGSKGEQLYRWIMGLPDDLITRPWQ

SEQ ID NO: 23455 - DNA, 1044 bp, Unknown
  Obtained from environmental sample
  misc_feature (1)..(1044): n is a, c, g, or t
atgcggaagctggtgcctctgggagcgctgcctttcaggggcgcatgggaagtaatgttttctacaggggaactcaaggccataagccttctggataaactgaacaaaacaagcgattcgggcgtggaagaggcgattctgggggcgtgncaggattcgccttccggcntggcaattaagggccttcttgcaagggttaagtccccgcgcctgcccgtgcgaatggaaagcatccgtgccattgatgccttgccggggctggacgaagacgccgaacgcgccctgatggacgacattatcaataacccattcactacggcatataggtcagcccgtacgcttgggaatcacggcgtttttcaggctattccccttctaagggaacttgccgtttccagcgattatatgcttgccggggaagcaatgatcgccctggcaaaactaatggatatcgcgttcaagccccagttggaacagatcattatggaaacgcaaaaccccaggctgagaattgccggagtagaggccattggtatttatggctttactgactctctgcccatactgcttgatatactaagggtgccaaatccgcctccgtatctccgggatgaagtggtgatgaccatggccagcatcctggacatggataataaatattattctctcttgatccgctttctggcaaatgaatccctcgcttttaccctggctatggatgaggttgaatcggcttgtgagcattgcttgtccgtacatggccacaagcgcagaaaaaaagaccctggcctggtcagcctccagaaccatgcaaaggcttttcaaagcgccgtttcagaatatatgcagggctcaaaaggagaccagcttttccgctggatcatgggcctccctgacgatctggtcaatagcgccgcccaaatgatccttgccgaagttgccatggatgaagattttatggcttatcgccgccttaagcttctcattgttcaatgggctgccaatgaactcaggctctggacaaataagcttaaaaacgaataa

SEQ ID NO: 23456 - protein, 347 aa, Unknown
  Obtained from environmental sample
  misc_feature (1)..(347): Xaa is any amino acid
MRKLVPLGALPFRGAWEVMFSTGELKAISLLDKLNKTSDSGVEEAILGAXQDSPSGXAIKGLLARVKSPRLPVRMESIRAIDALPGLDEDAERALMDDIINNPFTTAYRSARTLGNHGVFQAIPLLRELAVSSDYMLAGEAMIALAKLMDIAFKPQLEQIIMETQNPRLRIAGVEAIGIYGFTDSLPILLDILRVPNPPPYLRDEVVMTMASILDMDNKYYSLLIRFLANESLAFTLAMDEVESACEHCLSVHGHKRRKKDPGLVSLQNHAKAFQSAVSEYMQGSKGDQLFRWIMGLPDDLVNSAAQMILAEVAMDEDFMAYRRLKLLIVQWAANELRLWTNKLKNE

SEQ ID NO: 23457 - DNA, 648 bp, Unknown
  Obtained from environmental sample
  misc_feature (1)..(648): n is a, c, g, or t
gtggtaactttcatcaccgactccgttaccaccaccgatgaacttatcccgtccggggaaacttcatcgtaccgttcaaacccgttaaaactggcagaattcactttaagcagaaaagacccgaattacgtaaagctggcgaaagaagtgcaaattcttgaagagcaaagaagtaacgaaaaagctgacggcgaactggaaaaggcactgaaaaagatacagggtattgaaggctgtgcaggggtagggctttccaatataggcatagcaagcgtgatttttgcccgcaaacccggtgacggctccgcaagggagcaggccgcgtcctgtcagcgcgtactgggaggcggcgcgaatttcgctttggaatatgcgacaaagaggtataggtcaaacctaatcaactggggaatacttccatttcttattaccgatgagaccgccttctcaaacggcgattatattttctttccggaaattaagtccgccgttcaagataaaaaagaaacaatcacaggttttgtgttaggtgaaaccgtcaaagagatgaagaccgtattaggcggacttacggatgctgaaagacagatattgatagatggctgtttaatcaattattacgctagtaataattcacgaaccacatga

SEQ ID NO: 23458 - protein, 215 aa, Unknown
  Obtained from environmental sample
  misc_feature (1)..(215): Xaa is any amino acid
MVTFITDSVTTTDELIPSGETSSYRSNPLKLAEFTLSRKDPNYVKLAKEVQILEEQRSNEKADGELEKALKKIQGIEGCAGVGLSNIGIASVIFARKPGDGSAREQAASCQRVLGGGANFALEYATKRYRSNLINWGILPFLITDETAFSNGDYIFFPEIKSAVQDKKETITGFVLGETVKEMKTVLGGLTDAERQILIDGCLINYYASNNSRTT

SEQ ID NO: 23459 - DNA, 762 bp, Unknown
  Obtained from environmental sample
  misc_feature (1)..(762): n is a, c, g, or t
atggagagtaatttactaattcccgttaaatcccgcatcctttatcaatgctcggcgtgcgttgtcgtgaacaaattaattggcgaggctgtagagggagcgatgggcaggatgagggatttacgggaagaaataaaaaacatgaaattagaaataaaaaataaagaagtaggaaatagcgtggatgttattgaggctgtacatcggcttgatgtacctgtgacagggtgcgctctttttgctttaactagagacgctctttcatttttaaattcggcctttgcgggggatactagtctgccctgccctgtcgaaaaaacttactgggctgtaatagaaaagccttcccgccctctgcctgaaagtggcgagtttgtccactggatagaaactgcttccggtaagaacaaatcattcgcgcataaaaaagatgctcccaaccgtaaaaaagcggttctgcgctacagggtgacaggtgaaggacggaattatctttttgtggaagtacaattgctttcaggcagacatcatcaaatacgcgcgcaatttgccgctgagggacttcacataaagggtgatcttaaatacggggcgaaacgcagtgaaaaaggcggcggcatacgtcttcacgcaagatcgcttttttttcccgatccattgaacaggagcaaaataattcgcataacggcggcgccgccggtgatggataatttatgggaaggatttttaaccacgaaccacacgaacaccatgaactnttag

SEQ ID NO: 23460 - protein, 253 aa, Unknown
  Obtained from environmental sample
  DOMAIN (19)...(185): RNA pseudouridylate synthase
  misc_feature (1)..(253): Xaa is any amino acid
MESNLLIPVKSRILYQCSACVVVNKLIGEAVEGAMGRMRDLREEIKNMKLEIKNKEVGNSVDVIEAVHRLDVPVTGCALFALTRDALSFLNSAFAGDTSLPCPVEKTYWAVIEKPSRPLPESGEFVHWIETASGKNKSFAHKKDAPNRKKAVLRYRVTGEGRNYLFVEVQLLSGRHHQIRAQFAAEGLHIKGDLKYGAKRSEKGGGIRLHARSLFFPDPLNRSKIIRITAAPPVMDNLWEGFLTTNHTNTMNX

SEQ ID NO: 23461 - DNA, 345 bp, Unknown
  Obtained from environmental sample
  misc_feature (1)..(345): n is a, c, g, or t
atgtgcgtcgccgatgtactggcccttgaagacccggaagagcccgaccttcttgtaaacggaaaaacatattcgttctggcacccgcaggcggactaccgccgtttctctcacactctggatcgggaggcggaaggccttttaaaagagcgctttatagacggaaaacttacgggggaaagcccctcccttcctgaaattcaaaaccgggtgcgcagggaacttgaaagccttgacggaagctacaaacgctttctaaatccccacatttacaaggtttccgttacagagcggctgcgggcattaaagctggaactgataaaaaactatttaggagatctgtaa

SEQ ID NO: 23462 - protein, 114 aa, Unknown
  Obtained from environmental sample
  misc_feature (1)..(114): Xaa is any amino acid
MCVADVLALEDPEEPDLLVNGKTYSFWHPQADYRRFSHTLDREAEGLLKERFIDGKLTGESPSLPEIQNRVRRELESLDGSYKRFLNPHIYKVSVTERLRALKLELIKNYLGDL

SEQ ID NO: 23463 - DNA, 1299 bp, Unknown
  Obtained from environmental sample
  misc_feature (1)..(1299): n is a, c, g, or t
atgaaagacgaaataaaggtttggattgcaaataacaaagatacgaaaaaggaactgtcctgccctatcggatcaagaattgactcgctggttcatcattttgacgtacggaataaccgtctggcggctgtgaaggcaaacggagaaattctgtcgctttctgccaaactcgaggtaaacaccgttctggaaccggtttcgcttgagagcccggaaggagaagccatctaccgctgtaccctggcttttctgcttgccgccgccgcagacaaactgttcccggacaagagcctttacatcggccactcattggggaacagctattactacacctttttggaagacgagacgccggataaaaatgaaatcgaagaactgcaaaacagggtaaaagacctggtcaagcaggacttgcccatagactgccattacatggcctacgcggaagcaatggaaactttcactaaaaaccatcaggacgataccgcccttttgttaaacgaaagaagcgaagcaaaagtaatggtgaacgaatgtgcaggttttatcgatctttacatatcgccgctcttaaaccggacagggcttcttgacgtttttgagctaatgccttacgaggacggcttcctcctgcgctttcccgccatcggcagcggaaggcagcttgagccttttgaagacagcccgaaaatcttttccgtatacaacgaatacaaaaaatggggccgcatagtcggcgtctattcggttggaaggctgaaccgcctggtgtcggagacgaatatcagggaatatatccgcatcgccgaagcctttcaggaaaaaaagctcgatgagattgccgggaaaatttacgatcacaaggacacggtaaaggcgatccttatcgcaggcccttcaagttccggaaaaacaaccaccgccaaaaggctttccatcgctcttagggtcatgggcatagaacccatagccattagccttgacgattactacgtcgggacggagaacacccccctggacgaaaaaggcgaacctgactatgaatgtcttgaagctttggatgtccctttcctgaaccagcagttactggatcttttggcgggcaaagaagtaacgctgcccgtatttgattttaagaccggcaagcgcaaagaatcaggcggccgcaagatccgcctggacaagagaaccatgctggtaatcgaaggcatacacgggctaaacgacgcccttaccccgcagataaaaagggaaaccaaattcaagctctacgttcagccctactctcggcgattctga

SEQ ID NO: 23464 - protein, 432 aa, Unknown
  Obtained from environmental sample
  DOMAIN (293)...(429): Phosphoribulokinase / Uridine kinase family
  misc_feature (1)..(432): Xaa is any amino acid
MKDEIKVWIANNKDTKKELSCPIGSRIDSLVHHFDVRNNRLAAVKANGEILSLSAKLEVNTVLEPVSLESPEGEAIYRCTLAFLLAAAADKLFPDKSLYIGHSLGNSYYYTFLEDETPDKNEIEELQNRVKDLVKQDLPIDCHYMAYAEAMETFTKNHQDDTALLLNERSEAKVMVNECAGFIDLYISPLLNRTGLLDVFELMPYEDGFLLRFPAIGSGRQLEPFEDSPKIFSVYNEYKKWGRIVGVYSVGRLNRLVSETNIREYIRIAEAFQEKKLDEIAGKIYDHKDTVKAILIAGPSSSGKTTTAKRLSIALRVMGIEPIAISLDDYYVGTENTPLDEKGEPDYECLEALDVPFLNQQLLDLLAGKEVTLPVFDFKTGKRKESGGRKIRLDKRTMLVIEGIHGLNDALTPQIKRETKFKLYVQPYSRRF

SEQ ID NO: 23465 - DNA, 309 bp, Unknown
  Obtained from environmental sample
  misc_feature (1)..(309): n is a, c, g, or t
atggcaaaggaaggaatacgcgtaaggctgcgcggcttcgatgttgagttaattgatcaaagcgcaaaatctatcgctacggcagtaagaaaagccggtgcgaaagttacggggcctatcccgctgccgacaagaattaacaaggtgacggttttacgttcacctcacgtgaataagaagagccgcgaacaatttgaaatgcggactcacaaaaggttaattgatattgttaatccctctgcggaagtaatggattctttgatgaaacttgaattacccgccggtgtggatgtcgagattaagcagtaa

SEQ ID NO: 23466 - protein, 102 aa, Unknown
  Obtained from environmental sample
  DOMAIN (5)...(100): Ribosomal protein S10p/S20e
  misc_feature (1)..(102): Xaa is any amino acid
MAKEGIRVRLRGFDVELIDQSAKSIATAVRKAGAKVTGPIPLPTRINKVTVLRSPHVNKKSREQFEMRTHKRLIDIVNPSAEVMDSLMKLELPAGVDVEIKQ

SEQ ID NO: 23467 - DNA, 627 bp, Unknown
  Obtained from environmental sample
  misc_feature (1)..(627): n is a, c, g, or t
atgctagggctattggccagaaaagttggtatgactcaggtttttgacaacgcgggcaaccttatgcccgtaactgtgatgcgcgtagacccgaatgttgtcattgccactaaaacaaaagaagcggacggttattccgcggtaattgtaggcatggacgaagcgaagaaaaatcgcgtaacaaaagcccgcgccggacagttcccaacggacattacccccaaaaaacaacttcgcgaattgcgcgattttgaaaaagaagttaaggtcggagattccctcggaatagaagtttttgaaggcgtaagatatgtagatgtctcaggcgtttccaagggcaaaggttttcagggcgttgttaagcgttacggcttcggcggcggacgcaaaacccacggttctaagttccaccgcgaacccggttctacggggcagagcacatatcccggaaaaacttttaagaatcaaaagttacccggacgcatggggcgcgaaaagacaacaaccttaagcttaagagtcgtaaaagtagacagcgataaaaagcttattatggtaaaaggcgccgttcccggcattaacaaagggctggttcttgtaagagcggctgtaaagaaggggcgctaa

SEQ ID NO: 23468 - protein, 208 aa, Unknown
  Obtained from environmental sample
  DOMAIN (8)...(201): Ribosomal protein L3
  misc_feature (1)..(208): Xaa is any amino acid
MLGLLARKVGMTQVFDNAGNLMPVTVMRVDPNVVIATKTKEADGYSAVIVGMDEAKKNRVTKARAGQFPTDITPKKQLRELRDFEKEVKVGDSLGIEVFEGVRYVDVSGVSKGKGFQGVVKRYGFGGGRKTHGSKFHREPGSTGQSTYPGKTFKNQKLPGRMGREKTTTLSLRVVKVDSDKKLIMVKGAVPGINKGLVLVRAAVKKGR

SEQ ID NO: 23469 - DNA, 612 bp, Unknown
  Obtained from environmental sample
  misc_feature (1)..(612): n is a, c, g, or t
ttgcacccgataatgcccttcatcaccgaagagatttggtcgttccttcgtgagaaaatgtcgtttgacaaggtcatagacgcggagtcgataatgctcgcttcatatcccgaccctgtgccctcgcttgtcaatgagaaattggagagcgactttgacctgctgaagagctgcatagtggcgctgaggaccatccgctccgaaaacaacgtcccgccggacaaaacggggactgccgtgatcatccccgccgacaaagaggcggaaacgtggctgtcgtcgcaaaccccggcaatcaacctcttcgccaaactgtcggaaacaaccgtcggcatagaagcgaaaaaacccggcttcgccggatcggcggtggtcaggggcaaccaaatatttttgagcttggaaggcttgattgacaaacaggtagagatcgaccgcttgacaaaagaggtagtgagattgaagtcgatggccgacggggcgaaggcgcggctggaaagcgagaacttcgtctcccgcgctccgaaagaggtcgttgaaaaggagcgggagaagtatcagggaattttggttaatctggagaaaacggagaaggcgctcgcgagcctttga

SEQ ID NO: 23470 - protein, 203 aa, Unknown
  Obtained from environmental sample
  DOMAIN (1)...(83): Anticodon-binding domain
  misc_feature (1)..(203): Xaa is any amino acid
MHPIMPFITEEIWSFLREKMSFDKVIDAESIMLASYPDPVPSLVNEKLESDFDLLKSCIVALRTIRSENNVPPDKTGTAVIIPADKEAETWLSSQTPAINLFAKLSETTVGIEAKKPGFAGSAVVRGNQIFLSLEGLIDKQVEIDRLTKEVVRLKSMADGAKARLESENFVSRAPKEVVEKEREKYQGILVNLEKTEKALASL

SEQ ID NO: 23471 - DNA, 408 bp, Unknown
  Obtained from environmental sample
  misc_feature (1)..(408): n is a, c, g, or t
ttgcggacagagcgtcatgtggaaaacgctcttaaagttgtaagttatttgcaaaagcattcgcaggtagaaagcgtaaatcatccgtcattgccgaatcatcaggatcacgctttatatcaaaaatattttcctcgcggagcaggttcaatttttacttttgaaattaaaggcggagcggagcaggcaaaaaactttattgataaactggaactgttttctcttcttgccaatgtggcggattccaaatcgcttgtaatacaccccgcaagcacaacacactcacagctttcgggagaggaactgctggaacagggaataaaaccaaatactatcaggctttccgtcggaactgaacatattgatgatattatcgccgatttggagcaggcgtttggaggtaaatga

SEQ ID NO: 23472 - protein, 135 aa, Unknown
  Obtained from environmental sample
  DOMAIN (2)...(133): Cys/Met metabolism PLP-dependent enzyme
  misc_feature (1)..(135): Xaa is any amino acid
MRTERHVENALKVVSYLQKHSQVESVNHPSLPNHQDHALYQKYFPRGAGSIFTFEIKGGAEQAKNFIDKLELFSLLANVADSKSLVIHPASTTHSQLSGEELLEQGIKPNTIRLSVGTEHIDDIIADLEQAFGGK

SEQ ID NO: 23473 - DNA, 1152 bp, Unknown
  Obtained from environmental sample
  misc_feature (1)..(1152): n is a, c, g, or t
atggtgcttataatagactntgcggaacacatgtttcccgcaggagatctgatccgtctttccgataaagaccgttactgtatggtaacatttaaccgctgggcaacagatcccaaatttatcaagggtgacatttcaataattcttttgacagagaatctcgctgatatttcatcccgcctntccggttctccttcaaccgtaaaaataagcgttccttttcctgaccttaaggtaagagaaagttttctccgttcaaaagaaaaaaaaggcaaattacttcttgaacgcggcttaactccggaaaagcttgccgcaattacatcaggaatcaatttaatgaatttaaacaggcttactgcggaaagttttgaagaaaacaaaccgctgtcgtttgattttatgcggcgcagaaaaaaagaaataatcgaaaatgaagcagtcggtctcctggaatttatggaaacttcgtttaacctttcccatgtgtccggtcatgactttgtaaagaagcggttcaagaacgccgcaaaagcgattaagatgggacgtcatgatgttttgccgatgggttatctgattgcgggccctgtcggaacgggaaagagttttatggtaaacgcgtttgccggcgagatcggaatcccgatggtgaagttccgcaatttcaggacaaagtggcagggtgaaactgaatcaaacttggagaaagttttaaatattcttgtagcaatggcacctgtcggagtgatgattgacgaagcggacgcttttctcggcgaccgcgatcaggaaggggattccggcacaagcaaccgtgtatttgcacagatagcaagttttatgggaaacactgaatacagagggaagataatctggtttttgattaacctgncctccccgatcttatacctatcgactaaagcgcccagggacgcgcggaggagcatctcgcgcttttttatcctgaaaccgacaaggacagggaagatctttttaaaacgcttgtccgtaaactcgatttggatattcgtaacttttctatttcagatctttttaagaaatacaggcatgaatattcaggcgcggaccttgaagcggtccttgttcgcgcaaaactgctcgcggcaatggacgagcgcgtttttgtaa

SEQ ID NO: 23474 - protein, 383 aa, Unknown
  Obtained from environmental sample
  DOMAIN (191)...(363): ATPase family associated with various cellular activities (AAA)
  misc_feature (1)..(383): Xaa is any amino acid
MVLIIDXAEHMFPAGDLIRLSDKDRYCMVTFNRWATDPKFIKGDISIILLTENLADISSRLSGSPSTVKISVPFPDLKVRESFLRSKEKKGKLLLERGLTPEKLAAITSGINLMNLNRLTAESFEENKPLSFDFMRRRKKEIIENEAVGLLEFMETSFNLSHVSGHDFVKKRFKNAAKAIKMGRHDVLPMGYLIAGPVGTGKSFMVNAFAGEIGIPMVKFRNFRTKWQGETESNLEKVLNILVAMAPVGVMIDEADAFLGDRDQEGDSGTSNRVFAQIASFMGNTEYRGKIIWFLINLXSPILYLSTKAPRDARRSISRFFILKPTRTGKIFLKRLSVNSIWIFVTFLFQIFLRNTGMNIQARTLKRSLFAQNCSRQWTSAFL

SEQ ID NO: 23475 - DNA, 633 bp, Unknown
  Obtained from environmental sample
  misc_feature (1)..(633): n is a, c, g, or t
gtgtttaatacacgtcgccctgttcaagtgccctccaacattcccgttgtcgtgctgataaacaaaggttccgcctccgcatcggagattgtcgccggagcgctaaaggacaggggaagggccttcctggtcggggagaaatcntacggcaaaggttccgtacagcaggtgtatcccctggatacagcgggtttcaagatcaccaccgcccgctactatacacccagcgacgtaaatatcgacaagatcggcataccgccggatcgtctggtcaagttccccgagttcaccgacgcggacgcggaaaaactcaatacgttgataagagacaacaagataccatcctttatcaaagacaatcccaaggcaaaccccacgcaggtagaaaattttgccaagtcccttgaaaaagaatataaacttgatttctcgctgcttaaacgccttatacgtaacgagcaaaaccgcaccaccattggcccggtttacgatcttgagtacgatgtgcagcttcaggaagcagtgaacatcctcagaagcggcgaataccgcatcctgatgcagaccactaaaacgttaagagctttacaggaagaagcctccggggacgaggatctggctcatgcgtcttaa

SEQ ID NO: 23476 - protein, 210 aa, Unknown
  Obtained from environmental sample
  DOMAIN (1)...(91): Peptidase family S41
  misc_feature (1)..(210): Xaa is any amino acid
MFNTRRPVQVPSNIPVVVLINKGSASASEIVAGALKDRGRAFLVGEKSYGKGSVQQVYPLDTAGFKITTARYYTPSDVNIDKIGIPPDRLVKFPEFTDADAEKLNTLIRDNKIPSFIKDNPKANPTQVENFAKSLEKEYKLDFSLLKRLIRNEQNRTTIGPVYDLEYDVQLQEAVNILRSGEYRILMQTTKTLRALQEEASGDEDLAHAS

SEQ ID NO: 23477 - DNA, 1029 bp, Unknown
  Obtained from environmental sample
  misc_feature (1)..(1029): n is a, c, g, or t
gtgtcgatcgccgatacgtcggtaaaattcacagtcgagtcgagtacccgcgccgcggttgaaatatggggcggcagcgtggaacttggcggggggacgattataaacaaagattcgaccggaaacgccgtcaaattgaactatcagtccggggcgctgacgttcaaggggagcgcgccgcccaaaatcaccggaagcatagagacaaataccgccggaaccatacgcgcggacgcctctttcaaacccggaaccaacaaatacacgcttaaattgatcggcagcgcttgcgccgacgacgcggcggcggtaaaagggggcggcgcgaacttagccgctttcgtattaacaaataaatactatgaactcaaagaaaaagacggcgatattatcgtcaagctgaaagccggcgttacccagcccaaatacgttgttatcggcagcgtagatgcgggtttcaatgcgttgtcgggtgccgatacggttggtaggggtgcggatataaggcaggttttcgactccatacgggtcaacgccgacgggaggccgtgcggtatacagtttggcggcggcgccgccgcggttttggatataggcgaggccggcatatactttggttccaacggttggggcagagtgtccatatccggaaaagtggttggcgggacgttgagtcttgaccaaggcgtgtcaatagagaacagcgcggatatcagcaccagcggcgacatgtatatctattcgggggcggattttacccataagagcgggtacataaaagcgcgcataaccaatgccggtacgctaacgatctccggcggaacggttggggacacgcttagccgccgctacgctattaataacagttcttcgggtgagctcgttattaacggaaccgcgaatatcatatcaagtgactctagcgcaaccggcggaacgatcaaaaacagggggacactggtaatatccggcggaaaggtatctaatgttagttctatcaaccaaagcgtcgccgtcttaacggcgtag

SEQ ID NO: 23478 - protein, 342 aa, Unknown
  Obtained from environmental sample
  misc_feature (1)..(342): Xaa is any amino acid
MSIADTSVKFTVESSTRAAVEIWGGSVELGGGTIINKDSTGNAVKLNYQSGALTFKGSAPPKITGSIETNTAGTIRADASFKPGTNKYTLKLIGSACADDAAAVKGGGANLAAFVLTNKYYELKEKDGDIIVKLKAGVTQPKYVVIGSVDAGFNALSGADTVGRGADIRQVFDSIRVNADGRPCGIQFGGGAAAVLDIGEAGIYFGSNGWGRVSISGKVVGGTLSLDQGVSIENSADISTSGDMYIYSGADFTHKSGYIKARITNAGTLTISGGTVGDTLSRRYAINNSSSGELVINGTANIISSDSSATGGTIKNRGTLVISGGKVSNVSSINQSVAVLTA

SEQ ID NO: 23479 - DNA, 747 bp, Unknown
  Obtained from environmental sample
  misc_feature (1)..(747): n is a, c, g, or t
atggtccaggaagtaaaaaataaaattgaaagcagttctgcgctggaagtcacagaaaaaacttttgaaaaaatagaggaaacaaaggggctaaacgcctatatctccttatgcaaagaaagggctttggcacaggctaaggcagctgatgagcggcacaagagcggcaaaagcctttccgttttggatggcgttcccattgcggttaaagataacatctacatagaaggcgttagaacaacctgcgcatcaaaggttttggaaaattttatctcgccatacacagctacagccgtggcaaaattggaagcggcgggagccgtgatagttggcaaaacaaatatggacgagtttgcgatgggagcttcgggtgagaactctttttttggcaaggtggttaacccagccgcaccggatagaatatctggaggctcatccagcggtagcgcagcaacggttgcagccggagttgttgccttggctctaggctcggacacaggcggctctatccgccagccagccgcttgcacaggcacggttggcataaaaccaactcacggcagagtctctagccacggcgtggtagcttatgccaagagcatggatcaagttggagcaatttcaaacagcgtaaaagatttggttcccgttttggatttgatgtgtgagcctgcaactaattttggcgagcatctaggcaaaggtgtgaaaggaaaaattatcggcttgccaaggaatattttatag

SEQ ID NO: 23480 - protein, 248 aa, Unknown
  Obtained from environmental sample
  DOMAIN (16)...(248): Amidase
  misc_feature (1)..(248): Xaa is any amino acid
MVQEVKNKIESSSALEVTEKTFEKIEETKGLNAYISLCKERALAQAKAADERHKSGKSLSVLDGVPIAVKDNIYIEGVRTTCASKVLENFISPYTATAVAKLEAAGAVIVGKTNMDEFAMGASGENSFFGKVVNPAAPDRISGGSSSGSAATVAAGVVALALGSDTGGSIRQPAACTGTVGIKPTHGRVSSHGVVAYAKSMDQVGAISNSVKDLVPVLDLMCEPATNFGEHLGKGVKGKIIGLPRNIL

SEQ ID NO: 23481 - DNA, 1077 bp, Unknown
  Obtained from environmental sample
  misc_feature (1)..(1077): n is a, c, g, or t
ttgaatagcggaagaaattttaacttggcttctccaaagcagctttcgcatattttgtatgagaaattaaaactgccaatgctgaaaaagaacgcaagcgggcctagcaccgatgcggaaactttggaaatgcttttggaacagagcgaacctcaccctattctggaacctataatgaattggcgtgagattcaaaaactgaaaaacacatacacagaagcgttgccaaaaatgctatcgccaaagacaaatcggcttcacaccacatttttgccgtggggaacggtaaccggcaggctttccagcgtgaacccgaatttgcagaatattcctgttaggagcgaggcgggcaggcggataaggactgtttttgtgccgagccaaaaggattggaaaataatttccgttgattactcgcaaatagaattgcggatgcttgcccatttgagcggagaccaagaactttccaacgcgtttttgcaggggcttgatattcacagcataaccgctgcaaaaatttttgggacaggcgaagtaagcaaagagatgagggcagccgcgaaagttgtgaactttggcgtgatttacggaatgagtgcatttaggcttgccagggatttgcgcataacccgttcaaaagctatggaattcataaatggatatttcaatttatatagcaaggtcaaaacatattttgaagaagttgtaaaagaagcaaaggaaaaaggctttgtggaaaccatagcgaagcggaggcgttatttgccggagctgcaagcgagcgaccatcaggagcgggcgatggcggagcgcatggcgatgaataccccaattcagggcagtgcagcagatttgattacagaggcgatgcttcgcctgcacgctaaaattgaaaacgaaaatttgccccttaaaatgcttttgcaggttcacgacgaactggtttttgaatgcccaaaggaaaatgtagatgaattttcgcaaataatcaaatacgaaatggaaaacgcctggcctatttccgttcccataatcgccaacataggcgttggcgataactggctggaagcgcattaa

SEQ ID NO: 23482 - protein, 358 aa, Unknown
  Obtained from environmental sample
  DOMAIN (2)...(357): DNA polymerase family A
  misc_feature (1)..(358): Xaa is any amino acid
MNSGRNFNLASPKQLSHILYEKLKLPMLKKNASGPSTDAETLEMLLEQSEPHPILEPIMNWREIQKLKNTYTEALPKMLSPKTNRLHTTFLPWGTVTGRLSSVNPNLQNIPVRSEAGRRIRTVFVPSQKDWKIISVDYSQIELRMLAHLSGDQELSNAFLQGLDIHSITAAKIFGTGEVSKEMRAAAKVVNFGVIYGMSAFRLARDLRITRSKAMEFINGYFNLYSKVKTYFEEVVKEAKEKGFVETIAKRRRYLPELQASDHQERAMAERMAMNTPIQGSAADLITEAMLRLHAKIENENLPLKMLLQVHDELVFECPKENVDEFSQIIKYEMENAWPISVPIIANIGVGDNWLEAH

SEQ ID NO: 23483 - DNA, 531 bp, Unknown
  Obtained from environmental sample
  misc_feature (1)..(531): n is a, c, g, or t
atgctccacagcaccctgctaaaactatccgactctgaacttcttaaagagtgcgaggtttctgcatacaaaggttctggcccaggtgggcagcatcgcaataaaactaactccggcgttaaattgaaaatacgcggtggagatttaatgtctctggaatcttactcctgcgatgaccgcagttcacatataaacaaattgctcgctttaaaaaagttgcgtttgaaaatcgcgttgcagataagggaagaacctacgcagcaaattccatttccgttccccggcacgggcggcaaaatttcccaagacaacgctctctatccgcaattcatagcagacattttagaccgcataaatttttgcaaaggtgatttatcggaaacggcaaagatatggggtttgagcaaaagcgctttgaataaaattatcattcaagataaaaaagttttagaggcttttcaaaaaatgcgttctgcggcatcgccaatgcagagcaaagaagactcgtcaaaagatttgccaatccattga

SEQ ID NO: 23484 - protein, 176 aa, Unknown
  Obtained from environmental sample
  misc_feature (1)..(176): Xaa is any amino acid
MLHSTLLKLSDSELLKECEVSAYKGSGPGGQHRNKTNSGVKLKIRGGDLMSLESYSCDDRSSHINKLLALKKLRLKIALQIREEPTQQIPFPFPGTGGKISQDNALYPQFIADILDRINFCKGDLSETAKIWGLSKSALNKIIIQDKKVLEAFQKMRSAASPMQSKEDSSKDLPIH

SEQ ID NO: 23485 - DNA, 384 bp, Unknown
  Obtained from environmental sample
  misc_feature (1)..(384): n is a, c, g, or t
gtgatggaaatcaacgagtattacggttggtataatccgaattttgaacaactgccgaaaatattcgcgaattcaaatcccggaaagcccgtgcttgtctgcgaattcggtgccgatgcccgcctggggcagcggggaagcgtggacgagctttggactgaggacaaacaaaaacagctttatgaacagcaggtggaaacttttaaaaagtgccagtacattgcaggcacgactccatggatactgtacgatttccgctgcccccggcggcttaaccgctatcaggaaggttttaaccgcaaaggccttatcgacgccgagcgaaaagccaaaaagcccgctttttatgtaatgcagaaattctatgaggagatgaagcgataa

SEQ ID NO: 23486 - protein, 127 aa, Unknown
  Obtained from environmental sample
  misc_feature (1)..(127): Xaa is any amino acid
MMEINEYYGWYNPNFEQLPKIFANSNPGKPVLVCEFGADARLGQRGSVDELWTEDKQKQLYEQQVETFKKCQYIAGTTPWILYDFRCPRRLNRYQEGFNRKGLIDAERKAKKPAFYVMQKFYEEMKR

SEQ ID NO: 23487 - DNA, 609 bp, Unknown
  Obtained from environmental sample
  misc_feature (1)..(609): n is a, c, g, or t
ttggtcagaatcggccgagcggcacgagaggctgaaatggacgaaaaactggcgcagattccccgcaggattaaggaattgagggaaatccttgagatcagcgcgatggatatggctgaagatattcatatcccgctggaaacctacaataaatatgaaaacggtgaactggacattccgatcagcgttttgaacaatatagcggggcggctcggcatagacatgaccgtaattataaccggcgaagacccaagaatgaaaagcgccgccgtatgccgcaagggaaaaggcgttcagattgagcgttaccccggctatgaattttccagcctcgcctacaattttaaagacaggacaatggagccgcttctggtgctgctcgattcttcacggcctcccgccgcgcaggtgtctcattcagggcaggaatttaactatgtggttgagggttgcatgaaggtcaccgtgggcaaggcggaatatatcctttccgaaggcgattcaatttactttgacgcgactctgccccacggacagagcgctgtaaacgcctccgaaggaggcaccggcgccgcccgctttatcacgatcattcaggaatggacataa

SEQ ID NO: 23488 - protein, 202 aa, Unknown
  Obtained from environmental sample
  DOMAIN (24)...(78): Helix-turn-helix
  misc_feature (1)..(202): Xaa is any amino acid
MVRIGRAAREAEMDEKLAQIPRRIKELREILEISAMDMAEDIHIPLETYNKYENGELDIPISVLNNIAGRLGIDMTVIITGEDPRMKSAAVCRKGKGVQIERYPGYEFSSLAYNFKDRTMEPLLVLLDSSRPPAAQVSHSGQEFNYVVEGCMKVTVGKAEYILSEGDSIYFDATLPHGQSAVNASEGGTGAARFITIIQEWT

SEQ ID NO: 23489 - DNA, 621 bp, Unknown
  Obtained from environmental sample
  misc_feature (1)..(621): n is a, c, g, or t
atggcaggtagagtgatagttctgttattgcttgtcgcggtcctggcggccgggagcatcatctggtttgactatttgaatgtaattgacgcaaagaccgttttggccccattataccgttttatggcccgtgaagggcggaatcagcccgaaatcacgccggaggagtggcgcaaccttgatgccgaccggcttgcggtacggctggacgctctggaattggaaaggctggaattggaaaaaaagcggcaggaactggatgccaaagatggcgaaataatggaaaaggcccaggagcttgaagaacggcaaaaagctcttgaagatttagagaattctctcaaagcggcgattgcggatgccgaaaataaagagaagaacgtcgaagcgaacgctcgtaacctaatgaatatgcagcctgatcgagcggtgggtatcatgtccgaaatggatgatcagctcgttattgatgttctccggaagactgaagagcttgcgcaagccgagggaacagcgtctttagtgccctattggctccagttaatggcgggaacgccggaaggagccaagagagcggcggaactgcagcgcaagatggttgggaggccgcaaaggctctag

SEQ ID NO: 23490 - protein, 206 aa, Unknown
  Obtained from environmental sample
  SIGNAL (1)...(16)
  misc_feature (1)..(206): Xaa is any amino acid
MAGRVIVLLLLVAVLAAGSIIWFDYLNVIDAKTVLAPLYRFMAREGRNQPEITPEEWRNLDADRLAVRLDALELERLELEKKRQELDAKDGEIMEKAQELEERQKALEDLENSLKAAIADAENKEKNVEANARNLMNMQPDRAVGIMSEMDDQLVIDVLRKTEELAQAEGTASLVPYWLQLMAGTPEGAKRAAELQRKMVGRPQRL

SEQ ID NO: 23491 - DNA, 879 bp, Unknown
  Obtained from environmental sample
  misc_feature (1)..(879): n is a, c, g, or t
atgatgctcccggccgccaggaccgcgacaagcaataacagaactatcactctacctgccatatatactctcccaatgtaccattataatgtaaaattgctaaagaaacaatgctattccttgtcaacccagcttttttattgtacaattcaaacgaaaactatgagctttttatatgaaacccacctacatacagttttctcaagcgcctgcgccaattccaaaggctcggaatatatccgcctgtataaggaattgggttattcgggaatcgtcgtaacggatcatttttatcgcggaaacacggcggtcccacgcggtcttccctggaaagaatgggtcaagcagttctgcaaaggctatgaagaatccagaaacgaaggcgaaaagcagggctttgatgtcttcttcgggtgggaagaaacattcgacggctgcgatgactatcttgtctatggcctggacagggaatggctgcttgaacacccggaagtaagaaactggacaaggggccagcagttcagcgccgttacaaccgcgggcggatgcgtagttcaggcccaccctttcaggcagcacacctatatcccgcgggtcgtcctttcaaccggatgcgttgacgcggtggaagcggcaaacgctaccaattccgaacagtcttatgacgccctggcaatgcgttatacgcaaagactcggccttccttataccgccggttccgacacgcacgatgcgaggcagattaccgtcgacggcgtctttggtgtttatgtcaaaaaaaaattaacatccattaatgattttgccaatgaaattcgtactaataatcttgccggcattaaaatatccgaaagccgatgtgattatttcggagaataa

SEQ ID NO: 23492 - protein, 292 aa, Unknown
  Obtained from environmental sample
  DOMAIN (59)...(246): PHP domain
  misc_feature (1)..(292): Xaa is any amino acid
MMLPAARTATSNNRTITLPAIYTLPMYHYNVKLLKKQCYSLSTQLFYCTIQTKTMSFLYETHLHTVFSSACANSKGSEYIRLYKELGYSGIVVTDHFYRGNTAVPRGLPWKEWVKQFCKGYEESRNEGEKQGFDVFFGWEETFDGCDDYLVYGLDREWLLEHPEVRNWTRGQQFSAVTTAGGCVVQAHPFRQHTYIPRVVLSTGCVDAVEAANATNSEQSYDALAMRYTQRLGLPYTAGSDTHDARQITVDGVFGVYVKKKLTSINDFANEIRTNNLAGIKISESRCDYFGE

SEQ ID NO: 23493 - DNA, 645 bp, Unknown
  Obtained from environmental sample
  misc_feature (1)..(645): n is a, c, g, or t
ttgcggttgatatcccgcgatgaggacggcgcgcttcatccgactgtaagcggcatattaatggccgcggaataccctgaacggtatatttcaaacgcctttatccaggccgtatgttataacggagaaaataataattctccgcagttggacgcgcaggattgtaccgggccgctggatatacaaatcaaagaggcctgtaaatttgtcaagcggaatatgaaagtcagggcggtcaaggagccgggaagaattgaaactccccagtattcattgaacgccgtatttgaagccgtcgtcaacgccgttgtacaccgcgattattcggtttacggttcaaaaatcagactgcatattttctccgacaggctggaattgtactcgcccggctgtattccaaatacaatgggcattgaaagcatatcgctgcgtcaatcatcgcgaaacgaactcttaagctccttgcttgcccgttgccggatgaactttgacgccgaaggaagcaagcgggtttttattatggacaaacgcggcgaaggggtgccaattattttatcagaaagccttgaactgtcaggaaaaaaacccgaatatttattgattgatgacgcggaactgcggttaacaatattttcggcgttttga

SEQ ID NO: 23494 - protein, 214 aa, Unknown
  Obtained from environmental sample
  misc_feature (1)..(214): Xaa is any amino acid
MRLISRDEDGALHPTVSGILMAAEYPERYISNAFIQAVCYNGENNNSPQLDAQDCTGPLDIQIKEACKFVKRNMKVRAVKEPGRIETPQYSLNAVFEAVVNAVVHRDYSVYGSKIRLHIFSDRLELYSPGCIPNTMGIESISLRQSSRNELLSSLLARCRMNFDAEGSKRVFIMDKRGEGVPIILSESLELSGKKPEYLLIDDAELRLTIFSAF

SEQ ID NO: 23495 - DNA, 537 bp, Unknown
  Obtained from environmental sample
  misc_feature (1)..(537): n is a, c, g, or t
atgaaaaactctcctataatcctcggtataacaggcgcatctggtgccatatatgcaaagcgttttttgcaacttgcaaaaaaacagaatttagcagtggagcttattgtgacaaaaatgggtgaagcagtgctgaagtatgagggttgccagtctattttgcagcacaaaaaaatccataaaatagacgatttttttgccccaccagcaacaggcagctcaaaatatcttggaatggttattttgccctgttcaatgggaacactagggaaagttgccgctggcacaagcaataatttgttgataagagtcgccgatgtatgcttaaaggaaaaccgcccacttgtgattgttccaagagaaatgccttttaatgaaatacatttagaaaatatgctgaggttaaaaagagcaggagcaattattataccagcttgtccgcatttttataagcatccgaagagtgttgaggatgttgtggatagcgttgtggagagggttttgagtgtttttactcctcatcttccgaattgctaa

SEQ ID NO: 23496 - protein, 178 aa, Unknown
  Obtained from environmental sample
  SIGNAL (1)...(19)
  DOMAIN (4)...(120): Flavoprotein
  misc_feature (1)..(178): Xaa is any amino acid
MKNSPIILGITGASGAIYAKRFLQLAKKQNLAVELIVTKMGEAVLKYEGCQSILQHKKIHKIDDFFAPPATGSSKYLGMVILPCSMGTLGKVAAGTSNNLLIRVADVCLKENRPLVIVPREMPFNEIHLENMLRLKRAGAIIIPACPHFYKHPKSVEDVVDSVVERVLSVFTPHLPNC

SEQ ID NO: 23497 - DNA, 804 bp, Unknown
  Obtained from environmental sample
  misc_feature (1)..(804): n is a, c, g, or t
atgaaacacactcttgttttggcaatagacataggcaacagtcaaacggcaataggcatttaccgagatgcgaaaattgaagcgagttatcgtttaacaacaaacgaaaaaacaaccagcgatgagattttttttagaataagcgatttgataaaacactttggttgcaaaacaaaagattttacccatataggtttgagcaatgttgttccgcaacttgaacgtccttggattaaagctcttattgcttatttcaataaacccgtgcaaattgtgagttccaaaaattgccttgatttgcccatagcttatcctcgcccagggagtgttggaccagaccgtttatgcaatatgattgcactacgctcgcgaggaattcaaaatggaattgttgttgatatgggaaccgccacaacatttgatgttttgcacaatggcggttttgcaggtggtttaattgtacctggcattagcgcatctatggatgctttaacggaaaaggctgcaatgcttttgcctgtttccataaaatggacaaataaattcgtggcaaaaaatacgggcgatgccatgcgttccggtattcttcacgggtttttgggacaacttgattttttggtaaagaacataatgaaagaaactggaatggaaaatattcccgtaatagccacaggcggctggngtcaaatgctcttgaaacacacaaacataatcaaaggctacgacccttacttaacattggaaggtattcgccgtgttgcgctgaacggcaatggatttagcaattcggaagatgaggagtaa

SEQ ID NO: 23498 - protein, 267 aa, Unknown
  Obtained from environmental sample
  DOMAIN (6)...(209): Bordetella pertussis Bvg accessory factor family
  misc_feature (1)..(267): Xaa is any amino acid
MKHTLVLAIDIGNSQTAIGIYRDAKIEASYRLTTNEKTTSDEIFFRISDLIKHFGCKTKDFTHIGLSNVVPQLERPWIKALIAYFNKPVQIVSSKNCLDLPIAYPRPGSVGPDRLCNMIALRSRGIQNGIVVDMGTATTFDVLHNGGFAGGLIVPGISASMDALTEKAAMLLPVSIKWTNKFVAKNTGDAMRSGILHGFLGQLDFLVKNIMKETGMENIPVIATGGWXQMLLKHTNIIKGYDPYLTLEGIRRVALNGNGFSNSEDEE

SEQ ID NO: 23499 - DNA, 672 bp, Unknown
  Obtained from environmental sample
  misc_feature (1)..(672): n is a, c, g, or t
ttggctaaaaaaaggccgtttccgcgccgacccgtcgtcgccgaagcccaagtacagcatagtgatcccgccgcccaacgtgaccggcgtgctgcacatggggcacgccctcaacaacgccatccaagacatcctcatccgccacaagcgcatgaagggcttcgaggcgatgtggatgccgggcaccgaccacgccgggatcgccacgcaaaacgtggtggagcggcggctggccaaggagaagcgcaaccggcactccttggggcgcgaggcgttcgtgcaagaggtctggaagtggaaggaggagtaccacgccaccatcaccacgcagctcaaaaaactcggctcctcatgcgactgggagcgggagcgcttcacaatggacgaggggctgtcggcgtccgtcagaaaggtgttcgtccaattatacaacgaggggttgatatacaaggggaagtacattatcaactggtgcccgcgctgccagaccgccctctccgacgaagaggcggagcacaaggagatcggcgggaagctctatcatctgcgttatccctacgaggacgggagcggctatgcggtagtggccacgacccgccccgagacgatgctcggcgacgtcgcggtcgccgtcaatccggcggacgagcgttacaaggagatcaagaataa

SEQ ID NO: 23500 - protein, 223 aa, Unknown
  Obtained from environmental sample
  misc_feature (1)..(223): Xaa is any amino acid
MAKKRPFPRRPVVAEAQVQHSDPAAQRDRRAAHGARPQQRHPRHPHPPQAHEGLRGDVDAGHRPRRDRHAKRGGAAAGQGEAQPALLGARGVRARGLEVEGGVPRHHHHAAQKTRLLMRLGAGALHNGRGAVGVRQKGVRPIIQRGVDIQGEVHYQLVPALPDRPLRRRGGAQGDRREALSSALSLRGRERLCGSGHDPPRDDARRRRGRRQSGGRALQGDQE

SEQ ID NO: 23501 - DNA, 804 bp, Unknown
  Obtained from environmental sample
  misc_feature (1)..(804): n is a, c, g, or t
gtggcgtcggagagttgcgcgttggaaatatgcggatttgaattcgtcagagacgtgaaaccaggcgagatcattaccataaaaaacggggtgataacgtatgagagcataagcctgcacaacaaggaagaagggcgcgggttttgcatatttgagtacgtatatttcgccagacccgactccgtgctcgacgggctctcaatctatgaggcacgctacaatatgggcgcgattctagcgaaggaatatcctgtagacgccgacgtcgtctgcggcgtgccggacagcggcttagtcgcggcaagcggctatagcgcggcaagcggtattccgctcgcgtccggatttgtcaagaacagatacatcgggcgtagtttcatctacccaacgcagacgcaacgcgacagcgcggtgcggcaaaaactcaacccgctggcggcaaacgtgaaaggaaaaaaggtcgttctcgttgacgactccatagtacgcggcacgacctgcgagaaaattatccgcagcctcagaagcgccggagccgcggaagtccacatgagagtatcgtcgccgccgttccgttacacttgccactacggaaccgacataggcagcgaagataatcttatagcgaacaaaatggctgtagacgacatccgccaaaaattcggcgccgatagtttggggtacataagtatagaggggctgaaaaaagcctgtgaaaaatgcgttctgccgttttgcacggcctgcttcaccggccacgacgaaaccgcaaccgcgagcaccagaaaagatattttcgaataa

SEQ ID NO: 23502 - protein, 267 aa, Unknown
  Obtained from environmental sample
  DOMAIN (60)...(196): Phosphoribosyl transferase domain
  misc_feature (1)..(267): Xaa is any amino acid
MASESCALEICGFEFVRDVKPGEIITIKNGVITYESISLHNKEEGRGFCIFEYVYFARPDSVLDGLSIYEARYNMGAILAKEYPVDADVVCGVPDSGLVAASGYSAASGIPLASGFVKNRYIGRSFIYPTQTQRDSAVRQKLNPLAANVKGKKVVLVDDSIVRGTTCEKIIRSLRSAGAAEVHMRVSSPPFRYTCHYGTDIGSEDNLIANKMAVDDIRQKFGADSLGYISIEGLKKACEKCVLPFCTACFTGHDETATASTRKDIFE

SEQ ID NO: 23503 - DNA, 735 bp, Unknown
  Obtained from environmental sample
  misc_feature (1)..(735): n is a, c, g, or t
atgtcgatgtttgacaaggcgttaaaatattcttatgccgaacaaaaaagggaacgccacaggattctgcgcgttgtcatgaccgtcctgcttctgttcctcctgtataatataataaacacttttctcgtctcggtttgggtcctgaataatgacacaatggaacccggactgcgcgcgggagaccgttttatcgtttactcgtccttcctgccgttcgttatttccaggatcaacaaaaccggcgggacgttccctttcaagcgcggagccgtagtattgattgataccaggcgcggtgaaaaccaaaattggcttttattgacggccgacagttttgtccggtttgtcacggcccagcaaaaagaaattttaagcgcggaagagcatctgtatataaagcggatcatcgccgttcccggcgacgagatcagcatgaacaattttgtcttcagggtgaagccggcgggcaatatgtatgtttttaccgaatttgaactttccgaccgcccctattacccgaacataccccaggttcccgccctttgggatgagacgcttcccttttcggggtacatggacagcataacgctcggccccggcgagtattttgttgtctcggatgacagaagcaattcgggcgactcgcggacatgggggccggttaacgcgaaaaaattactgggaaagcccgtattccggttttggcccatccagcgaatcggccggccatga

SEQ ID NO: 23504 - protein, 244 aa, Unknown
  Obtained from environmental sample
  misc_feature (1)..(244): Xaa is any amino acid
MSMFDKALKYSYAEQKRERHRILRVVMTVLLLFLLYNIINTFLVSVWVLNNDTMEPGLRAGDRFIVYSSFLPFVISRINKTGGTFPFKRGAVVLIDTRRGENQNWLLLTADSFVRFVTAQQKEILSAEEHLYIKRIIAVPGDEISMNNFVFRVKPAGNMYVFTEFELSDRPYYPNIPQVPALWDETLPFSGYMDSITLGPGEYFVVSDDRSNSGDSRTWGPVNAKKLLGKPVFRFWPIQRIGRP

SEQ ID NO: 23505 - DNA, 423 bp, Unknown
  Obtained from environmental sample
  misc_feature (1)..(423): n is a, c, g, or t
ttgatggcacgagggacctttgtgctgcgctccggctttcaggatcgctactatctgcgggcgcagcggatacgggcggccatccggcgggattttgaagccctgctcggcggcagcgagtatacggatgccgcgcaattcgacgctattttgatgcctgtttttccgtcgcgcgcctttggcaggggaccgtcctcgctttccgccttcgcgcaaaaagcggccgacctctacacctgctgcgcgaacctcgcggggctcccggcgctcgccttcccggcctcggtcgaagacggcctgcctgtcggcgtccagttgatggggcgggcatgggcggaaggaaccctgctggatatcgccgaaggctatgaacacgctttccccttcccgcacccggccgggtttcaggcattctggaggtag

SEQ ID NO: 23506 - protein, 140 aa, Unknown
  Obtained from environmental sample
  misc_feature (1)..(140): Xaa is any amino acid
MMARGTFVLRSGFQDRYYLRAQRIRAAIRRDFEALLGGSEYTDAAQFDAILMPVFPSRAFGRGPSSLSAFAQKAADLYTCCANLAGLPALAFPASVEDGLPVGVQLMGRAWAEGTLLDIAEGYEHAFPFPHPAGFQAFWR

SEQ ID NO: 23507 - DNA, 417 bp, Unknown
  Obtained from environmental sample
  misc_feature (1)..(417): n is a, c, g, or t
ttgggcggcaagacaaaagttcttattaaaacagaacagaatatcaggcagacattcccgcgccttcgcattgtcgggcgtttccccggttatttcaaacggtacgaagagccgactatcatcaaagccataaaaaaatcatcgccggcgctgctgttagcaggtaaaggcatccgcggcgaagaacgctggattgccagaaacaatgcctctcttggggatggcatgaggctatggtgcagcgacatttttgacgtattcgccgaaagaaaaaaatacccgtcgcgcggcgtttttaacgcgggacttgaatggataggctattgttttcacagtccattcaaattttttagaattttcccgtacataggatataagtttttattactatattaccgtctttttgttaaatactaa

SEQ ID NO: 23508 - protein, 138 aa, Unknown
  Obtained from environmental sample
  DOMAIN (1)...(119): Glycosyl transferase WecB/TagA/CpsF family
  misc_feature (1)..(138): Xaa is any amino acid
MGGKTKVLIKTEQNIRQTFPRLRIVGRFPGYFKRYEEPTIIKAIKKSSPALLLAGKGIRGEERWIARNNASLGDGMRLWCSDIFDVFAERKKYPSRGVFNAGLEWIGYCFHSPFKFFRIFPYIGYKFLLLYYRLFVKY

SEQ ID NO: 23509 - DNA, 741 bp, Unknown
  Obtained from environmental sample
  misc_feature (1)..(741): n is a, c, g, or t
atgaaacaatttattttaaataaagagcctgatttttcacaaggcagcggagacaaggacggcattgtccggcttgagggcaatgactaccactaccttgttaatgtccgccgcctggcgacaggcgaattttttcccgcgcttttacccaatggcaaaaagacgcttgtacaggtactctccattgaacgcggcgtactaacgggtaaatgtaacacaggtcgcttcgacacttcgacgcttcgacgcttcgacaagctcagcgtccacaagctcagcgaccacactggcgaaggtgttgcggaaagttctgcgcataggcaagaaaataatataccgccaataattttatttcaggcgatacccaagagcgacaagatggatttaatagtccggcaggccgctgaaggcggaataacagagattgttccttttgtatcagagttttcaacagcgaaaatcacgtccgaaaaagggcaaaaatttttacgctgggaacgaattattaaagaagcaagacagcagagcggctccggaaacgcgactacccttcatcagccattgacaagaaatgaactatttgactactggaaaataatttgtgaaaaaaacgcgtcaaatgcgctgggattattattccaccatcaaagggggcttgaaaatataagccttcacggttatcttaatagtgttccctatgttgtggcgtttgctatcggaccggaaagggggattttctga

SEQ ID NO: 23510 - protein, 246 aa, Unknown
  Obtained from environmental sample
  DOMAIN (23)...(246): Protein of unknown function (DUF558)
  misc_feature (1)..(246): Xaa is any amino acid
MKQFILNKEPDFSQGSGDKDGIVRLEGNDYHYLVNVRRLATGEFFPALLPNGKKTLVQVLSIERGVLTGKCNTGRFDTSTLRRFDKLSVHKLSDHTGEGVAESSAHRQENNIPPIILFQAIPKSDKMDLIVRQAAEGGITEIVPFVSEFSTAKITSEKGQKFLRWERIIKEARQQSGSGNATTLHQPLTRNELFDYWKIICEKNASNALGLLFHHQRGLENISLHGYLNSVPYVVAFAIGPERGIF

SEQ ID NO: 23511 - DNA, 885 bp, Unknown
  Obtained from environmental sample
  misc_feature (1)..(885): n is a, c, g, or t
atgaaatgcagtaccaaagacgaaactacaaaagaatcaagagcttttcaaaaaggttctgttgccgcaaccgatatggaaaccgctgaatacagatataaaaatgcgcagagcaacctgacaagtgcaaaaagcaatttagaacaggcagaactcgatttggaaaattgcataataaaaagtccaataactggcatagtattgaaccgctccgttgaagctggacaaaccgtagcagcatcactctctgcacctactttattcacccttgcacgtgacttgacccaaatggaggtaaaaaccgatgtagatgaagcggatattgggcaagtaaaagctgggcaaaaagttgagttttccgttgacgcatatccaggcgataaatttgatggcgtgattcaagaagtgcggctatcacctgttatatcctcaaatgttgtgacatataccgtgataataaaagcgaataaccccaaccaaaaacttttgcccggcatgactgcaaactgcaacataatagttcaagaggctttgcaagttttaaccattcctatgcgcgctatgcaattcaaacccgatgaaaacacgcccggttatgttccgccaaaaaatgccaaagaagatgatgccggaaaaaggcagcagggccctaaagggcgagcagagaacaagggcagagtttgggtacttgaaagcaaaggaaatttgcaagccaagcgaattggcttaggaatttctgatggaacaaagagccacgtactagatggtttagacataaacacccccgttgccatcggcgtatcatcagacacaaaagcacaacccggcggggcaaaaaaaggcagccaatcaagcaaccctttttgcaccacaacgcaaggttag

SEQ ID NO: 23512 - protein, 294 aa, Unknown
  Obtained from environmental sample
  misc_feature (1)..(294): Xaa is any amino acid
MKCSTKDETTKESRAFQKGSVAATDMETAEYRYKNAQSNLTSAKSNLEQAELDLENCIIKSPITGIVLNRSVEAGQTVAASLSAPTLFTLARDLTQMEVKTDVDEADIGQVKAGQKVEFSVDAYPGDKFDGVIQEVRLSPVISSNVVTYTVIIKANNPNQKLLPGMTANCNIIVQEALQVLTIPMRAMQFKPDENTPGYVPPKNAKEDDAGKRQQGPKGRAENKGRVWVLESKGNLQAKRIGLGISDGTKSHVLDGLDINTPVAIGVSSDTKAQPGGAKKGSQSSNPFCTTTQG

SEQ ID NO: 23513 - DNA, 768 bp, Unknown
  Obtained from environmental sample
  misc_feature (1)..(768): n is a, c, g, or t
atgggtaactacaaactgaataatatacttgtcgatcgaaaaacaaaaaagatttaccttgacggcgacaaagtgataaaactcatgggcgaggaataccccgcgcccgacgttctttccgaagcgcacaaccttgccgcggtgggagaaaccgccctcaaggttccccgcctggtagaggtaacgaaaatagacggcaagtgggcggtagtgtgggaatacgttaagggaaccacccttgcccagcttatggaaaaaaacaaggataatgagaagcagtaccttgaataccttgagcgctttgttgacattcagcttgatatgcaccgccatcacgcgacaaggcttccgctgcttatcgaaaaaatggaacgcaagataaaagtctccagtcttgacgctaccgcccgctacgaaattttgggaagactggcaagtatgcccaaacataccaaactttgtcacggcgactttaaccccagcaacattgtgattaccgaaaaggacgaggcgtacatcatcgactggtcccacgccacccagggcaacgcctcggcggacgctgcgcatacctacatgttattctggcttacaggcgatcttgcgttggcggaagaatacctttcgttgttctgcaaaaagagcgatacggcagtacagtatgtggaaaagtgggttcccattgtggcggcctcgcagcttccaaaggcaaaaccggaagaaaaaaatttattaatgagctgggcgaatgtggtggagtacgtttga

SEQ ID NO: 23514 - protein, 255 aa, Unknown
  Obtained from environmental sample
  DOMAIN (3)...(222): Phosphotransferase enzyme family
  misc_feature (1)..(255): Xaa is any amino acid
MGNYKLNNILVDRKTKKIYLDGDKVIKLMGEEYPAPDVLSEAHNLAAVGETALKVPRLVEVTKIDGKWAVVWEYVKGTTLAQLMEKNKDNEKQYLEYLERFVDIQLDMHRHHATRLPLLIEKMERKIKVSSLDATARYEILGRLASMPKHTKLCHGDFNPSNIVITEKDEAYIIDWSHATQGNASADAAHTYMLFWLTGDLALAEEYLSLFCKKSDTAVQYVEKWVPIVAASQLPKAKPEEKNLLMSWANVVEYV

SEQ ID NO: 23515 - DNA, 651 bp, Unknown
  Obtained from environmental sample
  misc_feature (1)..(651): n is a, c, g, or t
atggacgcggtgacgcacgcgctggaagcntacgcntcagtcatggcgacggactacaccgatggcctggcgatacaggcgcttaaggttattttcgagtggctgcccgccgcgtacaacgaaggcgcggcaaatccaacggcgcgggaaaaaatggcaaacgccgccaccatagcgggcatggcttttgccaacgccttcctcggcgtgtgccactcgatggcgcacaaactcggcgcgttccaccacctgccccacggcgtcgccaacgcgctgatgatctgcgaagtgctccgctacaatgcctgcgaggttccgccgaagatgggttccttcccccaatatgaccatcccaaaacattatcccgttatgcgcaaatcgcgaacgcgttgaatcttggcggtaaaaccgatgaagaaaagcttgagaacctcatattggccgtggaaaaactgaaagagcagatagggatcaagaagacaatcaaggattacggcattgatgaaaaagattttcttgcccgccttgacgacatgagcgaacaggcctttgacgatcaatgcaccggcgcgaatccccggtatcccttaattgaggaaatcaagaaaatgtacctcaatgtttattttggtaagaaggagcaggtgtaa

SEQ ID NO: 23516 - protein, 216 aa, Unknown
  Obtained from environmental sample
  DOMAIN (1)...(201): Iron-containing alcohol dehydrogenase
  misc_feature (1)..(216): Xaa is any amino acid
MDAVTHALEAYASVMATDYTDGLAIQALKVIFEWLPAAYNEGAANPTAREKMANAATIAGMAFANAFLGVCHSMAHKLGAFHHLPHGVANALMICEVLRYNACEVPPKMGSFPQYDHPKTLSRYAQIANALNLGGKTDEEKLENLILAVEKLKEQIGIKKTIKDYGIDEKDFLARLDDMSEQAFDDQCTGANPRYPLIEEIKKMYLNVYFGKKEQV

SEQ ID NO: 23517 - DNA, 1242 bp, Unknown
  Obtained from environmental sample
  misc_feature (1)..(1242): n is a, c, g, or t
atgaggctggcaatacttggcggcagttttaatcctattcatcttgggcatctgttcctcgcggacgcggttctgtctgaattgcgctacgaccgcgtggtgatggttcccgcgtatatttctcctttcaagccggcggctgtgggcatggaagacagcgcccaacagcgtctggagatgatcgccgcttccattaccgccgaccccaggctttccgttgacgcttgcgagatcaggcgggaaggggtttcctacaccgtggacacggtcgctgacattatccgccgttacaaccccgacggcaaacccggactcatcatcggcgatgatctgatcggggatttcccaaggtggtataagagtgatgagattctctcaatggcggatataatcatcgcgcggcgtgttcattcgggcagtccggatgttccttatcccaatacccagataaccaatgatattatggaaatctcatcaggcgctgtcagggaaaaaatcgcgtcaaactcgtcatggcgttatcttgtgcccgatgtcgcaagaataataatcgaagaccggaaactctacggctgccgcggttcggccactgacgacggcgcccggtccgcctccgttaaaaacatcatccgccgtattgaggatgaggcgcgtgaaaagcttaaccttgcgcgtttcctccattcccggcatactgcgttattggcctgggatctatgctgccgtttcaggaaggattacccttctcttgacccggctgtaggttatttaacggggattgcccacgatctgtgcaagcagttatgcgacgaggaacagatcaggctggcaacaatatacggcggagaaatatcgaatgtggaaagggcaaaaccgtcgttgctgcacggcagggcctgcgccgttgtgctaaaggatcgttttaacattaatgatgatgaggtgctgaaagcgatagccgtgcatacagaaggcggcaggaatatgagccctctggcaaaagtattgtatattgccgacaaaatggagatgtcgagggtaaaagtcgatcctgccaccagaacccggatattggcaggcgatactcttgaccggatttttattccggtattggaacgggccgtttcttcgatccgtgacaagaagctggaattgtcaaaaaacaccgtgggcctccttgaggaaatggggataccggatccggcgcagcaaaacggaggcatccgcagtgcgggtaaatag

SEQ ID NO: 23518 - protein, 413 aa, Unknown
  Obtained from environmental sample
  DOMAIN (225)...(345): HD domain
  misc_feature (1)..(413): Xaa is any amino acid
MRLAILGGSFNPIHLGHLFLADAVLSELRYDRVVMVPAYISPFKPAAVGMEDSAQQRLEMIAASITADPRLSVDACEIRREGVSYTVDTVADIIRRYNPDGKPGLIIGDDLIGDFPRWYKSDEILSMADIIIARRVHSGSPDVPYPNTQITNDIMEISSGAVREKIASNSSWRYLVPDVARIIIEDRKLYGCRGSATDDGARSASVKNIIRRIEDEAREKLNLARFLHSRHTALLAWDLCCRFRKDYPSLDPAVGYLTGIAHDLCKQLCDEEQIRLATIYGGEISNVERAKPSLLHGRACAVVLKDRFNINDDEVLKAIAVHTEGGRNMSPLAKVLYIADKMEMSRVKVDPATRTRILAGDTLDRIFIPVLERAVSSIRDKKLELSKNTVGLLEEMGIPDPAQQNGGIRSAGK

SEQ ID NO: 23519 - DNA, 591 bp, Unknown
  Obtained from environmental sample
  misc_feature (1)..(591): n is a, c, g, or t
atgatgaaagacggcgcggcgcgtaaagtaatagtaggcgtgacgggcgggatcgcggcctacaaagtcccggccttggtgcgtttattgcgcaaaagcgggtgcgaggtcaaaactgtgctgactaatgccgccaagcagcttgtcggcgcggaaacgttgcgcgttctctcaggcaatcctgtctattccgacgacaagtcggcgcattacgacatggaccacatccgcctctccgaatgggccgacgcgctgttaatatgccccgtgaccgcgaacaccatcgcgaagatggccggcggcatcgccgacaatctgctgaccacgcttacgctgtcgattcccgaatcaaagatcgtcgcggcccccgcgatgaactgcgttatgtgggcgaacaaggccacgcaggccaatgttaatacgttggcgtcgaggggcgtgacggtgctgcctgtcggcgagggcttgttggcctgcggcgttcgcggccccgggcggatgcttgggattgaggagatcgccaagcgggtcgtagagtttattgatacgctcaataaagttgataataatgcctgtaatgtgattctgtaa

SEQ ID NO: 23520 - protein, 196 aa, Unknown
  Obtained from environmental sample
  DOMAIN (8)...(124): Flavoprotein
  misc_feature (1)..(196): Xaa is any amino acid
MMKDGAARKVIVGVTGGIAAYKVPALVRLLRKSGCEVKTVLTNAAKQLVGAETLRVLSGNPVYSDDKSAHYDMDHIRLSEWADALLICPVTANTIAKMAGGIADNLLTTLTLSIPESKIVAAPAMNCVMWANKATQANVNTLASRGVTVLPVGEGLLACGVRGPGRMLGIEEIAKRVVEFIDTLNKVDNNACNVIL

SEQ ID NO: 23521 - DNA, 345 bp, Unknown
  Obtained from environmental sample
  misc_feature (1)..(345): n is a, c, g, or t
ttgagcgtatcaataaactctacgacccgcttggcgatctcctcaatcccaagcatccgcccggggccgcgaacgccgcaggccaacaagccctcgccgacaggcagcaccgtcacgcccctcgacgccaacgtattaacattggcctgcgtggccttgttcgcccacataacgcagttcatcgcgggggccgcgacgatctttgattcgggaatcgacagcgtaagcgtggtcagcagattgtcggcgatgccgccggccatcttcgcgatggtgttcgcggtcacggggcatattaacagcgcgtcggcccattcggagaggcggatgtggtccatgtcgtaa

SEQ ID NO: 23522 - protein, 114 aa, Unknown
  Obtained from environmental sample
  misc_feature (1)..(114): Xaa is any amino acid
MSVSINSTTRLAISSIPSIRPGPRTPQANKPSPTGSTVTPLDANVLTLACVALFAHITQFIAGAATIFDSGIDSVSVVSRLSAMPPAIFAMVFAVTGHINSASAHSERRMWSMS

SEQ ID NO: 23523 - DNA, 675 bp, Unknown
  Obtained from environmental sample
  misc_feature (1)..(675): n is a, c, g, or t
gtgctgaaaatgtatcacgcgcgtcaagtggggcgcaacgatgagccgcagttgtacgggatagttgagaagctcgcccgtaaagcgcaaatacccatgccaaaggtctacgtcatccctaccgacactccgaacgcattcgccacgggccgcagcccgtcgcacgcgtcggtggcggcgaccgagggcatactgcgattgttgagcgccgacgagcttgagggcgtgatggcgcacgagctggcgcacgtgaagcaccgcgatatattgatctgcacggtagccgcgacgcttggaggcgcgataagtattttggcgcggatattaatgttcggcggcgacagggacagaaacaggtccggcggcggcgtaatcgcccttgttgtgatgatactcgcgccgctgaccgctatgctgattcaaatggccatctccagaagccgcgagtacgccgccgacgccgccggagcgcgtatctgcggcaaaccgaccgcgttggccggcgcgctgaatcgccttcagagcggcgtgaaagcctcgccgatggagatgggcgatccggcgacatcaagcttgtttatagtaaatccgtttagcgcaaactttatgacccgcttgttcagcacccacccgcccatggaagagcgcatcangcgcctgcgggagatgcggtga

SEQ ID NO: 23524 - protein, 224 aa, Unknown
  Obtained from environmental sample
  DOMAIN (22)...(224): Peptidase family M48
  misc_feature (1)..(224): Xaa is any amino acid
MLKMYHARQVGRNDEPQLYGIVEKLARKAQIPMPKVYVIPTDTPNAFATGRSPSHASVAATEGILRLLSADELEGVMAHELAHVKHRDILICTVAATLGGAISILARILMFGGDRDRNRSGGGVIALVVMILAPLTAMLIQMAISRSREYAADAAGARICGKPTALAGALNRLQSGVKASPMEMGDPATSSLFIVNPFSANFMTRLFSTHPPMEERIXRLREMR

SEQ ID NO: 23525 - DNA, 450 bp, Unknown
  Obtained from environmental sample
  misc_feature (1)..(450): n is a, c, g, or t
ttgaactacctaacgcagacgtatttgatctacaaagtgccccgttacgatgtaaaggggaaaaatctgttgaaaacactcgacaaatactacttagcggataccggttttaggaaagcgcgattgggaaaaaaattcgcggaggagagggggcgcctgcttgaaaacatggtttacttggaattgcgtcgacgcaacagcgaggtgtacgttggcaaactgcacgataaggagattgatttcgtcgctatagacaaaaaggggtatgtgtcgtactatcaggtcgcgtactcggtcacagacgagcaaacgttgcaacgcgaattggcgccgttgaaaatgatacgggattccaacccaaagtacctgctctcggcggaccgggacacaaatccggtgtatgacgggattcgcaaatacaatgcggtcgattggctgttggatagttaa

SEQ ID NO: 23526 - protein, 149 aa, Unknown
  Obtained from environmental sample
  misc_feature (1)..(149): Xaa is any amino acid
MNYLTQTYLIYKVPRYDVKGKNLLKTLDKYYLADTGFRKARLGKKFAEERGRLLENMVYLELRRRNSEVYVGKLHDKEIDFVAIDKKGYVSYYQVAYSVTDEQTLQRELAPLKMIRDSNPKYLLSADRDTNPVYDGIRKYNAVDWLLDS

SEQ ID NO: 23527 - DNA, 480 bp, Unknown
  Obtained from environmental sample
  misc_feature (1)..(480): n is a, c, g, or t
gtggtaatcggcaacagtaggtggatgggcgaaaaacttgaatttcagccgcaaccgggcaactcatggtgctataacggcgataacgcctactgcgcaaaatacggcagattgtacgattggagcacggcgaagacagcctgtcccgccggatggcatctgcccgcccgcgcagagtggaatgatttggtaacaatagccggcggcccttctgtcgccggcaaaaaactgaaggcaaaaaccggctggaagagctccggcaacggcgccgacaactacgacttttcagccctgccgggcggcaaccgataccccgacggcagctcctacgacgccaactacagcggctactggtggacggacacggaaggcgacggcggttacgcttacggccggtacatgagctacagcaacgattacgtaaacgaaaacggcagcgacaaaggcggcggcttctccgtacgatgcgtccagaactag

SEQ ID NO: 23528 - protein, 159 aa, Unknown
  Obtained from environmental sample
  misc_feature (1)..(159): Xaa is any amino acid
MVIGNSRWMGEKLEFQPQPGNSWCYNGDNAYCAKYGRLYDWSTAKTACPAGWHLPARAEWNDLVTIAGGPSVAGKKLKAKTGWKSSGNGADNYDFSALPGGNRYPDGSSYDANYSGYWWTDTEGDGGYAYGRYMSYSNDYVNENGSDKGGGFSVRCVQN

SEQ ID NO: 23529 - DNA, 354 bp, Unknown
  Obtained from environmental sample
  misc_feature (1)..(354): n is a, c, g, or t
gtgaatcgggagaatcggggttctgacaaatgcttgaaaaaattatctaaattaaacaatgaaaggttacgtgaatggttgaggtttattaactctgagaaaagagaggaatttatggatttggcaggaatagatccagtgtttgtgaaagccgtagatgttttggctacgttcagtgcagacgaccataaccgtatgttgtatgaggctcgtttgaaggagtggcgtgataataagtctaatatagatggggctaggacagagggtagaaaggatggcatacaagaagttttctcccttttgcgtcaaggctattctgttgatgaagccgaaaaaaaactgggcttgtcttaa

SEQ ID NO: 23530 - protein, 117 aa, Unknown
  Obtained from environmental sample
  misc_feature (1)..(117): Xaa is any amino acid
MNRENRGSDKCLKKLSKLNNERLREWLRFINSEKREEFMDLAGIDPVFVKAVDVLATFSADDHNRMLYEARLKEWRDNKSNIDGARTEGRKDGIQEVFSLLRQGYSVDEAEKKLGLS

SEQ ID NO: 23531 - DNA, 1626 bp, Unknown
  Obtained from environmental sample
  misc_feature (1)..(1626): n is a, c, g, or t
atgatcagatcggccgagagagataatttaattccgccttacgaggcagaagacacttccacagacgacttctttgctgttttggattccggtgaggcgataagatttggtaaatatgaactcagtttagctattggcaggcttcctgttttgaatacaactgaatttgacaattatattcaaaaggcaaaggattatgaaaaaatttccattatggataatggaatttggagaaacacagttatactgaacgcagacgatgccacacaggcacaaaggctagaccatactcaccatacacaacaaatggaaaataccgctttgcttgtggactcactattgcaagatcaaaattttgcaatagactggagaaaaatatcgctccttcaatacgatcttgaaggtggcacaaaaaaaccaggagccacaaaagaactattgctccgtttaaatcagggtgccctattcacattttattatgggcacggaaatgccgttcagtgggcagacgaagacttgctcaactcgtcttctttgagcaatatatttaacgagaagaaatacaccattttaggttctttttcttgcctagtagcccgttttgacgatgctgctcagatcagtttttcggaagtttatgtaaatacaaaatccaagggagcaatagccgcgataggttctctcagagaaagctatgcaagccacaatgtggatttagctacaaaaattttgaaattttctgtgataactccaaatgctcttttaggcgaagctattttaaaagcaaagcagagttcgtcttatgatttcagttttcaaagatacaataatgaaaaatacgtgcttttgggagaacccgttttgggtatgccaaggcaggaaatcagtttgaaattagataccattcccgacacaattcaggctttgcaaaaattgaaaatttcgggcactgcgtctgtgccaaacggaaaaatccgcttgcagattttggaaggcgaaaaatctcgctatttggaacaaaagatttgcaaagacaaataccccgatagccccttttgttccgcaaacataaaaatacccggaaaccccatttattccgaggaactacagatagaaaaccaaaagttttcaacggaattcataactccgcgcaaattatcgcttggcgatactaatgctcaaataaggctttgggcacacaaggcaggaactgctggaataggaagagtggcggaaaaaggcatttctctatttggaacttcgcctgacgcagaattcattaaagataaagaccattttccgccaagcgtaaaaatttacccctgtatgcgttttggaaatacaaatccctacgcagaaaatgcgcaggtgagtttggaaattcccgcttgcttggatgttgttatagaagattctacaggcatagattacagagaggaagccgatgaaggaatttcttttgaactaagtccgataactgattcttggcacccgtggtctttttcggagcanaccagcaaacgtgctgtgacaagggttaattttggtttgtcttatgacccagggaattatgttttcaaggttcgcgcccaggatattttggggaatgctgccctgcgttcataa

SEQ ID NO: 23532 - protein, 541 aa, Unknown
  Obtained from environmental sample
  misc_feature (1)..(541): Xaa is any amino acid
MIRSAERDNLIPPYEAEDTSTDDFFAVLDSGEAIRFGKYELSLAIGRLPVLNTTEFDNYIQKAKDYEKISIMDNGIWRNTVILNADDATQAQRLDHTHHTQQMENTALLVDSLLQDQNFAIDWRKISLLQYDLEGGTKKPGATKELLLRLNQGALFTFYYGHGNAVQWADEDLLNSSSLSNIFNEKKYTILGSFSCLVARFDDAAQISFSEVYVNTKSKGAIAAIGSLRESYASHNVDLATKILKFSVITPNALLGEAILKAKQSSSYDFSFQRYNNEKYVLLGEPVLGMPRQEISLKLDTIPDTIQALQKLKISGTASVPNGKIRLQILEGEKSRYLEQKICKDKYPDSPFCSANIKIPGNPIYSEELQIENQKFSTEFITPRKLSLGDTNAQIRLWAHKAGTAGIGRVAEKGISLFGTSPDAEFIKDKDHFPPSVKIYPCMRFGNTNPYAENAQVSLEIPACLDVVIEDSTGIDYREEADEGISFELSPITDSWHPWSFSEXTSKRAVTRVNFGLSYDPGNYVFKVRAQDILGNAALRS

SEQ ID NO: 23533 - DNA, 1662 bp, Unknown
  Obtained from environmental sample
  misc_feature (1)..(1662): n is a, c, g, or t
atggcggggctcgctattccctgtcaccacggaagggccgccggaggagttttacccttattcagtattcttggggaagaatacgccccgcagtatgtggcaaaggataattcggaaaacgaagaggcctttaacggtgatccctttgacgatcctcctgaggtgtccataagaaccatggacatgcggaatatttacagggaaacttcgtttgtgcctggcgaccggtttgtggtcaggactcttgactggaagcaggggagtttcgagctggaaaaagtcagcaaggacgaatggatcgtggcagacctggacgcctggcttttggccgccgaagaggggtttgaaaattcgttcagcaagcttgggcctggttcctgcactgaggagcagatcgcctatgcctattggtatggcagtcccagaatgagggaagtccccgcttattccctggaagattatatttatgaaaaaaccaacaggattgaaacctcagcttatggcatagaaacgcgtttttggtatgccggcagggagattcccgacaggaaggagctggacctaagcgcagtcagctccgacattactcctgtggtgttaatactacagaagaataaaattccggtttccaaatatgtgatacagtcatatattcttgattctctttaccgggaaaacggagatgagaatctaattttggaaagactggtaccggcaagagtagatatggactgcaaggataaagttactcttattgaatatatcaaagctgtaatggatgagtaccgggttttttacaccccgtttaccgacaaggttatgggcccaatcagggcaagggcgggtgaattgcatacggcggtaattgatcttgcctcaaagcttaacaagggagatttcgatattacctggcttccccgccatacctttatcattctttcacagattcagatgcacacagccggcgtaatggaagaccttgattccagcgatacccttcccgaagcggagcttgaagctctggataattccctggacagcatgatagaaacttacgaagaggttaaagagcttattgacgaagctttggaaagtttcaggcgcaacagaatcgcggtcatacactccggaagcgaggtggtaaccgagaggcttcttcaattgagcatcggtggtacggatacgtggcggcgcattatcgtccctgactactgcgcccttggggatcttcacaggatcattcaggctgtttttggctggagtaatgcggaaacttacaggttcaacgctgaaagcgggcttgatccgaaaatcacaataaaggagctggaagaagcaaacactgttgaactgctctatgaatatggaacaaaatggaacgtcagggttattattctttccaggcaggatacaccgggcccaaagcccgtgcgctgtgtggcgggggcgggggctgctcctcccgaattcattcccggcccaataaaatacaggcggctcctttacgcgctagaaagcgggaacgacgcggagcgtcagggcgcaaggcaggaagtagggccggattttgttcccggggaatttgatttggaagaatgtaacaagcttcttgcttcattattctatttaaagttaaagggcgatgaaaagctattaatataa

SEQ ID NO: 23534 - protein, 553 aa, Unknown
  Obtained from environmental sample
  DOMAIN (382)...(534): Plasmid pRiA4b ORF-3-like protein
  misc_feature (1)..(553): Xaa is any amino acid
MAGLAIPCHHGRAAGGVLPLFSILGEEYAPQYVAKDNSENEEAFNGDPFDDPPEVSIRTMDMRNIYRETSFVPGDRFVVRTLDWKQGSFELEKVSKDEWIVADLDAWLLAAEEGFENSFSKLGPGSCTEEQIAYAYWYGSPRMREVPAYSLEDYIYEKTNRIETSAYGIETRFWYAGREIPDRKELDLSAVSSDITPVVLILQKNKIPVSKYVIQSYILDSLYRENGDENLILERLVPARVDMDCKDKVTLIEYIKAVMDEYRVFYTPFTDKVMGPIRARAGELHTAVIDLASKLNKGDFDITWLPRHTFIILSQIQMHTAGVMEDLDSSDTLPEAELEALDNSLDSMIETYEEVKELIDEALESFRRNRIAVIHSGSEVVTERLLQLSIGGTDTWRRIIVPDYCALGDLHRIIQAVFGWSNAETYRFNAESGLDPKITIKELEEANTVELLYEYGTKWNVRVIILSRQDTPGPKPVRCVAGAGAAPPEFIPGPIKYRRLLYALESGNDAERQGARQEVGPDFVPGEFDLEECNKLLASLFYLKLKGDEKLLI

SEQ ID NO: 23535 - DNA, 501 bp, Unknown
  Obtained from environmental sample
  misc_feature (1)..(501): n is a, c, g, or t
atggggaacaccgaataccgggggaaaataatctggtttttaattacctgccgcccggatcttatacctatagacttaaagcgccagggacgcgcggaagagcatcttgcgctcttttatcctgaaaccgacaaagacagggaagatctttttaagacgcttgtccgtaaactggatttggacattcgcaatttttctgtttccgatcttttcaagaaatacaaccacgaatattcgggcgccgaccttgaagcggtccttgtgcgcgcgaaactgcttgcggcgatggatgagcgcgtttttgtaaagcgcgaagacatggaagaggcaatgagcgactttgttccggcggcataccctcacgaagtggaactgcaaaaccttgtggctgttttggaatgtacttcccgggaaatgataccgaagaagttccagaaacttccccgcagtaaaattatcagcgaaattcaggaattaaaagtgttatgtagagagagatag

SEQ ID NO: 23536 - protein, 166 aa, Unknown
  Obtained from environmental sample
  misc_feature (1)..(166): Xaa is any amino acid
MGNTEYRGKIIWFLITCRPDLIPIDLKRQGRAEEHLALFYPETDKDREDLFKTLVRKLDLDIRNFSVSDLFKKYNHEYSGADLEAVLVRAKLLAAMDERVFVKREDMEEAMSDFVPAAYPHEVELQNLVAVLECTSREMIPKKFQKLPRSKIISEIQELKVLCRER

SEQ ID NO: 23537 - DNA, 540 bp, Unknown
  Obtained from environmental sample
  misc_feature (1)..(540): n is a, c, g, or t
atggcgataattgcgaatgaagtaaacaaggcggacatcagttccgcggaacttgcccaaagagtggcaattttaaaacgtttcaaaacactgttatcgcaacaaagagagcgtttccgctcataccttaatatgcttgacaaacagcagaatgtaattgaatcgggcagcgccgaagaccttttaacatacgtcgaactcgaagaaaaaatagtcgccgatattttctcaatccaaaaagttattgatccccttgaagaaatgtacaatgccgtagtcacagaccggcacccggcaaaatcccctcttaacattgaaagctcaagcgcacaggaagaagtgccaagcattaaagcgtcgcttgaaacactaaaaaacgaagccattataagatcgacaaagaacaaagaactgctctccaaacgaatgttggaacttcgccaagaaatcaaatcactgcgaaacaacccctatgccgcaaccggcaagagcgcctacagcaactcaaacaaagcctcattagtagacatacacggataa

SEQ ID NO: 23538 - protein, 179 aa, Unknown
  Obtained from environmental sample
  misc_feature (1)..(179): Xaa is any amino acid
MAIIANEVNKADISSAELAQRVAILKRFKTLLSQQRERFRSYLNMLDKQQNVIESGSAEDLLTYVELEEKIVADIFSIQKVIDPLEEMYNAVVTDRHPAKSPLNIESSSAQEEVPSIKASLETLKNEAIIRSTKNKELLSKRMLELRQEIKSLRNNPYAATGKSAYSNSNKASLVDIHG

SEQ ID NO: 23539 - DNA, 1068 bp, Unknown
  Obtained from environmental sample
  misc_feature (1)..(1068): n is a, c, g, or t
atgaaacaacaagtagtttgcgaagtgtgtcagggcgagttatttaaacaagaaaatatgtttatttgccaacactgtggtattaaatattctattgaagcagtcaagagaatgttgactgaaatgcagctaaaagagaaaaaattaaaagaaggagatagattaagtgaagagcaaaagttaaaagaagaagcggaaagattaaaagaagaggaaaagcaaagattaatggaagagcagaggctgaaagaagaagaaagacaaaggctaaaaaaagaagaagaagaaaagataatggctgaagaaaaaaggctaatggatgaagaaaaaaggctaaaagaagaggagcaaaagctaatagcagaaaaagagagattaaaagaagaaaaaaggttaagggaagagcagagattaaaagaagaagagagattaagagaagaagagagattaagagaagtgcaaaggctaaaagaagaagagctaaagctaatagctgaggagcaaaagttaaaagaagaaaaagaaagattaaaagaagagcagagattaaaagaagaggaaaggcaaagggaagagcagaggttaaaagaagaacaacaaaaaataatagctgaagagcaaaagttaaaagaagaaaaggaaaggttaactggaaaactgagagtgataacggaagttccacaggaggctccgcaagaagaagttgcggaagaagctcctcaggaggctccgcaagaagaagttgcgaaagaagtcctcaggaagctccgaaagaagaagttgcggaagaagctcctcaggaagctccgaaagaagaagttgcggaagaagttcctcaggaagctccgaaagaagaagttgcagaagaggctcctcaggaagctccgaaagaagaagttgcggaagaagctcctcaggaagctccgaaagaagaagttgcggaagaagctcctcaggaagctccgaaagaagaagttgcagaaaaaatctcaaaagaagatgaaaaatcaatatttggtgaaccggaagaacaaaagaaaaagaaaggttgctttctttattttataa

SEQ ID NO: 23540 - protein, 355 aa, Unknown
  Obtained from environmental sample
  misc_feature (1)..(355): Xaa is any amino acid
MKQQVVCEVCQGELFKQENMFICQHCGIKYSIEAVKRMLTEMQLKEKKLKEGDRLSEEQKLKEEAERLKEEEKQRLMEEQRLKEEERQRLKKEEEEKIMAEEKRLMDEEKRLKEEEQKLIAEKERLKEEKRLREEQRLKEEERLREEERLREVQRLKEEELKLIAEEQKLKEEKERLKEEQRLKEEERQREEQRLKEEQQKIIAEEQKLKEEKERLTGKLRVITEVPQEAPQEEVAEEAPQEAPQEEVAKEVLRKLRKKKLRKKLLRKLRKKKLRKKFLRKLRKKKLQKRLLRKLRKKKLRKKLLRKLRKKKLRKKLLRKLRKKKLQKKSQKKMKNQYLVNRKNKRKRKVAFFIL

SEQ ID NO: 23541 - DNA, 366 bp, Unknown
  Obtained from environmental sample
  misc_feature (1)..(366): n is a, c, g, or t
ttgatttttcatcttcttttgagattttttctgcaacttcttctttcggagcttcctgaggagcttcttccgcaacttcttctttcggagcttcctgaggagcttcttccgcaacttcttctttcggagcttcctgaggagcctcttctgcaacttcttctttcggagcttcctgaggaacttcttccgcaacttcttctttcggagcttcctgaggagcttcttccgcaacttcttctttcggagcttcctgaggacttctttcgcaacttcttcttgcggagcctcctgaggagcttcttccgcaacttcttcttgcggagcctcctgtggaacttccgttatcactctcagttttccagttaa

SEQ ID NO: 23542 - protein, 121 aa, Unknown
  Obtained from environmental sample
  misc_feature (1)..(121): Xaa is any amino acid
MIFHLLLRFFLQLLLSELPEELLPQLLLSELPEELLPQLLLSELPEEPLLQLLLSELPEELLPQLLLSELPEELLPQLLLSELPEDFFRNFFLRSLLRSFFRNFFLRSLLWNFRYHSQFSS

SEQ ID NO: 23543 - DNA, 300 bp, Unknown
  Obtained from environmental sample
  misc_feature (1)..(300): n is a, c, g, or t
ttgcggaagaagctcctcaggaggctccgcaagaagaagttgcgaaagaagtcctcaggaagctccgaaagaagaagttgcggaagaagctcctcaggaagctccgaaagaagaagttgcggaagaagttcctcaggaagctccgaaagaagaagttgcagaagaggctcctcaggaagctccgaaagaagaagttgcggaagaagctcctcaggaagctccgaaagaagaagttgcggaagaagctcctcaggaagctccgaaagaagaagttgcagaaaaaatctcaaaagaagatga

SEQ ID NO: 23544 - protein, 99 aa, Unknown
  Obtained from environmental sample
  misc_feature (1)..(99): Xaa is any amino acid
MRKKLLRRLRKKKLRKKSSGSSERRSCGRSSSGSSERRSCGRSSSGSSERRSCRRGSSGSSERRSCGRSSSGSSERRSCGRSSSGSSERRSCRKNLKRR

SEQ ID NO: 23545 - DNA, 579 bp, Unknown
  Obtained from environmental sample
  misc_feature (1)..(579): n is a, c, g, or t
gtggaacttccgttatcactctcagttttccagttaacctttccttttcttcttttaacttttgctcttcagctattattttttgttgttcttcttttaacctctgctcttccctttgcctttcctcttcttttaatctctgctcttcttttaatctttctttttcttcttttaacttttgctcctcagctattagctttagctcttcttcttttagcctttgcacttctcttaatctctcttcttctcttaatctctcttcttcttttaatctctgctcttcccttaaccttttttcttcttttaatctctctttttctgctattagcttttgctcctcttcttttagccttttttcttcatccattagccttttttcttcagccattatcttttcttcttcttctttttttagcctttgtctttcttcttctttcagcctctgctcttccattaatctttgcttttcctcttcttttaatctttccgcttcttcttttaacttttgctcttcacttaatctatctccttcttttaattttttctcttttagctgcatttcagtcaacattctcttga

SEQ ID NO: 23546 - protein, 192 aa, Unknown
  Obtained from environmental sample
  misc_feature (1)..(192): Xaa is any amino acid
MELPLSLSVFQLTFPFLLLTFALQLLFFVVLLLTSALPFAFPLLLISALLLIFLFLLLTFAPQLLALALLLLAFALLLISLLLLISLLLLISALPLTFFLLLISLFLLLAFAPLLLAFFLHPLAFFLQPLSFLLLLFLAFVFLLLSASALPLIFAFPLLLIFPLLLLTFALHLIYLLLLIFSLLAAFQSTFS

SEQ ID NO: 23547 - DNA, 396 bp, Unknown
  Obtained from environmental sample
  misc_feature (1)..(396): n is a, c, g, or t
atgacctttccgctgacaagatacggaatgccgcaggtgttgatatatccgctgattgtattggcggtaatggcggctttgttcatcttcctgcccaggggtgtaactcttataattgcggaagccgttctttttctggtctttgtctggatgatgatgttctttcgggatccaaaccgaaaaatccgcctggacagccgagtattgctctccccggcggacggcacgataacggatatttccgaaacagaaatccccgatattggaggcaaggcgctgaaaatcagcatgttcctcagtattttcaacgtacatataaaccgcgcgccatgcgcggcgcgtatagagtcggtcaattacaggaaggggaaattcaaaaagcgccatggacgttga

SEQ ID NO: 23548 - protein, 131 aa, Unknown
  Obtained from environmental sample
  misc_feature (1)..(131): Xaa is any amino acid
MTFPLTRYGMPQVLIYPLIVLAVMAALFIFLPRGVTLIIAEAVLFLVFVWMMMFFRDPNRKIRLDSRVLLSPADGTITDISETEIPDIGGKALKISMFLSIFNVHINRAPCAARIESVNYRKGKFKKRHGR

SEQ ID NO: 23549 - DNA, 888 bp, Unknown
  Obtained from environmental sample
  misc_feature (1)..(888): n is a, c, g, or t
ttgttcggcatccgcagcagcctctgttacgaggtgtctgaccgcgacggggaggaaattgcgcgagcaggcatcaaagagaatattgattttgccgagtactgcaaaaggcagaatgacgatatgattggcgcactgttcggggtgcacgcccagatgacggtaagcgatacaacgctggacaggtgcgtacaggccgccgccgatgccggtattggcctgcacgtccactgcgccgagggcattgaggacgtggaggacgcgcttgccaaatacaggatgagggccgccgaacggctgtaccggcgcggggcgctttccaaaaaatcaatcgccgtgcattgcgtccatgtcaccagcgaagaaattgatctgctcagggaaagcggcgttgcggtggcgcataacccccagtccaacatgggcaacgccgtgggaaccgcgcctgtgccggaaatgttcaagcgcggggtgctggtcggcatgggaactgacggctatacagccgatatgcttgaatcgtacaagacggcggcggtgcttcacaaacacgcaacggggattccgtcggttgcatgggccgagccgcccgctatgctctttgagaataacaaaaccattatggagcggcttatcaagggcaaggtggggactttggcggtgggtcattacgccgacattattattgttgattataacggccccacgccgattaacgctaataccattaacagccacattttgttcggcataagcggtcgccacgttgacacgactattatcaatggcaaggttgttatgaaagaccgtgccctggttgatattgacgaggaggcgctgctggcaaagtcgcgggaacgggcgcacaaactctggcagcggatataa

SEQ ID NO: 23550 - protein, 295 aa, Unknown
  Obtained from environmental sample
  DOMAIN (3)...(231): Amidohydrolase family
  misc_feature (1)..(295): Xaa is any amino acid
MFGIRSSLCYEVSDRDGEEIARAGIKENIDFAEYCKRQNDDMIGALFGVHAQMTVSDTTLDRCVQAAADAGIGLHVHCAEGIEDVEDALAKYRMRAAERLYRRGALSKKSIAVHCVHVTSEEIDLLRESGVAVAHNPQSNMGNAVGTAPVPEMFKRGVLVGMGTDGYTADMLESYKTAAVLHKHATGIPSVAWAEPPAMLFENNKTIMERLIKGKVGTLAVGHYADIIIVDYNGPTPINANTINSHILFGISGRHVDTTIINGKVVMKDRALVDIDEEALLAKSRERAHKLWQRI

SEQ ID NO: 23551 - DNA, 861 bp, Unknown
  Obtained from environmental sample
  misc_feature (1)..(861): n is a, c, g, or t
atgtacaccaccggagtatacggagtttttgacatattcggcggcaaattccacgacggcacaggctggataccgccggacggctttataccccaagaacgaccgtggtacaaggcggcggtagaagcaaacggagaaaccgcggtaaccgaaccgtatatatcagtagcaacgggcattttaaccatgacattcacacgccgcatattttccgcggacaataaacccctgggtataatctgccttgatatagttcttgacagggttagggaattggccgttaatacgaatttcgcccacagcggatacggaatactttttaacagccaattagacatacttgcccaccccaacaaagatttatggggtaaaaacatgacagatgtaagcgccagttttatacctatagcggaagatataaaaaatggaatacctgttttagaacacaggataacaaattataaaggagagccgtcagtcgcattcacacgaaaacttcaaaacggctggttcatcgccgttataatacccgaaaacatctactttaaagaaatgagggcaatgaggctggcaatcatcatacttggaactgtgcttgcggtattattcatatcgttggttctgcttctttttgagacgaaaaagaaacttaatgacattagtccggcaaaactcaccgctcgggagagagaaattttcaatcttcttctgaccgatctttccacaaaggaaatcgcccacgaaatgaaattaacctattcaggggttaattttcatattcaaaatctttacggcaaacttggcgttcaaagccgcacggaactgcttgctaaatttgtgaataagcccaattcagagtaa

SEQ ID NO: 23552 - protein, 286 aa, Unknown
  Obtained from environmental sample
  DOMAIN (49)...(129): Cache domain
  misc_feature (1)..(286): Xaa is any amino acid
MYTTGVYGVFDIFGGKFHDGTGWIPPDGFIPQERPWYKAAVEANGETAVTEPYISVATGILTMTFTRRIFSADNKPLGIICLDIVLDRVRELAVNTNFAHSGYGILFNSQLDILAHPNKDLWGKNMTDVSASFIPIAEDIKNGIPVLEHRITNYKGEPSVAFTRKLQNGWFIAVIIPENIYFKEMRAMRLAIIILGTVLAVLFISLVLLLFETKKKLNDISPAKLTAREREIFNLLLTDLSTKEIAHEMKLTYSGVNFHIQNLYGKLGVQSRTELLAKFVNKPNSE

SEQ ID NO: 23553 - DNA, 597 bp, Unknown
  Obtained from environmental sample
  misc_feature (1)..(597): n is a, c, g, or t
atgaaaaagttatttaaacttttagcaattatcgcctttatagcggtaatcggcttttcaatggcggcttgtcccggcgacggcggaggcggaggcggaggcggaggcggcggtggaggcggaggcggaggcagcggtgactctactctaaccggaacggtaagcattagcggaaccgccgaagtggggcaaacgttgacagcggatactaccgctcttggcggcagcggaaccattacctaccaatgggaaaggggagatcaagttgtcggcgaaaacaacagtacctatctgattgtagccgctgatataggttcaaccatcaccgtaaccgtaacacgcgcgagctattccggcagtgttacaagcaacccgacagcggttgttatcgcaaaacccggaaccctaaacgtcaccgttaccatcgaaacagacgcagttatctccggcccgtctatcgtggacggcgtattaaccttgagccggactgctacggcaacgctgaccttgccaatagcgcgcagtatgacgctggcagtatcaggtggaaagtacaaaacacggcgattaccggaagcggagccacgtttacactga

SEQ ID NO: 23554 - protein, 198 aa, Unknown
  Obtained from environmental sample
  SIGNAL (1)...(22)
  misc_feature (1)..(198): Xaa is any amino acid
MKKLFKLLAIIAFIAVIGFSMAACPGDGGGGGGGGGGGGGGGGGSGDSTLTGTVSISGTAEVGQTLTADTTALGGSGTITYQWERGDQVVGENNSTYLIVAADIGSTITVTVTRASYSGSVTSNPTAVVIAKPGTLNVTVTIETDAVISGPSIVDGVLTLSRTATATLTLPIARSMTLAVSGGKYKTRRLPEAEPRLH

SEQ ID NO: 23555 - DNA, 1020 bp, Unknown
  Obtained from environmental sample
  misc_feature (1)..(1020): n is a, c, g, or t
ttgggtatggccacggccaactcgcttatggcggtggctcacggcgcgcgtcaggtggagtgcacgataaacggcataggcgagcgggcgggcaacgcgtcgcttgaagagattgttatggcgataaaactgcgccaagatttttttaatctgagcacgggtattgacactaccaaaattatgcagaccagcaggctcgtccgtaatatttgcaatatgccggtgcagcccaataaggcgattgtcggggccaacgcgttcgcccactcgtcggggatccaccaagacggcgtcctcaaggagaggaatacttatgaaattatgacgcctgagtccgtcgggctcacgaccaatagtatgaatctgacagggcgttcggggaggcatatacttaagacgcgtttggcggatttgggctacgcggaaaccgaatacgatatggatgcgttctatacgatgttcaaggaattggcggatcgaaagggtacggtatatgacgacgacctaatgatgttgatggagaaattattgggcaataaagatacgaataggtatacgcttgaataccttgaagtgttatgcggtaaaggcgagggcgttgccacaaaagcgaaagtacggatcaagtgcggtggtgaccctatactgttgccggagaaagaagctgtcggcaacggcgcttttgatgccgctaagaacgcgattgacaaagttttcgaagacttcggtataacaatcaaggagtatcatcttgacgcgataacaggagggagcgacgcggtgggaaaggtgacgatacatgcgtcaacggcggaggagggaaagtttgttggcaccgattccagtaccgacatcgtcgtagcatcggcaaacgcctatatggacatcgtcaataaagtcgatatggtaaaaaggttcaagcgtaaagtggccaaaggcggcgacgcggattcggaaattgccggcacaaaaacaagttcgtttgctataatgggggagtatatgcaggatcaggattaa

SEQ ID NO: 23556 - protein, 339 aa, Unknown
  Obtained from environmental sample
  DOMAIN (163)...(301): LeuA allosteric (dimerisation) domain
  misc_feature (1)..(339): Xaa is any amino acid
MGMATANSLMAVAHGARQVECTINGIGERAGNASLEEIVMAIKLRQDFFNLSTGIDTTKIMQTSRLVRNICNMPVQPNKAIVGANAFAHSSGIHQDGVLKERNTYEIMTPESVGLTTNSMNLTGRSGRHILKTRLADLGYAETEYDMDAFYTMFKELADRKGTVYDDDLMMLMEKLLGNKDTNRYTLEYLEVLCGKGEGVATKAKVRIKCGGDPILLPEKEAVGNGAFDAAKNAIDKVFEDFGITIKEYHLDAITGGSDAVGKVTIHASTAEEGKFVGTDSSTDIVVASANAYMDIVNKVDMVKRFKRKVAKGGDADSEIAGTKTSSFAIMGEYMQDQD

SEQ ID NO: 23557 - DNA, 1434 bp, Unknown
  Obtained from environmental sample
  misc_feature (1)..(1434): n is a, c, g, or t
atgggttcagtccttgttgacgacaatgaaatgaaggttaccttaattttaacgcctccgggagaaggcggctgcgaccttacggtagaaaattttcacagcctgcttatacagaacagggtttacaacggagtaaaagaagaattcttgcaggaattcgcggacagcccggtttacagggaacatgtggaagtcgccgaggggctaaggcccgtcaacggcaaagacgcctatattaaatataattttgaaaccgatcagacaaaaatatcgttaaaagagggagcaaacggcaaggttaattttaaggaactcaatattattcaaaacgtaacggcggactcgattcttgcgacaaaagtaccgccggaagacggcgttgacggcaagaccgttacgggaaaaatacttcccgccagagccggaaacgacatccccatgcctgtcgggaacaatgtgcgcctcaacgataacgaagacaccattctggcgaatattaacgggcaggtactggtagcaaacggcaagattaacgtggagcctgtgctgaccgttgaaggcgacgtaaacttaaaaaccggaaatatcattttccttggaaatgttattatcggcggaaatgtggaagacggattctcagtaaaagcggacggaaatatagaaataaaaggaactgtgtcaaaagcggaattggacgcggaaggcgacattattatttatcagggagtaaacggcaaaggcggcgacaagaaaataagagcggggcgttcgctttggtcgcgttttattgaaaacgccaatgtagaagccggcaatatggtagctgttaccgacggaattatcaattcaaatgtcgatgcgataaagagcattgtttgtatgggcaaacgcgctaatatcatgggcggccgcttgcgcgcgggagaggaaataaacgccaaagttctgggcaactcaacaagcggtacggaaacaatctgcgaagttggttttgatccgcacagcaaattggaattggaacgtttgcaggcaataaaagcaaaatcagaagaagaacttgaagcgatgaagctggacttgcaaacattagtaaatacaaaaaaacagcgtaaaacactgcccgacgataaagaagcgtatttgcaggaattaacggaacgcaagcaagtattaaccgatgagttaaccgatgttaatgaaaatatcacgaaagtccaggaattcatgaatcaaatgcaagttagaggaaaagtatccgcgtccacaaaagtatggcccggcgtaaaaatattgattcgcgacgtaaaagaagacgtaagaacagagtatcgcgcggtaacctttgttctggaagacggacttgtcagggctacaaaatacgaggagcctgacgagcttgcgatgaaggggcttgatggctataactccaattga

SEQ ID NO: 23558 - protein, 477 aa, Unknown
  Obtained from environmental sample
  DOMAIN (1)...(460): Protein of unknown function (DUF342)
  misc_feature (1)..(477): Xaa is any amino acid
MGSVLVDDNEMKVTLILTPPGEGGCDLTVENFHSLLIQNRVYNGVKEEFLQEFADSPVYREHVEVAEGLRPVNGKDAYIKYNFETDQTKISLKEGANGKVNFKELNIIQNVTADSILATKVPPEDGVDGKTVTGKILPARAGNDIPMPVGNNVRLNDNEDTILANINGQVLVANGKINVEPVLTVEGDVNLKTGNIIFLGNVIIGGNVEDGFSVKADGNIEIKGTVSKAELDAEGDIIIYQGVNGKGGDKKIRAGRSLWSRFIENANVEAGNMVAVTDGIINSNVDAIKSIVCMGKRANIMGGRLRAGEEINAKVLGNSTSGTETICEVGFDPHSKLELERLQAIKAKSEEELEAMKLDLQTLVNTKKQRKTLPDDKEAYLQELTERKQVLTDELTDVNENITKVQEFMNQMQVRGKVSASTKVWPGVKILIRDVKEDVRTEYRAVTFVLEDGLVRATKYEEPDELAMKGLDGYNSN

SEQ ID NO: 23559 - DNA, 336 bp, Unknown
  Obtained from environmental sample
  misc_feature (1)..(336): n is a, c, g, or t
atggaagaaattcgctcaatagaaatcgccccgcttgcgtacatgagagggcgaagccttaacgattgcatggtaattttagacgaagctcagaacactactaaagaacagatgaaaatgtttttaacaagaatcggttcgggcacgcgggcggtaatcacgggagacaacacgcaaattgacctgccccgtaaatcggattcagggcttttgcacgctctggaaatattaaggaacgttgagggattaagtttttcttttttgcatacttgcgacgtggcgagaaatcccttaataaaaaaaataatacaggcatacaatgaaagtgaaaaatga

SEQ ID NO: 23560 - protein, 111 aa, Unknown
  Obtained from environmental sample
  DOMAIN (1)...(107): PhoH-like protein
  misc_feature (1)..(111): Xaa is any amino acid
MEEIRSIEIAPLAYMRGRSLNDCMVILDEAQNTTKEQMKMFLTRIGSGTRAVITGDNTQIDLPRKSDSGLLHALEILRNVEGLSFSFLHTCDVARNPLIKKIIQAYNESEK

SEQ ID NO: 23561 - DNA, 840 bp, Unknown
  Obtained from environmental sample
  misc_feature (1)..(840): n is a, c, g, or t
atgcaaaaaaaagtttatggcagagctatgtatgtaagcaaaataaagccgtttataggtaaaaatataaccaaagtgctgactgggcaccgcagggtgggcaaaagctatattttgttccagcttataaacgaaattaaaaaaaatgagccaaaggcaaatataatttacataagcaaagaagatattgcctttgaccatatttgcgattatcacgatttagacaaatatttagccactgtgtctgtgaaaaacaaaatgaattacatatttattgacgaaattcaattgataaaggattttcacaaaaccataaaatctctgatgttaaagaataacaacgatatttacataacaggaagcaattctgatatgctttcgggtgatttagccaatgaactcggtgggcgttatattgaatttacaattcacagtttgtcttatatggaatttttgcagtttcacaaattggaaaacaacgatgattctttggaaaaatacattcgctatggcggtatgccttatttaattcatttgccttttgaagaagaaattataagggaatatttgaatagtgtttattccacaattattttgaaagatgttatagctcgcaaaaaaataagaaatacgttttttttggaacagttggtaaaatatttggctggaaatgtaggtaatttattttcatcaaaaagcataagtgattatttaaaaaatcaacgcaccgaaatttccacaaatcaggttattgaatatatctctgctcttttagatgcttttgtgattcacaaagttgatagatacgatattgtagggaaaaaagtattgaacgggtga

SEQ ID NO: 23562 - protein, 279 aa, Unknown
  Obtained from environmental sample
  DOMAIN (4)...(179): Archaeal ATPase
  misc_feature (1)..(279): Xaa is any amino acid
MQKKVYGRAMYVSKIKPFIGKNITKVLTGHRRVGKSYILFQLINEIKKNEPKANIIYISKEDIAFDHICDYHDLDKYLATVSVKNKMNYIFIDEIQLIKDFHKTIKSLMLKNNNDIYITGSNSDMLSGDLANELGGRYIEFTIHSLSYMEFLQFHKLENNDDSLEKYIRYGGMPYLIHLPFEEEIIREYLNSVYSTIILKDVIARKKIRNTFFLEQLVKYLAGNVGNLFSSKSISDYLKNQRTEISTNQVIEYISALLDAFVIHKVDRYDIVGKKVLNG

SEQ ID NO: 23563 - DNA, 882 bp, Unknown
  Obtained from environmental sample
  misc_feature (1)..(882): n is a, c, g, or t
gtgttcaacgaagaacccataggttttcagggctttgcgctgaacttgcgcagggaaaaattcaaagatgttcgtgttcgcaaagccctttcccttttgctcaacagagaacttatgagcgagaaatttatgttcaatcaatattttctgctaaatacatattacccaagtctttggggtgggcataaaaatccatactctcccctatacccttatgccccggattccgctcgtaaacttatggaagaggctggctacacagtaaatgcgagtggcaaacttgtggacaaaactggaaaaccatttgaactcactttcttaaaccacgccgaagatattcgccacacaacaaaattccaagaagacctaaaagcagtcggcattgaatccaacatagaaacagtttcgctttccacattccgccagcgcattgacgatgcgaactttgacttgtgctggctcgcatggggtgcgggtcgtttgagcgatccggaggcaagttggcattccaaaaccgcaaacgacaaaggcacaaacaacgtgcccggcttgcaagacaaaattatagacagccttatagaagcccaaaaaaccgagctgaatttggatgcccgcaacaatatattgaggaatctggacacccgtctaactgaaatagttccatatattttgctatggcaatccgaaaattccaaaatcctgcattggcggcgttttggctatcctgggtcgttatacggcaaattcaatagggaagatgcaataccggtatattggtggtataatcccgaaaaagctggagaacttcaaaaggcacaaaagagcaatgagactttacccgttgaagaagtggatgtgcccttccaaagtagctgtcattag

SEQ ID NO: 23564 - protein, 293 aa, Unknown
  Obtained from environmental sample
  misc_feature (1)..(293): Xaa is any amino acid
MFNEEPIGFQGFALNLRREKFKDVRVRKALSLLLNRELMSEKFMFNQYFLLNTYYPSLWGGHKNPYSPLYPYAPDSARKLMEEAGYTVNASGKLVDKTGKPFELTFLNHAEDIRHTTKFQEDLKAVGIESNIETVSLSTFRQRIDDANFDLCWLAWGAGRLSDPEASWHSKTANDKGTNNVPGLQDKIIDSLIEAQKTELNLDARNNILRNLDTRLTEIVPYILLWQSENSKILHWRRFGYPGSLYGKFNREDAIPVYWWYNPEKAGELQKAQKSNETLPVEEVDVPFQSSCH

SEQ ID NO: 23565 - DNA, 333 bp, Unknown
  Obtained from environmental sample
  misc_feature (1)..(333): n is a, c, g, or t
ttgatcgcgaggccgacatatgcactgacgagtggcggtcatatattggggcttaataaagactatacgcatttgactgtgaagcataaagcgtggcagttcaaaagtggcatagccagcacaaattcaatagaaagcagatgggcgatttttaaacgcggctattatggcacgtttcattatatgtcgcctaagcatttgcaaagatacgctgacgagtttgattttcgccataatgacggcaatgtcaaatatcaaactatggagagggtggatagcttgactgctgggtgctggggaacgcggctgacttggaagaggctggtagcatga

SEQ ID NO: 23566 - protein, 110 aa, Unknown
  Obtained from environmental sample
  misc_feature (1)..(110): Xaa is any amino acid
MIARPTYALTSGGHILGLNKDYTHLTVKHKAWQFKSGIASTNSIESRWAIFKRGYYGTFHYMSPKHLQRYADEFDFRHNDGNVKYQTMERVDSLTAGCWGTRLTWKRLVA

SEQ ID NO: 23567 - DNA, 1377 bp, Unknown
  Obtained from environmental sample
  misc_feature (1)..(1377): n is a, c, g, or t
gtggcgcgttcttatccgcctattcaacagggggcttacggctcccacggccacggaatcgccgccaaaggaagcaacgtgttccgccagctctacaacgatgaaaaggcccgtaaaactgacatttacacggtttacacgaataccgcggccgcgggggcaatgcgcggctacggtacaccacaggcggtgttcgccatagagtcccatattgaggacattgctaaaagcctaaaacttgatccgctggaattccgtttcctcaacgtgatgcctgtcggttttgttgacagttttacaaaaaatgtcaatctgtttgattcgttccgccaatgcgtggaggccggtaaaaaacgaatcaaatgggatgaaaagcgcgagcgttatgcgaaacagagcggcccggtaaggcgcggtatagggatgtccctgttctggtataacaccgccgtctggcccatttcgatagaaatttcatcatgccgcatggtgatgaaccaggacggcagcgtacagatgcagcttggcgaaaccgaaatagggcaaggggcggacacggtcttttcccagatggccgcccagaccctggggataccctggcagacggttcatatcatcagcacgcaggacacggacattacgccttttgggttaggcgcttacggctcacggcaaacctatgtcggcggcgccggcgtacacaagaccgctcttctgctaaaggaaaaaatcttaaaagccgcgtccctgtacgcgaaaattcccattgtcgatcttaatattgttaatggcgatattgtcaatacttcgcttaacaacaaaaaaattgtcagccttggggaacttgctgttgataccatgtaccacaccgaacatgccgaacatttgaccgccgaggctaccgcccaggttaaaagcaacgcttatagctttgggtgcgcctttgccgaggtagaagttgacatccctttctgcaagataaagctgctgaaaatggttaattgccacgactgcggcactgtgatcaaccctaaaaccgccgaggcgcaggttcacggcggcatgagcatggcgattggctatggattgtatgagaagatgttatacgataccaaaacggggaaactcctcaatggcaacctgcttgactacaaactgccgacgattatggatcacccgagacttgcggttgaatttatcgaaaaccccgagccgacaagtccttacgggacaaaggccctcggcgaaccgccgactgtgccgggcgcttcggctattcgtaatgccgtgcttcatgctaccggcgtgggaatcaataccatcccgcttacgcctcatgtgctttttacggaattcagcaaagccggactgctgtaa

SEQ ID NO: 23568 - protein, 458 aa, Unknown
  Obtained from environmental sample
  DOMAIN (2)...(393): Aldehyde oxidase and xanthine dehydrogenase, molybdopterin binding domain
  misc_feature (1)..(458): Xaa is any amino acid
MARSYPPIQQGAYGSHGHGIAAKGSNVFRQLYNDEKARKTDIYTVYTNTAAAGAMRGYGTPQAVFAIESHIEDIAKSLKLDPLEFRFLNVMPVGFVDSFTKNVNLFDSFRQCVEAGKKRIKWDEKRERYAKQSGPVRRGIGMSLFWYNTAVWPISIEISSCRMVMNQDGSVQMQLGETEIGQGADTVFSQMAAQTLGIPWQTVHIISTQDTDITPFGLGAYGSRQTYVGGAGVHKTALLLKEKILKAASLYAKIPIVDLNIVNGDIVNTSLNNKKIVSLGELAVDTMYHTEHAEHLTAEATAQVKSNAYSFGCAFAEVEVDIPFCKIKLLKMVNCHDCGTVINPKTAEAQVHGGMSMAIGYGLYEKMLYDTKTGKLLNGNLLDYKLPTIMDHPRLAVEFIENPEPTSPYGTKALGEPPTVPGASAIRNAVLHATGVGINTIPLTPHVLFTEFSKAGLL

SEQ ID NO: 23569 - DNA, 621 bp, Unknown
  Obtained from environmental sample
  misc_feature (1)..(621): n is a, c, g, or t
atgaccaatcatctggatataaacaaggaagaactgcgccgccgtaccgccgaacttctggagaaagtgggtcttcaccccgataccgcaaagcagtatccctttgaactttccggcggaatgcagcagcgggttatgatcgcccaggcaatcagttgttatcctgaactgcttattgccgatgaaccgaccaccgcccttgaccttaccattcaggcgcaggtattaagtctgatcagaagcctgcaaaaagaactttcccttacggtgctgcttattacgcataacttcgccctggtcacggaaaactgcgaccggacatcggtaatgtacgcgggacgcattgtagaaaccgctcccgccagaagccttatcgagtccgccgcccatccttacacccgcgcactgatcaactgcataccccattcaaataccggcggaaaccgtcaggaaaaacttccggtgatttccggttcccctccgaggctctacgcccccctcaggggttgtccctttgttccccgctgttccagatccgataaagcctgcgttgaaatacccgcggctacggaccttggcgggggaagatcggtgtgttgtcaccacctgggagacgcgtaa

SEQ ID NO: 23570 - protein, 206 aa, Unknown
  Obtained from environmental sample
  DOMAIN (1)...(113): ABC transporter
  misc_feature (1)..(206): Xaa is any amino acid
MTNHLDINKEELRRRTAELLEKVGLHPDTAKQYPFELSGGMQQRVMIAQAISCYPELLIADEPTTALDLTIQAQVLSLIRSLQKELSLTVLLITHNFALVTENCDRTSVMYAGRIVETAPARSLIESAAHPYTRALINCIPHSNTGGNRQEKLPVISGSPPRLYAPLRGCPFVPRCSRSDKACVEIPAATDLGGGRSVCCHHLGDA

SEQ ID NO: 23571 - DNA, 849 bp, Unknown
  Obtained from environmental sample
  misc_feature (1)..(849): n is a, c, g, or t
atgaaatactggggattgtcggagaatcccggctgcggcaagtctacgctgggcaggcttatactgcgcctgattgaaccggacgcggggcaggtgtattttcagggtgaggaatttaccggaatcaaacgggacgctttacgcttaaaacgcaaagcaatgcaaatggtttttcagaatcctttttcctcttttaacccgaagattactatcggcggggcgcttatggaagtatgccgctattacggcatgactattcccgaaagcaaagaaaaaatagatcgcctgttaaatgatattggactgtcaggcgatatacttaacagttggtcgcgggaactttcggggggacagcttcaacggcttgccatagcaagggctattatcggggagccttccctgcttatcgccgacgaacctttatccgctcttgacgtgtcggttcaagcgcagcttcttaacctgcttgatgatctccgcgccgctcgttctatggctatgatttttatctctcatgatatgacagtagttgaatacttttgcgacaagattgcgattatgtacatgggcaaagtaatggaatttgtttcctcaactgaattgtcacataacgcaattcatccgtataccctttctctaaaggcaagcgcgcccaggtttgatgtttttaagaactttgtcgaagaaaaaaaagcgccgattcacggagaaatgactaatcgccggggacaaattaagggatgtccttttgccccgcgctgtatgagggcaatgcctgaatgcgtcgaatctttaccggaacttattgaagcatcgcccgaacattttgttcgctgtcattatttttag

SEQ ID NO: 23572 - protein, 282 aa, Unknown
  Obtained from environmental sample
  DOMAIN (193)...(261): Oligopeptide/dipeptide transporter, C-terminal region
  misc_feature (1)..(282): Xaa is any amino acid
MKYWGLSENPGCGKSTLGRLILRLIEPDAGQVYFQGEEFTGIKRDALRLKRKAMQMVFQNPFSSFNPKITIGGALMEVCRYYGMTIPESKEKIDRLLNDIGLSGDILNSWSRELSGGQLQRLAIARAIIGEPSLLIADEPLSALDVSVQAQLLNLLDDLRAARSMAMIFISHDMTVVEYFCDKIAIMYMGKVMEFVSSTELSHNAIHPYTLSLKASAPRFDVFKNFVEEKKAPIHGEMTNRRGQIKGCPFAPRCMRAMPECVESLPELIEASPEHFVRCHYF

SEQ ID NO: 23573 - DNA, 957 bp, Unknown
  Obtained from environmental sample
  misc_feature (1)..(957): n is a, c, g, or t
ttgatggccgaggcggcaatgattgtatacgttgtcatgaacagagtaatccatccgattgtaatggtggctgaccaactcaaagatattgccgaaggcgaaggagatttaacccatgctatcccgatacattccgatgacgaagtaggcgatcttgccaagtatttcaatgagaccctggagaaaatcaaaaaccttgtcgtaaatgttaaaaaagaaggacacggtttatctgacatcggaactgatctttcggccaacatgaacgaaaccgccgccgccgtgaacgagattaacgcaaatatccagagtattaagggaaggattataaaccagagcgccagcgtcagcgaaactcacgcgactatggaacagcttaccgtaaacattcataagcttaatgaccatgttgaaaatcagagctctcatatttctcaagcgtcgtccgctattgaagagatgatggcgaatataagttcagttacaggaacgcttattaataacgcggctaatgtgaagacgttaatagacgcctccgaagtgggaaagaccggattgcaggaaatgtcgacagacattcaggaaatatccagcgaatcagaaggcttgcttgagattaacatggtgatgaaaaaaatcgccagccagacaaatttattgagtatgaacgccgcaatagaagccgcccacgccggagaagcgggcaaaggctttgccgtggtcgccgatgaaattcgcaaactcgctgaaaattccagcgatcagtccaaaactatcagcgcggtgttgaaaaagataaaggaagcaatcgacaaaataatacattccaccgaaaacgtacttgctaaattcgaggcaattgacaaaaacgttcaaactgtagcgactcagggagaaagtatccgtaaatcaatggaggagcaactacgggaaagcaacaggtgcttgagggcataa

SEQ ID NO: 23574 - protein, 318 aa, Unknown
  Obtained from environmental sample
  DOMAIN (1)...(65): HAMP domain
  misc_feature (1)..(318): Xaa is any amino acid
MMAEAAMIVYVVMNRVIHPIVMVADQLKDIAEGEGDLTHAIPIHSDDEVGDLAKYFNETLEKIKNLVVNVKKEGHGLSDIGTDLSANMNETAAAVNEINANIQSIKGRIINQSASVSETHATMEQLTVNIHKLNDHVENQSSHISQASSAIEEMMANISSVTGTLINNAANVKTLIDASEVGKTGLQEMSTDIQEISSESEGLLEINMVMKKIASQTNLLSMNAAIEAAHAGEAGKGFAVVADEIRKLAENSSDQSKTISAVLKKIKEAIDKIIHSTENVLAKFEAIDKNVQTVATQGESIRKSMEEQLRESNRCLRA

SEQ ID NO: 23575 - DNA, 357 bp, Unknown
  Obtained from environmental sample
  misc_feature (1)..(357): n is a, c, g, or t
gtgggactgatcaaacccgcgtattcctgcatgttgaccctggccatggaccttgcaggcgggaaatggaagatggtcatactctggcaactgcgaggcggcgtcgtccgcttcagcgtattgaagcgtcaactcgacgggatcacacaaaagatgcttacgcagcagttgcgcgaacttgaagactcagggcttgtccgacgcaccgtgtatccggtcgtgccgcctaaagtggaatacggcctgacggcggaaggcgaaaaatgcattccggctttggaactcctgtgccgctggagtaccgaatacgccgccgcgcacggcatagcccaagcgacttgccgctcaggcggataa

SEQ ID NO: 23576 - protein, 118 aa, Unknown
  Obtained from environmental sample
  DOMAIN (18)...(108): HxlR-like helix-turn-helix
  misc_feature (1)..(118): Xaa is any amino acid
MGLIKPAYSCMLTLAMDLAGGKWKMVILWQLRGGVVRFSVLKRQLDGITQKMLTQQLRELEDSGLVRRTVYPVVPPKVEYGLTAEGEKCIPALELLCRWSTEYAAAHGIAQATCRSGG

SEQ ID NO: 23577 - DNA, 345 bp, Unknown
  Obtained from environmental sample
  misc_feature (1)..(345): n is a, c, g, or t
atgcttccggtatacagattatatcttcccttccgccctgcaaacgattccgccccagtatgtttgagcccgccaaaatcgagggaggcgaccggctgggagtgtttctggaaaattaccttccccatggtcagccccctgatactggtcaatgttgtttacagcgtggttgattattttatcaggaccgataaccgcgtcatggaaaagataagggtaaccatgatgcagcgtatggaatatggtttttctaccgctatggcctgggtatattttcttgccgttattgtgatcatcggtatcgcgatggcgttgatttcccgaaaggtgtactactatgaataa

SEQ ID NO: 23578 - protein, 114 aa, Unknown
  Obtained from environmental sample
  misc_feature (1)..(114): Xaa is any amino acid
MLPVYRLYLPFRPANDSAPVCLSPPKSREATGWECFWKITFPMVSPLILVNVVYSVVDYFIRTDNRVMEKIRVTMMQRMEYGFSTAMAWVYFLAVIVIIGIAMALISRKVYYYE

SEQ ID NO: 23579 - DNA, 669 bp, Unknown
  Obtained from environmental sample
  misc_feature (1)..(669): n is a, c, g, or t
ttgaacggcaagcaggcaggcgaaacgccattcagcggttctgttcctgtgtgtgcggatatagagcttggcaagagccgtgaaaaggtggatgtgaagttgaagcataacgagaaggttgagcatacggtgaagggcggcggcgtgagtggcggttctcttgtggattcccgcgatggcaaaaagtataaggtggtaaagataggcacacagacttggatggcggagaatttgaattataacgttggtggctcaaaatgctatgaaaatcaggaaagcaactgccagaaatacgggcggctttataattggtcaacagcaaaaacggcttgccctaagggttggcatttgcctaccaaagatgaatatggcaggttggataattttgttggcggcaaaaaaacggcaggcaaatttttaaaggctacgaatggctggaataaaaatggcaacggcacggatgcctacagtttttcggctctgcctggcggctacggctattccgatggcagtttcggcaatgtcggctactacggcaactggtggagtgcctccgagcacaatagcaactacgcctactaccggtatatgggttacgactacgagttcgccgactacctcaacgactttaagagcagcttgttctctgtccgttgtctgcaggactaa

SEQ ID NO: 23580 - protein, 222 aa, Unknown
  Obtained from environmental sample
  misc_feature (1)..(222): Xaa is any amino acid
MNGKQAGETPFSGSVPVCADIELGKSREKVDVKLKHNEKVEHTVKGGGVSGGSLVDSRDGKKYKVVKIGTQTWMAENLNYNVGGSKCYENQESNCQKYGRLYNWSTAKTACPKGWHLPTKDEYGRLDNFVGGKKTAGKFLKATNGWNKNGNGTDAYSFSALPGGYGYSDGSFGNVGYYGNWWSASEHNSNYAYYRYMGYDYEFADYLNDFKSSLFSVRCLQD

SEQ ID NO: 23581 - DNA, 1269 bp, Unknown
  Obtained from environmental sample
  misc_feature (1)..(1269): n is a, c, g, or t
atgcatagaggcgaacttctcaaacatctgtcgcccattcactcgcccatgctttgcgccgctgtgtatatgcgcagatacagaaaaataaaaacaaaaatcgcggcgatttcgccctgcgtggcgaaatcgcatgagttcgacgccaccggcctggtggattacaacgtcacttttaaagggctgctcaaatatatacaggagaatcaggtttctttccccgcccaggccggcggctttgaccattttaaagccgggctgggctcgctttaccctatgcccggcgggctgaaggaaaatgtagaacattatgtcggcaaatcgcttcgggttgataaatccgaaggtccgggcgtggtttacaaggctctggacgaatatgcccgccagtcggccaaagatctgcctgttttgttcgatgtcctaaactgcgctgaaggatgcaacatgggcaccggctgcaaccatgatgaaagcatttttgaaataaattccatgatggacggcgcgcggcagaaatcaattgataagggcaacgtaaaacatctcgacaagttatttgaagaatttgacaaaaagctgcgcctagatgattttatcagggtttacgcccctgtcccggtaaagcctatcaaggtatcggcgcaagacatagaaaaggcctatgatgcgcttgaaaaacaagatgacagggataaagagttcaactgcggcgcctgcggctgcgacacctgccgggaaatggccgtgaaaatcgccaaaggcataaatattccgctcaactgcattgaccgggcgcacaagaacctgcggcgcgaatacgaggaggccaaaagcaatttaagcagctttgatgacattctggccgaatcagagcaaataaaacagctgaccgagcatatcgtggtgaatgtcggagatataacccaagcgattgccgcctataaaagcatggccgccgagattgagaaaattgccatgcaggtcaatcttattgccataaacgcctcggtcgaagccgccagggccggtgaagccggcaaggccttcagcgtggtggccgaggaaataaggcggctttcgcagaactccgaggcttcagccaagcaaacggcggccgtttcggaaacggccaccaaggcgattgttgatgttaatgaaataatagggaaaattaacataagcgtccacgcgtcatatgaaaacatttctcgcgtggcggaaaaaaccaggaaattatcagcgtcgccgcaggctcaaacatcttaa

SEQ ID NO: 23582 - protein, 422 aa, Unknown
  Obtained from environmental sample
  DOMAIN (234)...(265): Putative Fe-S cluster
  misc_feature (1)..(422): Xaa is any amino acid
MHRGELLKHLSPIHSPMLCAAVYMRRYRKIKTKIAAISPCVAKSHEFDATGLVDYNVTFKGLLKYIQENQVSFPAQAGGFDHFKAGLGSLYPMPGGLKENVEHYVGKSLRVDKSEGPGVVYKALDEYARQSAKDLPVLFDVLNCAEGCNMGTGCNHDESIFEINSMMDGARQKSIDKGNVKHLDKLFEEFDKKLRLDDFIRVYAPVPVKPIKVSAQDIEKAYDALEKQDDRDKEFNCGACGCDTCREMAVKIAKGINIPLNCIDRAHKNLRREYEEAKSNLSSFDDILAESEQIKQLTEHIVVNVGDITQAIAAYKSMAAEIEKIAMQVNLIAINASVEAARAGEAGKAFSVVAEEIRRLSQNSEASAKQTAAVSETATKAIVDVNEIIGKINISVHASYENISRVAEKTRKLSASPQAQTS

SEQ ID NO: 23583 - DNA, 564 bp, Unknown
  Obtained from environmental sample
  misc_feature (1)..(564): n is a, c, g, or t
gtgtctggccataagcgccctgctctactgctatctgggcaatgtgctgccccagggaatgagccacaggggcttcagcgttgcgcgcatcgtcaaccacatgtatctgggcacggaaggggtgttcggcacggcgctggaagtgtcctccacctttgtgttcatgttcatcctgttcggctgcgtgctggaaaaaaccggcatcggccgcttcatcatcgatctgtcgctggccctggcgggctgggcttcaggcggcccggccaaggtggcggtcgtggcttcgggcatcatgggcacggtgtccggctcctccgtggccaatgtctgcacgacaggcatgttcaccattccgctcatgaagagcgtgggctaccggccgcatttcgccgcagccgtcgaggcgaccgcgtccacaggcgggcagatcatgccgccggtcatgggcgcggccgcgttcatcatggcccagtttttgggctggccctacatcaaggtggccatagccgccattatcccggcccttctgtattacacggcggtgcttatccaggtgcattttga

SEQ ID NO: 23584 - protein, 187 aa, Unknown
  Obtained from environmental sample
  misc_feature (1)..(187): Xaa is any amino acid
MSGHKRPALLLSGQCAAPGNEPQGLQRCAHRQPHVSGHGRGVRHGAGSVLHLCVHVHPVRLRAGKNRHRPLHHRSVAGPGGLGFRRPGQGGGRGFGHHGHGVRLLRGQCLHDRHVHHSAHEERGLPAAFRRSRRGDRVHRRADHAAGHGRGRVHHGPVFGLALHQGGHSRHYPGPSVLHGGAYPGAF

SEQ ID NO: 23585 - DNA, 330 bp, Unknown
  Obtained from environmental sample
  misc_feature (1)..(330): n is a, c, g, or t
atgagcggaatggtgaacatgcctgtcgtgcagacattggccacggaggagccggacaccgtgcccatgatgcccgaagccacgaccgccaccttggccgggccgcctgaagcccagcccgccagggccagcgacagatcgatgatgaagcggccgatgccggttttttccagcacgcagccgaacaggatgaacatgaacacaaaggtggaggacacttccagcgccgtgccgaacaccccttccgtgcccagatacatgtggttgacgatgcgcgcaacgctgaagcccctgtggctcattccctggggcagcacattgcccagatag

SEQ ID NO: 23586 - protein, 109 aa, Unknown
  Obtained from environmental sample
  misc_feature (1)..(109): Xaa is any amino acid
MSGMVNMPVVQTLATEEPDTVPMMPEATTATLAGPPEAQPARASDRSMMKRPMPVFSSTQPNRMNMNTKVEDTSSAVPNTPSVPRYMWLTMRATLKPLWLIPWGSTLPR

SEQ ID NO: 23587 - DNA, 837 bp, Unknown
  Obtained from environmental sample
  misc_feature (1)..(837): n is a, c, g, or t
ttgaataagatgctggatgcgcaggtagatttttctgaccttaaactgtcatttatccgtaatttcccgaacgcttatgtggctttggaaaatttgacggtgacgggaaaggacgagtttgaaggcgaaacattggtggcatttaaaagtttcagcgtaacggtcgacatcaagagcgtcatcaagatggacaatatacgggtaaaatcaatactgttagatcaggcaaggataaacgcgcatatagcggaaaacggcagcgctaactggaatattataaaacccggcaaagaggaagaaaagccgtccgctgaaactcccgccgggaaaagcgcgcccgagaaatcatcttcgctcaaagtagcccttaataaattcgagatacgcggtgccaaactttcctttcaggacgataagggcaaaatgacggcggcggtaaatgacctcaatttcattctgcatggagatatgtcgctggataacgttgttttaaaattgaaattggatataaccgatatcaatttattgatgggcggcattcgtatgcttaacaacgcgcgcgccggctttgtttcggaagttgacgccgatcttaaaaatatggaattcaccttaaaagacaataaattcaatctgaatgaaattatcctgaaatttacgggaaaagcgaagatgcccggcgatatcatcgtcgacatgacctttgcaaccgaaactatagattttaaaaacgtgctggggcttgttccatccgtatttatgaagggctttgaatcaataaaaacaacggggcacctttgccctgtcgggggacataaaaggcgcatacaacgataa

SEQ ID NO: 23588 - protein, 278 aa, Unknown
  Obtained from environmental sample
  misc_feature (1)..(278): Xaa is any amino acid
MNKMLDAQVDFSDLKLSFIRNFPNAYVALENLTVTGKDEFEGETLVAFKSFSVTVDIKSVIKMDNIRVKSILLDQARINAHIAENGSANWNIIKPGKEEEKPSAETPAGKSAPEKSSSLKVALNKFEIRGAKLSFQDDKGKMTAAVNDLNFILHGDMSLDNVVLKLKLDITDINLLMGGIRMLNNARAGFVSEVDADLKNMEFTLKDNKFNLNEIILKFTGKAKMPGDIIVDMTFATETIDFKNVLGLVPSVFMKGFESIKTTGHLCPVGGHKRRIQR

SEQ ID NO: 23589 - DNA, 777 bp, Unknown
  Obtained from environmental sample
  misc_feature (1)..(777): n is a, c, g, or t
atgagggcaagcgagcttgaggcggacttcgcggaactgggcggatgggaagcggaagcgcaggctggtcagcttctttcaggccttggccttgacgaggaagatcacggcaaattaatggcggaacttgacgaatcaaaaaaagtacgcgtgcttttggcgcaggcccttttcggcagccctgacatcctgctccttgacgaacctaccaacggtttagacttagaatccatctcatggctggaagattttcttattgattttcccaacacggtaattgtcgtctcccatgaccgccatttcttaaacgcggtctgcacaaacgtatgcgacatagacttcggcaaaatcaccccgtattccggcaattacgatttctggtaccagatgagccagatactgcaaaggcaggcgcgggatcaattaaaaaagcgtgaagaaaaagcaaaagaattaaaagagtttatacaaaggttttcgtctaacgcaagtaaagcgcgacaggcgacaagccgcaagaaagtgctggaaaaactcgatcttgacaatgtgcccgttacaagccgcaaatttccgtacgcgggattcaagagcgaccgtgaaatagggaacaatgtactgagagcggaaaaattaaactacacttttgaggggaaatccctattaaaagatttttcgctaatggtaaacaagggcgataaaatcgcctttgtgggtcttgaacactcttccaagtcggcgttttttgacatcctcacaaatgagaaaaaaagctga

SEQ ID NO: 23590 - protein, 258 aa, Unknown
  Obtained from environmental sample
  DOMAIN (13)...(115): ABC transporter
  misc_feature (1)..(258): Xaa is any amino acid
MRASELEADFAELGGWEAEAQAGQLLSGLGLDEEDHGKLMAELDESKKVRVLLAQALFGSPDILLLDEPTNGLDLESISWLEDFLIDFPNTVIVVSHDRHFLNAVCTNVCDIDFGKITPYSGNYDFWYQMSQILQRQARDQLKKREEKAKELKEFIQRFSSNASKARQATSRKKVLEKLDLDNVPVTSRKFPYAGFKSDREIGNNVLRAEKLNYTFEGKSLLKDFSLMVNKGDKIAFVGLEHSSKSAFFDILTNEKKS

SEQ ID NO: 23591 - DNA, 384 bp, Unknown
  Obtained from environmental sample
  misc_feature (1)..(384): n is a, c, g, or t
atgaaaattttattggatatgaatatgtcaccgcaatgggtgaaagtattgacagataaaggcatatctgctactcattggtcaagtgtaggtttgtctaatgctagtgatatggagattatgacttttgcgaaagaaaacgattttattgttttaacgcacgatttagattttggagctattctctttgttacaaatgggcagaaacccagcgttgttcaattacgaataaatgatatttatcctgaaatagactcggattatttgatttctgctttgagctctgttaaaacagaacttgaacaaggagctttactaataatagatacgaaaaaaactcgtattaggattttaccgctgggaaatgattatgggattacctaa

SEQ ID NO: 23592 - protein, 127 aa, Unknown
  Obtained from environmental sample
  misc_feature (1)..(127): Xaa is any amino acid
MKILLDMNMSPQWVKVLTDKGISATHWSSVGLSNASDMEIMTFAKENDFIVLTHDLDFGAILFVTNGQKPSVVQLRINDIYPEIDSDYLISALSSVKTELEQGALLIIDTKKTRIRILPLGNDYGIT

SEQ ID NO: 23593 - DNA, 1080 bp, Unknown
  Obtained from environmental sample
  misc_feature (1)..(1080): n is a, c, g, or t
ttgggcgggccctggattttttcagtaaaaccgccctgggttatgaattggggggcaaaaatatcttcgggagataggatgcttcgtccacgtctttcccgaattctctatatgcgaaaatttttggactcccctgggtcgctaaatgcaaatccaataaaaggtctaggattatggggaaggccaaaaataggcacaagctatttaaaatccagtttatttcaaattaaaaaagaaaaaaatttgcgtgattttatgttgaaccgttttgggaattcgctctacttaacatttttcaaggattatacggaaaaggtttggggcattccatgcgaggagataagcgcggagtggggggcgcagaggataagggggttgagtatcgcgaagacaatcaagcacgcgttgttcaagaataccaaagagacaagcctgatagacgaatttctatatcccaaattgggccccggtgatttatggcagaaggccgctgacaaagttttggagatgggcggagagattctctttaacacccgcgtcgtaggggcggccctgcgtggccgcccgtcttcgtcgatagcaaaaatctctttatccgacggaaaatcgttcgagcccgattacgttttcagttcaatgccgattaaggatcttgtcaatataatggacgacgtgccgtcaaatgtcaaagaggtggcaaatgggttagtatatagagatttcattgctgtcggggtgcttttagacaagcttgagataggcgccatcaaagacaattggatttacgtgcaagagagcgacgtgaaggtgggcaggctgcagtttttcaataattggagcgagtacatggttaaggataaaagtaaggtatggctgggcatggagtatttcgcgaacgagggcgacgaattgtggaatatggatgcgcgggcgtttgcggagttggcggtaagcgagcttgaaaagataggcgtcgcgaagaagtccggggttttggatagtgtggtgataaaggttcccaaggcctacccggcttattttgggacatacgatcgttttaatgaagtcaaggaatggtga

SEQ ID NO: 23594 - protein, 359 aa, Unknown
  Obtained from environmental sample
  misc_feature (1)..(359): Xaa is any amino acid
MGGPWIFSVKPPWVMNWGAKISSGDRMLRPRLSRILYMRKFLDSPGSLNANPIKGLGLWGRPKIGTSYLKSSLFQIKKEKNLRDFMLNRFGNSLYLTFFKDYTEKVWGIPCEEISAEWGAQRIRGLSIAKTIKHALFKNTKETSLIDEFLYPKLGPGDLWQKAADKVLEMGGEILFNTRVVGAALRGRPSSSIAKISLSDGKSFEPDYVFSSMPIKDLVNIMDDVPSNVKEVANGLVYRDFIAVGVLLDKLEIGAIKDNWIYVQESDVKVGRLQFFNNWSEYMVKDKSKVWLGMEYFANEGDELWNMDARAFAELAVSELEKIGVAKKSGVLDSVVIKVPKAYPAYFGTYDRFNEVKEW

SEQ ID NO: 23595 - DNA, 585 bp, Unknown
  Obtained from environmental sample
  misc_feature (1)..(585): n is a, c, g, or t
atgggaatgagaatgtaccatgaattgagcgttgatatccccgaagaagaaacgcgcggcattgtaatttccctcgcgaatggcgattacagcaatgtgataaagaccgccgccggctggtttttcttccgctgcgaggaagcggcgcgggaagccgatttaaccgatccggcggttatggaaaaaataaaatcctatcttcgcaattttgagttcgggcgcatggagaactgggcgatagagaaggcgaatgtcttcatagcccttgtcaacgaacacggttttgacgaggcgctgtcattacagagccttgagagcaggagtttcggccctgttccgataaacttcggcaatgtggagctttttaccacgcttccgatccagtcggtacccgggctttcaggctcggcggaaaatgagaatttctggaaagccgccttttccacgcctgtcggaaaaccttcccagtggatagtgcaggggagcaacgtgctggtgcttttccctgtcgaggagatcgaggccgaagcttccagacaggagaccgtcgcttcaattataccgcgtactggctggattatatga

SEQ ID NO: 23596 - protein, 194 aa, Unknown
  Obtained from environmental sample
  misc_feature (1)..(194): Xaa is any amino acid
MGMRMYHELSVDIPEEETRGIVISLANGDYSNVIKTAAGWFFFRCEEAAREADLTDPAVMEKIKSYLRNFEFGRMENWAIEKANVFIALVNEHGFDEALSLQSLESRSFGPVPINFGNVELFTTLPIQSVPGLSGSAENENFWKAAFSTPVGKPSQWIVQGSNVLVLFPVEEIEAEASRQETVASIIPRTGWII

SEQ ID NO: 23597 - DNA, 573 bp, Unknown
  Obtained from environmental sample
  misc_feature (1)..(573): n is a, c, g, or t
atgtttggaactcagttgtttttatcggggatttctgacattgcccctattttttatgttaccggtaatcatgaatatatgagccgtaatatactgaaaatcagggaagaacttgcctcttttggggtaattattttatcggatgaatataaaacaattaaaataaatgacaatataatagtaattgccggaatagaggatccttataagaaaaaatatgaaacaccactttacaatcaaaatgagagtatggaaagagcttttagggaattggataaaatacaattatataaaatactattagcgcatcgtcctgaaaagattgaaatttacaagaaatattcatttgatttagttttatccggacatgcgcatggaggacaagtaataattccgcatattataaatggattatatgcgccccatcaaggatttttcccaaaatatgccggtggaatttatgatcatggaaggacaacgcatattataagcagaggactttctattactccgttacttcccagaatatttaaccctcctgaattggtagttattactattgaatcaaaataa

SEQ ID NO: 23598 - protein, 190 aa, Unknown
  Obtained from environmental sample
  misc_feature (1)..(190): Xaa is any amino acid
MFGTQLFLSGISDIAPIFYVTGNHEYMSRNILKIREELASFGVIILSDEYKTIKINDNIIVIAGIEDPYKKKYETPLYNQNESMERAFRELDKIQLYKILLAHRPEKIEIYKKYSFDLVLSGHAHGGQVIIPHIINGLYAPHQGFFPKYAGGIYDHGRTTHIISRGLSITPLLPRIFNPPELVVITIESK

SEQ ID NO: 23599 - DNA, 597 bp, Unknown
  Obtained from environmental sample
  misc_feature (1)..(597): n is a, c, g, or t
atgttttccggtttctatattacttcagatatactaaataaggaaactttatggtttgatttggaaaatatgaataaaaagaaatttggatattttccattgttaaatatttggaagattcagacggttgtattttttgatgatttacatatatcaagatcaattaaccgtattctgaaaaattatgaattaagaataaattataattttaaaaatgttttaaataatattatagaaagtcatggtaacgtatggataactccgccattaaaaaaaactttattgaaattaaacaaaggcaattataaggcaaaagccatatcttttgaagtatataaagacggagaattaaaagccggtgagattggaataaaaacaggaaaaatatataccagttattccgggttttacaacgaatcttccgccggatctgtgcagttggctatgatgttaaattatttaaaagacaataattttgtgttttgtaattttgggactgatgatagtataaagaataatttgtataagagaaaacttggagcggtttatattgacagattgaattttattagattatggagggaagggaggagataa

SEQ ID NO: 23600 - protein, 198 aa, Unknown
  Obtained from environmental sample
  DOMAIN (28)...(186): Leucyl/phenylalanyl-tRNA protein transferase
  misc_feature (1)..(198): Xaa is any amino acid
MFSGFYITSDILNKETLWFDLENMNKKKFGYFPLLNIWKIQTVVFFDDLHISRSINRILKNYELRINYNFKNVLNNIIESHGNVWITPPLKKTLLKLNKGNYKAKAISFEVYKDGELKAGEIGIKTGKIYTSYSGFYNESSAGSVQLAMMLNYLKDNNFVFCNFGTDDSIKNNLYKRKLGAVYIDRLNFIRLWREGRR

SEQ ID NO: 23601 - DNA, 1029 bp, Unknown
  Obtained from environmental sample
  misc_feature (1)..(1029): n is a, c, g, or t
ttggccgaggaattggtcagccgctcatccggtcaaaaacttgaactgcccgataacggctccgctcaatacgagcttggcgtaatcaccgccggactgggcggaaactactatgaggaaaatcttgccgatctgattgcccggcggaacggaaaagccccggcgcgtctgcacataggcgcataccccctgccccttgaatcaatacgtgcgctctgcgccgcctcggaagaaattctggtaattgaagaagggcagccgtttattgaagaaaaactgcgcggccttttgtctcaatccgtaaccatttatggcagattaaacgataaacaaaatgaaacaatgattgtcccccgtaccggggaacttgatcccgacaatgtgcggcaagccctggatctgccgccccggcccagtgtaaccgtgtccggctttaatcccgccgaccttccgggccgtcctccgcagctttgccagggttgtccccatgccgacagttatgaaacgatcaaaaaagcggcggcgcttcttgacgggcggccgggccaccccgatgtgggaatcaactcggacataggctgttattcgctgggagccgccccgccgtaccaggttccggaaagcatagtctgtatgggagcgtcggtaggcatggcgaaaggcgcggcggatgcgggacttaaatacagccttgccgttatcggcgattcaacatttcttcattcagggattaccggccttattgatgcggcggtcgcaaatgttcccatgaccctcattatactggataactccaccgtcgccatgaccggctgccaggaaaccatactttcttccggacaactgcggaacctgattatcggctgcggcgcgaacccggcgcatgttgtggaactggaagcgaagaaacagcttattgaagaaaatactgcgcggcttaaaactgaaatcgaatatcgcggcctttcggtagtgatcttcaggcgggaatgtcttgaggctttcagaaagcgaaataagaaatcttag

SEQ ID NO: 23602 - protein, 342 aa, Unknown
  Obtained from environmental sample
  DOMAIN (191)...(327): Thiamine pyrophosphate enzyme, C-terminal TPP binding domain
  misc_feature (1)..(342): Xaa is any amino acid
MAEELVSRSSGQKLELPDNGSAQYELGVITAGLGGNYYEENLADLIARRNGKAPARLHIGAYPLPLESIRALCAASEEILVIEEGQPFIEEKLRGLLSQSVTIYGRLNDKQNETMIVPRTGELDPDNVRQALDLPPRPSVTVSGFNPADLPGRPPQLCQGCPHADSYETIKKAAALLDGRPGHPDVGINSDIGCYSLGAAPPYQVPESIVCMGASVGMAKGAADAGLKYSLAVIGDSTFLHSGITGLIDAAVANVPMTLIILDNSTVAMTGCQETILSSGQLRNLIIGCGANPAHVVELEAKKQLIEENTARLKTEIEYRGLSVVIFRRECLEAFRKRNKKS

SEQ ID NO: 23603 - DNA, 858 bp, Unknown
  Obtained from environmental sample
  misc_feature (1)..(858): n is a, c, g, or t
atgacaggcaaatatatcaatgattttgtggacgcgattaaaaccggcaaattttttactttttccaatcacatcgcggctttgaagacagacctgaaaatattcctgattcccattactgtcggatctacgaagacctcctggagctacgcggtaggcattatgcgcaatacgataatggccccggtctaccaaatgcttacaatagccatagcgataagcgtcgcggtattgggcctgctggttttggcgtccatgttcctgtcccggtccatcagcaagccaatcgtcaaggtagcggttaccttaaaagacatatccgaaggcgaaggcgatttgaccaagcgaatagcgattaaatccagcgatgaaatcggcgaccttggccgctgctacaacctcacgatggaaaaaatcaggaacctggtgggaacaataaaatacaaaattaacgggcttaaccataccagttttgagctttccgccaatatgggcaaaacctcaaccgcagttcagcagattagttctcaccttgacaatatgaaaaacctgatggtcaagcaggagagcggcgcaaccgaagcgggcaaggcggtaggggagattaaggttaatattgacagccttaaaaaaatgatagaagaacaaactgacagcgtaaacaagtcgtcttcggctattgaagaaatgacagccaatattaattcagtaacccgtacgctggcggaaaacagcaaaaacgtaggcgtattgaccgaagcctcggaaaacggcaaaacgggtctccaattagtcgtgcagggaatacggggaaatagcccaggattcggaggggcttctggaaataaactcgtttaa

SEQ ID NO: 23604 - protein, 285 aa, Unknown
  Obtained from environmental sample
  DOMAIN (70)...(141): HAMP domain
  misc_feature (1)..(285): Xaa is any amino acid
MTGKYINDFVDAIKTGKFFTFSNHIAALKTDLKIFLIPITVGSTKTSWSYAVGIMRNTIMAPVYQMLTIAIAISVAVLGLLVLASMFLSRSISKPIVKVAVTLKDISEGEGDLTKRIAIKSSDEIGDLGRCYNLTMEKIRNLVGTIKYKINGLNHTSFELSANMGKTSTAVQQISSHLDNMKNLMVKQESGATEAGKAVGEIKVNIDSLKKMIEEQTDSVNKSSSAIEEMTANINSVTRTLAENSKNVGVLTEASENGKTGLQLVVQGIRGNSPGFGGASGNKLV

SEQ ID NO: 23605 - DNA, 852 bp, Unknown
  Obtained from environmental sample
  misc_feature (1)..(852): n is a, c, g, or t
gtgctggaacagctttccccaggcggtcaggctttgtacatagacgcgctggaaaattatcctggcattgcccaaggcaagtcggggtttgaattcagcgaggatctgcgccttcaggccgaaggcttcggggcaaaaattttaactgaagaggtcaaggcccttaacaaggaaggcgggctgtttacaattgcccttgcgagcggcaagacctttaaagctcatgcggtaattattgcgaccggtgcaaagcaccgcccacttggcattcccggcgaaaaggaattttcaggccggggggtttcttactgcgccacctgcgacggcccttttttcaagggcaaaaaaatctttgtagtgggcggcggggatacggcctgtgtcgaggcccagtacctttcgcatttgtccaatcaagtgattttaatccaccgcagggaaagatttcgcgcacaaaaagccctggcggatcgcgtgcttcacaacccaaatgttagcgtacggttcaacactgtgatgaaggaaatccggggtggggccaaggttacatcggttttgctggatggaaacggtacatccggagaagagagcgccgacgctgtttttgtttttaccggaatcgtcccgcaggcttctttggtttcaggtgccgatggcggccttaaagttgagttggacgaagccggctatattatcaccgatcaaaaaatggctgcttccgtgcccgggctttttgccgccggagacgttagaacgacgccgttccggcaggtggtaactgccgctgccgatggcgctgtggccgcgcattgcgccgccgcttacatcgacagcctgaaaggtgagacctaa

SEQ ID NO: 23606 - protein, 283 aa, Unknown
  Obtained from environmental sample
  DOMAIN (2)...(255): Pyridine nucleotide-disulphide oxidoreductase
  misc_feature (1)..(283): Xaa is any amino acid
MLEQLSPGGQALYIDALENYPGIAQGKSGFEFSEDLRLQAEGFGAKILTEEVKALNKEGGLFTIALASGKTFKAHAVIIATGAKHRPLGIPGEKEFSGRGVSYCATCDGPFFKGKKIFVVGGGDTACVEAQYLSHLSNQVILIHRRERFRAQKALADRVLHNPNVSVRFNTVMKEIRGGAKVTSVLLDGNGTSGEESADAVFVFTGIVPQASLVSGADGGLKVELDEAGYIITDQKMAASVPGLFAAGDVRTTPFRQVVTAAADGAVAAHCAAAYIDSLKGET

SEQ ID NO: 23607 - DNA, 606 bp, Unknown
  Obtained from environmental sample
  misc_feature (1)..(606): n is a, c, g, or t
atgttactttatgcggaagccataatctcatcccaaagagctatccagatcgcggaaatcgtcggggatcggctttcagcggctttatcgtattacaaccttttcattcgtgagaccagattttaccagttcgggatggctttcgatagcaccaacgcctcccttgtaaggatggatcgcgcttccggcaggcttgcaaggggcgagttgtaccttgcgcgtcgggaattatcccgtgccctagccgattaccaggaagcttatcaaacagacagctcccctctttcaaaactgaaccttgccgaggcgttccagatcggtggaggtttgtccgaggctgccggttacgcaagggactgcctaaaagcgggggatgattcctggatgatgtattacggcatcgatcctgtccgttacaaacgggacatccatgaaattgtgaaagatacctataagggcctttttaatgccgaggccttttcatgcccgggcagtttaataggagaaagtgcacgagcctgttccgtaagatgtcatatcgattccgttttgccatccacaggcatttgttccataaatacggccttctttcagcggacgccttga

SEQ ID NO: 23608 - protein, 201 aa, Unknown
  Obtained from environmental sample
  misc_feature (1)..(201): Xaa is any amino acid
MLLYAEAIISSQRAIQIAEIVGDRLSAALSYYNLFIRETRFYQFGMAFDSTNASLVRMDRASGRLARGELYLARRELSRALADYQEAYQTDSSPLSKLNLAEAFQIGGGLSEAAGYARDCLKAGDDSWMMYYGIDPVRYKRDIHEIVKDTYKGLFNAEAFSCPGSLIGESARACSVRCHIDSVLPSTGICSINTAFFQRTP

SEQ ID NO: 23609 - DNA, 1002 bp, Unknown
  Obtained from environmental sample
  misc_feature (1)..(1002): n is a, c, g, or t
ttggctctccttggcaggtctgcattgaatttcataagcagagaagggcacatcgtcgccaaagcgctgttttgcttttgttcctgtccatccgttttggttctttggctttactggatcagaaaagatccgcgaaaaaaagcgctgtatctctgggcgcatgtaaaacgccgtatgacccttgccggcttaaagaaacccaatgcctccggcgttgccgagtgggcaagagctgacaacagcgtttgcggtggactttatccgctttatttggatgtcgccgccgcacgctttgccccaggttttacttttgacgacaacaaaaaaatggaagcgcattaccgcctttttagtgatgaatacaaaaaaaccgttgtgcttttgcggcggcttttggcttacctcatgccgcctttagcgctggcctttggtcaaacaaagcgacgacggccgactggtacaaaaattttaaacgctgctctnatcgtcgtttttattttcttgttccgcatggataccatggcacagactgatccggattcttcgttattagaaagaggatcagatttcatttttaatagcgcaacatccgcgcaaatggctgaaaattggaaacgggccatagaactctttaatgagggggcgaaattatttcctgacgatttccgttttccctggtctttgggaaacctctactattaccgcaggctttaccatctggcctgggacgagtaccgccgggccgaaaaaattatcccctgggaaacggatttgcttttaaagcttgcaaacaccgcaggttatctgaatagaaacgaagtttccgctttttattatgagcgccttttggccctcgatcctgataatatggaagccataggcagtcttgcgtggatgtattttaagctccaccgccttagggaaggggagatacttttacttgatgcgatgggctatcttggcgaagatatggatttcgccatgcctttgggaaccatttag

SEQ ID NO: 23610 - protein, 333 aa, Unknown
  Obtained from environmental sample
  misc_feature (1)..(333): Xaa is any amino acid
MALLGRSALNFISREGHIVAKALFCFCSCPSVLVLWLYWIRKDPRKKALYLWAHVKRRMTLAGLKKPNASGVAEWARADNSVCGGLYPLYLDVAAARFAPGFTFDDNKKMEAHYRLFSDEYKKTVVLLRRLLAYLMPPLALAFGQTKRRRPTGTKILNAALIVVFIFLFRMDTMAQTDPDSSLLERGSDFIFNSATSAQMAENWKRAIELFNEGAKLFPDDFRFPWSLGNLYYYRRLYHLAWDEYRRAEKIIPWETDLLLKLANTAGYLNRNEVSAFYYERLLALDPDNMEAIGSLAWMYFKLHRLREGEILLLDAMGYLGEDMDFAMPLGTI

SEQ ID NO: 23611 - DNA, 1596 bp, Unknown
  Obtained from environmental sample
  misc_feature (1)..(1596): n is a, c, g, or t
ttgtcgacagtaccgtgcgccggacacctcgcgtttttctattgctgtgctttaggcccggggctgcgtggggcgtctctgttttttctaaaccgggaaaaagttttcggctattctgctcgtccgttcctggccgtcattggcattgcccttgttccatgggtaatcatgcttttcattgccctgccccgctggtttgtccccggagttgcgggcccggcggtaatccttgactccctgctcttaaagatggatggcaattatttttccacgctgcttccattttattgggctgcctttaccacttattattctatcaagagcacgcattttctcacggcggatataattgccgccaaaactttttttctggttcttttcagcattgtatcccccttttcaatacaagcatatcgctggcctgttctaatgatcggggtttttgcccttgcgttctttcttcaaatacttgcctttgttttttctgcgccggcagaattcaagctgctaaaaaaggaaggggccgctgcgactattgggctttttctattgatgtttgttggcggaccgctttttgtccggccttttcaggacaaagctgttgacaggggcagccgccttctggagccaaagcttttccactttgatttttcccaggtcatcaggctggaaagcgaaatcaacttaaacgacgatctggtgctgattgccaaaaaagacccatacgatccccatatccttctgcgccgttatacgctctccgcttacagtcccaagcagggcttcttccggcttggcgatgtggacgaggccgcccatccccaaaacctgccaagccgccgcactttattgcataccgaagaaataaatgacttccgcgtaagcgagcaggaatattatatagtaaattttgattcatccgcttttatcgggatgaatatgcccgtggaaataatcccctttgaaacctgggacgcttcttctttcaactcagcctatgctgtcgtcagctataccagcgaagtctttccttacgagcttatacgctccgtgcgcggaaacgactggtcggaaagcctcggcttaaaaccggaagagtacgccctatacaccgagtatggaggcgacgaggcgatagcggcttttgccagggaaattatcggcagctctgtgtcgaggttttcgggaagaagagaaaattctccttcttattgggaacaggttcagatgatttacgacaggctaaagttcggcgaatatcgttacagcctcaagcccggaatagccgccgacggggatcagcttaagcattttcttttcaactccaaaaagggctactgctcctactacgcctttgccttcacgctgatgctccgttctttgggtattccctgccgggttgcagccggtttttttgttgatccctctaccgaagcctttggctattaccctgtcagggcggacatggcccacgcctgggcggaagtgtggttccccggatacggctggattgaatatgacccgacttcggaaaacctggcggaaggagaggagttccttttcaggcggacgctcggccataatccnnnnnnntaa

SEQ ID NO: 23612 - protein, 531 aa, Unknown
  Obtained from environmental sample
  DOMAIN (442)...(509): Transglutaminase-like superfamily
  misc_feature (1)..(531): Xaa is any amino acid
MSTVPCAGHLAFFYCCALGPGLRGASLFFLNREKVFGYSARPFLAVIGIALVPWVIMLFIALPRWFVPGVAGPAVILDSLLLKMDGNYFSTLLPFYWAAFTTYYSIKSTHFLTADIIAAKTFFLVLFSIVSPFSIQAYRWPVLMIGVFALAFFLQILAFVFSAPAEFKLLKKEGAAATIGLFLLMFVGGPLFVRPFQDKAVDRGSRLLEPKLFHFDFSQVIRLESEINLNDDLVLIAKKDPYDPHILLRRYTLSAYSPKQGFFRLGDVDEAAHPQNLPSRRTLLHTEEINDFRVSEQEYYIVNFDSSAFIGMNMPVEIIPFETWDASSFNSAYAVVSYTSEVFPYELIRSVRGNDWSESLGLKPEEYALYTEYGGDEAIAAFAREIIGSSVSRFSGRRENSPSYWEQVQMIYDRLKFGEYRYSLKPGIAADGDQLKHFLFNSKKGYCSYYAFAFTLMLRSLGIPCRVAAGFFVDPSTEAFGYYPVRADMAHAWAEVWFPGYGWIEYDPTSENLAEGEEFLFRRTLGHNPXX

SEQ ID NO: 23613 - DNA, 501 bp, Unknown
  Obtained from environmental sample
  misc_feature (1)..(501): n is a, c, g, or t
gtgccaaagctacgctctgggagggtgtttttaatggatcagggaaacgcgaaaaacccgcaaaacaagcgtaaaaagctcatccagcttatacatatcggcaaggcaaaaatggcccttagcgacgacgcctaccgtgcttttctcgaaggcatcaccaaaaagaaatcctgcgcggatatgggcgaaaggcagcttgaggccgtactccgcgccatgcggcgcaacggctttgtccagctgccggagcgggtaaagccggaagagcaagggatggcgagcctggagcagcttgagtacatcaaggggatgtggcagaaatgcgcccggaataaaagcgacccagcccttttggcttttgtaaaccgcattgccggagtcaagtcgctccgcttccttacagtccacaccgcgcagaaagtaattttggcgctgcgcgacatgatggtcaaagcaggcttcgatcccgacacgtcggaggcgctggatggccaaggctaa

SEQ ID NO: 23614 - protein, 166 aa, Unknown
  Obtained from environmental sample
  DOMAIN (23)...(155): Protein of unknown function (DUF1018)
  misc_feature (1)..(166): Xaa is any amino acid
MPKLRSGRVFLMDQGNAKNPQNKRKKLIQLIHIGKAKMALSDDAYRAFLEGITKKKSCADMGERQLEAVLRAMRRNGFVQLPERVKPEEQGMASLEQLEYIKGMWQKCARNKSDPALLAFVNRIAGVKSLRFLTVHTAQKVILALRDMMVKAGFDPDTSEALDGQG

SEQ ID NO: 23615 - DNA, 678 bp, Unknown
  Obtained from environmental sample
  misc_feature (1)..(678): n is a, c, g, or t
gtgaagtatgtcgccggaaaagtcgccatgggaatgcccagtaatgttgaatttgacgatctggtgggttttggggtcttcgggctgattgacgccattgataaatacgatcccgaaaaaaacgtcaagttcaaaacctacgccgtaacccgcatccggggggcaattttcgatgaactccgccagattgactgggttccccgttccgtccggcaaaaaacccgtgaaatagagtccaccataagctctctggaagcccagttgggaagaaccgcctcggatcaggaaattgccggggcgctggggatgaacgaagacgaatacctcaaaaccatacaaaaaatctccggaacctcaatactgagcctcaacgacgtatggttctccggcgatgaaaaagatcgtgtttctatagtagattccattgaatcgccctccagcatgaaccccgacgtaatggtggaaaaagaggcgatgcgccaggtcatcattgccgccattaacgagcttcccgacaaggaaaaaaagatactgatactctactattacgaggaccttaccctcaaagacataggcagggtgctggaagtcaccgaatcccgtgtttcccagctccacaccaaggccattcttcatctcagatcaaaactgaccaatattcgcaaaggcattgtataa

SEQ ID NO: 23616 - protein, 225 aa, Unknown
  Obtained from environmental sample
  DOMAIN (67)...(149): Sigma-70 region 3
  misc_feature (1)..(225): Xaa is any amino acid
MKYVAGKVAMGMPSNVEFDDLVGFGVFGLIDAIDKYDPEKNVKFKTYAVTRIRGAIFDELRQIDWVPRSVRQKTREIESTISSLEAQLGRTASDQEIAGALGMNEDEYLKTIQKISGTSILSLNDVWFSGDEKDRVSIVDSIESPSSMNPDVMVEKEAMRQVIIAAINELPDKEKKILILYYYEDLTLKDIGRVLEVTESRVSQLHTKAILHLRSKLTNIRKGIV

SEQ ID NO: 23617 - DNA, 378 bp, Unknown
  Obtained from environmental sample
  misc_feature (1)..(378): n is a, c, g, or t
gtgtcgaactggtgcttcacatcgctgatggacggacgcggaacgttcaaggaaatcgtcatgtcctccgaatacgcgctgacgccgatggtcgtcgttttggtcccgctgacggccgcaagccatattatgaactatgacgaccacgcgatttacgcgtttttctggtatctgtccatcgcgtgggtggccgcgctgattgttttggggaccatgattaccaacgactattcccttaaaaagacgaatctcacttgcgttctgtcggtagtcggcattgggattattctattcctgtgccttgtctcattcagtgtcatacagcagatagtcacatttgtcatggcggtttataacgaggtgtcgttcaggttatga

SEQ ID NO: 23618 - protein, 125 aa, Unknown
  Obtained from environmental sample
  misc_feature (1)..(125): Xaa is any amino acid
MSNWCFTSLMDGRGTFKEIVMSSEYALTPMVVVLVPLTAASHIMNYDDHAIYAFFWYLSIAWVAALIVLGTMITNDYSLKKTNLTCVLSVVGIGIILFLCLVSFSVIQQIVTFVMAVYNEVSFRL

SEQ ID NO: 23619 - DNA, 672 bp, Unknown
  Obtained from environmental sample
  misc_feature (1)..(672): n is a, c, g, or t
atgacgggaatttacgcggtgatagtgggcgcgggatctggaacgcggttggggcttccggtacccaaggctttcgtagagctttgcggcaagcccatagtctattattcgcttaaaacctttgtcaaccacccgtctgtggataaaacaatattggtaatcccctccgccatggtagacgaggcggcgggtattatcaaaggttacggtgattttgccggtaaagtatcgatagtaacgggcgggaacgagcggtgggagtctgtgcggaacgggtgcgcggcggcgaacggcgagtgggtgttggtgcacgacgcggcgcggcctttcgtcagcggcgcggtgatcgacgcggtcttggaaaaacgagatctttccgactgcgtgatcacggcgacgccggtggcggacaccatacggactatcgctgacggcgggcgttgcggggccacggtggacaggtcgacgctgatgcgggtggggacgccgcagctcttccggcgggagcggttgatgtccgcctttgatttgataaaggatatgccggcggcgccgaccgacgaggcggcgttgtttgagcgtttggggatcgacatattgtactcatggggcgacgcgatgaatttcaagataacggacaaggccgactggagacggcgcgggccatcatag

SEQ ID NO: 23620 - protein, 223 aa, Unknown
  Obtained from environmental sample
  DOMAIN (4)...(221): Uncharacterized protein family UPF0007
  misc_feature (1)..(223): Xaa is any amino acid
MTGIYAVIVGAGSGTRLGLPVPKAFVELCGKPIVYYSLKTFVNHPSVDKTILVIPSAMVDEAAGIIKGYGDFAGKVSIVTGGNERWESVRNGCAAANGEWVLVHDAARPFVSGAVIDAVLEKRDLSDCVITATPVADTIRTIADGGRCGATVDRSTLMRVGTPQLFRRERLMSAFDLIKDMPAAPTDEAALFERLGIDILYSWGDAMNFKITDKADWRRRGPS

SEQ ID NO: 23621 - DNA, 936 bp, Unknown
  Obtained from environmental sample
  misc_feature (1)..(936): n is a, c, g, or t
atggcgagagttgctcgtcgcttaagcgaacgcgcggtagagatcgcccatgcggagggcgcggcggccgtggcgcacggggctacgggcaaggggaacgatcaggtccgctttgagctgacggtgatggcgctggatcccaaactcaagataatctccccttggaaggatcctaagtggacgctccacagccgcgaggattgcctcgcctacgcggcggagcgcggggtgcccgtgtcgcaaagcaagaagcggatatactccgaagaccgcaacatctggcacataagccacgagggcggcgtattggaggatccttggaacgagccgccggacgacgtctacacgctgacaaataccatagagaaagcgccggacgcggcggagcatatcgagatcacctttacgcaggggaatccggtcgcggtagacggcaaggccatgagcccggtcgatctgttgacggcgctcaacaagctgggcgccaagcacggcatagggcacgtagacatggtggagaacaggcttgtggggataaagtcgcgcggggtatacgagacgcccggcggggcgatactctacgcggcgcacagaacgctcgagagtttgacgctcgacagggacacggcgcacttcaaggagatgctggcgatacggtacgcggaactcgtctacaacgggcagtggttctcgaagctgcgcgaagcgctagacgggtttgtggacgtcacgcagaagaacgtttccggcgcggttcggctgaagctctacaaggggaacatcgtgccggcgggcgttaaggcggacaaagcgctgtatctggaggatttggcctcgtttacggacacggagttttacaaccagatggacgccacggggttcataaagattttcgggctgcccatgaaagtcgccgggttggtagacaggaaatga

SEQ ID NO: 23622 - protein, 311 aa, Unknown
  Obtained from environmental sample
  DOMAIN (1)...(308): Arginosuccinate synthase
  misc_feature (1)..(311): Xaa is any amino acid
MARVARRLSERAVEIAHAEGAAAVAHGATGKGNDQVRFELTVMALDPKLKIISPWKDPKWTLHSREDCLAYAAERGVPVSQSKKRIYSEDRNIWHISHEGGVLEDPWNEPPDDVYTLTNTIEKAPDAAEHIEITFTQGNPVAVDGKAMSPVDLLTALNKLGAKHGIGHVDMVENRLVGIKSRGVYETPGGAILYAAHRTLESLTLDRDTAHFKEMLAIRYAELVYNGQWFSKLREALDGFVDVTQKNVSGAVRLKLYKGNIVPAGVKADKALYLEDLASFTDTEFYNQMDATGFIKIFGLPMKVAGLVDRK

SEQ ID NO: 23623 - DNA, 624 bp, Unknown
  Obtained from environmental sample
  misc_feature (1)..(624): n is a, c, g, or t
gtggacgctccacagccgcgaggattgcctcgcctacgcggcggagcgcggggtgcccgtgtcgcaaagcaagaagcggatatactccgaagaccgcaacatctggcacataagccacgagggcggcgtattggaggatccttggaacgagccgccggacgacgtctacacgctgacaaataccatagagaaagcgccggacgcggcggagcatatcgagatcacctttacgcaggggaatccggtcgcggtagacggcaaggccatgagcccggtcgatctgttgacggcgctcaacaagctgggcgccaagcacggcatagggcacgtagacatggtggagaacaggcttgtggggataaagtcgcgcggggtatacgagacgcccggcggggcgatactctacgcggcgcacagaacgctcgagagtttgacgctcgacagggacacggcgcacttcaaggagatgctggcgatacggtacgcggaactcgtctacaacgggcagtggttctcgaagctgcgcgaagcgctagacgggtttgtggacgtcacgcagaagaacgtttccggcgcggttcggctgaagctctacaaggggaacatcgtgccggcgggcgttaa

SEQ ID NO: 23624 - protein, 207 aa, Unknown
  Obtained from environmental sample
  misc_feature (1)..(207): Xaa is any amino acid
MDAPQPRGLPRLRGGARGARVAKQEADILRRPQHLAHKPRGRRIGGSLERAAGRRLHADKYHRESAGRGGAYRDHLYAGESGRGRRQGHEPGRSVDGAQQAGRQARHRARRHGGEQACGDKVARGIRDARRGDTLRGAQNAREFDARQGHGALQGDAGDTVRGTRLQRAVVLEAARSARRVCGRHAEERFRRGSAEALQGEHRAGGR

SEQ ID NO: 23625 - DNA, 366 bp, Unknown
  Obtained from environmental sample
  misc_feature (1)..(366): n is a, c, g, or t
ttgttttcaagtgggattattatttcatcagatgaagtaattgatgagattaaacgagggaatgacgatcttgaggaatgggctaacgcaagaaaggattccttttatccaagcagtgaaccagtgcagatgattgtcaaagaaatattaggacagtttagcggattagttaccaaccccaaaaaaccgaacacagcagatccttttcttattgcattggcaaggcaaacggcttgtactgtggttacagaggaaaatcgtagtggaaatgatttatctcccaaaattcctaatatatgtgattactataatatccggtgtattaaatttgtcgaatttttacgggaaaacagaattacttcttaa

SEQ ID NO: 23626 - protein, 121 aa, Unknown
  Obtained from environmental sample
  misc_feature (1)..(121): Xaa is any amino acid
MFSSGIIISSDEVIDEIKRGNDDLEEWANARKDSFYPSSEPVQMIVKEILGQFSGLVTNPKKPNTADPFLIALARQTACTVVTEENRSGNDLSPKIPNICDYYNIRCIKFVEFLRENRITS

SEQ ID NO: 23627 - DNA, 945 bp, Unknown
  Obtained from environmental sample
  misc_feature (1)..(945): n is a, c, g, or t
gtgagctgcgtcctgatggttcctgttattacttcttttaacaatcttgtcgctttaaaaattgaagggaaaataattgacgaaggcaaagccgaaataagggcgcaaagggcggaggtcgaaaaactaattgctgaaaacaaagtaaaaatgctggaacgcgagaaactggataacgagattaccctcgcgaaacagtcaatagaaattgaagcgctgaacgcaagcaatatgctgcttgagcgggcgaagctaagcatgcagagcttccagcagatcgcggagctggctttaacccaggcaaatatttcccagactctggtaagaaaggaacctgtaactcccatagaaacaggctgggggctattggccgatttttattacgatgaggcgctggtaattattgcccataacataaacgcgaaattcggggtagaccttaaggaaattaaaattgcgagggtccaggataattcggttgttgtgtcgggaattcgcccaaagttcataggcgcgaaccaaaacgaaagcaaaacgctggttaaggaaatacggcgagttgataataaattcggcgtgccttaccgggtaaggataaaagatcaaaggcaggatatagctctcgccgacataaaagcggatcaatacgaactggagttccagaaaaaactaagcgaaggaatggaaatggcttttatggacaacataataatccagctcgcacagaacttcatcaagatcgtacttgccccgctttacgacaatattgtttttaataacgttgacgctccgggcgctctgccgcttttggattatttgacaaaagagataaatgaaaacaatgaagagaagtacagattgcttcagatgaacgagcagtttattcttagcatcaatcagtttgaagcagaaaccggtgatagggaggcagaagatgagatatga

SEQ ID NO: 23628 - protein, 314 aa, Unknown
  Obtained from environmental sample
  misc_feature (1)..(314): Xaa is any amino acid
MSCVLMVPVITSFNNLVALKIEGKIIDEGKAEIRAQRAEVEKLIAENKVKMLEREKLDNEITLAKQSIEIEALNASNMLLERAKLSMQSFQQIAELALTQANISQTLVRKEPVTPIETGWGLLADFYYDEALVIIAHNINAKFGVDLKEIKIARVQDNSVVVSGIRPKFIGANQNESKTLVKEIRRVDNKFGVPYRVRIKDQRQDIALADIKADQYELEFQKKLSEGMEMAFMDNIIIQLAQNFIKIVLAPLYDNIVFNNVDAPGALPLLDYLTKEINENNEEKYRLLQMNEQFILSINQFEAETGDREAEDEI

SEQ ID NO: 23629 - DNA, 420 bp, Unknown
  Obtained from environmental sample
  misc_feature (1)..(420): n is a, c, g, or t
atgattaggctttctgctgaattggaaaaaaacataagaacggacggcgaaaccgcctatcccaatgaatgctgcggcattttaatcggcgaagttgacaacgagggaatcaaaacagccagaagcacgttaaccattaacaacgccagagaagacggcgaacaataccaccgctttcttataacgccggaagatatgatgaaggcggaacaaaccgcacgatcgatgaaactggaccttatcggcttttaccactcgcaccccgaccatccctcagcgccgtccggttatgataaagatcacgcgctgccattttattcgtatgtaattgtatcggtagataaaggcaaggcgcaggttcttaccagttgggaacttaccaacgacagaagtgattttgtacaggaaaagataaattga

SEQ ID NO: 23630 - protein, 139 aa, Unknown
  Obtained from environmental sample
  misc_feature (1)..(139): Xaa is any amino acid
MIRLSAELEKNIRTDGETAYPNECCGILIGEVDNEGIKTARSTLTINNAREDGEQYHRFLITPEDMMKAEQTARSMKLDLIGFYHSHPDHPSAPSGYDKDHALPFYSYVIVSVDKGKAQVLTSWELTNDRSDFVQEKIN

SEQ ID NO: 23631 - DNA, 894 bp, Unknown
  Obtained from environmental sample
  misc_feature (1)..(894): n is a, c, g, or t
atgagtattttggatcttgttggcaacactccggtaattgaattaaaaaaaatattcaacgcaacaaacggcgtttccctgtttaccaaagcggagtattttaacccaagcggctctgttaaagaccgcgccgcaaaagccatgatacagcacggtattaactcgggacaacttactaaaaataaaatccttttagattccacaagcggcaatacaggtatcgcgtatgccatgtttggcgcggcgcttggttatcgggtaaaactgtatatgccggcaaacgccagcgaggaaagaaaaaaaattatacgggcttacggcgcggaaattattgacacagatccccttgaaggctctgacggcgcgtaccgcatggtaataaagctagctgaaaaagagcctgatttgtatttctttcccaaccagtacgacaatccggaaaacccgcgcatacattatgaaacaacagggcttgaactgtataaccagtgcaagccgacgcattttgtcgcgggaaccggcacatcgggaacttttatgggcgtttccagacgacttaaagagtttgattcttccatacaaaccgcgctcatgcagccggattcgccgtttcacggacttgagggaatgaagcacatggaatcaaccataacgcccaaaatatttgacaagagcattgccgacgtacatattacggtaaaaacggaagacgcttacgcgacggcgcggcggcttgccctggaagaagggttgtttgtggggataagctccggggcaaatgtatacgccgcgatggaatgggcaaaaacgctgcccgcgggttcgcgggtcgctacaatactatgcgataacggataccgctatctgtcacagcccttatggaaagagatataa

SEQ ID NO: 23632 - protein, 297 aa, Unknown
  Obtained from environmental sample
  DOMAIN (3)...(284): Pyridoxal-phosphate dependent enzyme
  misc_feature (1)..(297): Xaa is any amino acid
MSILDLVGNTPVIELKKIFNATNGVSLFTKAEYFNPSGSVKDRAAKAMIQHGINSGQLTKNKILLDSTSGNTGIAYAMFGAALGYRVKLYMPANASEERKKIIRAYGAEIIDTDPLEGSDGAYRMVIKLAEKEPDLYFFPNQYDNPENPRIHYETTGLELYNQCKPTHFVAGTGTSGTFMGVSRRLKEFDSSIQTALMQPDSPFHGLEGMKHMESTITPKIFDKSIADVHITVKTEDAYATARRLALEEGLFVGISSGANVYAAMEWAKTLPAGSRVATILCDNGYRYLSQPLWKEI

SEQ ID NO: 23633 - DNA, 567 bp, Unknown
  Obtained from environmental sample
  misc_feature (1)..(567): n is a, c, g, or t
atgacttcaaaacagaaatttttgattgttgctacagattgtgaaaccggtaaggcggtatattttgaaaagcataattacacagaattagtacaggcattacaggcatcaagcagcattcccttgctatctaaactggtttttatagatgataaaatatgccttgatggatctatatcagaacctataggtatacacaaagcattttcagaaggttttgataaacaagtagttatcttaacaagaaaacttgaatatactaataaagcagagtggtcaagatttgcaatatttttatctaaaattaaatacaaaaaataccctgaaatcattaatctaataaataattattctacactatataattcattgattgaggaaataaatacaatggaagatgaaaataaaatattcgttattcgcccatctcgtgaagcaaatataaaaactatagaaagggacgcaaggaaacttatagacttttattttcttggaagagaagatgcactaaaatcactcccaaaaatgtatgaatacttaaaccgatnagtaatatttaccaaataa

SEQ ID NO: 23634 - protein, 188 aa, Unknown
  Obtained from environmental sample
  misc_feature (1)..(188): Xaa is any amino acid
MTSKQKFLIVATDCETGKAVYFEKHNYTELVQALQASSSIPLLSKLVFIDDKICLDGSISEPIGIHKAFSEGFDKQVVILTRKLEYTNKAEWSRFAIFLSKIKYKKYPEIINLINNYSTLYNSLIEEINTMEDENKIFVIRPSREANIKTIERDARKLIDFYFLGREDALKSLPKMYEYLNRXVIFTK

SEQ ID NO: 23635 - DNA, 945 bp, Unknown
  Obtained from environmental sample
  misc_feature (1)..(945): n is a, c, g, or t
atgtccctggtgctgaatgatcccgcttcgcaaaaccctgttgtttcatatcaatccccttatacctgtttccaaaccttgcggtccctgaaaatcgacctttccgacgagttggatattctgaatatcttaagaaagctgcgcggggtggaagtcgaaatcgccgtgccctcccctgtcagcggaaaaataataggcgtcgagtaccgcccgcggcaacacccttccggttttgaaaccaaccatccctggctgtccttgtacacggcacagggaatcaaaatgtttagttttgccgatattaacgctataactttcaaagacccggcgatagaggtcgatctgaaacgggcccttgaattgattgccgcttcgagaaataacgacgcgcgggatttgacaatacagttgcccggaacaggcagccgcagggtttcattaagctatgtcattcccgcgcctgtgtggaaggcttcatacaggctcgatctcggcggcgcaaactcaaagccccgcttgcagggttgggctattgttgacaatgacggcgacacggactgggacaaagtcgagctttcattggtagcgggccggcccgcctcctttatacaaaacctgtatcccccgtattatgttttccggcctacgcttccccttgccatagccggggcggccggcgcggtaacccacgaccagggctacgccccggtcccggctcccgcggctccgcgccttgaaagcggcggttcggcgcggacgtcaatggttgaaaaggtaatgatggatcaggctgcggaaccggagtacataagggagcgtccggctccaaatgttattgagacagccataagcggcgcgacggcggcatctgccggagagcagtttgagtttaccataaaaagcccggtaagcgtcgcgcggcggatgagcgcaatgctgccctga

SEQ ID NO: 23636 - protein, 314 aa, Unknown
  Obtained from environmental sample
  misc_feature (1)..(314): Xaa is any amino acid
MSLVLNDPASQNPVVSYQSPYTCFQTLRSLKIDLSDELDILNILRKLRGVEVEIAVPSPVSGKIIGVEYRPRQHPSGFETNHPWLSLYTAQGIKMFSFADINAITFKDPAIEVDLKRALELIAASRNNDARDLTIQLPGTGSRRVSLSYVIPAPVWKASYRLDLGGANSKPRLQGWAIVDNDGDTDWDKVELSLVAGRPASFIQNLYPPYYVFRPTLPLAIAGAAGAVTHDQGYAPVPAPAAPRLESGGSARTSMVEKVMMDQAAEPEYIRERPAPNVIETAISGATAASAGEQFEFTIKSPVSVARRMSAMLP

SEQ ID NO: 23637 - DNA, 957 bp, Unknown
  Obtained from environmental sample
  misc_feature (1)..(957): n is a, c, g, or t
gtgagccttgaagtacggcagacggccgagcgggaaatacggcgttaccacgccaaaaccgggctgcccgtaaccgccctcctgaaatacgcggggataccgcacaggacatggcgcgaatgggcgcggcgactcgaggttgagacgaagcacaacaacaacattcccaaggcatattacttgacgccggaagaaatcagggcgatagtcgtttattgcaccaacaatcccctgaaaggctaccggatgcagtgttgggagatggtagaccaaaatgtggcgtttgtgtcctgcagcagcgtctataacgtcataaaacgccataatttggacaaaaaatgggcggaattgaccgaagaggcaaagaaaggttttgaccagcctctggcggttcacgagcaatggcacatagatttttcatacatcaagatacaaaactcgttttattattttatcggcatccttgacggctacagccggaagatgcttaactggaggctttgcaaaaacatggagggcattaatgccgagatactggttgccgaaaccaaagagatgtacccacaggcggtctgcccgcggctgataagcgacaacggaagccagttcatatcaaaagattttgaagagcttcttgcgcttctggaattttcccacacgtttacatccgcgaaccatccgcagagcaacggcaagctggagcggttccaccgcaccttgaaaactgagcacgtaaggagggcatcgtatctggaataccaagacgcctgcataaggatggcggaatggattgcgtattacaacagcgggaggcttcacagcgcgatctggtatttaacgccgaatgacgttttttacggcagggcggctggacggcttgcagaacgcaaagaaaagttgcatgctgcatttatcaagagacaggaatattggcggacacaaaagtctgcatcttga

SEQ ID NO: 23638 - protein, 318 aa, Unknown
  Obtained from environmental sample
  DOMAIN (127)...(286): Integrase core domain
  misc_feature (1)..(318): Xaa is any amino acid
MSLEVRQTAEREIRRYHAKTGLPVTALLKYAGIPHRTWREWARRLEVETKHNNNIPKAYYLTPEEIRAIVVYCTNNPLKGYRMQCWEMVDQNVAFVSCSSVYNVIKRHNLDKKWAELTEEAKKGFDQPLAVHEQWHIDFSYIKIQNSFYYFIGILDGYSRKMLNWRLCKNMEGINAEILVAETKEMYPQAVCPRLISDNGSQFISKDFEELLALLEFSHTFTSANHPQSNGKLERFHRTLKTEHVRRASYLEYQDACIRMAEWIAYYNSGRLHSAIWYLTPNDVFYGRAAGRLAERKEKLHAAFIKRQEYWRTQKSAS

SEQ ID NO: 23639 - DNA, 312 bp, Unknown
  Obtained from environmental sample
  misc_feature (1)..(312): n is a, c, g, or t
atgggcagaagaaaaaggtataccgccgaagaaaaagtaaagattctcagagaggtgcttgaggacgggaagcagataagccaggtggcggagaaatacgggctttctccgaacaacatcttcaaatggcggaagcagctttttgaggaaggcgttcagacattccaggtaaaaagaccggacatctcaggcaaagccgaagaacggaaaataacggcgcttgaagacaggatcaagcagaaagacgaaataatagccgagcttgccgaagagctgttagcattaaaaaaaaagaactgtggcctgaggtag

SEQ ID NO: 23640 - protein, 103 aa, Unknown
  Obtained from environmental sample
  DOMAIN (4)...(95): Transposase
  misc_feature (1)..(103): Xaa is any amino acid
MGRRKRYTAEEKVKILREVLEDGKQISQVAEKYGLSPNNIFKWRKQLFEEGVQTFQVKRPDISGKAEERKITALEDRIKQKDEIIAELAEELLALKKKNCGLR

SEQ ID NO: 23641 - DNA, 897 bp, Unknown
  Obtained from environmental sample
  misc_feature (1)..(897): n is a, c, g, or t
ttgtcctcggccgatatcgcttccctgtcaaaggaagacacgcttacatttctcccggaagatattcccggcacgacttccgataaaatggtttccattgacgacgcgctcaaagacctcaacacgctggtggggcttaaatcggtcaaggacgcggtaataaggataaccaactctttgcaggcccaaaaacttaccggcgaaacggaaacgctcgccaagcattttgtttttacgggtaatcccggcacgggaaaaactactgtcgcgcggataatgagcgacgtgttcaaggccgtaggattgcttcccaccaacaatttgatagaagcggacagggggaaactggtggcgtcctatgtgggccagacggccaagctggtggcgcagcagtgcgacaacgctatgggcggcattctttttatagacgaagcgtacgcgttgaaacagggaccgcaggacagtttcggacaggaggcggtggatacgcttcttaaacggatggaagacgaccggggcaaatttgtggttatagccgccggctataccaaagaaatggaagaatttttggcgtccaacagcgggtttaaatcgcggttttcggattatataaattttgacgactacgatacaaccgaaatgcgggaaatttttatagggatgtgcaaaaaaagaaaaattgaatttgctcccggttttgatgaagctatgcaaaaaaggctggatgatttatatgccaaccgtaacgcccagtttgccaatgcccgcacggtaaggcagttatttgataaaacaagagaaaatgtttcaagtagagtaatggctctacaggatgaggaagaacgcaaacatgaaatatttatcatgcgcccggaagatttggatatgaccgtatag

SEQ ID NO: 23642 - protein, 298 aa, Unknown
  Obtained from environmental sample
  DOMAIN (75)...(270): ATPase family associated with various cellular activities (AAA)
  misc_feature (1)..(298): Xaa is any amino acid
MSSADIASLSKEDTLTFLPEDIPGTTSDKMVSIDDALKDLNTLVGLKSVKDAVIRITNSLQAQKLTGETETLAKHFVFTGNPGTGKTTVARIMSDVFKAVGLLPTNNLIEADRGKLVASYVGQTAKLVAQQCDNAMGGILFIDEAYALKQGPQDSFGQEAVDTLLKRMEDDRGKFVVIAAGYTKEMEEFLASNSGFKSRFSDYINFDDYDTTEMREIFIGMCKKRKIEFAPGFDEAMQKRLDDLYANRNAQFANARTVRQLFDKTRENVSSRVMALQDEEERKHEIFIMRPEDLDMTV

SEQ ID NO: 23643 - DNA, 339 bp, Unknown
  Obtained from environmental sample
  misc_feature (1)..(339): n is a, c, g, or t
atggagggaaagcaaacatttaacatggaagatgaatttgcgggactggattgtaattcaagccgccttgagaagcggtttataaggacaatggaaacactgtccaaacaaccggacaaatcaatatggttctgcagcgaanaccgagctgaagcanaagccatatatcggatgcttggcaacgagaatctggatcgcgaagaaatactgcgggcgcatcgggaggctaccataaagcgcatgatacagtcaggggaaactatttctgcagtacaagataccaacagcctgaactacaacacctatgagaaaaatggaggggatagggtataccagtga

SEQ ID NO: 23644 - protein, 112 aa, Unknown
  Obtained from environmental sample
  misc_feature (1)..(112): Xaa is any amino acid
MEGKQTFNMEDEFAGLDCNSSRLEKRFIRTMETLSKQPDKSIWFCSEXRAEAXAIYRMLGNENLDREEILRAHREATIKRMIQSGETISAVQDTNSLNYNTYEKNGGDRVYQ

SEQ ID NO: 23645 - DNA, 1080 bp, Unknown
  Obtained from environmental sample
  misc_feature (1)..(1080): n is a, c, g, or t
gtgcgggcgcaaatagaaacagcgctcctgttctaccgtcataccctgggaatttctcccagaggcttctggccgggcgaactgggatggacgaatgatatgtcgtcttacctttattcttacgggcttaactataccattgtaaacagtcacggcctgctttttggaaaaccgcccccttcgcgcgggacattttaccctgtcaagaccgaagaagggctttttgttctggcctgtgattataacgcttccgcccttgttgaaggaatgcgaaaaaaaggactgtaccgcgacaatagccgcgacgcggtcgatgaacctgaaaatgaggagaataatccttttatcgccaagaacggtgaaaagtaccattccggctacaaataccggcagatcggaagcgacagcttgtatgatcccgccgcggcaaaattatgcgcgcaggaacaagcgcgggaacttctggaaagtcttagcggcaggttagcctccgcggcgtcatatatgaaggaaacgcccatcagcctttgcgcgttcaatgcggacagcttcggccgtcaatggcatgggggcgcccacttcattgaaagcctgttcaagctggcggccggttacagggaactgcaatttatgactccgtcggaatacctgttccagcagccaatcacggccatagaagtgtcgcatccggaattctcctcctggggcgataacggttatgccgaactttggctggattcttccaatgactggatataccgtcatataaaccgttccattgatcggatggtggagcttgccgacagattcactgaagattcaagtctgaaagaacgcgcgttgaaccaggcggcaagggagatccttcttgcgcaggcgtcggactggcctgctttgctctaccacgaaaaaaacgccgaatacgcgaagaagcaaattgaaggcgcgttgcagaattttactacaatatacgaatctctgggcagaagccacatcagcgcagaatggctgaccagccttgagcgccgtcatcagattttccccaatatcaactaccgggtattcagaagcaggcgctag

SEQ ID NO: 23646 - protein, 359 aa, Unknown
  Obtained from environmental sample
  misc_feature (1)..(359): Xaa is any amino acid
MRAQIETALLFYRHTLGISPRGFWPGELGWTNDMSSYLYSYGLNYTIVNSHGLLFGKPPPSRGTFYPVKTEEGLFVLACDYNASALVEGMRKKGLYRDNSRDAVDEPENEENNPFIAKNGEKYHSGYKYRQIGSDSLYDPAAAKLCAQEQARELLESLSGRLASAASYMKETPISLCAFNADSFGRQWHGGAHFIESLFKLAAGYRELQFMTPSEYLFQQPITAIEVSHPEFSSWGDNGYAELWLDSSNDWIYRHINRSIDRMVELADRFTEDSSLKERALNQAAREILLAQASDWPALLYHEKNAEYAKKQIEGALQNFTTIYESLGRSHISAEWLTSLERRHQIFPNINYRVFRSRR

SEQ ID NO: 23647 - DNA, 786 bp, Unknown
  Obtained from environmental sample
  misc_feature (1)..(786): n is a, c, g, or t
atgaaaatcgcgattgttggatacggcaaaatgggaaagatgattgagcagacggcctgtgatcagggtcataccattgccgccattattgaccctgttcaaacagggacttcgctcctttcaggagcgcgaataagcggcagcgttgccgacgctgaaaaccttgactctgttgacgcggcaattgaatttacccagcccgcggtggcggctgcgaatatcatcgcccttgcggaaaggaagattcccactgtcgcgggaaccaccggctggcatgggcaaatggacgaagtaaagaaggcggtcgaagccgccggaagcagtctgctgtgggcttccaatttttccattggggtgaatctgttttaccgcatcgcctggtacgccgccgaccttttcaacaggtttcccgaattcgacgtggggggatttgagacccatcacaataaaaagctggacagcccgtccgggaccgcgaaggttttggcggagggggtgctttccataattgacaggaaaaagaaaatcatctgggaaacaatggaccgccagcccgagccggaggaattccacttccccagtctgcgcatggggtccgtgccggggcagcacagcctgttttttgattcccccgcagacaccattgagattacccatgccgcccgcagccgcgaaggttttgcctccggcgcggtaaaggccgcccagtggctgacatccggaggggcaaaaaggcgtggggtattcacggttgacgatatgttgaaagatatcctggggatttaa

SEQ ID NO: 23648 - protein, 261 aa, Unknown
  Obtained from environmental sample
  DOMAIN (1)...(115): Dihydrodipicolinate reductase, N-terminus
  misc_feature (1)..(261): Xaa is any amino acid
MKIAIVGYGKMGKMIEQTACDQGHTIAAIIDPVQTGTSLLSGARISGSVADAENLDSVDAAIEFTQPAVAAANIIALAERKIPTVAGTTGWHGQMDEVKKAVEAAGSSLLWASNFSIGVNLFYRIAWYAADLFNRFPEFDVGGFETHHNKKLDSPSGTAKVLAEGVLSIIDRKKKIIWETMDRQPEPEEFHFPSLRMGSVPGQHSLFFDSPADTIEITHAARSREGFASGAVKAAQWLTSGGAKRRGVFTVDDMLKDILGI

SEQ ID NO: 23649 - DNA, 645 bp, Unknown
  Obtained from environmental sample
  misc_feature (1)..(645): n is a, c, g, or t
atgagagcatcggaactggcctactttggtgcgcaggtactgcaccccagggccatgcagccctgcatgaaaaccggaacgccggtactggtaaaaaattcgtataacatcgacgcgccgggaaccagaattgggccgccgcaggaaaacaagcggcccgacgcgaagggcggaacgcgcgtaaaaaaaagcgcaccggtacgggccattacgtcccggctgaacgttaccctggttgatattgtttctacccggatgctggggcagcatggttttctgtcggaagtgttttcggcctttgccctgctcggtatttccgtggacatggtagccaccagcgaagtttcggtttccctcaccctggacaccgcctatgatctcgcgacgctgaaaagggatttgtccaaaatcgccagcgtggagataaggaccggaagagccattgtttccattgtcggggatgtggcccgctcttcggaaattctggcgcgggctttcagaatctgccagcttatcggcgtaaccgtgcagatggtctcccagggggccagcaaagtaaatataagttttattgttaacgatactgaagcggcgcaggttgttaaggcccttcacatggatttttttgaggagttggaaaaataa

SEQ ID NO: 23650 - protein, 214 aa, Unknown
  Obtained from environmental sample
  DOMAIN (149)...(214): ACT domain
  misc_feature (1)..(214): Xaa is any amino acid
MRASELAYFGAQVLHPRAMQPCMKTGTPVLVKNSYNIDAPGTRIGPPQENKRPDAKGGTRVKKSAPVRAITSRLNVTLVDIVSTRMLGQHGFLSEVFSAFALLGISVDMVATSEVSVSLTLDTAYDLATLKRDLSKIASVEIRTGRAIVSIVGDVARSSEILARAFRICQLIGVTVQMVSQGASKVNISFIVNDTEAAQVVKALHMDFFEELEK

SEQ ID NO: 23651 - DNA, 1068 bp, Unknown
  Obtained from environmental sample
  misc_feature (1)..(1068): n is a, c, g, or t
atggaggtttgtatgaaagtcgcgattaatggttttgggcgtattgggcgcctgctgttccaggccctggtaggacaggggtttctgggaaaagacaagattgatgtggtagcggtggtggatatttccaccgatgcgaagtattttgcctatcagttaaaatatgactcaacacagggtcatatgaaagccgatatcggcactgagggcgaggatattctggtgatcaatggccacaagatcaaatgtttgtccggtaaggggcttaccccgagtcaacttccctggaaaaacatgggtgtcgaatatgtgctggaatgtacaggtatttacaacagcgagaaagcatatggtcatattgaagccggggcaaagaaagttattctctccgcgcccggtaagtccgccgatgattccaagcccattaagactttcgttatgggtgtcaacaacgaagaatacgatccggcaaagcacaatgtaatttccaacgcaagctgcaccaccaactgccttgcgccgctggttcatgtgattattaaagaaggcatcgggattgaaaccggcctgatgaccacgattcactcgtatacggcaacccagaaaaccgtagatggcgtttcccagaaagactggcggggcggacgggctgcggctatcaacattatcccctcgacaaccggcgctgcaaaggccgtaggcgaagtgcttccctccaccaagggcaaactcaccggcatgagcttccgcgttcccacacccaccggctcggtagtagacctgaccttccgcgcggagaaagacacctctattgaagccattgacgccgctttcaaaaaggcttcggaaacatacatgaaaggcgttctggcctactgcaaagaagaaatcgtttcaaccgacatcattcacaataccaacacttcaatctacgacagccttgccaccctccagaacaacctcaagggcgaaaaacgcttctttaaggtagtttcctggtacgacaacgaatggggctattcgaacaaagtcgtagacctgatgaaacatatcgatagcaagaaatag

SEQ ID NO: 23652 - protein, 355 aa, Unknown
  Obtained from environmental sample
  DOMAIN (5)...(167): Glyceraldehyde 3-phosphate dehydrogenase, NAD binding domain
  misc_feature (1)..(355): Xaa is any amino acid
MEVCMKVAINGFGRIGRLLFQALVGQGFLGKDKIDVVAVVDISTDAKYFAYQLKYDSTQGHMKADIGTEGEDILVINGHKIKCLSGKGLTPSQLPWKNMGVEYVLECTGIYNSEKAYGHIEAGAKKVILSAPGKSADDSKPIKTFVMGVNNEEYDPAKHNVISNASCTTNCLAPLVHVIIKEGIGIETGLMTTIHSYTATQKTVDGVSQKDWRGGRAAAINIIPSTTGAAKAVGEVLPSTKGKLTGMSFRVPTPTGSVVDLTFRAEKDTSIEAIDAAFKKASETYMKGVLAYCKEEIVSTDIIHNTNTSIYDSLATLQNNLKGEKRFFKVVSWYDNEWGYSNKVVDLMKHIDSKK

SEQ ID NO: 23653 - DNA, 1263 bp, Unknown
  Obtained from environmental sample
  misc_feature (1)..(1263): n is a, c, g, or t
atgattaaaactgtaaaaaccgttgacctgaagggcaaacgcgtcattatgcgcgtggactttaacgtgccgatgaaagacggcgttgtgcaggatgatacccgcattgtggcagccctgccaactatcaaatatatccttgatcagggggttaagaccctgacgcttatgtcacatctgggagacccttccaaggatgccaaaaaagcgaaggaaaaggccgaaaaagacggcaagaccttcgatgaagccgcgtacataaagggcaaacaccgcatggcgccggttgccgcttacctggaaaaaaagctgggcaaacctgtgatttttgccggagaagacggctgttacggaaaaaaggcgtttatcgacgggcagcccgccggatcggttatcatgctggaaaacacccgtttccacaaggaagagaccgccaaggatgccgctgacctggacaagctggcgaaagagcttgccacttacggtgacgtatttgtaaacgacgctntcggcactgcccacagggatcacgcctctacagcgtccatcgcgaaattcgcgccggttgcggttgcgggtttcctcatggagaaagaggtcaactacctggagcctattgtcaccaacccccaaaaaccgctgattgcgattatcggcggggcgaaagtttcctccaaaatcgcggtgctggaaagcctgttgaaaaattcagccgcgctggtcattggcggcggcatggcctataccttcctcaaagttcaggggcacaagattggcaaatcgcttgttgaagacgatcagcttgatacggcgcagaaaatccttgacgccgccaaaagcgcaaatgtgcagattgttctgccgcttgaccacattgccgcgacaagttttgacgcgaactcttctcccgttccggttgacggtcttgatcttcccgacaatatgcttgggctggacgtaggaccaaagacgcttactaaatacaaggaagtgcttgccggagccaaaaccattgtatggaacggtccggtaggcgtttttgaatttgacgcatttgccaaaggcactgaggcagtggcgaaactggtggcggaagctaccggcaagggtgtcatcaccgtggtaggcggaggcgactcagtggcggcagtgaacaagttccaccttgccgacaaaatgagccatgtctccacaggcggcggcgcatctctggaactgctggaaggcaagaaactgcccggcatcgaagtgtgtagagggtag

SEQ ID NO: 23654 - protein, 420 aa, Unknown
  Obtained from environmental sample
  DOMAIN (1)...(418): Phosphoglycerate kinase
  misc_feature (1)..(420): Xaa is any amino acid
MIKTVKTVDLKGKRVIMRVDFNVPMKDGVVQDDTRIVAALPTIKYILDQGVKTLTLMSHLGDPSKDAKKAKEKAEKDGKTFDEAAYIKGKHRMAPVAAYLEKKLGKPVIFAGEDGCYGKKAFIDGQPAGSVIMLENTRFHKEETAKDAADLDKLAKELATYGDVFVNDAXGTAHRDHASTASIAKFAPVAVAGFLMEKEVNYLEPIVTNPQKPLIAIIGGAKVSSKIAVLESLLKNSAALVIGGGMAYTFLKVQGHKIGKSLVEDDQLDTAQKILDAAKSANVQIVLPLDHIAATSFDANSSPVPVDGLDLPDNMLGLDVGPKTLTKYKEVLAGAKTIVWNGPVGVFEFDAFAKGTEAVAKLVAEATGKGVITVVGGGDSVAAVNKFHLADKMSHVSTGGGASLELLEGKKLPGIEVCRG

SEQ ID NO: 23655 - DNA, 447 bp, Unknown
  Obtained from environmental sample
  misc_feature (1)..(447): n is a, c, g, or t
atgccgggcagtttcttgccttccagcagttccagagatgcgccgccgcctgtggagacatggctcattttgtcggcaaggtggaacttgttcactgccgccactgagtcgcctccgcctaccacggtgatgacacccttgccggtagcttccgccaccagtttcgccactgcctcagtgcctttggcaaatgcgtcaaattcaaaaacgcctaccggaccgttccatacaatggttttggctccggcaagcacttccttgtatttagtaagcgtctttggtcctacgtccagcccaagcatattgtcgggaagatcaagaccgtcaaccggaacgggagaagagttcgcgtcaaaacttgtcgcggcaatgtggtcaagcggcagaacaatctgcacatttgcgcttttggcggcgtcaaggattttctgcgccgtatcaagctga

SEQ ID NO: 23656 - protein, 148 aa, Unknown
  Obtained from environmental sample
  misc_feature (1)..(148): Xaa is any amino acid
MPGSFLPSSSSRDAPPPVETWLILSARWNLFTAATESPPPTTVMTPLPVASATSFATASVPLANASNSKTPTGPFHTMVLAPASTSLYLVSVFGPTSSPSILSGRSRPSTGTGEEFASKLVAAMWSSGRTICTFALLAASRIFCAVSS

SEQ ID NO: 23657 - DNA, 603 bp, Unknown
  Obtained from environmental sample
  misc_feature (1)..(603): n is a, c, g, or t
gtggcggcgggcgttggagtcgaatggggatatccgcaccaatcgatggacgcccgtctcggctttgaggtggccgtaggcgtactcgcccttgacctccagcgtaacggatttcagcccggcttcgtcgccgggggagctttccagcatattgtacgagtaccctttgcgctccatgtagcgggcgtacatacggtagagcatctccgtccagtcgcacgattcggtgccgcccgccccgctgtggatggtcactatggcgtcagcagcgtcgtcctcgccgctcatcttgcggatgaactctatccgcgccacctctttttcgagctcggccgcctgaccgcaaagatcggcgagcgtcgccttgtcgccctcctccgaggccagcccgtacagctcgtagatgtcgttcgcgtcggcgttcgccttgtcccacggctccacgacccgcttcagctctttgatgcttttgagcaccttctgcgccgcccccgcgtcgtcccagaacccgtcttgggcggagcgggactcgagttgcatgatttggttcttcttcccgtctatgtcaaagatacccccgaaggttatcgacgcgggacttga

SEQ ID NO: 23658 - protein, 200 aa, Unknown
  Obtained from environmental sample
  misc_feature (1)..(200): Xaa is any amino acid
MAAGVGVEWGYPHQSMDARLGFEVAVGVLALDLQRNGFQPGFVAGGAFQHIVRVPFALHVAGVHTVEHLRPVARFGAARPAVDGHYGVSSVVLAAHLADELYPRHLFFELGRLTAKIGERRLVALLRGQPVQLVDVVRVGVRLVPRLHDPLQLFDAFEHLLRRPRVVPEPVLGGAGLELHDLVLLPVYVKDTPEGYRRGT

SEQ ID NO: 23659 - DNA, 522 bp, Unknown
  Obtained from environmental sample
  misc_feature (1)..(522): n is a, c, g, or t
atggcgaacaaggtcgcaaatgacgcgattcagattcacggcggcacaggctacatgaaggaattcaacgcggaacgccattatagagatgcgagaatcacaaatatatacgaagggacaacacagcttcagattgtggcggctatcgggccggtgacatcgggcattgcccagatggttatggacgaatacgacaagataaattacaaccacagccctgatctgctcgcgaagctccgcgacgctcgcaagggcttcgaagaggccctggaatacgccaaggcttacgagggccatgagcagtttctcacgtatcattcccgcaggcttgtggaaatggccaccgaccttattctgggttatctgctgatgagagacggcaatcacagcgagaggaagcagaaagtggccgctatttttattgcaaagatgccttcgaggataaaatccaatagggacttcattatgggcgataatggtacgttactgaaaaattacgaagaagtaatcggaatcaggtaa

SEQ ID NO: 23660 - protein, 173 aa, Unknown
  Obtained from environmental sample
  misc_feature (1)..(173): Xaa is any amino acid
MANKVANDAIQIHGGTGYMKEFNAERHYRDARITNIYEGTTQLQIVAAIGPVTSGIAQMVMDEYDKINYNHSPDLLAKLRDARKGFEEALEYAKAYEGHEQFLTYHSRRLVEMATDLILGYLLMRDGNHSERKQKVAAIFIAKMPSRIKSNRDFIMGDNGTLLKNYEEVIGIR

SEQ ID NO: 23661 - DNA, 636 bp, Unknown
  Obtained from environmental sample
  misc_feature (1)..(636): n is a, c, g, or t
atggcgagaaccacctgcatgtactggaagcctataaaacttgttcctgccggcggggatgagcgcgtgcgaaaggcgcttgaagcgctgttgcacataacgctagataaaattgtcagccgcgattggcactttaagttattttttgacatgaattggaattcgctgactaaagatatttcttatggtcacgatattgagggaagctggctgttgtatgaggcggctttagctgtcgatgatgaaaagattatctccaaaataaagcaaaccgcgttggagattgcggaagttatctatactgctgccattgaccgaaaaaacggcgggctgctcagcggctgtgacgaacagggacacaaccacgccaaaaaagaatggtggccgcaggcggaagccgtcgtaggtttctacaatgcgtatgagttatccggtgatcagaaatactttgatgcggctgataacatttggagttacatacaaaaacattttgtggatcatacccacggcgaatggcacaacgaattgaacctggacaatacgccggatacaagtatgcccaaggccggtttctggaaatgcccctaccataacgcccgtgcctgctttgagttgttggagcggatggaggagtga

SEQ ID NO: 23662 - protein, 211 aa, Unknown
  Obtained from environmental sample
  misc_feature (1)..(211): Xaa is any amino acid
MARTTCMYWKPIKLVPAGGDERVRKALEALLHITLDKIVSRDWHFKLFFDMNWNSLTKDISYGHDIEGSWLLYEAALAVDDEKIISKIKQTALEIAEVIYTAAIDRKNGGLLSGCDEQGHNHAKKEWWPQAEAVVGFYNAYELSGDQKYFDAADNIWSYIQKHFVDHTHGEWHNELNLDNTPDTSMPKAGFWKCPYHNARACFELLERMEE

SEQ ID NO: 23663 - DNA, 627 bp, Unknown
  Obtained from environmental sample
  misc_feature (1)..(627): n is a, c, g, or t
atggaagaaaagaaaaagattatcgttgtagacgataatgttgaaaacctgaccgttcttaaagatattttaaaagaaaattacgaagtatatacaatcccctcggcggcgaaaatgttcgatttgctggaacatataacgccggacttgattttattggacgtggaaatgcctgaaatgaacgggtatgacgccgcgaaaaaacttaaaagcgcggaaaaatacaaatccataccctttatgtttttgactatcagggacgacataaaaagcgagatggacggtttagaccttggcgccattgattacatccataaaccgttcgtgagccctttgcttttacaaaggataaacacaaatttttccctgatggattatcaaaaactggaggttatttccaaagcgacagtaaccgccatgcagcacatcaaggaaggctttattcttgtagataccgaaaacaaatatatttcctccaattccgccgccgaaataatgtttcccggaattacaaaactcgaaaaaggagaattaataacttccgcggaggattggcccgcatatctggtaattaaagaaggcaatctggatttctcaactgaaggagaaaatgctcggccaatctga

SEQ ID NO: 23664 - protein, 208 aa, Unknown
  Obtained from environmental sample
  DOMAIN (5)...(118): Response regulator receiver domain
  misc_feature (1)..(208): Xaa is any amino acid
MEEKKKIIVVDDNVENLTVLKDILKENYEVYTIPSAAKMFDLLEHITPDLILLDVEMPEMNGYDAAKKLKSAEKYKSIPFMFLTIRDDIKSEMDGLDLGAIDYIHKPFVSPLLLQRINTNFSLMDYQKLEVISKATVTAMQHIKEGFILVDTENKYISSNSAAEIMFPGITKLEKGELITSAEDWPAYLVIKEGNLDFSTEGENARPI

SEQ ID NO: 23665 - DNA, 1143 bp, Unknown
  Obtained from environmental sample
  misc_feature (1)..(1143): n is a, c, g, or t
gtggctaataacctgaaagacattgccgaaggcgaaggcgatttaacccataccattccggtacgttccgatgacgaaataggcgaccttgccatttacttcaacaagacgctggaaaaaatcaaaaatctggtcgtaaatgttaaaaaagaagccggcgatttatccggcattggaaccgatctcgcggctaatatgaccgagaccgccgccgccgtaaacgaaataaacgccaatatccagagcattaagggaagggtaattaaccagagcgcaagcgtcagcgaaacacacgcgacaatggaacagcttaccgaaaacattcacaaaatgaatgatcatgttgaaaaccagagcgcccatgtttcccaggcgtcgtccgccattgaacagatgatggcgaatatcagttcggttaccgggacgcttattaacaacgcggttaatgtgaataccttaaaagaatcttccgaagtgggacgcgtcggcttacaggaagtcgcggcggatattcagggaatagcccgcgagtccgaaggcctgcttgagataaacgccgtaatggaaaacatagccagccagaccaatttattaagcatgaacgccgcgattgaggcggcgcacgcgggagaagccggtaaaggtttcgccgttgtcgccggtgaaatccgcaaactggcggagagttccggcgaacaatccaagaccatcggcactgttttgaaaaaaataaaagagtctatcgataaaataacaagatccacggataatgtgcttagtaaattcgaggctattgactcaagtgttaaaaccgttgcgactcaggaggaaaacatccgtgtctcaatggaagagcagactacgggaagcaaacaggtgcttgaaggcataagcgaagtaaacgaattaacgcggcaggtaaaaaacgcttccaaacaaatgcttgaaggagcaaaagaagtaatacaggaaagcgccaatcttgagaaagcgactcaggaaataaccggcggcgtgaacgagatggcaataggcgcggagcatataaacacggcggtaaaccatgtaaacgatataagcggcaagaaccgcggggcaataaatgatttatcgcgcgaggtgtcacggtttaaggtagactaa

SEQ ID NO: 23666 - protein, 380 aa, Unknown
  Obtained from environmental sample
  DOMAIN (116)...(336): Methyl-accepting chemotaxis protein (MCP) signaling domain
  misc_feature (1)..(380): Xaa is any amino acid
MANNLKDIAEGEGDLTHTIPVRSDDEIGDLAIYFNKTLEKIKNLVVNVKKEAGDLSGIGTDLAANMTETAAAVNEINANIQSIKGRVINQSASVSETHATMEQLTENIHKMNDHVENQSAHVSQASSAIEQMMANISSVTGTLINNAVNVNTLKESSEVGRVGLQEVAADIQGIARESEGLLEINAVMENIASQTNLLSMNAAIEAAHAGEAGKGFAVVAGEIRKLAESSGEQSKTIGTVLKKIKESIDKITRSTDNVLSKFEAIDSSVKTVATQEENIRVSMEEQTTGSKQVLEGISEVNELTRQVKNASKQMLEGAKEVIQESANLEKATQEITGGVNEMAIGAEHINTAVNHVNDISGKNRGAINDLSREVSRFKVD

SEQ ID NO: 23667 - DNA, 609 bp, Unknown
  Obtained from environmental sample
  misc_feature (1)..(609): n is a, c, g, or t
gtgaaggaacggctggatacaaaatacggcatcgtgcttcaacagcctgcatacagagaataccatcttgagctgggcgaagtctcgtcctacccgccgggctataaagagaacgcaggcattttttgccacaacaacccctgggttacgattgccgagaccaaactgggccgtggtacgcgcgcgtttgaaacctacacgaaaatttgcccggcttaccgcgaagacgacagcgatcttcgccgtctggagccgtatgtgtacgcgcagatggtcgctggaaaggacgcgccgcgttttggcgaagcgaaaaattcctggctcaccggaaccgcagcgtggacttttgtcagcatttcgcagtacatcctgggagtgcgccctgtgttcgatggcgtgctcatcgacccctgcatccccgcaagcatgaaaagcttctccgttattcgtcattttcaaaacgcagtgtaccgcattttcgtggacaatagcgctggcgtggagaaaggcgtaaagtcggttacgcttgacggcaagctgcttgacggcgctatattgccagcgcttggcgacgggcgtacgcatgaggtcagcgtggtgatgggatga

SEQ ID NO: 23668 - protein, 202 aa, Unknown
  Obtained from environmental sample
  misc_feature (1)..(202): Xaa is any amino acid
MKERLDTKYGIVLQQPAYREYHLELGEVSSYPPGYKENAGIFCHNNPWVTIAETKLGRGTRAFETYTKICPAYREDDSDLRRLEPYVYAQMVAGKDAPRFGEAKNSWLTGTAAWTFVSISQYILGVRPVFDGVLIDPCIPASMKSFSVIRHFQNAVYRIFVDNSAGVEKGVKSVTLDGKLLDGAILPALGDGRTHEVSVVMG

SEQ ID NO: 23669 - DNA, 489 bp, Unknown
  Obtained from environmental sample
  misc_feature (1)..(489): n is a, c, g, or t
atgtacgattttaagcagccttggaaaataaaagtttcatccgcgcttaacgcgattttagccgacgcgggtattactgaaactattaaacccgatcaggtaattgcggaaaatccgccgaaccctgaaatgggggatatcggttttccaatgtttggttacgcaaaattattgcgcaaaggaccgcctcagattgcgcaaatggcggcggaaaaactgacaaagctcgtcaatgaaactcagtccggcgcanaggtacaggcgcagggaccgtatttgaacgtcagtctggatcgcgctttggaggcaaaggcggttctttcgcaagtatttggttctgacaaagccgggcaatttaattttgccggtcctcaaatattaaccggaaaaaaatcatggtggagttttccagcccgaatacaaaacagcccctgcacttggggcacttgcgaaacgacgtgttgggcgaaagcgtgtcgcgtattttag

SEQ ID NO: 23670 - protein, 162 aa, Unknown
  Obtained from environmental sample
  DOMAIN (6)...(97): Arginyl tRNA synthetase N terminal domain
  misc_feature (1)..(162): Xaa is any amino acid
MYDFKQPWKIKVSSALNAILADAGITETIKPDQVIAENPPNPEMGDIGFPMFGYAKLLRKGPPQIAQMAAEKLTKLVNETQSGAXVQAQGPYLNVSLDRALEAKAVLSQVFGSDKAGQFNFAGPQILTGKKSWWSFPARIQNSPCTWGTCETTCWAKACRVF

SEQ ID NO: 23671 - DNA, 375 bp, Unknown
  Obtained from environmental sample
  misc_feature (1)..(375): n is a, c, g, or t
gtgtgccgganacttggcattccccctgtgctgaacttcggcccctgcctcgccataggacggctggaaattgtcgccaccgaacttgccgaggccatcggcatcgacatcccgcaacttcccttggtgctttccgccgcccagtggcttgaagagcaggctctcgcggatggatgtttcggtcttgccctggggctgccactccacttgggtcttcccccgtatgtaaccggcagtaaagtcgcagttcaggtgctttgccaggacatgatttccctcaccggcggccgggtgataatcaacagcgacgcgaaagagtctgcgaatctgcttgaaactatcatcaacgaaaaacgcgcggcattgaaaatttaa

SEQ ID NO: 23672 - protein, 124 aa, Unknown
  Obtained from environmental sample
  misc_feature (1)..(124): Xaa is any amino acid
MCRXLGIPPVLNFGPCLAIGRLEIVATELAEAIGIDIPQLPLVLSAAQWLEEQALADGCFGLALGLPLHLGLPPYVTGSKVAVQVLCQDMISLTGGRVIINSDAKESANLLETIINEKRAALKI

SEQ ID NO: 23673 - DNA, 483 bp, Unknown
  Obtained from environmental sample
  misc_feature (1)..(483): n is a, c, g, or t
atgaaacgcatcattattgaacaagataaatgcgatggctgcaaaagttgcagcattgcctgtatgcaagctcaccgtgatccgaccgcgacaggaagccgtggaacggtttacgatcttgaccttcttgaccccaaaaacgaggcccgtcataccatcaccaactatcgaaaaggcggatacgttccggtcttctgccgtcactgtgctgtgcctgaatgtgtgggcgcgtgtatgtctggcgctttaaagaaagaccccgtcaccggtcatgtgcaatacgacgagaagcgctgcggcaaatgcttcatgtgtgttatgagctgcccctacggaaacatcaaaccggacagcgtaacgcgaacaaagatcctcaagtgcgatttttgcaaggaagataatgaggaaccaaattgcgtgaagtcctgtcccaaagaagctattcatgtggaagaagttgatgttgggggtatagcggtatga

SEQ ID NO: 23674 - protein, 160 aa, Unknown
  Obtained from environmental sample
  DOMAIN (92)...(115): 4Fe-4S binding domain
  misc_feature (1)..(160): Xaa is any amino acid
MKRIIIEQDKCDGCKSCSIACMQAHRDPTATGSRGTVYDLDLLDPKNEARHTITNYRKGGYVPVFCRHCAVPECVGACMSGALKKDPVTGHVQYDEKRCGKCFMCVMSCPYGNIKPDSVTRTKILKCDFCKEDNEEPNCVKSCPKEAIHVEEVDVGGIAV

SEQ ID NO: 23675 - DNA, 366 bp, Unknown
  Obtained from environmental sample
  misc_feature (1)..(366): n is a, c, g, or t
atggacaggcaccttgagcagaagctgcttggggaaaaatccggcatactgaactggctgatcgaaggggcgttgcgctggcagaaggaaggcttgaacacaccgtcaatcgtgctgaacgccacggacgagtaccggggcgagatggacgctattgggaactttatcaaggaacggtgcgtccaaaagccgggggaggcgatcaaggcgcgagagctgtttcgtgtctatcaggaatggtgcgaggagaacaacgaaatggcaaccagcgagcggatgttcgggctgcggatgaaggagctgggcatggcgcagaagcgggcagccgacgggcggtactggcaggacattgcgcttcaggggtaa

SEQ ID NO: 23676 - protein, 121 aa, Unknown
  Obtained from environmental sample
  misc_feature (1)..(121): Xaa is any amino acid
MDRHLEQKLLGEKSGILNWLIEGALRWQKEGLNTPSIVLNATDEYRGEMDAIGNFIKERCVQKPGEAIKARELFRVYQEWCEENNEMATSERMFGLRMKELGMAQKRAADGRYWQDIALQG

SEQ ID NO: 23677 - DNA, 1014 bp, Unknown
  Obtained from environmental sample
  misc_feature (1)..(1014): n is a, c, g, or t
ttgccttgcatcaatcaaaaaatattgcaaaagcaagaatttgcacattttacttatttgcgcctatgccgggacactctacatttccagcataaatcttttatgaaggagtcgaaaatgaaaattcaagaaacggcaagcgacattgaacgcaatgcgcttagggaagaatcggtattgctgcgcatccaccagctgcaaaatgggctggtgcagcttaccgacgcgactacagcctaccggctggtcacgaagcatggcgacgacatccgctacattgccccctggaagaaatgggtcgtatggaacggcgcctattgggaaaccgacagcggcggggcgctgatccacacaagggggctggaaatcgtgcggaatatctacggcgaaattgccaaaaccgccgactaccgggaacggatcgaaatcgagaagtacgccataaaaagcgagtccacaaggcagagggaaaactttgtcagggcggcgcggtacatccccgaactcaacgccgcagtcgacgaccttgaccgcgatccctggctactgaacgtggagaacggcactgtcgacttgcggacgggggagctgctggcccaccggcaggaggataaaatcacgaaggttgcccatgtccagcatgacaggaacgccgactgcccgaaatggaagcagtttgtccgggagatcatggattacaagggcgatttgattgccttcctccaggccgccgcagggtggtcgatcagcggggacatcagcgagcagtccatgtttatcctctacggaacaggggccaacgggaaaagcacgttcctaaacgtgatcatgcgtatattgggggattacgccattaccacctaccctgaaacatttatgaagcggagcagcgattcgcttaccaacgacatcgcccgattgcgggggacgaggtttgtggccactgcagagacggaacaggggaagcggctttcagagcacctgatcaagcaggctacgggaacgaccaaatga

SEQ ID NO: 23678 - protein, 337 aa, Unknown
  Obtained from environmental sample
  misc_feature (1)..(337): Xaa is any amino acid
MPCINQKILQKQEFAHFTYLRLCRDTLHFQHKSFMKESKMKIQETASDIERNALREESVLLRIHQLQNGLVQLTDATTAYRLVTKHGDDIRYIAPWKKWVVWNGAYWETDSGGALIHTRGLEIVRNIYGEIAKTADYRERIEIEKYAIKSESTRQRENFVRAARYIPELNAAVDDLDRDPWLLNVENGTVDLRTGELLAHRQEDKITKVAHVQHDRNADCPKWKQFVREIMDYKGDLIAFLQAAAGWSISGDISEQSMFILYGTGANGKSTFLNVIMRILGDYAITTYPETFMKRSSDSLTNDIARLRGTRFVATAETEQGKRLSEHLIKQATGTTK

SEQ ID NO: 23679 - DNA, 375 bp, Unknown
  Obtained from environmental sample
  misc_feature (1)..(375): n is a, c, g, or t
atgaccgcaaggttcctgtacggggagcactttaacttcgtgccgacattcaagatattcatggcgagcaaccacaagcctgtcatcaaggggactgaccacggcatctggaggcggatcaagctgataccgttcactacaacgatagccgaggagaagatggacaggcaccttgagcagaagctgcttgaggagaaatccggcatactgaactggctgatcgaaggggcgctgcgctggcaaaaggaaggcttgaacaccccttcgatcgtgctgaacgccacggacgagtaccggggcgagatggacgctatcgggaactttatcaaggaacggtgcgtccaaaagccngggggaggcgatcaaggctcgtga

SEQ ID NO: 23680 - protein, 124 aa, Unknown
  Obtained from environmental sample
  misc_feature (1)..(124): Xaa is any amino acid
MTARFLYGEHFNFVPTFKIFMASNHKPVIKGTDHGIWRRIKLIPFTTTIAEEKMDRHLEQKLLEEKSGILNWLIEGALRWQKEGLNTPSIVLNATDEYRGEMDAIGNFIKERCVQKPGGGDQGS

SEQ ID NO: 23681 - DNA, 1182 bp, Unknown
  Obtained from environmental sample
  misc_feature (1)..(1182): n is a, c, g, or t
atgcacagcgcggtagcgttctgccagaatatagcgatttccaaagccactgcggaggcttttaacgtctgccgcgacgcttattttgacacccttacagaggaaaaacgccgcgaaatggttttagtagaggcaaagcatgttgacggaactatgggcgctcaaataagagaacaaaaacttcactggttaaaatccgctaacgccgccaaccgtgaatgtaaaatcctgcacaatgtgcgctgcctttccgaaggcgttgatgttccctctcttgacgccgtaatgttcctttccgcccgaaacagccagattgacgtagtgcaatccgtcgggcgcgttatgcgaaaagcggaaggcaaaaagtacggctatatcattattcccgtcgtagtcttgccggacgcagaccctgataaaacattatcgtcagacaatttcaaagtagtgtggacagtcttaaacgccctccgcgcccatgacgaccgctttaacgccacaataaataaaattgaactcaacaaaaagaagccagcatcaatcagcgcgaccggaaccgatattggcggttcagacggttataccgataccggcgctcccatgccgtccggcggtgaaaaaagcccgttccaaaaacaactcgaactccaatttgcccaattacaggggcaaatatacgcaaaaattgtcctgaaatgcggaacaaagccgtattgggaacagtgggcggccgatgtcgcaaaaattgccgaacagcatatcgaaaacattaccgccattgttaaaaagaaaggcacggccaaagacgaatttgaaaaatacctgaacggcttgcggaaaaatatcaaccccgccgtaaccgagcaggaagctatagaaatgctggcgcagcacatcatcacgcagcctgtattcgaggcgttgttcgaggattattctttcgtaaaaaacaacacagtatcgcagtcattgcagggcataatcgccgcccttaacgagaaaagcaaaaaagaagacgcgcaaaaattagacaaattttatgtttctgtccagacaagggcaagcggcatagacaacagcgaaggcaagcagaaaatcattgtcgaattatatgataagtttttccgcaccgccttcccgaaagttactgaaaaattgggcattgtatacaccccgtgttga

SEQ ID NO: 23682 - protein, 393 aa, Unknown
  Obtained from environmental sample
  DOMAIN (38)...(118): Helicase conserved C-terminal domain
  misc_feature (1)..(393): Xaa is any amino acid
MHSAVAFCQNIAISKATAEAFNVCRDAYFDTLTEEKRREMVLVEAKHVDGTMGAQIREQKLHWLKSANAANRECKILHNVRCLSEGVDVPSLDAVMFLSARNSQIDVVQSVGRVMRKAEGKKYGYIIIPVVVLPDADPDKTLSSDNFKVVWTVLNALRAHDDRFNATINKIELNKKKPASISATGTDIGGSDGYTDTGAPMPSGGEKSPFQKQLELQFAQLQGQIYAKIVLKCGTKPYWEQWAADVAKIAEQHIENITAIVKKKGTAKDEFEKYLNGLRKNINPAVTEQEAIEMLAQHIITQPVFEALFEDYSFVKNNTVSQSLQGIIAALNEKSKKEDAQKLDKFYVSVQTRASGIDNSEGKQKIIVELYDKFFRTAFPKVTEKLGIVYTPC

SEQ ID NO: 23683 - DNA, 1047 bp, Unknown
  Obtained from environmental sample
  misc_feature (1)..(1047): n is a, c, g, or t
ttgcaggtgactttcgagcagatacttcaggaattccgcgataaatccttctccgagcgtgacaaaggctaccgctttgaacgcctaatgcagtccttcctcaaaaccctgcccgaatacgccgactatttcacaaaaatatggctctggaacgagttcccctcacggggcgatttcggctccggcgacaaggatttaggcatagaccttgttgccatgaccaaatacggcgattactgggctgtccagtgcaaatgctatcaggaagacgccgttatcgacaaacccaaactggacaccttcctttccacatcgggaaaaactttttacgacatagcggaagccggaaaaaaagcaaccttcgcctgccgcctttggattgacaccaccgtaaaaggctttaacagggaagccgaaagcaccatacagaaccagactccggaagtaaaacgcataggctattatcagttagccgatgccgcagtcgactggcaaaaaatctacgacggcctgtccggttcaaaagccgcagtaaaaaaatacgacccgttgccgcaccaacaaaccgccataaccaaaacacacgaataccttaaaacaaacgacaggggaaaactcatcatggcttgcgggacaggcaaaacttttaccagcctccgtattgccgagaaagagacctctaaaaatgacgggcttgtcctgttccttgtcccctccatcgccctgttggggcagaccctccgtgaatggaaagcccaatgcgccaggccgttacacgcaatctgtatctgttccgatgcggcagtctctaaatcaagcaaaaataacaacgaggatacaaaccaaatatcggtgacagacctttgcctgcccgcttcaactaacatcaagaatattacccgacaggtggcgaacgcttgtaattctcagaaatcagaaggcggaaacgtggcagtattctctacatatcaatctattgacgtaatcagcgaagtgcaaaagacttttaaccgcgccaaanaagacagttttcttttcgacttgtaa

SEQ ID NO: 23684 - protein, 348 aa, Unknown
  Obtained from environmental sample
  DOMAIN (180)...(338): Type III restriction enzyme, res subunit
  misc_feature (1)..(348): Xaa is any amino acid
MQVTFEQILQEFRDKSFSERDKGYRFERLMQSFLKTLPEYADYFTKIWLWNEFPSRGDFGSGDKDLGIDLVAMTKYGDYWAVQCKCYQEDAVIDKPKLDTFLSTSGKTFYDIAEAGKKATFACRLWIDTTVKGFNREAESTIQNQTPEVKRIGYYQLADAAVDWQKIYDGLSGSKAAVKKYDPLPHQQTAITKTHEYLKTNDRGKLIMACGTGKTFTSLRIAEKETSKNDGLVLFLVPSIALLGQTLREWKAQCARPLHAICICSDAAVSKSSKNNNEDTNQISVTDLCLPASTNIKNITRQVANACNSQKSEGGNVAVFSTYQSIDVISEVQKTFNRAKXDSFLFDL

SEQ ID NO: 23685 - DNA, 882 bp, Unknown
  Obtained from environmental sample
  misc_feature (1)..(882): n is a, c, g, or t
ttgccggttcaacaaaaaatagactacgtngtagtcgctcccgatgacccgctcgctataggaatggtagatgctctgaaagaaaaaggaattcgctgtttcggaccgaataaagcggcggcaagaattgagagcagtaaagtcttttccaaaaacttaatgaaaaaatacggtatccctaccgccgcgtatgaagctttctctgactcaagagacgccttaaactatgtaaactcaaataccgtctcctttccccttgtgataaaagccgacgggcttgcgttagggaagggagtaattatcgctgaaaccaaagaacaggcggttgaggcggttacatcgatcatggttgaaaaaaagttcggcgattccggctgtaatatcgtcatagaggattttttaacgggaccggaagtttcagttctgtcattcacagacggaaaaacagtcgtccccatggtttcatcgatggatcataaacgcgcttttgacgggaacactggaccaaatacaggcggcatgggagtaatagcgccaaacccgcactacacaaaggaaatcgccgcagtttgcgaaaagacaatttttactcccacaatccgcgccatgagggaagaaggctgtccgttcaagggctgtctgtatttcgggcttatgttaactccgcgcggtcctatggttatcgaatacaactgccgctttggagaccccgaagcccaggcggtgcttccgctcttaaaaaccgacctctttgagataatgcaagccgtaacagatgaaaagctggaaagcgtaaaaattgactgggcttgcgaatgttccgcctgcgtagtgattgcgagtggtggctaccccgtgtcatataagacagggttgagataa

SEQ ID NO: 23686 - protein, 293 aa, Unknown
  Obtained from environmental sample
  DOMAIN (1)...(44): Phosphoribosylglycinamide synthetase, N domain
  misc_feature (1)..(293): Xaa is any amino acid
MPVQQKIDYVVVAPDDPLAIGMVDALKEKGIRCFGPNKAAARIESSKVFSKNLMKKYGIPTAAYEAFSDSRDALNYVNSNTVSFPLVIKADGLALGKGVIIAETKEQAVEAVTSIMVEKKFGDSGCNIVIEDFLTGPEVSVLSFTDGKTVVPMVSSMDHKRAFDGNTGPNTGGMGVIAPNPHYTKEIAAVCEKTIFTPTIRAMREEGCPFKGCLYFGLMLTPRGPMVIEYNCRFGDPEAQAVLPLLKTDLFEIMQAVTDEKLESVKIDWACECSACVVIASGGYPVSYKTGLR

SEQ ID NO: 23687 - DNA, 534 bp, Unknown
  Obtained from environmental sample
  misc_feature (1)..(534): n is a, c, g, or t
gtgagatcgggaactgagcgaaacgctgttcttgaaatactggaaacatataacaatgatcctcagcagcttatcgccgtactgcttgatatacagacagcttcgggcaggaattatgttgataaacaatgggcccggctggtatcagaacgccttgacgtgcctctgacaaaagtgtacgacgtgctgactttttacgccatgttcagcactgaacccagaggcgcgtgcctcatcgaaatctgcgagagcgccccctgccgcttcggcggcggcgcgcctaacggcgcggggctttgcgcgcagcaacttgtgggctggtttgaggccgcaacggggataaaaatcggggagacaagcgcagacggcaaaataaccctggcgcgtacaagctgcgtcggagcctgcgacataggccctgtggcgaaaataggcgatgatgttttcggcaatctggatgaagtaaaggtaaaggaattggtcaagcgctgtttgaaaggcgaattgaaagaggtatcccaatgtcaaaaatag

SEQ ID NO: 23688 - protein, 177 aa, Unknown
  Obtained from environmental sample
  DOMAIN (3)...(166): Respiratory-chain NADH dehydrogenase 24 Kd subunit
  misc_feature (1)..(177): Xaa is any amino acid
MRSGTERNAVLEILETYNNDPQQLIAVLLDIQTASGRNYVDKQWARLVSERLDVPLTKVYDVLTFYAMFSTEPRGACLIEICESAPCRFGGGAPNGAGLCAQQLVGWFEAATGIKIGETSADGKITLARTSCVGACDIGPVAKIGDDVFGNLDEVKVKELVKRCLKGELKEVSQCQK

SEQ ID NO: 23689 - DNA, 474 bp, Unknown
  Obtained from environmental sample
  misc_feature (1)..(474): n is a, c, g, or t
atgagtaccgcggactcccagcttcttgcttccgcttccgccttcgcggctgacgtatataaccctgtactgcgcaaaggaaaaggcaccgaagaagaaatgttctggtcgggacgttttgttgtcgcgattatcgcgcttttggcgattattatcgcctcaaatccgggcagcggcacgattatgagccttgtcggaaacgcatggggcgtattcggcgccgcctttggtcccgccattttactgtcgctgttctggaaacgcttcaccttttttggcgctatagccggtatcgtcgccggcgctgtagcggatgtgctttggcttgcgtttttttccggcacgggcctgtacgaaattatccccggctttattgtgggtttagtcgccgccgttattgttactctgtgcggcaaaggccccggcgccgatgttgaagcgctgtttgataaatctgtatccttaaaagattaa

SEQ ID NO: 23690 - protein, 157 aa, Unknown
  Obtained from environmental sample
  SIGNAL (1)...(16)
  misc_feature (1)..(157): Xaa is any amino acid
MSTADSQLLASASAFAADVYNPVLRKGKGTEEEMFWSGRFVVAIIALLAIIIASNPGSGTIMSLVGNAWGVFGAAFGPAILLSLFWKRFTFFGAIAGIVAGAVADVLWLAFFSGTGLYEIIPGFIVGLVAAVIVTLCGKGPGADVEALFDKSVSLKD

SEQ ID NO: 23691 - DNA, 813 bp, Unknown
  Obtained from environmental sample
  misc_feature (1)..(813): n is a, c, g, or t
atggttagtaagcgagaggcttatttttcgaagctcatgaccaaggaggggcgtaccgagtacacagccgttgaaaaggaagaactcgataacttgcgccgcgaagccgaaaccaatcccaaacataaaaaggtctacattttcggtactgatgtcctgggccgggaccttttaacccgcgtaatatacggaggccgtatctcaataggcattgggctagtcggtaccattaccgcgatgctctttgggactttttatggcgcgatagcgggctttatcggcggtaaaacagataatatcatgatgaggatagttgatgttatttacagcctgccttacttgatgctcgtcatagtcatgatggctttgtttggcggcaagagcatcttcatcctttttatcgctatcgcgatgatttcatggctggatcttgccagggtggtccggggccaggtactgtcgctaaaaaattcagagtttatcgaggcggcaagatcagccggagcggggacatggcgtattatttggaagcacctgcttcccaacattgttgggctgataattgtctactcatctttggcgttgcctactttcattataaatgaggcctttctatccttcctgggtttgggcgtttccgctcccatgacttcctggggcgttttgattgatgatggcacgaatgttatgggactctacccctggctcctggtagtaccggctattaccatgtcgtttttcatcttttgcatgaatttcctcggcgacggcctcagggacgcctttgatccccaggccaagaacaggctgtag

SEQ ID NO: 23692 - protein, 270 aa, Unknown
  Obtained from environmental sample
  DOMAIN (65)...(268): Binding-protein-dependent transport system inner membrane component
  misc_feature (1)..(270): Xaa is any amino acid
MVSKREAYFSKLMTKEGRTEYTAVEKEELDNLRREAETNPKHKKVYIFGTDVLGRDLLTRVIYGGRISIGIGLVGTITAMLFGTFYGAIAGFIGGKTDNIMMRIVDVIYSLPYLMLVIVMMALFGGKSIFILFIAIAMISWLDLARVVRGQVLSLKNSEFIEAARSAGAGTWRIIWKHLLPNIVGLIIVYSSLALPTFIINEAFLSFLGLGVSAPMTSWGVLIDDGTNVMGLYPWLLVVPAITMSFFIFCMNFLGDGLRDAFDPQAKNRL

SEQ ID NO: 23693 - DNA, 1386 bp, Unknown
  Obtained from environmental sample
  misc_feature (1)..(1386): n is a, c, g, or t
atgcccaaacaagaggaattgaaaaactacctccgctttcccattaccatggttccagacccctggggcagggatcaaaattatgcccggcaccacgaagttgatgtagaaagcgcccttcccaaagtaggtattcaccccgaatatctctaccaggcggagcgttaccgcgcttcccagtatgccgaaggcatacgccgcgccctggaacgccgggatgcgctgaaaacaatcctcgacaagttccgggacgaagatcacaagatccagggcgaatggtggcctgtaagcgtgttttgttcagcctgcaacaaagatgatactgatattgacggctgggacggtgagtggaacctgagttaccattgcagtgcctgcggtcatagggaagctgcggatatgcgcagcgccaagggaatcaagttagtctggcgggttgactggcccatgcgctgggaacacgaaaaagtggactttgagcctgcaggcaaggatcaccacagccaggggggcagttttgatactgcccgtcatgtgtgcaaggacgtgtacaactgggacgcgccggtcaccttccgctatgactttatcggccttaagggaacgccgggcaagatggccagctcgaaagggaacgtgatcgatcttcccgatgtgcttaaggtgtacactccggagcttacccgctacttatttgccggaacccggccaaatacggaattcaccatttcctttgaccttgatgtgatcaagatatatgaagactacgacaagaccgaacgcatagcctggaaaattgagcctgccaaaaacgaagaagttttccagcgggaaaagcggatctatgaattgtcccagcctgagctttccgcggacggcaaaacccaaatgcccgcagtaatgccctatcaggttcctttccggcatttgtgcaacctcattcaaatcagcgatggggacattgaaaaaaccctggaggccctccaaaatacggtcggaggccccaagccggaacagcttccgcgccttagggtcagggccgaatgtgccaagtactgggtggaggattgcgcccccgaggatttccggtttaaactgaaagcggccggacaagaaacttcagcggatttaacagagcctgaaaaagaggcggttcgcggccttagggacaaggttatcgccaatatcgagcactacaccgatgacaaagcctgcgccgaggcaatttacaaggttgcggaggaacagggtcagggtatagatgggaaggcccttttccgcgccgcgtatcaggcgctaattggtaaggatcaggggccgcggttggcaaacttcctgcggtccatcaacaaggaacgacttctgggaatactggaaaaatattag

SEQ ID NO: 23694 - protein, 461 aa, Unknown
  Obtained from environmental sample
  DOMAIN (1)...(458): tRNA synthetases class I (K)
  misc_feature (1)..(461): Xaa is any amino acid
MPKQEELKNYLRFPITMVPDPWGRDQNYARHHEVDVESALPKVGIHPEYLYQAERYRASQYAEGIRRALERRDALKTILDKFRDEDHKIQGEWWPVSVFCSACNKDDTDIDGWDGEWNLSYHCSACGHREAADMRSAKGIKLVWRVDWPMRWEHEKVDFEPAGKDHHSQGGSFDTARHVCKDVYNWDAPVTFRYDFIGLKGTPGKMASSKGNVIDLPDVLKVYTPELTRYLFAGTRPNTEFTISFDLDVIKIYEDYDKTERIAWKIEPAKNEEVFQREKRIYELSQPELSADGKTQMPAVMPYQVPFRHLCNLIQISDGDIEKTLEALQNTVGGPKPEQLPRLRVRAECAKYWVEDCAPEDFRFKLKAAGQETSADLTEPEKEAVRGLRDKVIANIEHYTDDKACAEAIYKVAEEQGQGIDGKALFRAAYQALIGKDQGPRLANFLRSINKERLLGILEKY

SEQ ID NO: 23695 - DNA, 606 bp, Unknown
  Obtained from environmental sample
  misc_feature (1)..(606): n is a, c, g, or t
atggtccgtgagcgcatgaaaaaaggctttaaaccttttgacttgatttttatggatatacatatgccggtaatggacgggattgaagccgcgtcaataattaacaaactgcaagtaggaacgcctattgtcgctatgaccgcaaatattttatccaccgacaaagaactttacaaaaggaacggtatgcccgattatctggggaaaccttttacttctcaggtcttatggcgttgtctgctgaaatacttcaagcccataaagaaggaaaccgtacaggaaaacacgatagacgaagaagaattggcggtgcagaggatattccagttaagttttataaaagagaatcaaaaaagatttgacgagattgccgacgccttaaaagccaacgactttattctcgcgcatagactggctcacgccttaaaagccaacgccgggcagattgggaaaacccgcctgcaagccgccgccgcggatattgaacagacgattaaaaacggagaaaaaaaggttacggatgaacaactaaagactcttgaaaccgagatgaatgttgttttgaaagagcttgcgcctttgctggatgaacaagccgggaaataa

SEQ ID NO: 23696 - protein, 201 aa, Unknown
  Obtained from environmental sample
  DOMAIN (107)...(187): Hpt domain
  misc_feature (1)..(201): Xaa is any amino acid
MVRERMKKGFKPFDLIFMDIHMPVMDGIEAASIINKLQVGTPIVAMTANILSTDKELYKRNGMPDYLGKPFTSQVLWRCLLKYFKPIKKETVQENTIDEEELAVQRIFQLSFIKENQKRFDEIADALKANDFILAHRLAHALKANAGQIGKTRLQAAAADIEQTIKNGEKKVTDEQLKTLETEMNVVLKELAPLLDEQAGK

SEQ ID NO: 23697 - DNA, 753 bp, Unknown
  Obtained from environmental sample
  misc_feature (1)..(753): n is a, c, g, or t
atggccgagagagatcccacttttgttgcgaaggaaaatgaagaaacgggccagctcattatctccggcatgggggaacttcaccttgacgtgcttgttacccgtattctgaaggagtacaacattggggccaaggtaggcgctcctcaggtaacctaccgtgaatccatcagcgttccggtagaaaggacggagagctattcaaaggtaattgccggaaaggaaaacgccgcgtctttaaccataaaggtcgaacctcttgagcgggggtcgggtaacaagtacagttgggcggccaaatccagagacattcccgaagagatccgggatgcggtggaacgcggcataaacgcgtcgttccagtccggcatcgcccttggctacccctgcatcgacattggcgttaccatcaccggcgttgaatattctgagcttacaggtaccgagatggcctttgaagcctgcgcgtcttttggctttgacgaagcctgtaaaaacgcttctcctgtacttctggagccaattatggccgtgagcatggtgtcccccaaggaatcggtgggcgacgtaataagcctgatgactcagcggggcgggcaggtgttaagcatggaatccaaacctggcggagacgaggtaaaagccctggcccccatggcaaaaatgttcggctttatgacggccctccgcagcgtaagccagggccgcgcggtctttacaatggaattttcacattttgagcggaaagagtaa

SEQ ID NO: 23698 - protein, 250 aa, Unknown
  Obtained from environmental sample
  DOMAIN (49)...(168): Elongation factor G, domain IV
  misc_feature (1)..(250): Xaa is any amino acid
MAERDPTFVAKENEETGQLIISGMGELHLDVLVTRILKEYNIGAKVGAPQVTYRESISVPVERTESYSKVIAGKENAASLTIKVEPLERGSGNKYSWAAKSRDIPEEIRDAVERGINASFQSGIALGYPCIDIGVTITGVEYSELTGTEMAFEACASFGFDEACKNASPVLLEPIMAVSMVSPKESVGDVISLMTQRGGQVLSMESKPGGDEVKALAPMAKMFGFMTALRSVSQGRAVFTMEFSHFERKE

SEQ ID NO: 23699 - DNA, 393 bp, Unknown
  Obtained from environmental sample
  misc_feature (1)..(393): n is a, c, g, or t
atgctggtaccaataaacgacatcaaggtcaaacgaaggatcagaaaagaaatgggcgacatcacggccctggcagacagcatgaaacgtttcggacagatcagcccgatcctaataacaaaaaacaacgtccttatagccgggggcaggcggcttgaagcggcccgcagcctggggtggaccagcataaacgcggtaatagccgaaattcccgacgagctttcaaaactggaatacgagctggaagaaaacattcaacgcagggatttttcccaggccgaaacccacgacgcagtcaaaaggatacaccgcctgcgcaatccttcttttttcagccgcataatcaccgctattgtcgggttttttaagcggctgtttaagattggggagtag

SEQ ID NO: 23700 - protein, 130 aa, Unknown
  Obtained from environmental sample
  DOMAIN (1)...(85): ParB-like nuclease domain
  misc_feature (1)..(130): Xaa is any amino acid
MLVPINDIKVKRRIRKEMGDITALADSMKRFGQISPILITKNNVLIAGGRRLEAARSLGWTSINAVIAEIPDELSKLEYELEENIQRRDFSQAETHDAVKRIHRLRNPSFFSRIITAIVGFFKRLFKIGE

SEQ ID NO: 23701 - DNA, 612 bp, Unknown
  Obtained from environmental sample
  misc_feature (1)..(612): n is a, c, g, or t
ttgttcggctttgacaaaccaggaaattcgctgggcttgacccttaccggctcgaccctggccggccccgtatgggcggattatatgagggaaatccaccaggggcttccctacagggatttcctgcgtcctgccacaggcctggttgacgcaaccgtgtgcgcaaaatcagggctcttaaaaacgccttcctgcactgaaggagtaaccctgaccttccttgaaggcacccagcctatgcttttttgcgaggagtgtggcagtaccagggggtttgatgccttcaggtatattgaattgaaccctatcttcttcgatacattggatttcttaaacgatcttaaaatgccggttttgcgggacgaggcgttattgagggaaatagaggaagaaatgcgcaggccgcagtccagtctaaccattagcagaaacactactccagaccccattaccttgccgaccttaaatttaccaatcttagatttagttgaaaatagtccacagccggttccgcaaccgattgttgaagacgattctgatgagaatgaaacttccgcattagacatggatgacagcctggaggcgccttcctacaacccacttctggactaa

SEQ ID NO: 23702 - protein, 203 aa, Unknown
  Obtained from environmental sample
  SIGNAL (1)...(26)
  misc_feature (1)..(203): Xaa is any amino acid
MFGFDKPGNSLGLTLTGSTLAGPVWADYMREIHQGLPYRDFLRPATGLVDATVCAKSGLLKTPSCTEGVTLTFLEGTQPMLFCEECGSTRGFDAFRYIELNPIFFDTLDFLNDLKMPVLRDEALLREIEEEMRRPQSSLTISRNTTPDPITLPTLNLPILDLVENSPQPVPQPIVEDDSDENETSALDMDDSLEAPSYNPLLD

SEQ ID NO: 23703 - DNA, 831 bp, Unknown
  Obtained from environmental sample
  misc_feature (1)..(831): n is a, c, g, or t
atgtggctgatggatcatctgatgaacctagaggccgccgaggtgttcgagaaatacgagtacaggctgccgctgaaagagagcgcaaaaattgtgcatgggaacgcattgaagattgattgggaagacgttgtacccaaaaacgaattgagctacatcttggggaatccgccgtttggtggcgcaaggataatgagccctgagcaaaaaggggatatggggcttgttttcggcaatgccaagggcgtggggaatcttgactatgttactgcatggtacagaaaggccgctgattacattggaggcgacaggtctgtcaaggtggcctttgtttctaccaattcgataacccaaggtgaacaggtggcggtgctttggaagccgctagttgagcgtggaatacacatcaatttcggtgttcccacattcaagtggagcaatggggcaaaaggaaaagccgcagttcattgcgtcatcgtgggattcagccttgaaaggacggtgcctaacgtcaatcaatatttgatcgaagcacccaatgttttcattgagagccgcgaaaagccgctctgtgacgtgccagagataggaatagggaacaagcccattgatggtggatactatcttttcaccaaagaagaaatggagcagtttcttatgcttgaacccaaggcaaagaaatggttccgcccttatgtcggcgcagaagaattcatcaatggtttccaacggcactgtttgtggctcggcgactgcccgccgcangaactaaggaagatgccncagtgcatggagagggtcaatgccggagcttgtacattttttgtgtaa

SEQ ID NO: 23704 - protein, 276 aa, Unknown
  Obtained from environmental sample
  misc_feature (1)..(276): Xaa is any amino acid
MWLMDHLMNLEAAEVFEKYEYRLPLKESAKIVHGNALKIDWEDVVPKNELSYILGNPPFGGARIMSPEQKGDMGLVFGNAKGVGNLDYVTAWYRKAADYIGGDRSVKVAFVSTNSITQGEQVAVLWKPLVERGIHINFGVPTFKWSNGAKGKAAVHCVIVGFSLERTVPNVNQYLIEAPNVFIESREKPLCDVPEIGIGNKPIDGGYYLFTKEEMEQFLMLEPKAKKWFRPYVGAEEFINGFQRHCLWLGDCPPXELRKMPQCMERVNAGACTFFV

SEQ ID NO: 23705 - DNA, 981 bp, Unknown
  Obtained from environmental sample
  misc_feature (1)..(981): n is a, c, g, or t
gtggggcacgtacttcagggagttcctgaccatgtggacgatgcacagctggacctccgtctgcgggaacacggcgttgaccgcgtcggggaagcccgtcaggccgtccacggcagcaagcaggatgtctttcacgcccctggccctcagctcgttcaggatgcccgcccagaacttcgcgccctcgttctgctgcacccagaggcccagcacgtccttgcgcccgtccatccccacggccagggcgacgtggacggccttcttggcgaccgcgccgccgtcccttatggccacgcgcagggcgtcgaaaaagaccacggggtacaccggctccaggggcctgccgcgccactcgtccagatgggccttgacctcgtcggtcacgcggctcaccagctcgggggagacgtccacggcgtagatctccttgaggtggtcctgtatctgcctcgtggtgaggcccagggcgtacatggagagtatcttttcgtcgaagcccctccactcgcggctgtgcttgggcactatcgctggctcgaactcgccgtccctgtcccgggggacgcttacctccatcggaccgtggtccgtgcggagggtcttcgtggtgcgcccgttccgcctgttggcggtcgccttctcgccgggacggctcttggggaagccgagctcctgggtgagctcggcctccatcgccctctctatcagcgccttcgtgaggcgcttcagcagcccgtccgggccggcgaactcctcaggcgccccgctgtactccttcaaaatctcgtccagcacttccttcgtaaacgcccatgtgaactcctttccaaaagtttcggcgtttacacaaaaaatgtacaagctccggcattgaccctctccatgcactgnggcatcttccttagttcntgcggcgggcagtcgccgagccacaaacagtgccgttggaaaccattgatgaattcttctgcgccgacataa

SEQ ID NO: 23706 - protein, 326 aa, Unknown
  Obtained from environmental sample
  misc_feature (1)..(326): Xaa is any amino acid
MGHVLQGVPDHVDDAQLDLRLREHGVDRVGEARQAVHGSKQDVFHAPGPQLVQDARPELRALVLLHPEAQHVLAPVHPHGQGDVDGLLGDRAAVPYGHAQGVEKDHGVHRLQGPAAPLVQMGLDLVGHAAHQLGGDVHGVDLLEVVLYLPRGEAQGVHGEYLFVEAPPLAAVLGHYRWLELAVPVPGDAYLHRTVVRAEGLRGAPVPPVGGRLLAGTALGEAELLGELGLHRPLYQRLREALQQPVRAGELLRRPAVLLQNLVQHFLRKRPCELLSKSFGVYTKNVQAPALTLSMHXGIFLSSCGGQSPSHKQCRWKPLMNSSAPT

SEQ ID NO: 23707 - DNA, 444 bp, Unknown
  Obtained from environmental sample
  misc_feature (1)..(444): n is a, c, g, or t
gtgaatgcggctgccactgaccgcggcgacagcgacgtgtgtaccgtgctggaagcggcgtacaaggtctggcatgagattcatcggttgatgggattattgcgcttctgccccaatgaagacggcgtgtatattgcccgctgcgagccggatcactttgtattgcctgctttgtggccgcatttcagagaacgctttggggaaacgccctgggccattattgatgagaagcgccgtttttgtctgcgttatacgacgggggaattatttgaattttttaatatagacaaaaatcccacgtttttgaaaagttcgcctaacggcgaatgggataatctctggcggctttatcacaaaaccattaacaacgaaagcaggaataaccccggtttacagcggaggttcatgccacagcgttactggaaatatttaactgaggtgtaa

SEQ ID NO: 23708 - protein, 147 aa, Unknown
  Obtained from environmental sample
  misc_feature (1)..(147): Xaa is any amino acid
MNAAATDRGDSDVCTVLEAAYKVWHEIHRLMGLLRFCPNEDGVYIARCEPDHFVLPALWPHFRERFGETPWAIIDEKRRFCLRYTTGELFEFFNIDKNPTFLKSSPNGEWDNLWRLYHKTINNESRNNPGLQRRFMPQRYWKYLTEV

SEQ ID NO: 23709 - DNA, 369 bp, Unknown
  Obtained from environmental sample
  misc_feature (1)..(369): n is a, c, g, or t
ttggaaaaggaaaaaacaacttcaactccgtacatattgatgatgaaagaaaagagttatatgaggtttgaaggccggagttttcacgaaaacgtcgtggaattttaccaggacgtaaacagctggttggacacttaccttgaaaaagattttagctgttttaccttcgattttgagatgaactatttcaacagctcaacctcaaaactgctgcataatatgttaaccaaaatggatgagtacgcatccgatgaaaaaaaggtgatcgtaaactggataaccacttacgacaacgatattattattgaatgcggcgaagactttcaggaagattttaacaacctgaaatttaatatgattatcaaatga

SEQ ID NO: 23710 - protein, 122 aa, Unknown
  Obtained from environmental sample
  misc_feature (1)..(122): Xaa is any amino acid
MEKEKTTSTPYILMMKEKSYMRFEGRSFHENVVEFYQDVNSWLDTYLEKDFSCFTFDFEMNYFNSSTSKLLHNMLTKMDEYASDEKKVIVNWITTYDNDIIIECGEDFQEDFNNLKFNMIIK

SEQ ID NO: 23711 - DNA, 570 bp, Unknown
  Obtained from environmental sample
  misc_feature (1)..(570): n is a, c, g, or t
atgataaagaaggaggcggaaatgaagtttaatattcatgaatacaacaaactgctggcggaacataatatcagcatcatctacagcggtcctttatgggcggaagggattgacggcatggccgaatttttacagaaaaggcttgatatggacgatatgcccctaagcgcgtcgcaggccgtcttttcggtatttgtggagcagatgaacaatatgctcatgtattctgccgaaaaggagaaacacgaacgcccccaggcggaaacgtccagcggcatttttgtcctgggcagccatgataaatcgtattatgtacagacgggaaatgtaataaaaaacagcagcgtcgggcttttgaaagaacggatagactatcttaacactctggacaagaaagagttgcggcagttctacaaggagcagatgaaagcagagaatgacaatcctgaaagcaggggcgcggggctcgggcttacggaaatagcgaggcgggcgacttcaaaaatcgaatatgagtttaccccctacggcgaaggcttgtcgtattttacgatgtacgtaacagtatag

SEQ ID NO: 23712 - protein, 189 aa, Unknown
  Obtained from environmental sample
  misc_feature (1)..(189): Xaa is any amino acid
MIKKEAEMKFNIHEYNKLLAEHNISIIYSGPLWAEGIDGMAEFLQKRLDMDDMPLSASQAVFSVFVEQMNNMLMYSAEKEKHERPQAETSSGIFVLGSHDKSYYVQTGNVIKNSSVGLLKERIDYLNTLDKKELRQFYKEQMKAENDNPESRGAGLGLTEIARRATSKIEYEFTPYGEGLSYFTMYVTV

SEQ ID NO: 23713 - DNA, 783 bp, Unknown
  Obtained from environmental sample
  misc_feature (1)..(783): n is a, c, g, or t
atgccatttactatatttctcactaacttaatgagcctttccaccactcaagccattgaactctttaacttgccttttcaagaattggcaaccttagcaaatgattttaaagaagaactccacggcaaaaatgttttctgggtttgcaataggcaaataaattatacaaatgtgtgctgcttgcattgcagtttttgcgcgttttcaaaaataaaaaaggattctccacttgcttacaatatgaatttggatgagattttagcaaaggcaaaagaggctgtaaatttggaagcacgagaattgcacatagtgggaggacttcatccagataatcctttttcttattacacggatatgcttaaaatgcttaaaaaagattttccgagcgtgaatttaaaatgctttaccgctgtggaaatttgccattttgcaaagcaggaaaatagaagcgtagaaagtattttggcagagttaaaagaggctggtttagacacaatgccaggtggcggtgcagaaattttagtgccagaaataagagagaaaatttgtgggcaaaaagaaagcggagatgaatggctttgtgttcacagggctgcacacaaactgggaatcccaacaaatgcaactatgctctttgggcatatagaaagcatagaacacagggttaagcatttatctatgttgcgcgatttgcaaagtgaaacagatggctttttagcttttttgccactcgtgtttttgcctcaaaacaatgctctggaaggcaaggaaaaacagaactag

SEQ ID NO: 23714 - protein, 260 aa, Unknown
  Obtained from environmental sample
  DOMAIN (53)...(228): Radical SAM superfamily
  misc_feature (1)..(260): Xaa is any amino acid
MPFTIFLTNLMSLSTTQAIELFNLPFQELATLANDFKEELHGKNVFWVCNRQINYTNVCCLHCSFCAFSKIKKDSPLAYNMNLDEILAKAKEAVNLEARELHIVGGLHPDNPFSYYTDMLKMLKKDFPSVNLKCFTAVEICHFAKQENRSVESILAELKEAGLDTMPGGGAEILVPEIREKICGQKESGDEWLCVHRAAHKLGIPTNATMLFGHIESIEHRVKHLSMLRDLQSETDGFLAFLPLVFLPQNNALEGKEKQN

SEQ ID NO: 23715 - DNA, 393 bp, Unknown
  Obtained from environmental sample
  misc_feature (1)..(393): n is a, c, g, or t
gtggtcgatgtcatccacttcgctggtggggtcgtccttgagcttgaccagttccttgaccgcggccaggatgtccaggggccggagcacctggacgcccaggtccgcggcctgatcgcccaagccctgctcgccgaaaagccggaggttgagcttgagccgccccaccggcgacaggtcgtagtgctcggggttgaaaaacaggttgtcgaaaaaggtctgggccacttccggggtgggcggggtggagggccggatcttgcggtagatctcaaaaaccgcctcctgggtggtctccaccttgtccatggtcagggtgtcgcggaaggaggaactgacgttggcattgtctatgaacaacaaaggaagctcggtgatgccggtggtttttag

SEQ ID NO: 23716 - protein, 130 aa, Unknown
  Obtained from environmental sample
  misc_feature (1)..(130): Xaa is any amino acid
MVDVIHFAGGVVLELDQFLDRGQDVQGPEHLDAQVRGLIAQALLAEKPEVELEPPHRRQVVVLGVEKQVVEKGLGHFRGGRGGGPDLAVDLKNRLLGGLHLVHGQGVAEGGTDVGIVYEQQRKLGDAGGF

SEQ ID NO: 23717 - DNA, 576 bp, Unknown
  Obtained from environmental sample
  misc_feature (1)..(576): n is a, c, g, or t
gtgttccgcaaagatcgctggaccggagcgttttttgccgtgtcgggtgaaaacgcggacgcagtgtatctgtctatgaaagcgattaccgcgccgttaaaatcggtaaaaggtattttttacggacacagttcttccgtgaaacttgaaaaattaataagagaaagcatcggagtaacggaagactacggtcctgatttcgccctggaatacgcgatacggtttatctgcctgctggttgaaaaaaaatgtttcaaatacattgatttgcttttaaaagaaattgagcggatattgaatgagcaaaaagggattcttaatgttaccgttgaatcggcggtaacgcccgacagcggatttgaggaaaatttggcgcagtcgatcaagctaaagaccggagcggaggcagtaaaggtaaaaactcaggttaatcctgatctgctaggtgggtatttactgcggatcggagatttttatgtggatgcgagctttagggggcaattggaaaatatgaaagcggaattaattgcggctgttgaggaaatgccggacggaggtaacaatggcgaattatga

SEQ ID NO: 23718 - protein, 191 aa, Unknown
  Obtained from environmental sample
  DOMAIN (14)...(175): ATP synthase delta (OSCP) subunit
  misc_feature (1)..(191): Xaa is any amino acid
MFRKDRWTGAFFAVSGENADAVYLSMKAITAPLKSVKGIFYGHSSSVKLEKLIRESIGVTEDYGPDFALEYAIRFICLLVEKKCFKYIDLLLKEIERILNEQKGILNVTVESAVTPDSGFEENLAQSIKLKTGAEAVKVKTQVNPDLLGGYLLRIGDFYVDASFRGQLENMKAELIAAVEEMPDGGNNGEL

SEQ ID NO: 23719 - DNA, 372 bp, Unknown
  Obtained from environmental sample
  misc_feature (1)..(372): n is a, c, g, or t
ttgcggctgttgaggaaatgccggacggaggtaacaatggcgaattatgaataccttaccagagttctgcaggagcggattgaaaattggcaaggcagggctgtatccggcaattccggttttgttgtacaagtaggcgactcagtcgcttccgtttacggattatccggcgctgtttacggagagcaggttgaatttacatcgggcgcaacagggattgttcttaaccttgaggacgagaacacgggcgttgttattttgtccggcgagtatttggtaaaagaaggcgatgaagtaaagggaaccggtaaagtggtctctgttccttccggcatttccctgtttggccgcgtggtaaatcctcttgggtaa

SEQ ID NO: 23720 - protein, 123 aa, Unknown
  Obtained from environmental sample
  DOMAIN (35)...(103): ATP synthase alpha/beta family, beta-barrel domain
  misc_feature (1)..(123): Xaa is any amino acid
MRLLRKCRTEVTMANYEYLTRVLQERIENWQGRAVSGNSGFVVQVGDSVASVYGLSGAVYGEQVEFTSGATGIVLNLEDENTGVVILSGEYLVKEGDEVKGTGKVVSVPSGISLFGRVVNPLG

SEQ ID NO: 23721 - DNA, 708 bp, Unknown
  Obtained from environmental sample
  misc_feature (1)..(708): n is a, c, g, or t
atggaaatcaccgaaagccttgtccgctcaggcgcggtagacgtaatagtcgtggactccgtagcggcgcttaccccgcaatcggaaattgagggcgaaatgggtgacgcgcaaatgggggcgcaggcgcgccttatgagccaggccctgcgaaaacttaccgccacaataggcaaatcgcgcaccattttaatttttatcaaccagatccgcatgaagataggggtcttcttcggcaatcccgaaactaccacaggcggaaacgcgcttaaattttactcgtcgctgcggctggaagtgcgcaaaaccgaaacaatcgaagtttccaaagacgccgacgcgataggcaacagggtgcgcgtaaaagtggtaaagaataaagtagcgcctcctttccgcagaacggaactggaattaatgttcggcaaaggaatttccgcgacgggcagtttgctggactgcgccgtaaagtacgacataatcaaaaaaagcggcgcatggtattcctacaatgacgaaaaaatcgggcagggcagggacaatacaagagaatatcttgaacagcgccccgattttatgaaagaactggaattaaaactgcgcaaaataattttccccgacagggaattcccgcagttcaaagcggaaaaggctaaggccggcaaagaacacaaagctcccgcggaagcaaaacaggatggagtataa

SEQ ID NO: 23722 - protein, 235 aa, Unknown
  Obtained from environmental sample
  DOMAIN (1)...(206): recA bacterial DNA recombination protein
  misc_feature (1)..(235): Xaa is any amino acid
MEITESLVRSGAVDVIVVDSVAALTPQSEIEGEMGDAQMGAQARLMSQALRKLTATIGKSRTILIFINQIRMKIGVFFGNPETTTGGNALKFYSSLRLEVRKTETIEVSKDADAIGNRVRVKVVKNKVAPPFRRTELELMFGKGISATGSLLDCAVKYDIIKKSGAWYSYNDEKIGQGRDNTREYLEQRPDFMKELELKLRKIIFPDREFPQFKAEKAKAGKEHKAPAEAKQDGV

SEQ ID NO: 23723 - DNA, 1122 bp, Unknown
  Obtained from environmental sample
  misc_feature (1)..(1122): n is a, c, g, or t
atgacggcaaatattaattcggtaaccaaaacccttgcggacaacagcaaaaatgtcagcgctttgaccgaagcgtcggaaaacggcaaaacgggcgttcagacagtggcgcaggagatacaggaaatagcgaaagactccgaaggtttgctggaaataaactcggttatgaacactatcgccagccagaccaatctgctttcgatgaacgccgcgattgaggcggcgcacgccggagaagcggggaaaggttttgccgttgtcgccgatgaaatccgcaaactcgccgaaagttccagcaaacaatcaaaaactaccgcaacgatgcttaaaaaaataaaaacgtccatagacagcatcaccagatcgtctaacgaggtgctggagcgtttcggggccatagacacaagcgtgaaaacagtttccgagcatgagagaaatattttaaacgcgatggaagaacaggcaacaggcggaaagcaaatactggaatccataagccgcctgcgggatataacctcctcggttaagaccggctctgatcaaatggcggaatcgggaaatactcttgtcaaggaaacagacgatctcataaaaaccagcaaagaaacggtaaacggcatgaacgaaatactggtgggcattaatcagataagcgcttcgatgacccttgtcaacgaaatgagccaggaaaacaacaaaaacttcgaagcgttaaaaaccgagacgaataaatttgttgattctcttggcaacgagaagaaaaaactccttgtagtagacgacgaagcccccattcttgtaatggcgaaaggcgtattgggcgacgactacgaggtaattaccgcaagttcgggcaaagaagcgctgggctatttctatcagggccttctccccgccctggtattgctggacctggtaatgccgggaatggacggatgggacgcatataccagaattaagggcctggccggtttgcacaataccccgatagcgtttttcacgtcttcaaccgatccgaaagacgtacaaaaggcgcagcaaatgggtgccgctgattacattaagaaaccctgcgaccatgacgagctgttaagaaaggtgaagagactggtcagctag

SEQ ID NO: 23724 - protein, 373 aa, Unknown
  Obtained from environmental sample
  DOMAIN (1)...(207): Methyl-accepting chemotaxis protein (MCP) signaling domain
  misc_feature (1)..(373): Xaa is any amino acid
MTANINSVTKTLADNSKNVSALTEASENGKTGVQTVAQEIQEIAKDSEGLLEINSVMNTIASQTNLLSMNAAIEAAHAGEAGKGFAVVADEIRKLAESSSKQSKTTATMLKKIKTSIDSITRSSNEVLERFGAIDTSVKTVSEHERNILNAMEEQATGGKQILESISRLRDITSSVKTGSDQMAESGNTLVKETDDLIKTSKETVNGMNEILVGINQISASMTLVNEMSQENNKNFEALKTETNKFVDSLGNEKKKLLVVDDEAPILVMAKGVLGDDYEVITASSGKEALGYFYQGLLPALVLLDLVMPGMDGWDAYTRIKGLAGLHNTPIAFFTSSTDPKDVQKAQQMGAADYIKKPCDHDELLRKVKRLVS

SEQ ID NO: 23725 - DNA, 399 bp, Unknown
  Obtained from environmental sample
  misc_feature (1)..(399): n is a, c, g, or t
atggattccagtatttgctttccgcctgttgcctgttcttccatcgcgtttaaaatatttctctcatgctcggaaactgttttcacgcttgtgtctatggccccgaaacgctccagcacctcgttagacgatctggtgatgctgtctatggacgtttttatttttttaagcatcgttgcggtagtttttgattgtttgctggaactttcggcgagtttgcggatttcatcggcgacaacggcaaaacctttccccgcttctccggcgtgcgccgcctcaatcgcggcgttcatcgaaagcagattggtctggctggcgatagtgttcataaccgagtttatttccagcaaaccttcggagtctttcgctatttcctgtatctcctgcgccactgtctga

SEQ ID NO: 23726 - protein, 132 aa, Unknown
  Obtained from environmental sample
  misc_feature (1)..(132): Xaa is any amino acid
MDSSICFPPVACSSIAFKIFLSCSETVFTLVSMAPKRSSTSLDDLVMLSMDVFIFLSIVAVVFDCLLELSASLRISSATTAKPFPASPACAASIAAFIESRLVWLAIVFITEFISSKPSESFAISCISCATV

SEQ ID NO: 23727 - DNA, 573 bp, Unknown
  Obtained from environmental sample
  misc_feature (1)..(573): n is a, c, g, or t
atgacgacagaacaaatgcttcacatgagcggtatccaccttgtgccttatattcaggccgccacattgcttataggaaaatcacgcgaaggcggcggaaatatgttccgccaccagcttgatacaatggcaattcttatcgattacggttttatcgactccgtcctcttaaaagcctcgctcgtgcatgatttgattgaagacatacatgatctggatcataatatcctgcttacaattgattccgaaagcaaggctgtttatgatcttgtgttggaagtctcaaggcgcaacggcgaaaccaaggctgattttcttttgcgtatcagggagaaaggctcttatcacgcgaaaatccttaaagtggcggaccgtatttccaacatgatatctttaggctttgtaaataatcttgattttgtcgaacggtacatcaatgagacaacagagtatgtgcttccaatcgcgtgggatgtaagccagtatatgacgcgggaacttacggacttgctggattcaagaaaaaaatatctggaaagattacgggatcagcctgtaatcattaacggttaa

SEQ ID NO: 23728 - protein, 190 aa, Unknown
  Obtained from environmental sample
  DOMAIN (35)...(129): HD domain
  misc_feature (1)..(190): Xaa is any amino acid
MTTEQMLHMSGIHLVPYIQAATLLIGKSREGGGNMFRHQLDTMAILIDYGFIDSVLLKASLVHDLIEDIHDLDHNILLTIDSESKAVYDLVLEVSRRNGETKADFLLRIREKGSYHAKILKVADRISNMISLGFVNNLDFVERYINETTEYVLPIAWDVSQYMTRELTDLLDSRKKYLERLRDQPVIING

SEQ ID NO: 23729 - DNA, 348 bp, Unknown
  Obtained from environmental sample
  misc_feature (1)..(348): n is a, c, g, or t
ttgctgacgttcgccgccatcgctttctctttagtggcgtcgatcaccacgctgctgttattgttaatccgcaccgtccccacgatctcgtcgcgaacgccggtagcgctgccttccagcagttttttcgtgttgaactcggtagtatttccgatgcggtcaatttcagccttaagctgggtaacctcggcctgcagttcttcgcggtctttatccgtgttcgtatcgttggccgactggacggacagttcgcgcattctctgcagtatggagtgcgtttcggcgagggcgccttcagccgtctgtattaatgatatagtgtctgaggagtttttggaagcatgctaa

SEQ ID NO: 23730 - protein, 115 aa, Unknown
  Obtained from environmental sample
  SIGNAL (1)...(28)
  misc_feature (1)..(115): Xaa is any amino acid
MLTFAAIAFSLVASITTLLLLLIRTVPTISSRTPVALPSSSFFVLNSVVFPMRSISALSWVTSACSSSRSLSVFVSLADWTDSSRILCSMECVSARAPSAVCINDIVSEEFLEAC

SEQ ID NO: 23731 - DNA, 426 bp, Unknown
  Obtained from environmental sample
  misc_feature (1)..(426): n is a, c, g, or t
gtggaaatttacgcttccggaaatacattgatggggacgggagccaacaagatcatcgggcatcacatggaaatacgcgggccggggataattaacattacgcatcttttcggagtaagggccatccgcgacagaaaagaaattcagcttgtcgttgagcttgaagaatgggatcaggacaaaaattacgaccgccttggagcggaagaacatacggttaaacttttgggaattaatatcccatcaataacaatacctgtaaaaccagggcgaaatatccctattattatcgaaactgccgccatgaacgaaaggttaaaatccatgggttacaatgccggaaaggagtttaatagaaatatccttaaatggatagaaagcgattccacccgctctgtcttcttcggacaggacgacgtgatttaa

SEQ ID NO: 23732 - protein, 141 aa, Unknown
  Obtained from environmental sample
  DOMAIN (1)...(131): HPr Serine kinase C-terminus
  misc_feature (1)..(141): Xaa is any amino acid
MEIYASGNTLMGTGANKIIGHHMEIRGPGIINITHLFGVRAIRDRKEIQLVVELEEWDQDKNYDRLGAEEHTVKLLGINIPSITIPVKPGRNIPIIIETAAMNERLKSMGYNAGKEFNRNILKWIESDSTRSVFFGQDDVI

SEQ ID NO: 23733 - DNA, 741 bp, Unknown
  Obtained from environmental sample
  misc_feature (1)..(741): n is a, c, g, or t
atggttcaggatttggaaaaatcaagagcggcattggttaaaagcgaaaaaatttcgatatggcagaacatggcgcagcagcttgcgcatgaaattaaaaaccctcttacaccgataaaactttccgccgaacgcgttctgcgccgctggagaaacgagccggaaaatatcggcgagattctggaaagctccatgatggcgattattcaggaaacggaagggctctctaccctgcttaacgaattcagaactttgtcgaaacctatggaaccgtcccaaacatggacggaccttcgcgaagccgcggatgaattaataaacgcatattcaacctcttacccacaggttcaattcgacataaaccatgtggaaaaaggaattatcgtaaaaatagaaaaacaccgcattgctcaaattcttacaaaccttattattaacgcgattgacgcgatgaacggaacaggctcaattgaaattcgcacggatattgtaaaaaaacgggacgtgctttattgtagaataagcgtaaaagatacaggcaaaggcataggcaaacaggacagccatcttttatttacgccgtactacactacaaaagaatccggcaccggccttgggcttcctattgtagagcgtatagttaacgatcacggcggcgcgatttggtttgattcggcggaaggcatgggaaccactttttacattgacctgccagctgaaaaaaatgaggaagaaaaataa

SEQ ID NO: 23734 - protein, 246 aa, Unknown
  Obtained from environmental sample
  DOMAIN (20)...(91): His Kinase A (phosphoacceptor) domain
  misc_feature (1)..(246): Xaa is any amino acid
MVQDLEKSRAALVKSEKISIWQNMAQQLAHEIKNPLTPIKLSAERVLRRWRNEPENIGEILESSMMAIIQETEGLSTLLNEFRTLSKPMEPSQTWTDLREAADELINAYSTSYPQVQFDINHVEKGIIVKIEKHRIAQILTNLIINAIDAMNGTGSIEIRTDIVKKRDVLYCRISVKDTGKGIGKQDSHLLFTPYYTTKESGTGLGLPIVERIVNDHGGAIWFDSAEGMGTTFYIDLPAEKNEEEK

SEQ ID NO: 23735 - DNA, 615 bp, Unknown
  Obtained from environmental sample
  misc_feature (1)..(615): n is a, c, g, or t
gtgcaattccgcagggcaagccttaaagacggggatcgcagcgcgggctacccctcccttatcaacgtaagccgccttgcgccgggaaatcccgcaatgcagactgccttggcttcccttttcaccatgaaatacggttccatcattgttatggaagagatgagttacgcccaggccctgcctctctacggcctaaggcagaacatcttcacggatccccagaaaccaatgaaggttgaaccggggatctacccgatcaacggagcggacgagaacgcgatctgcgccactaccgtggactttgccctcacttactttatcatttccggggaactggaacgttccggtgttcccgtgaacctcctcatctccgatgctgggggctattcagtgcttaccgcctgggccgcgggaaaactgtccgcttcttccatggctaaattcgtcaaagaacacggggtggaaactaaaatcaagaaccgctcgcttatcatccccggcaaggtagcggtcctcaaaggcgaactggaagaaagccttccgggctggaagatcattgtcgcccccggagaagccgtaggcattgtaaagttcctcaaggagcttaaggtttaa

SEQ ID NO: 23736 - protein, 204 aa, Unknown
  Obtained from environmental sample
  DOMAIN (2)...(199): CO dehydrogenase/acetyl-CoA synthase delta subunit
  misc_feature (1)..(204): Xaa is any amino acid
MQFRRASLKDGDRSAGYPSLINVSRLAPGNPAMQTALASLFTMKYGSIIVMEEMSYAQALPLYGLRQNIFTDPQKPMKVEPGIYPINGADENAICATTVDFALTYFIISGELERSGVPVNLLISDAGGYSVLTAWAAGKLSASSMAKFVKEHGVETKIKNRSLIIPGKVAVLKGELEESLPGWKIIVAPGEAVGIVKFLKELKV

SEQ ID NO: 23737 - DNA, 786 bp, Unknown
  Obtained from environmental sample
  misc_feature (1)..(786): n is a, c, g, or t
atgagtaaatttatagtagtaggcgagcgtatccactgcatatccccagtcataaggacggcaatggaaaccatgaatcctgagcctatattgcagcgggccagggaacagattgccgccggcgcggattatcttgaagtcaatataggcccggcggaaaagaacgggcctgatctgatgcgatgggcggtaaagctgctgcaggaaaactgcgacaatgtgcctttgtgcctggataccgccaacaagaacgcgattgaggcgggcctgaaagcgtacaatgccgcaaagggcaaacccattctcaactcggcggacgcgggcgacaggatttccaatttggatcttgccgcggcaaacggggcgatctgcattgccctttgcgcaaagcagggtattccctcggacaatgacgagcgcatggcctattgtcaggaattgctggagcatggcatgaacttaggtctggaagcggatgaccttttattcgatccgctgtttctggtaataaagggaatgcaggacaaacaggcgcaggtgctggaatttatacgccagctaagggacatggggcttaaatccacgggcgggctttcaaacgtttccaacatgatgccgaaaaacatcaggcctatcatggattcaacgatggtggcgatggcgattaacaacggccttacgtcggcgattgttaacccctgcgacaagcggcttatggaaacgatcaagtcagcggacataatcatgaatcaaagcctctatgccgattcgtatctggaaatatag

SEQ ID NO: 23738 - protein, 261 aa, Unknown
  Obtained from environmental sample
  DOMAIN (4)...(207): Pterin binding enzyme
  misc_feature (1)..(261): Xaa is any amino acid
MSKFIVVGERIHCISPVIRTAMETMNPEPILQRAREQIAAGADYLEVNIGPAEKNGPDLMRWAVKLLQENCDNVPLCLDTANKNAIEAGLKAYNAAKGKPILNSADAGDRISNLDLAAANGAICIALCAKQGIPSDNDERMAYCQELLEHGMNLGLEADDLLFDPLFLVIKGMQDKQAQVLEFIRQLRDMGLKSTGGLSNVSNMMPKNIRPIMDSTMVAMAINNGLTSAIVNPCDKRLMETIKSADIIMNQSLYADSYLEI

SEQ ID NO: 23739 - DNA, 888 bp, Unknown
  Obtained from environmental sample
  misc_feature (1)..(888): n is a, c, g, or t
atgaatgaaacacgcaagatgtcttaccaatcatcagaatacttaatggacagcaggtggcggaaaataaaaaagaatgatatttccaaacttgaaaacttcctgcgcgaagcggaaaacgattatgtaaacgcgtgcggtaaatttctagagtatgactcttcaaaagattatatctggattttacaggataaaaacggaaatattaaagcttcaattataaatacaaaaagtatgctgatacctgtgctgtgcggatcaagagaaatgccaaatatgaattttttaaaaagtttattacggtataaaagaattcattctttgcagggactaagggaagaagtaattgtacttgaaaacgctttggaaaaatttggtaaagttaccgcagatatatttgattacgatcttatgagccttgatactttgccttcaaaaaaaggcttttttgaaagttccatgaatctaacgcttcgggttcctcagatggtcgatttggatgcgctcgctccgttacaggcaggctatgaaaaggaagaagtcctgcctaagggatcagctttcagtcctgcggcaagcagggttaatattaccaatataattgccaaaggtaaaatacttgctgcggaacttaacggcaagatggtcggcaaaatcaatgtaaatgcggtttcttttacaaggtatcaagtaggaggagtctatgttttacctgattttcgcggcaagggaatagccggcgcaatggcgtatgagtttatttcctcgcttatctcacagggcaggggtgtaaccctttttgccagaaaatcgaataacgccgcctgccggctttacaaaagtttaggttttgaaaatattaatgattatttaataatatactattga

SEQ ID NO: 23740 - protein, 295 aa, Unknown
  Obtained from environmental sample
  DOMAIN (207)...(292): FR47-like protein
  misc_feature (1)..(295): Xaa is any amino acid
MNETRKMSYQSSEYLMDSRWRKIKKNDISKLENFLREAENDYVNACGKFLEYDSSKDYIWILQDKNGNIKASIINTKSMLIPVLCGSREMPNMNFLKSLLRYKRIHSLQGLREEVIVLENALEKFGKVTADIFDYDLMSLDTLPSKKGFFESSMNLTLRVPQMVDLDALAPLQAGYEKEEVLPKGSAFSPAASRVNITNIIAKGKILAAELNGKMVGKINVNAVSFTRYQVGGVYVLPDFRGKGIAGAMAYEFISSLISQGRGVTLFARKSNNAACRLYKSLGFENINDYLIIYY

SEQ ID NO: 23741 - DNA, 504 bp, Unknown
  Obtained from environmental sample
  misc_feature (1)..(504): n is a, c, g, or t
ttggacgagcctgtacataaagcggtggtgtaccttgagcctgaagaattccgcactacctggcttggaaacaaggctgtttaccgtacccgcatggcgatggccgacaatggcgaacttttaattatcgcgccgggccttgaacgtttcggcgaggacatgggcatagacgcgcttatccgcaagcacggctaccggccttcaaagcttatcaaagaaaaagtaagcaaggacgcggaactggcaaacagcctcagcgccgcggcccacctgatccacggttccagcgaaggccgcttcactgtccgctattgccccgacaagggcataagccggcaggaaatcgaatctgtagggtttgaatggggcgacattggcgaagcgacggcccgctacgatgtgcataaactcacgacaggctggaactcagacagcaacggcgaaaaatttttctttgtgccgaatccggcactaggattgtgggcgctgcgaaaaaatttttaa

SEQ ID NO: 23742 - protein, 167 aa, Unknown
  Obtained from environmental sample
  misc_feature (1)..(167): Xaa is any amino acid
MDEPVHKAVVYLEPEEFRTTWLGNKAVYRTRMAMADNGELLIIAPGLERFGEDMGIDALIRKHGYRPSKLIKEKVSKDAELANSLSAAAHLIHGSSEGRFTVRYCPDKGISRQEIESVGFEWGDIGEATARYDVHKLTTGWNSDSNGEKFFFVPNPALGLWALRKNF

SEQ ID NO: 23743 - DNA, 882 bp, Unknown
  Obtained from environmental sample
  misc_feature (1)..(882): n is a, c, g, or t
atgattatgatcgcaaacccggtaaagacaatcgcccttgtcgctaaaaaattgggtattctccccggagcaaaaattgagattccgcctgtaacgccctaccccgctttccttgactatgtcggcgaactttcagattatgacattctctgcagggaaaacggcgccgcctcggaaatcagaaaattgcgcgccgtcaaagatgaggaagaaatcgctattatccgtaaagccgcggaaattacaaacgaattaattgatcaactggaaaaaaacgtaatatcgggaaaaataaaaacagaagccgacgcggcgctgtttattgaagtggaggcgcgaagacgcggctgtgagggaacaagttttggaacccttgccgcgggaccggataggagttttgcgattcacgcctttccaaattggacatgcgctccttttggcggaaagggactttccatccttgactttggagtaaaattcggcggatactgcacagacgtaacactcacttttacccgcgatttggacccaaagcaggagaagcttgtcagtcttacggaaaaagcggctaaactcgctatctcaatggcacataacggatgtatggcaaaaaatattgcagaggcggtagacgcgcatttttcaaagtccagaaaaaaaatgccgcacggtcttggacacggcatagggcttcaggagcatgagtacccgttaattaaaaacgcaaacgacaatgagtgggttcttgagccgggaatgatctttacgatagagccgggactctacgacccgctgcttggaggctgccggcttgaaaatgacgtgcttataactgaaagtgggcacgaggttctaacaaccgcgcatattatcaggttgtag

SEQ ID NO: 23744 - protein, 293 aa, Unknown
  Obtained from environmental sample
  DOMAIN (73)...(287): metallopeptidase family M24
  misc_feature (1)..(293): Xaa is any amino acid
MIMIANPVKTIALVAKKLGILPGAKIEIPPVTPYPAFLDYVGELSDYDILCRENGAASEIRKLRAVKDEEEIAIIRKAAEITNELIDQLEKNVISGKIKTEADAALFIEVEARRRGCEGTSFGTLAAGPDRSFAIHAFPNWTCAPFGGKGLSILDFGVKFGGYCTDVTLTFTRDLDPKQEKLVSLTEKAAKLAISMAHNGCMAKNIAEAVDAHFSKSRKKMPHGLGHGIGLQEHEYPLIKNANDNEWVLEPGMIFTIEPGLYDPLLGGCRLENDVLITESGHEVLTTAHIIRL

SEQ ID NO: 23745 - DNA, 759 bp, Unknown
  Obtained from environmental sample
  misc_feature (1)..(759): n is a, c, g, or t
ttgcgttcccttatgaatcgtatcattgacgactggggtttccgctacataaagctggattttctttacgccggatttttaggcggcgaaaaccacggcagagctgctgaatactatgaaagagccgtcgcgcttttaacggaacgcgccgaaaacgccgccaaacttccgcttgcctatctgggctgcggccttcccctgggcgcttcctaccgccatttccccctttcacggattggaaccgacaccaaagaaagctgggactggcctgtcgctaaatttatccgccacgagggccgtcccagcgccctgctttccctgagggaaactatatcccgatctttcatgaacggcactgtttatataaacgatcccgatgtggtctttctgcgtacagcgaactgcgcgttaaatgaaacagaaaaagagtgtatcgcgctggttaattttttgtttgccggacaaatcatgtgttccgataatttattcgccctttgcgaagcggatatcagattaatcaaacgtttacaaaatctgtatgaaagattggaaggggatgaatacggcgctgcagttttggaaaaagatgtgtttttacttgaaagccgttcgggaaaaatatccggtcttataaatctgagggataaacctttccgtccggctgcggaacattttagcggcggcacatggtttttagatcacaggaaggcagcgggctttgagccgcatagcattagtatagtgttagatgaacattga

SEQ ID NO: 23746 - protein, 252 aa, Unknown
  Obtained from environmental sample
  misc_feature (1)..(252): Xaa is any amino acid
MRSLMNRIIDDWGFRYIKLDFLYAGFLGGENHGRAAEYYERAVALLTERAENAAKLPLAYLGCGLPLGASYRHFPLSRIGTDTKESWDWPVAKFIRHEGRPSALLSLRETISRSFMNGTVYINDPDVVFLRTANCALNETEKECIALVNFLFAGQIMCSDNLFALCEADIRLIKRLQNLYERLEGDEYGAAVLEKDVFLLESRSGKISGLINLRDKPFRPAAEHFSGGTWFLDHRKAAGFEPHSISIVLDEH

SEQ ID NO: 23747 - DNA, 1119 bp, Unknown
  Obtained from environmental sample
  misc_feature (1)..(1119): n is a, c, g, or t
gtgcgctatgaatcgtacctcgcgcggcttgagcgttttgagaagaacacgttgtacgcgaaggatcactacaatgtcgtttatggatacatgaacgaggcgcttggcattatgcagcgggtgcgggagcttgcggtccagggcgcaaacggaacttacacggaagaagatcagaaacttatgggtatggaagtaaacgagctgatcaaggagcttgcgaccctttccaatacggtgggacctgacggcaagcaggtatttgccggcgataaggcgtttaccgagcctttccgccttgtcgaaggctcagtcccgggcggcggcggtgaaagcatggtcgttagggttgagtaccgcggcgcgggcgcatcgcggagaacggaaatcagcgacaatacatacgtcgatctcgacttggggggcggcgaggcgttctgggcggaaaagatgcagattttttccaatgtaaacgcttccaattacagggtaagcgcccccggttcctttttcattgacgggtcagagattcgggtggctgccggagacacactgccggctattgtggcaaagatcaacgattctccggcgccggtcaaggcgtacatcgatcctgaaaccagggggcttgtgctggagggaacaaatccccacctaatccgcgccgaagacgcggtttctcaaaacggcgaagggccgacggtgctgaaagacctcgggattatccgcgggaatatggaaaacaacgtcccgaattgggacactacccgatcccgcgtttccggcggttcgatgtttgacatgctcatccggctgcgtgacgcgatgtaccggggcgatcatgaatttatcggcagccaggggattggcggcatagatcttgcgttgagcaatttgaccacgcgccttgccgacatcggcagccgttatgaaagagcggatgttgtctggcagcggcttaacagggagatccccaatgttacagctaacattgtccgcgaatcctccgttgatatgtatgacgccgcgacagacctcaagttcctggagttcgcccaaaaggcgagccttcagaccgcggcgcgccttctgccgatgtcgctgcttgacttccttaggtag

SEQ ID NO: 23748 - protein, 372 aa, Unknown
  Obtained from environmental sample
  DOMAIN (5)...(113): Bacterial flagellin N-terminus
  misc_feature (1)..(372): Xaa is any amino acid
MRYESYLARLERFEKNTLYAKDHYNVVYGYMNEALGIMQRVRELAVQGANGTYTEEDQKLMGMEVNELIKELATLSNTVGPDGKQVFAGDKAFTEPFRLVEGSVPGGGGESMVVRVEYRGAGASRRTEISDNTYVDLDLGGGEAFWAEKMQIFSNVNASNYRVSAPGSFFIDGSEIRVAAGDTLPAIVAKINDSPAPVKAYIDPETRGLVLEGTNPHLIRAEDAVSQNGEGPTVLKDLGIIRGNMENNVPNWDTTRSRVSGGSMFDMLIRLRDAMYRGDHEFIGSQGIGGIDLALSNLTTRLADIGSRYERADVVWQRLNREIPNVTANIVRESSVDMYDAATDLKFLEFAQKASLQTAARLLPMSLLDFLR

SEQ ID NO: 23749 - DNA, 351 bp, Unknown
  Obtained from environmental sample
  misc_feature (1)..(351): n is a, c, g, or t
ttgaaagttgcgaccaaagcatacggccttattgacgttgacgagcgtcaaaaaattgtctttccccagggcctgtttggttttgaaaaactgaaggattatctgctccttgacgcggaacgccagcctttctactggctgcagtcaatggatgaggaagatgtggcgtttgtacttgtcaaccctttccttttccggcccgattacgaggttaatgtcagcaatgaggaagttgacgggataggcatccgttcgccggaaaaggccctgattttttccatagtaaccataccgcatgacggcagccccatgacggctaaccttcagggaccgcttatcatcaacncgtga

SEQ ID NO: 23750 - protein, 116 aa, Unknown
  Obtained from environmental sample
  DOMAIN (17)...(116): Uncharacterized BCR, COG1699
  misc_feature (1)..(116): Xaa is any amino acid
MKVATKAYGLIDVDERQKIVFPQGLFGFEKLKDYLLLDAERQPFYWLQSMDEEDVAFVLVNPFLFRPDYEVNVSNEEVDGIGIRSPEKALIFSIVTIPHDGSPMTANLQGPLIINX

SEQ ID NO: 23751 - DNA, 825 bp, Unknown
  Obtained from environmental sample
  misc_feature (1)..(825): n is a, c, g, or t
atggttagggcacccgataccatatactacaatccgctagatacagcatctgattattacactattgacacaacgtcttattatgtaggtttctctgataatttttcattaaaatatactggaattctatttgatgttttaagcataactccgtcactgaatttttttgggaactggactgctaaggaatatatttcgccgcgtgattccatagacaaaagaggtcaccttgcttttgacccctcaaaagacgaatatgggcaatactatttgaaaggcaacggctccgtgagaaccaacacaaagctctacggtatatggcttccagaatggggcaggttcacaggcattcgccacacactttctccaaccgtggattttacgtatgcgccagaactagataccaactatagattttatccgcatccgcttttgggtcagtatgcttttcaagaggaacagagaaccgtgggctttaggcttggaaacgattttgacataaaatatttgcttgcaagcgccgacacggcaagtgaagatacagaccttgatgatgtgagcaaaaatctcaggattttaacaacttcgcattcaacctcttacaactttgccgcagattcgattcaatggtatccgatatattctacttttggaattcaggttttggaaaattatctttttacaataaacaccacgcacaatgtttatcataaatttgaagagtctccaaacaaagttcgctttccgcaactcacggattggaactacggactcagccgcagattttcttggtatggagattttaacgcggggcttcccatctaa

SEQ ID NO: 23752 - protein, 274 aa, Unknown
  Obtained from environmental sample
  misc_feature (1)..(274): Xaa is any amino acid
MVRAPDTIYYNPLDTASDYYTIDTTSYYVGFSDNFSLKYTGILFDVLSITPSLNFFGNWTAKEYISPRDSIDKRGHLAFDPSKDEYGQYYLKGNGSVRTNTKLYGIWLPEWGRFTGIRHTLSPTVDFTYAPELDTNYRFYPHPLLGQYAFQEEQRTVGFRLGNDFDIKYLLASADTASEDTDLDDVSKNLRILTTSHSTSYNFAADSIQWYPIYSTFGIQVLENYLFTINTTHNVYHKFEESPNKVRFPQLTDWNYGLSRRFSWYGDFNAGLPI

SEQ ID NO: 23753 - DNA, 465 bp, Unknown
  Obtained from environmental sample
  misc_feature (1)..(465): n is a, c, g, or t
gtgataagctcaattaaggcagattataccatgacaaattttaaacgtatcgggcacattgcgcttcgagccaaagacattgacgcgactatcgtcttttaccgcgatatgctgggcatggaagaagcattcagaatgtacaatgaaagcggcaaactcagtacaatttatctttgtcttgcgccggggcaatttattgaaatttttccggacggtcttatggaacgaaagatcgataacgataccatcggttattcccatctatgtatagaagtcgaagacgccgcgaaaacactggaaactctccgcgccaaaggattgccggtggacagggaactacaaacaggattatccaaatgcaggatgttctggactcacgatcccgacggcaaccgcattgaattcatggaattgactcccgaaagccttcaggcccaggctattaaacgcctggaagcattatga

SEQ ID NO: 23754 - protein, 154 aa, Unknown
  Obtained from environmental sample
  DOMAIN (16)...(135): Glyoxalase/Bleomycin resistance protein/Dioxygenase superfamily
  misc_feature (1)..(154): Xaa is any amino acid
MISSIKADYTMTNFKRIGHIALRAKDIDATIVFYRDMLGMEEAFRMYNESGKLSTIYLCLAPGQFIEIFPDGLMERKIDNDTIGYSHLCIEVEDAAKTLETLRAKGLPVDRELQTGLSKCRMFWTHDPDGNRIEFMELTPESLQAQAIKRLEAL

SEQ ID NO: 23755 - DNA, 558 bp, Unknown
  Obtained from environmental sample
  misc_feature (1)..(558): n is a, c, g, or t
atgaactgcccgaacaaaatttgcaaacaggaaatacctgatgattcgtgtttctgcgatcagtgcggcgttcatttactgcgctgtgacaaatgcggctttatcggcacaagcaaattctgcggaagctgcggcggttcaatgtccgccatccagccgcctgacgcagatccctctttatcttctgcgccgtctgccgctcctccgtccgctccaacgccgtccgctccttcgtccgaggcgacagtaattgtttcacttccttcggaaaaaattcttctgtgccatcttgaaggatggaacatggaaatcgcgaacggcaatattttaggaaggacaaacggcccgcacgcggcttcgctcggcaagttcccggtgatctcgtcaaatcacgcgaaaattacgaaggttaataacgaatggtttatcacggatttaaattccacaaataaaacttatgttaacggcgtaaaactggaaccgaatgttccggttaaaataaaacagaatgacgtagttttactcgccaatgttacatttaccgtgagggacgcatga

SEQ ID NO: 23756 - protein, 185 aa, Unknown
  Obtained from environmental sample
  DOMAIN (108)...(176): FHA domain
  misc_feature (1)..(185): Xaa is any amino acid
MNCPNKICKQEIPDDSCFCDQCGVHLLRCDKCGFIGTSKFCGSCGGSMSAIQPPDADPSLSSAPSAAPPSAPTPSAPSSEATVIVSLPSEKILLCHLEGWNMEIANGNILGRTNGPHAASLGKFPVISSNHAKITKVNNEWFITDLNSTNKTYVNGVKLEPNVPVKIKQNDVVLLANVTFTVRDA

SEQ ID NO: 23757 - DNA, 384 bp, Unknown
  Obtained from environmental sample
  misc_feature (1)..(384): n is a, c, g, or t
ttgttcggcgtagtcgccggctacgaaaaagaaatgcaggtcttccttgatactgtaaatcccggaatgaggcggcgttttaaacattacctaagcctaagcgattacagcgcggaagaactnttcgctatcttcagttccatggtgaagaaagctggttataccctgacgcctgaggcgagcgatgccgcaaaagccgccataaccggtatgtacaataacaaggggccgaatttcggcaatgcgggagaaatcagggtgttctttgaaaagaccacaagcaggctggcgaccagacttgcggcgctctccaaagaagaacgctccgacaaattgaaaacaattgaagcctgcgacattcccggaaaagaaggaggcgcctaa

SEQ ID NO: 23758 - protein, 127 aa, Unknown
  Obtained from environmental sample
  misc_feature (1)..(127): Xaa is any amino acid
MFGVVAGYEKEMQVFLDTVNPGMRRRFKHYLSLSDYSAEELFAIFSSMVKKAGYTLTPEASDAAKAAITGMYNNKGPNFGNAGEIRVFFEKTTSRLATRLAALSKEERSDKLKTIEACDIPGKEGGA

SEQ ID NO: 23759 - DNA, 855 bp, Unknown
  Obtained from environmental sample
  misc_feature (1)..(855): n is a, c, g, or t
gtgtacgcgacagctacagggcgcgaaaacagcgaggtttttacgccgattgccggaacatcgggagcttttattctcggcggccgtttcaagggaatgatggatgaatttaaaatccacggcgtctgcgccggacgttcttccgttcaaaaatacgctaccgcgggcggcagggctgagacgacgcatattgatttgggcgacataaacagcgccgtactcagggttgaagttacgggcggaaggacaagccttaaagggacaaagattagcaatgaattccgcgaaaacggaaggtttcgcttttccgatgattctgaaatgagcttttatatccgctcaggcgagaatccctggcgtttgaacgagaaaaaatggacggcttttattcccggcactaatcttaaagaaacaatcagaggccgttatgtgcaaatagcggttgatttttatccttcgggcgatggggaaacaaccccctatcttgacgaggtgcgtattgtttatcagccgaatgagccgccgctgcctccgactaattttaccgccgtggcagttgacggcggcgtaatgctgcgctggaaaaaaagccccgacgcgacagccgccgggtatttgatttattacagttctgttcgcggggaacttttcggctctgacgcggcgttgggggcatcgcccatagacgcgggtaatgtaacaagcatcttaattaccgggcttaaaaacggaactttgtattatttcagagccgcgtcttatgaagtgactgaggaattaggcgaatacaatatcggggaattttccagagaagtgacggcnaggccgcttgcggtgctttcggtttacgagtaa

SEQ ID NO: 23760 - protein, 284 aa, Unknown
  Obtained from environmental sample
  DOMAIN (175)...(264): Fibronectin type III domain
  misc_feature (1)..(284): Xaa is any amino acid
MYATATGRENSEVFTPIAGTSGAFILGGRFKGMMDEFKIHGVCAGRSSVQKYATAGGRAETTHIDLGDINSAVLRVEVTGGRTSLKGTKISNEFRENGRFRFSDDSEMSFYIRSGENPWRLNEKKWTAFIPGTNLKETIRGRYVQIAVDFYPSGDGETTPYLDEVRIVYQPNEPPLPPTNFTAVAVDGGVMLRWKKSPDATAAGYLIYYSSVRGELFGSDAALGASPIDAGNVTSILITGLKNGTLYYFRAASYEVTEELGEYNIGEFSREVTARPLAVLSVYE

SEQ ID NO: 23761 - DNA, 738 bp, Unknown
  Obtained from environmental sample
  misc_feature (1)..(738): n is a, c, g, or t
gtggaatcatacgcgatagtgtatttagacgcgctgagggtcaaagggaagacggacgggaaaagctgcctaaagagcgtatacacggctttgggggtcaattttgaagggaaaaaggaagttttagggctgtggatagcggagagcgaaggggcgaaattttggatgggagtgttgtccgaattgaaaaaccgcggcgttcaggacatcctcatcgcctgcatggacgggctgaccggtttccctgaagcggtgcggtccgtctaccccgatacccgcgtccagttgtgcattgtccacatggtacgtaattcgacaaagtttgtttcttataaggacttgaaaaaagtatgcgctgatttgaaagaggtatattcagctaacaacgaggaagcaggtcatgacgctttggaagaattcggtaaaaaatggaatgggaaatacccgatgatataccagtcatggcaacggcattgggatgacctcagcgagttttttaaatacccgcctgagatccgccgcgctatttatacgactaacgctattgaatctatgaactaccagcttcgcaaagttacaaagaatcgcttgctgtttccgacagatgacgctatatttaagatactttatctggcgatccggaacgcctctgaaaagtggacgatgccgataagggcgtgggggcaggctctaaaccagtttgccatcgagtttggaaaagaacgggttccgttctga

SEQ ID NO: 23762 - protein, 245 aa, Unknown
  Obtained from environmental sample
  DOMAIN (1)...(223): Transposase, Mutator family
  misc_feature (1)..(245): Xaa is any amino acid
MESYAIVYLDALRVKGKTDGKSCLKSVYTALGVNFEGKKEVLGLWIAESEGAKFWMGVLSELKNRGVQDILIACMDGLTGFPEAVRSVYPDTRVQLCIVHMVRNSTKFVSYKDLKKVCADLKEVYSANNEEAGHDALEEFGKKWNGKYPMIYQSWQRHWDDLSEFFKYPPEIRRAIYTTNAIESMNYQLRKVTKNRLLFPTDDAIFKILYLAIRNASEKWTMPIRAWGQALNQFAIEFGKERVPF

SEQ ID NO: 23763 - DNA, 513 bp, Unknown
  Obtained from environmental sample
  misc_feature (1)..(513): n is a, c, g, or t
gtgcggggagataagccgggattcccggctgggtttggaagcggctcgggaatcatgagttcaagggaaatgnaggcttccgcgctttcggaattgaaacgcttttttaaccccgaatttctaaaccgcctggatgacgtgattgtgttcaattctctggatctgcctcagattgaagccattttggatctccagttggctgaacttgtagaacgcatggctggacaaggtttttgtctgcgtattgagagcgacgtccggcagcttcttctaaaaaagggctgggattccaaatacggcgcccggcctttacggcggatcatacaaaaggaactggaagatcctctttccatgctgattctggaacaggatccattaagacagggtcttaccggatcatcaactgaactccaggaaacaatatttattgcccgtgcggaaggggaaaaaatcgtttttgagattcaagtcccggaacccgcagcgtgttatgaggtaacaagtaacgggtaa

SEQ ID NO: 23764 - protein, 170 aa, Unknown
  Obtained from environmental sample
  misc_feature (1)..(170): Xaa is any amino acid
MRGDKPGFPAGFGSGSGIMSSREMXASALSELKRFFNPEFLNRLDDVIVFNSLDLPQIEAILDLQLAELVERMAGQGFCLRIESDVRQLLLKKGWDSKYGARPLRRIIQKELEDPLSMLILEQDPLRQGLTGSSTELQETIFIARAEGEKIVFEIQVPEPAACYEVTSNG

SEQ ID NO: 23765 - DNA, 729 bp, Unknown
  Obtained from environmental sample
  misc_feature (1)..(729): n is a, c, g, or t
atgaggcagatcggcggcagaatgtatatcgtccttaccggcgaacttggaagtaaaaccgacgcgggaacaatgttggctaaagccggtgaagtaaattcacctcacgtcattcttattccaagaagcaagaatcccgatcttccatgcgtttgggccgcggcatggtgcgcggtcgcctgccgtattcttgccgatgatcccgccgccaacacttacgacaccaaaatacccggcttaatcggcggcgtagaatttaacgccgatgaacggcagaaacttcttgaagccggcattgcaacctaccgcttggatacgaccggcaatgtgctgattgaacggctcgtaaccagttatacggaaaactccgacggagggcgtgatacgagttaccttgacgtgcaggttaccgaaacggtagacgcggttcgcacgtacatcaacgccgaagcgaagaaacggttcaaaacatggaaacttgcaagcaccgatgaaaattttggttcgggcgcgagggtgatgacggcgggcgtgttccgctcgttccttgcggaactgtatcaggaagtgtttatcaaagaaaaacagtggtgtcaggattttgacggttataaaaaatcgatcattgtcgagatcaaagcgggaagtaaaacccggcttgaatattcccaccagcccaatctgataggccagttctatatcggcgcgggtctgacgcaattcaaatag

SEQ ID NO: 23766 - protein, 242 aa, Unknown
  Obtained from environmental sample
  DOMAIN (1)...(242): Bacteriophage Mu tail sheath protein (GpL)
  misc_feature (1)..(242): Xaa is any amino acid
MRQIGGRMYIVLTGELGSKTDAGTMLAKAGEVNSPHVILIPRSKNPDLPCVWAAAWCAVACRILADDPAANTYDTKIPGLIGGVEFNADERQKLLEAGIATYRLDTTGNVLIERLVTSYTENSDGGRDTSYLDVQVTETVDAVRTYINAEAKKRFKTWKLASTDENFGSGARVMTAGVFRSFLAELYQEVFIKEKQWCQDFDGYKKSIIVEIKAGSKTRLEYSHQPNLIGQFYIGAGLTQFK

SEQ ID NO: 23767 - DNA, 456 bp, Unknown
  Obtained from environmental sample
  misc_feature (1)..(456): n is a, c, g, or t
atgggcgccgccgttgaaattaaacttcaggagataaacattcttcagcgcaagctcaacgagtttgttttgtcaggcggcgataaagcgcggctccttgacagccttggcatggtgattgaggagcaggttaaagaacgtatagatataaccaagcaggatccggacaataaaaaatgggacccgtggaaagaatcaacgcaaaaatatatgcaaaaatattttccaaaagccagtttgttataccgcgacccatcgggaggtttacttaattcaatcgaacatcaaatgaagggaagtgacgcgatactcgttggctcttccaaggaatattcaggatatcttcaggaaggtacaaaaaacatggttgcgcgtaaatttttaggtttcggcactgacgatattaccgcattgcaggatgcggttgatacgtttttaaaggagcaggtcgcgtga

SEQ ID NO: 23768 - protein, 151 aa, Unknown
  Obtained from environmental sample
  DOMAIN (10)...(147): Phage virion morphogenesis family
  misc_feature (1)..(151): Xaa is any amino acid
MGAAVEIKLQEINILQRKLNEFVLSGGDKARLLDSLGMVIEEQVKERIDITKQDPDNKKWDPWKESTQKYMQKYFPKASLLYRDPSGGLLNSIEHQMKGSDAILVGSSKEYSGYLQEGTKNMVARKFLGFGTDDITALQDAVDTFLKEQVA

SEQ ID NO: 23769 - DNA, 774 bp, Unknown
  Obtained from environmental sample
  misc_feature (1)..(774): n is a, c, g, or t
atgacgaggatattacctatacctgcgccggtattaatcatcanggctttttatattgattaccgctggaaaggaaaggacgcttatcccctgctcagggaggcgatgaagaaccccgcgatatacaacgaggaacaggtaaggaacgagatgtttttgcttttggattactacccgactgaatcatccggccataattccgagtacaacgcatggttccgcaaacgccctgatcttattgaaaaattttgcattcacggaacaggctggaatccgggtgcctacgcttatattcttaacgaatatcagagcaggaagggaacctggcgaaaagagattgaagactggcttgatgaaccctctgttgatctgaaccgcgggcatgaatacgcggcgtatatttttaacgccatgttcggcgataaaaccatgtttaaatttaacggcaacgtattgaaccacggactgattgacaatctgccccagggcgcctgcgtggaggtgccggtgcttgcctcgcctcacggttttgaggcaatacgggtcggcaaacttccaaatcaaatcgcggctctggtgcataccagttccatttgcgaggagatggcggtggaagcctcgctttcaggcgatccccggaaagtgtatcaggccatagcttttgatccgcttacatcggcgatattgggcataccggaaataaaagaaatgacctttaaaatgttcatacaaaacgagagctatcttccgcaattcanatctcanaaattttag

SEQ ID NO: 23770 - protein, 257 aa, Unknown
  Obtained from environmental sample
  DOMAIN (1)...(225): Family 4 glycosyl hydrolase
  misc_feature (1)..(257): Xaa is any amino acid
MTRILPIPAPVLIIXAFYIDYRWKGKDAYPLLREAMKNPAIYNEEQVRNEMFLLLDYYPTESSGHNSEYNAWFRKRPDLIEKFCIHGTGWNPGAYAYILNEYQSRKGTWRKEIEDWLDEPSVDLNRGHEYAAYIFNAMFGDKTMFKFNGNVLNHGLIDNLPQGACVEVPVLASPHGFEAIRVGKLPNQIAALVHTSSICEEMAVEASLSGDPRKVYQAIAFDPLTSAILGIPEIKEMTFKMFIQNESYLPQFXSXKF

SEQ ID NO: 23771 - DNA, 1287 bp, Unknown
  Obtained from environmental sample
  misc_feature (1)..(1287): n is a, c, g, or t
atggaaacattgtccaaacagccggataaatcaatatggtcatgcagcgaaaaccgggcggaagctaaggcgatataccggctgttaggcaacgagaacctggatcgtgaagaaatactgaaggcgcaccgcgaagcgactgtcaggaggatgatacagcagggagggactatattgacgatacaggataccacgagcctgaattacaacacccatgagaagaccgaagggataggctatatcagcgataaaacgttaggagtaaatatccacagctgtcttgcggtaagcgccgaagggttgacgttagggatattggggcaaacgtcctacaaccgcgaacaggcgaaggacgacagccgcagccacgagagcaaaaaggttcgcgcgttggaggaaaaagagagttaccggtgggtggagacgctgggaacaagcactgcggatctgccggaaggggttaagataatcaatgtctgcgaccgggaaggggatatgtatgagttactggacgcggcggaaagtgccgggcagttgtttctcatccgggcggcccaaaaccggatgacggcggataaccggcggattttagacgctatccgtaagaaacagtgtatggggaaggtagaaataacgatacccagggattcccgcaggaatctgaaggaacgggaagtggtattgcagatacggtatagccggtttgaaatcaaacgccctgctatactggacaagaacaaggcgctcagagggtctattgaagtgtgggttatctatgcgaaagaggaaaacccgcttgagggagtggaaccgatagaatggtttttaatgactaacgagccggtggaaacggctgaggcggcatatgaacgggttaagtattatacgcaacggtggaagatagagaggtttcatttcgtgctgaagtccggttgcgcggtggaaaagctgcaggaacggagtattgataagacaacaatgctggtgctgatgtattcgatcatagcggtaggaattatgaatctgacgtatattgcccggatacatcctgaagaaccgtgcacgatattttttgaagaagaggaatggaagttgctgtattgtaccgcgaacaagacgaagaagccgccgcgtaagccctatagcatacaggaagcggtaacctatcttggccggctgggagggccgaagcgtgcccccagcgacggcccgccggggttgaaaacggtgtggatgggccttatgacgcttaacactttattggcttatcgggagtggttcccatga

SEQ ID NO: 23772 - protein, 428 aa, Unknown
  Obtained from environmental sample
  misc_feature (1)..(428): Xaa is any amino acid
METLSKQPDKSIWSCSENRAEAKAIYRLLGNENLDREEILKAHREATVRRMIQQGGTILTIQDTTSLNYNTHEKTEGIGYISDKTLGVNIHSCLAVSAEGLTLGILGQTSYNREQAKDDSRSHESKKVRALEEKESYRWVETLGTSTADLPEGVKIINVCDREGDMYELLDAAESAGQLFLIRAAQNRMTADNRRILDAIRKKQCMGKVEITIPRDSRRNLKEREVVLQIRYSRFEIKRPAILDKNKALRGSIEVWVIYAKEENPLEGVEPIEWFLMTNEPVETAEAAYERVKYYTQRWKIERFHFVLKSGCAVEKLQERSIDKTTMLVLMYSIIAVGIMNLTYIARIHPEEPCTIFFEEEEWKLLYCTANKTKKPPRKPYSIQEAVTYLGRLGGPKRAPSDGPPGLKTVWMGLMTLNTLLAYREWFP

SEQ ID NO: 23773 - DNA, 444 bp, Unknown
  Obtained from environmental sample
  misc_feature (1)..(444): n is a, c, g, or t
gtgtcctgggcgctgtatccggatcagggcggcagccggggcgtgggcttttgccgcgcgaacctctacggcaagaacctggcggcctaccgcgagggcgcggccaaggaactgtttctggcggcgcagatcgagcacatccgggcgctggaggaactgccgcagatactcgcccatccgcgtctggacgccatcatggtcgggccgtacgatctttccggctccatgggtctgaccgggcttttcgatcatccggacttcatcgcggccatgcagcgcatccaggacgcctgcatccggcacggggcgaacatgggcgtccacgtcgtggaacccaatccggcggaacttgcggaacgcgtcaaacaggggtatcgcttcattgcctacggaattgacgcggtctttttgtggcggaacgtgcagcgcccggtgagcggctga

SEQ ID NO: 23774 - protein, 147 aa, Unknown
  Obtained from environmental sample
  DOMAIN (1)...(140): HpcH/HpaI aldolase/citrate lyase family
  misc_feature (1)..(147): Xaa is any amino acid
MSWALYPDQGGSRGVGFCRANLYGKNLAAYREGAAKELFLAAQIEHIRALEELPQILAHPRLDAIMVGPYDLSGSMGLTGLFDHPDFIAAMQRIQDACIRHGANMGVHVVEPNPAELAERVKQGYRFIAYGIDAVFLWRNVQRPVSG

SEQ ID NO: 23775 - DNA, 393 bp, Unknown
  Obtained from environmental sample
  misc_feature (1)..(393): n is a, c, g, or t
gtgaacattacggtattcggcggtgcgggctttttgggttcgcatgtctgtgacaagcttacggacgccggtcatcaggtgaccgtcgcggatctggcgccatccccttggctgaaagagggacagaccatgcgccaagggaatcttctggacgaagcctttgtggcggaagccgtggcgggcgcggacgtggtcttcaactacgcgggcatcgccgacatcggcgaggccaaccgtcgtcccgtggatacggccagggtgaacgtgctcggcaacgtcatcctgctggaagcctgccgcgcggccggtatacgaagatacgtctttgccagttcgctctatgtctacggcgtgtccgggcggtttttaccgttgcagcaagcagtcctgtga

SEQ ID NO: 23776 - protein, 130 aa, Unknown
  Obtained from environmental sample
  DOMAIN (4)...(125): 3-beta hydroxysteroid dehydrogenase/isomerase family
  misc_feature (1)..(130): Xaa is any amino acid
MNITVFGGAGFLGSHVCDKLTDAGHQVTVADLAPSPWLKEGQTMRQGNLLDEAFVAEAVAGADVVFNYAGIADIGEANRRPVDTARVNVLGNVILLEACRAAGIRRYVFASSLYVYGVSGRFLPLQQAVL

SEQ ID NO: 23777 - DNA, 795 bp, Unknown
  Obtained from environmental sample
  misc_feature (1)..(795): n is a, c, g, or t
atgccggtaattgatatgcagggcattaagcgggaataccggatggaaagcagaaagggcgaagaagccgtagtagtacgcgccctgcgcggggtagatttctccgcagaagcgggggaatttgtctccgttatggggccctccggttcaggcaaatctacgctgatgaatattctcggctgccttgataaaccaagcgccggaacctatacccttgacggcattgaaacctctatctccaattcagatactttcgcttacataagaaaccggaaaatcggttttgtgtttcaagcttttaatttattggcgcggacaacagcgctggagaatgtggagcttccccttttttaccgccaccggggtaaggacgaaaaaaagatgaatgcccaaatacgcaaggaacacgcgatgacggcattaaaagaagtgggactggaaaagcgcacggatcattttccttcccagctttcaggcggacagcagcaaagggtcgctattgcgcgggcaatggtaaacgatcccgcgtttattcttgccgatgagccgacaggtaaccttgataccggaatgacgcttgaaatcatgggtcttttccaggaacttaaccggaaggggaaaacaattataatggttacacacgagccggaacttgccgcttacacacggcgaattatcactctgcgtgacggcgaacttgttgaagataaaaaggtaacagatatgcgcaatgcgctggatgattttgaacaatggaaaaagacccacgccttattaacagaggcagcgtcatga

SEQ ID NO: 23778 - protein, 264 aa, Unknown
  Obtained from environmental sample
  DOMAIN (39)...(231): ABC transporter
  misc_feature (1)..(264): Xaa is any amino acid
MPVIDMQGIKREYRMESRKGEEAVVVRALRGVDFSAEAGEFVSVMGPSGSGKSTLMNILGCLDKPSAGTYTLDGIETSISNSDTFAYIRNRKIGFVFQAFNLLARTTALENVELPLFYRHRGKDEKKMNAQIRKEHAMTALKEVGLEKRTDHFPSQLSGGQQQRVAIARAMVNDPAFILADEPTGNLDTGMTLEIMGLFQELNRKGKTIIMVTHEPELAAYTRRIITLRDGELVEDKKVTDMRNALDDFEQWKKTHALLTEAAS

SEQ ID NO: 23779 - DNA, 1215 bp, Unknown
  Obtained from environmental sample
  misc_feature (1)..(1215): n is a, c, g, or t
atggcccgcggccgagaaaccgataaccccaataaatatattcaggaagttcttgatcgccataaaagcgtaaagtttgaatttctgcctccgttcaccggggggcttgtcggctactttgcctacgattacgctaaatactgcgaaccaaccctgaaactcgacgccgttgatgaagaacgttttaacgatgtcgatcttatgctctttgacaaggtaatcgcttttgacaattacaggcaaaaagtaattttaatcgtcaatataaacgctcagaacattgagagcgaatacgagaagggaaaatcgcagttagaaagcttaaaaaaccttattaaaaacggacagcatgaaaaaactccccaggccctcgtaaaatccgaattcaaagcgttgtttacaaaagaagaatactgcaaaatggtgaacagggcgaaaggccacatcaaagagggggatatttttcaggttgtattatccaaccgtttcgaggcggattttgaaggcagtatttttgacacatacagggtgctgcggacaataaacccgtcgccttatatgttttatttcggcggaagcaatctggaaatcgccggcgcgtcgccagagacgctggttaaactgcataacggcaggctgtttaccttccctcttgcgggaacacgccccaggggcgcaagcggcgaggaggacatcgcgctggaaaaagagcttcttgccgacgagaaagagcttgccgagcataatatgctggtagaccttgggcgcaacgatttgggaaagatcagtaaattcgggactgttgcggtggataattatatgtctatccttcgcttctcccacgttatgcacataggctctactgtaagcggggaaattatcgagggaaaaacagggcttgacgccattaacgccgtgcttcccgccggtacattgtcaggcgctccaaaaatccgcgccatgcaaatcatcaatgagctggaacaaaacaaacgcggcatttacggcggcgcaatcgggtatcttgattttacaggcaatatggatacctgcatcgccattagaattgtgtaccgcagaaacaacaaagtgtttatccgctcgggcgcgggaattgtcgcggacagcatacctgaatcagaataccaggaatgtgtgaacaagtccaaagcggtaatggacgcgcttaaaaactcctccggagggcttgaataa

SEQ ID NO: 23780 - protein, 404 aa, Unknown
  Obtained from environmental sample
  DOMAIN (1)...(85): Anthranilate synthase component I, N terminal region
  misc_feature (1)..(404): Xaa is any amino acid
MARGRETDNPNKYIQEVLDRHKSVKFEFLPPFTGGLVGYFAYDYAKYCEPTLKLDAVDEERFNDVDLMLFDKVIAFDNYRQKVILIVNINAQNIESEYEKGKSQLESLKNLIKNGQHEKTPQALVKSEFKALFTKEEYCKMVNRAKGHIKEGDIFQVVLSNRFEADFEGSIFDTYRVLRTINPSPYMFYFGGSNLEIAGASPETLVKLHNGRLFTFPLAGTRPRGASGEEDIALEKELLADEKELAEHNMLVDLGRNDLGKISKFGTVAVDNYMSILRFSHVMHIGSTVSGEIIEGKTGLDAINAVLPAGTLSGAPKIRAMQIINELEQNKRGIYGGAIGYLDFTGNMDTCIAIRIVYRRNNKVFIRSGAGIVADSIPESEYQECVNKSKAVMDALKNSSGGLE

SEQ ID NO: 23781 - DNA, 825 bp, Unknown
  Obtained from environmental sample
  misc_feature (1)..(825): n is a, c, g, or t
atgacttggtttcaatggcttcattctatatatgaatatatacgccccgtactggatatagtgcttctggcattcattctttacaagggttatgagcttctggaaaaaactcaagcccttcctctggttaagggaacggggttcctctttttggtctacggcatagcgtggcttcttaaccttacaacactgcgctgggtgcttacaataatcgcccccggcctttttatcgcgattgcaatcgtattccagcctgaacttagaaaaatagtattgcgcctgggacagacggaattttttaaacctaaagccatcgccaatatcggaaaacttgacgctgttgttacggcggcggagcttctctctgaaaaaagaaggggaatgttagttgtttttcagcgaaaaataaatttaaaaaatataatcgataccggcacaaaaatcaacgccgaaatttcatcaagcttaatcgtggctatttttgaatttgacgggccgctgcacgacggagcgctggttatctacggcggaaagataatctccgcgggatgttttttgcctctttctgaaaggcaggacatacgcaaaaatttcggcacgcggcacagggcaagcctcggcatggcggaacaatcggacgcggtcgtgcttattgtttcggaagaaacgggagccatctcgcttgcctacgattcaaaactctattacgatttatcctccgcggaagttacgcgcaaattgatggaattgctcgacaagggaagcagaaaagaagcggagcagaaagacgatcctaaagaggaaatggaggttcttgttgaatag

SEQ ID NO: 23782 - protein, 274 aa, Unknown
  Obtained from environmental sample
  DOMAIN (114)...(235): Domain of unknown function DUF147
  misc_feature (1)..(274): Xaa is any amino acid
MTWFQWLHSIYEYIRPVLDIVLLAFILYKGYELLEKTQALPLVKGTGFLFLVYGIAWLLNLTTLRWVLTIIAPGLFIAIAIVFQPELRKIVLRLGQTEFFKPKAIANIGKLDAVVTAAELLSEKRRGMLVVFQRKINLKNIIDTGTKINAEISSSLIVAIFEFDGPLHDGALVIYGGKIISAGCFLPLSERQDIRKNFGTRHRASLGMAEQSDAVVLIVSEETGAISLAYDSKLYYDLSSAEVTRKLMELLDKGSRKEAEQKDDPKEEMEVLVE

SEQ ID NO: 23783 - DNA, 303 bp, Unknown
  Obtained from environmental sample
  misc_feature (1)..(303): n is a, c, g, or t
atgaacctgataggcgctaagttggtagtgttgtcagcctgtcagaccggtttaggcgatgttaaaaacggcgaaggagttttcggcttacaacgcgccttcaaactggcgggagtggaaaccctaataatgagcctatgggaagtggacgacgccgccacgtcattattgatgagtactttttatcaggaatggctaatttcaggaaagagcaggcaggaagcgttcaaagaagcgcagaaaaaagtccgcgccaaataccctgcgcccttttattgggcagcgtttgtaatgatggattag

SEQ ID NO: 23784 - protein, 100 aa, Unknown
  Obtained from environmental sample
  misc_feature (1)..(100): Xaa is any amino acid
MNLIGAKLVVLSACQTGLGDVKNGEGVFGLQRAFKLAGVETLIMSLWEVDDAATSLLMSTFYQEWLISGKSRQEAFKEAQKKVRAKYPAPFYWAAFVMMD

SEQ ID NO: 23785 - DNA, 1800 bp, Unknown
  Obtained from environmental sample
  misc_feature (1)..(1800): n is a, c, g, or t
atgacagatcgccgagcagggcgattatgccaagcggaacgctattatcttgaggcgacagccatatatgaaaaggctctgggtaaggagcatccctcttatgccacgtcgttaaataatttgggatctctgtattacagcatgggcgattatgccaaagcggaacgctattatcttgaggcgacagccatctttgaaaaggctctgggtaaggagcatcccgattatgccacatcgttaaataatttgggattactttataagaacatgggagattatgccaaagcggaacgctattatcttgaggcgacagccatcagggaaaaggctctgggtaaggagcatccctcttatgccacgtcgttaaataatttgggattactttatatgaacatgggcgattatgccaaagcggaacgctattatcttgaggcgacagccatctttgaaaaggctctgggtaaggagcatccctcttatgccacgtcgttaaataatttgggattactttatcataaagtgggagattatgccaaagcggaacgctattatcttgaggcgacagccatctgggaaaaggctctgggtaaggagcatcccgattatgccacgtcgctggataatatgtatgcactatatttgagtaaaaatgaatacacaaaggcgcataagtataaacaggaacagtttaaaataaataccgatattataaataaaaatttctctttccaaactgaacaacagcgtgacgtttattggaacgctaattcatattctttcgagctgacttattccctctccttcttccaccccgtccctgagagcaatgctcttaactacgaaaactccttgtttttcaaaggtctgttactccgtaccactaacgcagtacgtgacgcaatatacgaatcaaagaatcaagctctaatcgctcaatttgaagaattaggcagtttacgccaacagataagcgcattacggcaaagtggcggtaatgaagagtacattaaaactcttgaagataaggccgaagctttggacaaatctctaatgcaatcctccgccgcttttagggaattaaaggcggacttggctattacctggcagaaagtaagagacaatctgcaaaagaatgaagctgcgattgaatttgtctctttcagaatctacgacaaaaaattaacggataccgttcaatatgccgcgcttgtgctaaaaaaagacagcaaagcgcctgtgtgggttctcctgtgcaatgaaagtgaattgaaagaaatactggacaaagcggaaggaagaagctctgagcaacaggcgcgtattctttacaacgccaacggactggcgttatttgaaactgtatggaagccattggaacaggaattaaaaggcgttacaactatttattattcgccttccgggctgtttcataagatagcgtttaacgccctgccgatagacgattcttataataaacgcctaatggacaaatacaatttgaatctggtatccagtacaagtgaagttgtccacgtttcacgaaacaagaaagaaagaacgcagattacgtccgcggttctgtacggcggccttgattataacgcagacgcgaccgccatgagagcggcggctcaatcatttaaaacggaagccgtcgcctccgccgccgcttccgctcctccgcaaggcgtaacgncgggcgcggcgtggggtccattacctgccacgcggggtggaagttcagaatattcaaggttttttagtcaggaaaaaaatagccaataccctgtaccaggatag

SEQ ID NO: 23786 - protein, 599 aa, Unknown
  Obtained from environmental sample
  DOMAIN (161)...(194): Tetratricopeptide repeat
  misc_feature (1)..(599): Xaa is any amino acid
MTDRRAGRLCQAERYYLEATAIYEKALGKEHPSYATSLNNLGSLYYSMGDYAKAERYYLEATAIFEKALGKEHPDYATSLNNLGLLYKNMGDYAKAERYYLEATAIREKALGKEHPSYATSLNNLGLLYMNMGDYAKAERYYLEATAIFEKALGKEHPSYATSLNNLGLLYHKVGDYAKAERYYLEATAIWEKALGKEHPDYATSLDNMYALYLSKNEYTKAHKYKQEQFKINTDIINKNFSFQTEQQRDVYWNANSYSFELTYSLSFFHPVPESNALNYENSLFFKGLLLRTTNAVRDAIYESKNQALIAQFEELGSLRQQISALRQSGGNEEYIKTLEDKAEALDKSLMQSSAAFRELKADLAITWQKVRDNLQKNEAAIEFVSFRIYDKKLTDTVQYAALVLKKDSKAPVWVLLCNESELKEILDKAEGRSSEQQARILYNANGLALFETVWKPLEQELKGVTTIYYSPSGLFHKIAFNALPIDDSYNKRLMDKYNLNLVSSTSEVVHVSRNKKERTQITSAVLYGGLDYNADATAMRAAAQSFKTEAVASAAASAPPQGVTXGAAWGPLPATRGGSSEYSRFFSQEKNSQYPVPG

SEQ ID NO: 23787 - DNA, 639 bp, Unknown
  Obtained from environmental sample
  misc_feature (1)..(639): n is a, c, g, or t
gtgcataggagttatgcgatgttagggctgttggccaggaaagtggggatgacacaggtctttgatgatgcggggaatctgacgccggttacggtgatgcggatagatccgaatattgtcattgcccacaaaacaaaggaaaaagacggctacaatgccgttgttgtcggaatagacgacgaaaagaaaaatcgggtaacaaagccctacgcgggccagtttccggaaaatgtcacccccaaaaagcggatccaggaactgcgggatttcgagaaggaagtcgccgtgggagactcgctgggccttgaagtgctggaagggatccgttatgtggatgtttccggcgtgtccaagggcaagggctttcagggcgttgttagacgatatggtttcggcggcgggcgcaagacccacggctcgaaattccaccgcgagcccggttcgacgggccagagcacctacccccacaggacattcaagaacacgaagctgcccggacgcatggggcgcgagaaggtgacggtcctgagcctgcgggtggaaaaactcgacgccgagaaacagcttatcctggtccgcggatcggttccgggaaataacggcggccttgtgcttgtgcgcgcggcggtgaaaaggtaa

SEQ ID NO: 23788 - protein, 212 aa, Unknown
  Obtained from environmental sample
  DOMAIN (14)...(207): Ribosomal protein L3
  misc_feature (1)..(212): Xaa is any amino acid
MHRSYAMLGLLARKVGMTQVFDDAGNLTPVTVMRIDPNIVIAHKTKEKDGYNAVVVGIDDEKKNRVTKPYAGQFPENVTPKKRIQELRDFEKEVAVGDSLGLEVLEGIRYVDVSGVSKGKGFQGVVRRYGFGGGRKTHGSKFHREPGSTGQSTYPHRTFKNTKLPGRMGREKVTVLSLRVEKLDAEKQLILVRGSVPGNNGGLVLVRAAVKR

SEQ ID NO: 23789 - DNA, 465 bp, Unknown
  Obtained from environmental sample
  misc_feature (1)..(465): n is a, c, g, or t
atggccgagatcaccactcgctatggaaaaggggctcaagttcgctatccgcgaaggcggcaaaaccgtcgcttccgggcaggtaatcgatatcatagagtaaggtttacctggccacttacaagtggtcaggtgccggaggttggaggaataatggctgcaaaggaaggaattcgcgtacggttgcgcggttttgatgttgaattgattgatcagagcgcaaagtcaattgctcaggcggtgcagaaggccggagcgaaagttaccggtccgatcccgctgccaacccgcatcaacaaggttacggtgctgcgttcgccacacgtgaacaaaaaagcccgcgagcagtttgagatgcggacacataaacggttgatcgatattatcaatccctccccggaggtgatggattctttgatgaagctggaactccccgccggcgtggacgtggaaataaagcaataa

SEQ ID NO: 23790 - protein, 154 aa, Unknown
  Obtained from environmental sample
  DOMAIN (57)...(152): Ribosomal protein S10p/S20e
  misc_feature (1)..(154): Xaa is any amino acid
MAEITTRYGKGAQVRYPRRRQNRRFRAGNRYHRVRFTWPLTSGQVPEVGGIMAAKEGIRVRLRGFDVELIDQSAKSIAQAVQKAGAKVTGPIPLPTRINKVTVLRSPHVNKKAREQFEMRTHKRLIDIINPSPEVMDSLMKLELPAGVDVEIKQ

SEQ ID NO: 23791 - DNA, 396 bp, Unknown
  Obtained from environmental sample
  misc_feature (1)..(396): n is a, c, g, or t
atgaaggtttttaacagttatgcgtatataacggcggcggccgcgaaggattattcggtaacgatgaaccgcactcatgaaaagcacatgctgccgcctgacagtccatattttggaaacgggcataaagctttggcgcttagggacgctgcgggcgcccaaggcattacaagagcgggcgtttttgaagacgcgatgcttcaggcgcttgataaagtatctggggcgcagttaaacgcaagcagtttgcaaaaggaagcgattatcaatccggattcggttgatattcacgatattacaattgcccaagccgaggcgggcatggctcttgatattacgcgaaatattttaagcagaatggtccagagctggagagatttgataaatacaagataa

SEQ ID NO: 23792 - protein, 131 aa, Unknown
  Obtained from environmental sample
  misc_feature (1)..(131): Xaa is any amino acid
MKVFNSYAYITAAAAKDYSVTMNRTHEKHMLPPDSPYFGNGHKALALRDAAGAQGITRAGVFEDAMLQALDKVSGAQLNASSLQKEAIINPDSVDIHDITIAQAEAGMALDITRNILSRMVQSWRDLINTR

SEQ ID NO: 23793 - DNA, 702 bp, Unknown
  Obtained from environmental sample
  misc_feature (1)..(702): n is a, c, g, or t
gtggagcaggtaagctggtatgccgctataaaatactgcaatgaacggagtctagatgaaggtatagatccacctgcgtacagaattaacggtagcgtttatccgtctgactgggaagatgtgccgacgaccaataatgcgacatggaatgcggtagaaatagtaccgaattcgaaagggtacaggttaccgactgaggcgcagtgggagtatgcatgccgggctggatcaacaataaactatgactatatgacttctagcggcggtactaatacatgggacgccagtatagggtggagttcaggtgaatccggtaataagacacatcaggttggactaaaggcagccaatgcttttggcttgtatgacatgcacgggaacgttgcggaatggtgctgggacaagtggagtctatttacttctgacaggcaggttaatcctttgggaccggcgacgtcgactggtgcccccgggaatctggacatgtactcgtccggctctgatcgcgtagtccgtggcgggagctggtacaacgcagcatcgatcctgcgatcggcgtggcgttcccccggtagcaattacggttccgtcatcagctacgaagctggcggcagccgttacacctactactacttctacccgtggaattggaacgtctataataatattctcgggctgcgggttgtgcgccctgctaattaa

SEQ ID NO: 23794 - protein, 233 aa, Unknown
  Obtained from environmental sample
  DOMAIN (2)...(209): Domain of unknown function (DUF323)
  misc_feature (1)..(233): Xaa is any amino acid
MEQVSWYAAIKYCNERSLDEGIDPPAYRINGSVYPSDWEDVPTTNNATWNAVEIVPNSKGYRLPTEAQWEYACRAGSTINYDYMTSSGGTNTWDASIGWSSGESGNKTHQVGLKAANAFGLYDMHGNVAEWCWDKWSLFTSDRQVNPLGPATSTGAPGNLDMYSSGSDRVVRGGSWYNAASILRSAWRSPGSNYGSVISYEAGGSRYTYYYFYPWNWNVYNNILGLRVVRPAN

SEQ ID NO: 23795 - DNA, 1347 bp, Unknown
  Obtained from environmental sample
  misc_feature (1)..(1347): n is a, c, g, or t
ttgccggtgggacgctggtcggaaactacggacatcgtgaacctgttggcttcaggcagcgctcctgatctctgctatacctattcgaaagccgcgatagatactttcggggcacaaggcggtatcctggacttggcgccctatgttgacagtcttctgcccgattttaagaaactggtgggcgatgatcccgcgcttgggggatccttagtttaccgtgaccaggacccggtcacaaaaaagctttactcggtaactaactatgttacatatcttgcgcggaaaaacatttttatccgcaaggactggcttgacaaactcgggcttcccctgcccaagaccaccaaggaattccatgacgcgctggtagctttcaaaaacagggacccgggcggtgtgggtgcgaacaacgtaattccgtacgcccaggactctgacgcccgctggggtttctcgccgataatttacgcttactttaataccaaacttagccccagggacgaatggataaacaggtttacagatgtgcctatcgccatgcctggttacaaggaaggcgtgcgactgatcaacgcatggtacaacgagggccttatattcaaggatttccccctgatgaacgttgcggaagacttttggaatcttctaaaatccggcagggcaggcgcttttggcggcgattggcagcttccgtacagaaccgattacaacattaatgtagacctggccaagaacataccgggcgcgaaatttgtgcctgtagactgcatagagggcgccgatggggtatactacaaagaagtttccgacaagcccggcatgcgaattttcgtaccccttcaatccaagaatcctgaaggagcccttaggtaccttaactggctttccaagtttgaaaatttcaactacctgcaaattggcgagctgggcagaaaccataacatggtgaacggcattccgcaggttattcccactaccgggccatggatccagaattcagccaataacatcgactttacaatgcccatgaatggcattgaactgcttgatcctgaaaaaaatgccagggccatcgctcttagttacgctggtacaccgcccgaagagattgtcaacgctattaatgtttccaccaacaaaggaagagctgctgttgtgtatccggcgactgaaacaaaactcccggctttaaaccaaaccttgtctgacaaggccaaggccttgcttgcccagtccataatagcccctgtggcgaactttgaccgtgtctgggacgcgggttacagggactggcttgcttccggcgctcaggacgtaataaacgaaaggacttcgctctggaagtaa

SEQ ID NO: 23796 - protein, 448 aa, Unknown
  Obtained from environmental sample
  misc_feature (1)..(448): Xaa is any amino acid
MPVGRWSETTDIVNLLASGSAPDLCYTYSKAAIDTFGAQGGILDLAPYVDSLLPDFKKLVGDDPALGGSLVYRDQDPVTKKLYSVTNYVTYLARKNIFIRKDWLDKLGLPLPKTTKEFHDALVAFKNRDPGGVGANNVIPYAQDSDARWGFSPIIYAYFNTKLSPRDEWINRFTDVPIAMPGYKEGVRLINAWYNEGLIFKDFPLMNVAEDFWNLLKSGRAGAFGGDWQLPYRTDYNINVDLAKNIPGAKFVPVDCIEGADGVYYKEVSDKPGMRIFVPLQSKNPEGALRYLNWLSKFENFNYLQIGELGRNHNMVNGIPQVIPTTGPWIQNSANNIDFTMPMNGIELLDPEKNARAIALSYAGTPPEEIVNAINVSTNKGRAAVVYPATETKLPALNQTLSDKAKALLAQSIIAPVANFDRVWDAGYRDWLASGAQDVINERTSLWK

SEQ ID NO: 23797 - DNA, 855 bp, Unknown
  Obtained from environmental sample
  misc_feature (1)..(855): n is a, c, g, or t
atggaaaaagaatatatttcgtataataatataatcactcccgcgaatgtccgcggcgttttggacgatattatcaaatccatggatactcctattttattcaagtcggtcgcctctgacctgttggaaccttttatcagggaaaacacttttttttctttcagcgaaacccaaaagcgaattgaagatgcaaaagacacgataacgcccgtgtacagaacaattgaaaaaggcaatagaattataagaaaaggctttattatcaccgaagaagaaatggaagaccttacggttcttcataagtcaatgccgaaaagagacccgcgcagcataattggggttattctggtgatgctcacgctttatatgctgtttaacgttttatgcgggcgtatcgttatcggaagaaaaataaacaacagcgaacgatatctgctggcttcgttttcaggtttttaccttataggggcggtattgttgtttaatttcctgccgagtcagagtaatttccccttatcgcttttaatgcccaccgccctatttgtgatgctgcttgcggttttaatgggaacgcgccccgccatgattatggcgctcgcgcttccgttaggcgcttattttaccggggcttttgacaattattcatacatcttcgctcttatatccggcatagcggcttctaccgtccttcacaacgcaaaagacagaatgagcttgattaangcaggtctggttatagcggcggtaaatacagccgcggctgtcattattctgcttttgaaacaggccggcctttacgattatcccgcgatgattttcggggctgtccttaacgggatgtctcgggaatgttaa

SEQ ID NO: 23798 - protein, 284 aa, Unknown
  Obtained from environmental sample
  DOMAIN (109)...(281): 7TM receptor with intracellular HD hydrolase
  misc_feature (1)..(284): Xaa is any amino acid
MEKEYISYNNIITPANVRGVLDDIIKSMDTPILFKSVASDLLEPFIRENTFFSFSETQKRIEDAKDTITPVYRTIEKGNRIIRKGFIITEEEMEDLTVLHKSMPKRDPRSIIGVILVMLTLYMLFNVLCGRIVIGRKINNSERYLLASFSGFYLIGAVLLFNFLPSQSNFPLSLLMPTALFVMLLAVLMGTRPAMIMALALPLGAYFTGAFDNYSYIFALISGIAASTVLHNAKDRMSLIXAGLVIAAVNTAAAVIILLLKQAGLYDYPAMIFGAVLNGMSREC

SEQ ID NO: 23799 - DNA, 345 bp, Unknown
  Obtained from environmental sample
  misc_feature (1)..(345): n is a, c, g, or t
gtgaaaaaccattttcaaattaaccccaaagcgataaaggaacttgaagaagatcaacagcagatgatccgaggcgtcgtggaattgtccgacaccaccgtcaaggaagtgatggttcccagaaccgacaccgtttttattcccgccgacgcctcaaaagaagagctttttaaatgtttaaacgaaaacgaacattcccggtatccggtgtatcaggacactgtggatcaagttatcggcgtcctgcatgtaaaggacgtattaaaagcgcttgtaaacgacagacccattaacatacgcgagcttgccagaaagccttttttcgtcccgtttccaaacacatga

SEQ ID NO: 23800 - protein, 114 aa, Unknown
  Obtained from environmental sample
  misc_feature (1)..(114): Xaa is any amino acid
MKNHFQINPKAIKELEEDQQQMIRGVVELSDTTVKEVMVPRTDTVFIPADASKEELFKCLNENEHSRYPVYQDTVDQVIGVLHVKDVLKALVNDRPINIRELARKPFFVPFPNT

SEQ ID NO: 23801 - DNA, 471 bp, Unknown
  Obtained from environmental sample
  misc_feature (1)..(471): n is a, c, g, or t
atgaaccatgtttcggttaacgccgaagaagtgacgcttcccaagtggagttcttcaatgagccgctttgcccttaaagtgctggatgaaataaaacgcgacaactgggagctttctatacttttatgcggggacaaaacaattaccgcccttaattcccaatacaggaacaagtttgaacccacggatattctgtcgtttaccttaggcgagacggtacaggagcgcggcaaaaccgtttatctgcccggggaccttgtaatttcccttgacacattgcgcgaaaacgcgaaatattttgacacaagcgaagatgaggagttacgcaggctgttaattcatggtatccttcatttagacggcatggatcacgaaaccacggaaaaagaagagcctatgctcatctttcaggaggagatactgaacaggttaaaagacgaacgtatattgggcgccgggggaaaaatgtga

SEQ ID NO: 23802 - protein, 156 aa, Unknown
  Obtained from environmental sample
  DOMAIN (43)...(142): Uncharacterized protein family UPF0054
  misc_feature (1)..(156): Xaa is any amino acid
MNHVSVNAEEVTLPKWSSSMSRFALKVLDEIKRDNWELSILLCGDKTITALNSQYRNKFEPTDILSFTLGETVQERGKTVYLPGDLVISLDTLRENAKYFDTSEDEELRRLLIHGILHLDGMDHETTEKEEPMLIFQEEILNRLKDERILGAGGKM

SEQ ID NO: 23803 - DNA, 843 bp, Unknown
  Obtained from environmental sample
  misc_feature (1)..(843): n is a, c, g, or t
ttgtgggatcatcagggttttcttaatgtaatttacaatgccggaataggaaatgaatttttcccgttgataatttttatcggcataggcgcgatgacggatttcggtccgcttatcgcaaatccgaaaaccgcgcttttgggtgcggcggcgcaattcggcgtnttcggcacattgttccttatcagtgtcgccaactaccttcccactgtagccttcaatcttaaagaagcctgcggcgtcgcgataatcggcggagcggacggtcccacgacaatttacatcgcggcaaaacttgcccctcaccttctggcgactgtagcggtagcggcatattcctacatggcccttgtgcctatgatccagccgcccatcatgaaactgctcacaaccaaaaaagagcggcttatcaaaatgaagcagctgcgtcctgtttccaaaattgaaaaaatcgccttcccgataattgtattctcactggcaattctgttgattcccgcggcggctcctcttatcggctgtcttatgttcggcaattttatccgtgaaatcggcgtggtggacagactttcaaagacagcacaaaacgaactgatgaatatagtgtcgatgttcctgtctttgggtgtcggcagtcagatgactcccgaaaagttccttaattccaagtcattgatcatcgtagtaatgggactacttgccttctcgatagcgaccgccacgggcgttcttgtagcgaagtttatgaatctctttcttaaagaaaagatcaacccgctcatcggctccgccggtgtttctgcggttccaatggcggcgcgtgttcaaacaaagtcggtctga

SEQ ID NO: 23804 - protein, 280 aa, Unknown
  Obtained from environmental sample
  DOMAIN (1)...(279): Na+-transporting methylmalonyl-CoA/oxaloacetate decarboxylase, beta subunit
  misc_feature (1)..(280): Xaa is any amino acid
MWDHQGFLNVIYNAGIGNEFFPLIIFIGIGAMTDFGPLIANPKTALLGAAAQFGVFGTLFLISVANYLPTVAFNLKEACGVAIIGGADGPTTIYIAAKLAPHLLATVAVAAYSYMALVPMIQPPIMKLLTTKKERLIKMKQLRPVSKIEKIAFPIIVFSLAILLIPAAAPLIGCLMFGNFIREIGVVDRLSKTAQNELMNIVSMFLSLGVGSQMTPEKFLNSKSLIIVVMGLLAFSIATATGVLVAKFMNLFLKEKINPLIGSAGVSAVPMAARVQTKSV

SEQ ID NO: 23805 - DNA, 543 bp, Unknown
  Obtained from environmental sample
  misc_feature (1)..(543): n is a, c, g, or t
atggccaagaaaaaatttagatcaactactataattgcggttcgcaaggacgggaagatcgctatggcgggggacgggcaggttactttcggtgaaaccgttatgaagaataacgcccgcaaggtacgccgcatgatggacggcaaagtgctttgcggctttgccggttccacggccgacgtttttacgcttcatgaccgtttcgaagcgaagctcaaggaatattcgggcgatcttgtccgctcagccgtggagttggcaaaggactggcgcatggatcgcagcctcaggaggttagaggcgatgctcctcgtcgccgatatttcaaagaccctgcttgtttccggctcgggcgacgttatcgaaccggccgacaacaccattgccatcggctcgggcggcaattacgcgtacgccgcggccttagccttcctggacggaagctcatattcggccaaggaaatcgccgagaaaagcctgaaaatcgcggggaatatctgcatttataccaacatggaaataactctggaggaattgggatga

SEQ ID NO: 23806 - protein, 180 aa, Unknown
  Obtained from environmental sample
  DOMAIN (5)...(179): Proteasome A-type and B-type
  misc_feature (1)..(180): Xaa is any amino acid
MAKKKFRSTTIIAVRKDGKIAMAGDGQVTFGETVMKNNARKVRRMMDGKVLCGFAGSTADVFTLHDRFEAKLKEYSGDLVRSAVELAKDWRMDRSLRRLEAMLLVADISKTLLVSGSGDVIEPADNTIAIGSGGNYAYAAALAFLDGSSYSAKEIAEKSLKIAGNICIYTNMEITLEELG

SEQ ID NO: 23807 - DNA, 747 bp, Unknown
  Obtained from environmental sample
  misc_feature (1)..(747): n is a, c, g, or t
ttgagttttgaacgggcgtcagcggccagcgtgaaccgcaggctttcttctgtccggggcttttaccgctggctgagcaaatttcgcgggcgcgtagataacccctgcgacggcggccccggcggggttatacgcaatgtcaaagcgccgcaggccctgccatccctgctctgggaagacgagatggcggattttgcggttttgcctgacgagaaaaaaatgttgtggccgctcagggacaaggctttgattttgactatgtattccgcggggctgcgtattggcgaattggtttccataaccatgaagataattacggctaacatggagggggcgaaaataacaggcaagggcggcaaggagcgcatggtgttcttttccgaagaggcgcgtcatgcgattcatgattatctgcctgaaagggacgccagaatcagaatgtccgggttgaacgcggctgatttgaacggcgccttgtttataagcgggaaggggcggccaatatctgtgccgggcgtgcgctggattatcggccagtacgccctggtttcggggctggggaaaaacatacacccgcacagtttccgccacagttttgccacccatctggtgaacgccggctgcgacgtgcgcatcgtacaggaaatgttgggccacgcgcggctttcaaccacgcagcgttactcgcatgtcagcattgagcggttgaagaaggtgtatgagaaggcgcatccccatgcaaaataa

SEQ ID NO: 23808 - protein, 248 aa, Unknown
  Obtained from environmental sample
  DOMAIN (68)...(238): Phage integrase family
  misc_feature (1)..(248): Xaa is any amino acid
MSFERASAASVNRRLSSVRGFYRWLSKFRGRVDNPCDGGPGGVIRNVKAPQALPSLLWEDEMADFAVLPDEKKMLWPLRDKALILTMYSAGLRIGELVSITMKIITANMEGAKITGKGGKERMVFFSEEARHAIHDYLPERDARIRMSGLNAADLNGALFISGKGRPISVPGVRWIIGQYALVSGLGKNIHPHSFRHSFATHLVNAGCDVRIVQEMLGHARLSTTQRYSHVSIERLKKVYEKAHPHAK

SEQ ID NO: 23809 - DNA, 1509 bp, Unknown
  Obtained from environmental sample
  misc_feature (1)..(1509): n is a, c, g, or t
atgttgaggcttacccgttaccgctacaataatgtcccggctgactcaggcgggcgttatttttacctgcgcgacggcggcgccgacgtgtggactccctcctggatgccaatgaagtcagaactttcccgctacgagtgccgtcacggaatgggttattcgcgcatttcctcagcgcggaacggccttgcgttttctcaagtttcgtttgtaccattacatgacacctgcgagatacataaaatcacgctgaccaacgaatcaaatgtggataagcgtgtagatatgttttcttttattgaattctgcctttggaacgccaatgatgatatgacgaacttccagcgcaatttcagcataggtgaagttgaaatcgaaggttcgcgtatttatcacaagaccgagtaccgcgaaaggcgcaaccactatgcggtgtgggcggtgaatgttccaatcgaaggctttgacacggacaggcagacttttcttggtctttacaacggtttcgatcacccgcaggcggtttttgacggagaggcgaaaaattccgtcgcttcaggatgggcgcccgtaggctctcaccacatcaaggcgcggcttgctccgggtgaatctaaaacttttgtttttgtccttggttactgtgaaaatcatgaggatcaaaaatgggaaaagtcggttcccggaggcaaccatggtgtgattaacaaaaaacccgcaaacactctccttgcaaaatacggaacgcctgaggcggcggacaaggctcttgccgcgcttaacgagtactggaaagctcttcttggccgctttaccgttgaagcggaagacaggaaaatggcgcgtatggcgggtatctggaaccagtaccagtgtatggttacgtttaacatgtcgcgcagcgcgtcctattttgaatccggaataggtcgcggcatgggtttccgcgattcaaaccaggatttgctgggctttgtccatcttgttccggagcgcgcccgaatgcgtattctggacatcgctgcgacgcagttcccggacggaagcgcgtatcatcagtaccagccgcttacaaagaggggcaataacgaaataggctccggttttaacgatgatcccctgtggctcatttgcggagtcgcggcgtacatcaaggagacgggagattacagcatacttgacgagaaagtgccgtttgataacgacgaatcgttagctgacaccctcttcgtccacttaaagcgttcttttgattacaccgtaacgcataaaggaccgcacggccttcctttaatcggacgcgccgactggaacgactgccttaaccttaactgcttttccaaaacgcccggcgaatcttttcagactaccgcgaattttgaaagcggtgtcgcggaatcggtgttaatcgcggcgattttcgcgtttaccggcccggattatgttgagatttgcaaaaggacaaagcgcaatgacgaggcgcagtacgctgaaaaagnccgtcgctga

SEQ ID NO: 23810 - protein, 502 aa, Unknown
  Obtained from environmental sample
  DOMAIN (132)...(220): Glycosyltransferase 36 associated family
  misc_feature (1)..(502): Xaa is any amino acid
MLRLTRYRYNNVPADSGGRYFYLRDGGADVWTPSWMPMKSELSRYECRHGMGYSRISSARNGLAFSQVSFVPLHDTCEIHKITLTNESNVDKRVDMFSFIEFCLWNANDDMTNFQRNFSIGEVEIEGSRIYHKTEYRERRNHYAVWAVNVPIEGFDTDRQTFLGLYNGFDHPQAVFDGEAKNSVASGWAPVGSHHIKARLAPGESKTFVFVLGYCENHEDQKWEKSVPGGNHGVINKKPANTLLAKYGTPEAADKALAALNEYWKALLGRFTVEAEDRKMARMAGIWNQYQCMVTFNMSRSASYFESGIGRGMGFRDSNQDLLGFVHLVPERARMRILDIAATQFPDGSAYHQYQPLTKRGNNEIGSGFNDDPLWLICGVAAYIKETGDYSILDEKVPFDNDESLADTLFVHLKRSFDYTVTHKGPHGLPLIGRADWNDCLNLNCFSKTPGESFQTTANFESGVAESVLIAAIFAFTGPDYVEICKRTKRNDEAQYAEKXRR

SEQ ID NO: 23811 - DNA, 915 bp, Unknown
  Obtained from environmental sample
  misc_feature (1)..(915): n is a, c, g, or t
ttggccgagtacataggagcgttgcttatggcctgcaattcaacaaacacctcaattgaaacccaaacgcctgacgcggtccttaacgcggctcccttttcacgggggataaatttttcacagtggtttgaaactcccaacgcgcagtctattcaatttacccggtttattgagcaggattttatcaacgtgaaaagcatgggggtagacgtgatccggcttccgattagaatgcacagcatgacacggggcgcgcccgaatacgttcttgatccgctgctgctgaaattactggacaccgttgtcgattgggcggaaaaacaccagatgtatttaattattgacaaccattcctttgatcctgtggcgcctaccgatacaaacatagacgggattctcctgaaagtttgggcgcagatcgcgcagcgatataaaaaccgcgggaagtatgttgtttatgagattctcaacgagccccacggcatttccgacagcaggtggggtgaaatccaggggatggcaatagaaacaataaggaaaatcgatacgacgcacgccataattgtcggcggcaccgattacaattccattaataaactgttctctataccggagtattcggatcccaacctcatctatacgtttcatttttacgatccccatttatttacccaccagggcgcctcctggggggagccctcgttagcatcattggccggcgtcccctttccggcggatgtcttacgcatacctaaaactcccgatgatcttaaaggaacatgggttgaaggcgctctaagaaattacaaaaacgacgccgctttttcacactcctgggaagacttgataaaacggtggctttttcaagggaacggaaagctccggtcttttgcggcgaattcggcgtttatatga

SEQ ID NO: 23812 - protein, 304 aa, Unknown
  Obtained from environmental sample
  DOMAIN (21)...(302): Cellulase (glycosyl hydrolase family 5)
  misc_feature (1)..(304): Xaa is any amino acid
MAEYIGALLMACNSTNTSIETQTPDAVLNAAPFSRGINFSQWFETPNAQSIQFTRFIEQDFINVKSMGVDVIRLPIRMHSMTRGAPEYVLDPLLLKLLDTVVDWAEKHQMYLIIDNHSFDPVAPTDTNIDGILLKVWAQIAQRYKNRGKYVVYEILNEPHGISDSRWGEIQGMAIETIRKIDTTHAIIVGGTDYNSINKLFSIPEYSDPNLIYTFHFYDPHLFTHQGASWGEPSLASLAGVPFPADVLRIPKTPDDLKGTWVEGALRNYKNDAAFSHSWEDLIKRWLFQGNGKLRSFAANSAFI

SEQ ID NO: 23813 - DNA, 1233 bp, Unknown
  Obtained from environmental sample
  misc_feature (1)..(1233): n is a, c, g, or t
ttgcagctatcagcgtatatgccgaactgtttatattatcggacgagaaaaccattattcttcggggaagcattaatgaatttagaatcaaatcgtaagcagttaaatgaagaacaaaaaaaagccgctttctgcgaagagaacgcggttgttgcggcaggcgcagggtcggggaaaactatggtgcttgcgcatcggtttgtatggcttctaacagaaaaagactataaagtagatgaaattttaacgcttacatttacaaaaaaagccgcttctcaaatgtttaaaaggatttattcgctggtttcgcaaatcgctcaggaagatagcggcgtacaggcgcaaagggcgcaaaaagcgcttgatgattttattcacgcaagaattcaaactttggactcttacagcgcctcaatcgtaaaacaatgcgcgccccgttacgggataagtcccgattttcagattgatcagcagagatgctataatatcgctcttgaggtttcgtatcctttttttatcgcgcaccgccaccaccctgccgtaaaaaaactttattcgggaaaccgtccgaacggcattgtccgcaatatattcgccgatgttttgtttaactactgcttaatcgacaagccccgtgatttttcggctgatttaaattttcagattaacaccctttgttcccagtgggacggctgcgttaaaaatgtaagaaaactgttatacgaaattaaacttgatattggcaatgataattcattgcttcctgttcttgtcccaataatcgaaaaagaaagaaatgagaaaattgatataccaacaaccgtcgaagtacaagaatattttaagttgttacaaaatactcccgtggaatcggtaattgaggaagccgagtctaatccgctgcaaaaatcctttgaaaaatttttgttttttttatatgatataacaagtttaagtttaagaggaggaaaacgctccgataatactgtaaagcaaaatatcaatcagcttcgcgccctttacgattctttttcttccttgacaatttcgtgtatgcaagccggctttatcatttctataatgtccttgcttgaaaaattacaaaaacgctatcttgcaagaaaacggacagagggcgttcttacattccgcgacgttgcaagtctttcaagaactatccttatcgaacaaaccgacataaggcgcagcgaaaaagatactttaaatcaataa

SEQ ID NO: 23814 - protein, 410 aa, Unknown
  Obtained from environmental sample
  DOMAIN (35)...(407): UvrD/REP helicase
  misc_feature (1)..(410): Xaa is any amino acid
MQLSAYMPNCLYYRTRKPLFFGEALMNLESNRKQLNEEQKKAAFCEENAVVAAGAGSGKTMVLAHRFVWLLTEKDYKVDEILTLTFTKKAASQMFKRIYSLVSQIAQEDSGVQAQRAQKALDDFIHARIQTLDSYSASIVKQCAPRYGISPDFQIDQQRCYNIALEVSYPFFIAHRHHPAVKKLYSGNRPNGIVRNIFADVLFNYCLIDKPRDFSADLNFQINTLCSQWDGCVKNVRKLLYEIKLDIGNDNSLLPVLVPIIEKERNEKIDIPTTVEVQEYFKLLQNTPVESVIEEAESNPLQKSFEKFLFFLYDITSLSLRGGKRSDNTVKQNINQLRALYDSFSSLTISCMQAGFIISIMSLLEKLQKRYLARKRTEGVLTFRDVASLSRTILIEQTDIRRSEKDTLNQ

SEQ ID NO: 23815 - DNA, 534 bp, Unknown
  Obtained from environmental sample
  misc_feature (1)..(534): n is a, c, g, or t
atggaaaataattatccgcagattttcaaaactaccgccgtttcaggcttatccgcgcatgaatgggctaaaataaagtcaaataaattgtcatttttgccgcaattactcgattattgcaaggccaacgcctgcggcaagtacaacaaatcatgggcgtgcccgccggcctgcggatcaatggaagaacagagggaaaaaattaaaagcagcgaatatattttggtgtttacgacaaagcacaaactggaggatcctttcgaccacgagggtatgacgcggggcagagaacaacacaccctgctggcgcaggaattaagaaaaaaatttgacaacgcgcctgtttacggcgcgggggcgtgccctgtttgcgccgtttgcgcttttcccgccccctgtacttttcccgaaaaaatgataggctccgtcgaggcggccggaatcgacgtgacggaattgagcaagactgccggcgtcgcctacaacaacggccctaacaccgtaacatatttctcgataatactgttaagttaa

SEQ ID NO: 23816 - protein, 177 aa, Unknown
  Obtained from environmental sample
  misc_feature (1)..(177): Xaa is any amino acid
MENNYPQIFKTTAVSGLSAHEWAKIKSNKLSFLPQLLDYCKANACGKYNKSWACPPACGSMEEQREKIKSSEYILVFTTKHKLEDPFDHEGMTRGREQHTLLAQELRKKFDNAPVYGAGACPVCAVCAFPAPCTFPEKMIGSVEAAGIDVTELSKTAGVAYNNGPNTVTYFSIILLS

SEQ ID NO: 23817 - DNA, 756 bp, Unknown
  Obtained from environmental sample
  misc_feature (1)..(756): n is a, c, g, or t
ttgaagaatggtagccaacataagttcagttaccatacgctggtcaacaatgccgccaatgtaaacacgttaatagacgcatctgaagtgggaaagacaggcttgcaggaagtcgcgacggacattcaggaaatatcccgcgaatccgaaggcctgttggagattaacgcggtaatggaaaacatcgccagccagacaaatctgctttctatgaacgcggcgatagaagcggcgcacgccggagaagcgggaaaaggcttcgccgtagtagccgatgaaatccgcaaactggctgaaagctccggcgagcagtcaaaaacgattatcacggtattaaaaaagatagcggaatcgatcaaaaaaataacaagctccgccgaaaacgtactgaacaaattcgaggcgatagactccggcgtaaggacagtatcgcagcaggaagaaaacatccgcaacgcgatggaagagcagagcgaggggagcaagcaaattctgcaaagcgcaagctctttaagccagcttacgcatcaggtaaagagcggttccgaagagatgcttgagggcagtaaggaagtaatgaaggaaagccataaccttgaaaaggtaacgcaggaaataaccggcggcatgaacgagatggcaagcggagcggatcagataaatgttgcggtaaacaatgtcaatgagatgacacaaaagaaccgtgatgcgattgattctttgataaaggaagtttcgcggttcaaggtggaatga

SEQ ID NO: 23818 - protein, 251 aa, Unknown
  Obtained from environmental sample
  DOMAIN (9)...(207): Methyl-accepting chemotaxis protein (MCP) signaling domain
  misc_feature (1)..(251): Xaa is any amino acid
MKNGSQHKFSYHTLVNNAANVNTLIDASEVGKTGLQEVATDIQEISRESEGLLEINAVMENIASQTNLLSMNAAIEAAHAGEAGKGFAVVADEIRKLAESSGEQSKTIITVLKKIAESIKKITSSAENVLNKFEAIDSGVRTVSQQEENIRNAMEEQSEGSKQILQSASSLSQLTHQVKSGSEEMLEGSKEVMKESHNLEKVTQEITGGMNEMASGADQINVAVNNVNEMTQKNRDAIDSLIKEVSRFKVE

SEQ ID NO: 23819 - DNA, 360 bp, Unknown
  Obtained from environmental sample
  misc_feature (1)..(360): n is a, c, g, or t
ttgctcccctcgctctgctcttccatcgcgttgcggatgttttcttcctgctgcgatactgtccttacgccggagtctatcgcctcgaatttgttcagtacgttttcggcggagcttgttatttttttgatcgattccgctatcttttttaataccgtgataatcgtttttgactgctcgccggagctttcagccagtttgcggatttcatcggctactacggcgaagccttttcccgcttctccggcgtgcgccgcttctatcgccgcgttcatagaaagcagatttgtctggctggcgatgttttccattaccgcgttaatctccaacaggccttcggattcgcgggatatttcctga

SEQ ID NO: 23820 - protein, 119 aa, Unknown
  Obtained from environmental sample
  misc_feature (1)..(119): Xaa is any amino acid
MLPSLCSSIALRMFSSCCDTVLTPESIASNLFSTFSAELVIFLIDSAIFFNTVIIVFDCSPELSASLRISSATTAKPFPASPACAASIAAFIESRFVWLAMFSITALISNRPSDSRDIS

SEQ ID NO: 23821 - DNA, 1383 bp, Unknown
  Obtained from environmental sample
  misc_feature (1)..(1383): n is a, c, g, or t
gtgttttggatcaacgatatagataaaacattctacagcaacgacaacgcgccgtacgtggttgatcctgatttgccggagaactattggtataacctgactctttacaagacggatgtgtataatttcaacatcaattacaatcccgaccttgatttgatcaacctttggatcaacgccccggtttttgacgacaacaataagcccgtcgggatggtgggtaccggtcttgaaatctcggcgtttgtgagcgcgcttttcagcgacttggacgacagaaaggagcttttttatttcaacgccgatggggaaattaccggcgcgaaggataccgccatcatctcctcaaagaagaagatagatgatgtggtagtcggtttgaacgagaatattttggctatcgccgccaattgggaaaccggcggcgaaaatgaggtcaagcgcgtccccttgaagaaaaaaatcggcgacgcgaccgccccgggtgtcttggccatcgcgaaaagccttgcgttcggcgaaacgcgggcgcttgtcgtgccgcatggaaatcttgtgatcagcacgattccgcagctcaagtggtacgctattgtatatatgccggacagtatagacgattataaaacctcaatgacggcgttgtttcttgtggtgctggtcgtcatattgctgatattcatcatattcaacgtatttgtctccaattttctcaagtcccaacataagactatggcgtcgcttgagcacgccagaaacgaggcggagattgccaaccggagcaaatcgaattttctcgccaccatgtcccacgagatccgcacgccgatgaacgcgattatcggtatagcgcaaatacagctgcaacgcgacgatgtgccggacgactacgcggccgcgtttaggaagatatacagctccgccaacaatcagctcaacattgtcaacgatattttggatatgtccaagatcgaaaccggcaggatggagctgaacccggtggaatacgacgtaccgaacctgatcaacgacgcgatgcagcttaatgtggtcagaataggggagaaactgattgagtttatagttgacgttgacgaanatttgccgtcgaggctttacggcgacgaattgcggatcaagcaaatacttaacaacctgctctcncacgccataaagtataccgacgaggggtgcgtgaagctgtcggtaggctgtttgacggacagcgacggcgtgatattgcgttttgtcgtggaggataccgggcagggcatanagccgaaggataaagagcggctcttttcggagtaccagcgttttcacgcccgagcccacccgcgcacgnagggtaccgggctcggtttaaatatcacaaaaaattaa

SEQ ID NO: 23822 - protein, 460 aa, Unknown
  Obtained from environmental sample
  DOMAIN (374)...(460): Histidine kinase-, DNA gyrase B-, and HSP90-like ATPase
  misc_feature (1)..(460): Xaa is any amino acid
MFWINDIDKTFYSNDNAPYVVDPDLPENYWYNLTLYKTDVYNFNINYNPDLDLINLWINAPVFDDNNKPVGMVGTGLEISAFVSALFSDLDDRKELFYFNADGEITGAKDTAIISSKKKIDDVVVGLNENILAIAANWETGGENEVKRVPLKKKIGDATAPGVLAIAKSLAFGETRALVVPHGNLVISTIPQLKWYAIVYMPDSIDDYKTSMTALFLVVLVVILLIFIIFNVFVSNFLKSQHKTMASLEHARNEAEIANRSKSNFLATMSHEIRTPMNAIIGIAQIQLQRDDVPDDYAAAFRKIYSSANNQLNIVNDILDMSKIETGRMELNPVEYDVPNLINDAMQLNVVRIGEKLIEFIVDVDEXLPSRLYGDELRIKQILNNLLSHAIKYTDEGCVKLSVGCLTDSDGVILRFVVEDTGQGIXPKDKERLFSEYQRFHARAHPRTXGTGLGLNITKN

SEQ ID NO: 23823 - DNA, 408 bp, Unknown
  Obtained from environmental sample
  misc_feature (1)..(408): n is a, c, g, or t
atgaggctgaaccggaataagggcaaaaatttctacattccccttaactcaatgtccgatgtagcctttctgctgttgatctttatcatgctggttgcgctgataaattaccgcaaggaagtcaagattgaatatcccaatgcgaaaaccgctttgcgaaccagcgaagaaaaaaatctggaggtatggatagaccgggaaggcggtatatacctggacggtgatgatgcggaccttcttgcccttgagcgaaaaatcgccgatttgtaccgcagcgcgccggatacgcgggtacacattattgccgaccggaacaccccctacgaaaaaataaacgccgctctggaggttctccagatacttcaataccgtgtggtaagttttgtggtaaaaaatgctgaacaatga

SEQ ID NO: 23824 - protein, 135 aa, Unknown
  Obtained from environmental sample
  DOMAIN (6)...(133): Biopolymer transport protein ExbD/TolR
  misc_feature (1)..(135): Xaa is any amino acid
MRLNRNKGKNFYIPLNSMSDVAFLLLIFIMLVALINYRKEVKIEYPNAKTALRTSEEKNLEVWIDREGGIYLDGDDADLLALERKIADLYRSAPDTRVHIIADRNTPYEKINAALEVLQILQYRVVSFVVKNAEQ

SEQ ID NO: 23825 - DNA, 402 bp, Unknown
  Obtained from environmental sample
  misc_feature (1)..(402): n is a, c, g, or t
gtggaagaagccgccaaagcggtgtatgcccatgaatttatttcccggcttcctgaaggatacaatacggttctttccgagggggcggccaatatttcttccggtcagcggcagttgatcagtttcgccagagttatcgcgcataacccagccattgttattttggacgaggcgacaagctccatagataccgaaaccgagcgcctgattcagctgggaatgcaaagggtgctggcggggcgtacatccattgtcatagcccaccgtctttccacgattagggacgcggatcgtatttttgttctgtccaatggccgtctggtggaggagggcagtcacgaagagcttgtcgaaagaggcggaatttactcaggtctttacagattgcaatatgaggattaa

SEQ ID NO: 23826 - protein, 133 aa, Unknown
  Obtained from environmental sample
  DOMAIN (1)...(105): ABC transporter
  misc_feature (1)..(133): Xaa is any amino acid
MEEAAKAVYAHEFISRLPEGYNTVLSEGAANISSGQRQLISFARVIAHNPAIVILDEATSSIDTETERLIQLGMQRVLAGRTSIVIAHRLSTIRDADRIFVLSNGRLVEEGSHEELVERGGIYSGLYRLQYED

SEQ ID NO: 23827 - DNA, 1206 bp, Unknown
  Obtained from environmental sample
  misc_feature (1)..(1206): n is a, c, g, or t
ttggcatcctttgtgataaacgcgctgagttacaagcttatattaataaggcccattaattccgtaaccgcgatgcttaaggaaatagccgaaggcgaaggagacctgaccaaacggcttatggtttccagcaaggatgaaatcggcgatatggccacatattttaatgaaacccttgaaaaaataaagcacatgattattgtcataaagaaagagacggcaagccttaacagcatcggcaatgaccttgccagcaatatgaccgaaaccgccgcggctgttaatcaaattacctccaatatccagagtatcaaaggccgcgttattaaccaaagcgccagcgtcaccgaaaccaacgcaaccatagaacaggttatagcgaacatcaacaaactcaacagccatgttgaaaaccagagccgcaatgtttcacaggcgtcatccgctattgaggaaatggtcgcaaatatcggttcggtaacccaaactttggtcaaaaactccagcaatgtaaatgtattaaaagaagcatccgaagtaggccgtagcggattgcaggaagtagccactgacatgcaggagatagcccgcgaatccgagggcttgctggagataaacgcggtaatgaagaatatcgccagccagaccaacctgctttcaatgaacgccgcgatagaagcggcacacgcgggggaagcgggcaagggctttgccgtagttgccgatgaaatccgcaaactggcggtaacttccagcgagcagtcaaagaccataggtaatgttttaaagaagataaaaggatcgatggacaagataaccaaatccacggaaaatgttctaagcagattcgaagcaattgacttaagcgttaagacagtgtcggatcaggaagaaaacatccgaaacgcgatggaagaacaaggcgaaggaagcaaacaagttctgcaaaacaccggcagtttaaatgaacttacagaacaggtaaagagcggttcacatgaaatgcttgatggcagcaacgaggtaatacaggaaagcaacaatcttgaaaaggcaacgcaggaaatatccaatagcatgaatgagatggcctcaggcgcggaacaggttaatatcgcggtacaccacgtcaacgaaataagcggtaaaaaccgcgatgcaattatcgttttattaaaggaagtttcgcggtttaaggtggaatga

SEQ ID NO: 23828 - protein, 401 aa, Unknown
  Obtained from environmental sample
  DOMAIN (1)...(64): HAMP domain
  misc_feature (1)..(401): Xaa is any amino acid
MASFVINALSYKLILIRPINSVTAMLKEIAEGEGDLTKRLMVSSKDEIGDMATYFNETLEKIKHMIIVIKKETASLNSIGNDLASNMTETAAAVNQITSNIQSIKGRVINQSASVTETNATIEQVIANINKLNSHVENQSRNVSQASSAIEEMVANIGSVTQTLVKNSSNVNVLKEASEVGRSGLQEVATDMQEIARESEGLLEINAVMKNIASQTNLLSMNAAIEAAHAGEAGKGFAVVADEIRKLAVTSSEQSKTIGNVLKKIKGSMDKITKSTENVLSRFEAIDLSVKTVSDQEENIRNAMEEQGEGSKQVLQNTGSLNELTEQVKSGSHEMLDGSNEVIQESNNLEKATQEISNSMNEMASGAEQVNIAVHHVNEISGKNRDAIIVLLKEVSRFKVE

SEQ ID NO: 23829 - DNA, 543 bp, Unknown
  Obtained from environmental sample
  misc_feature (1)..(543): n is a, c, g, or t
gtggatttggttatcttgtccatcgatccttttatcttctttaaaacattacctatggtctttgactgctcgctggaagttaccgccagtttgcggatttcatcggcaactacggcaaagcccttgcccgcttcccccgcgtgtgccgcttctatcgcggcgttcattgaaagcaggttggtctggctggcgatattcttcattaccgcgtttatctccagcaagccctcggattcgcgggctatctcctgcatgtcagtggctacttcctgcaatccgctacggcctacttcggatgcttcttttaatacatttacattgctggagtttttgaccaaagtttgggttaccgaaccgatatttgcgaccatttcctcaatagcggatgacgcctgtgaaacattgcggctctggttttcaacatggctgttgagtttgttgatgttcgctataacctgttctatggttgcgttggtttcggtgacgctggcgctttggttaataacgcggcctttgatactctggatattggaggtaatttga

SEQ ID NO: 23830 - protein, 180 aa, Unknown
  Obtained from environmental sample
  misc_feature (1)..(180): Xaa is any amino acid
MDLVILSIDPFIFFKTLPMVFDCSLEVTASLRISSATTAKPLPASPACAASIAAFIESRLVWLAIFFITAFISSKPSDSRAISCMSVATSCNPLRPTSDASFNTFTLLEFLTKVWVTEPIFATISSIADDACETLRLWFSTWLLSLLMFAITCSMVALVSVTLALWLITRPLILWILEVI

SEQ ID NO: 23831 - DNA, 390 bp, Unknown
  Obtained from environmental sample
  misc_feature (1)..(390): n is a, c, g, or t
atggaacttcacagaagatacggatatttttttgttcccggcggggcttataatgcaaaggcaattatttggaaagcacaccttattgattttactaaaatggcatttgataatggagagcttggttcacttgtcttcacctgttttgttttgtcgcatttcaaatctgcaaaaaaatcggaatggtttaaatcggcaatgatgtacatggaaaattatagaacaacagaggagcgatataattttcaaaaatatatgattgttgaaaaaccggattgttatgtcattgaaggcggtcatatgaatattggtgaaaacaaaagatcaaaaaaatatgctgaaataatatcaacatattggatgaatagaattaaagaaaatatgaaataa

SEQ ID NO: 23832 - protein, 129 aa, Unknown
  Obtained from environmental sample
  misc_feature (1)..(129): Xaa is any amino acid
MELHRRYGYFFVPGGAYNAKAIIWKAHLIDFTKMAFDNGELGSLVFTCFVLSHFKSAKKSEWFKSAMMYMENYRTTEERYNFQKYMIVEKPDCYVIEGGHMNIGENKRSKKYAEIISTYWMNRIKENMK

SEQ ID NO: 23833 - DNA, 945 bp, Unknown
  Obtained from environmental sample
  misc_feature (1)..(945): n is a, c, g, or t
atgtacgccggagaccgcagccggaagcagagccttgtcgattacggtttccgcctgccgagcgctcttgataaccgtccccttcgttatgatgaattcgtcgatcgtttggacaaagcaatttttgtttccgctactcccggcaagacagaaattgaacaatcagcgagggttgtacagcagttaatacgcccgacggggcttttggatccggaaattgaagtgcgtcccagcgaaggtcaaatggaagacatttacggagaggtgcaaaagcgcatcaaggcgggagaacgctcgctcattctcactcttacaaaaaaaatggcggaagaccttactgactatctttcaggtctcgggttaaaagtccgctatattcacagcgaagtagaaactattgaacgtgtggaaatactcacccagcttcggcagggagactttgacatacttgtcggcatcaacctgttacgcgaaggtattgatttgccggaagtttcgttcattgcgatccttgatgccgacaaaatcggctttttacggtcgctcacaagccttgtgcagattatcgggcgggcggctcgtaatgcggcgggcaaggtaatcatgtatgcggatcgcatgagcgaggcaatggaaaaggcgattgccgaaaccaaccgccgccgtgaggttcaaattgcctacaacaaaaaacacggtatcactccggcgacagttaaaaaggcaattgcggaaatactgacacgccatgttgaagaagcggataacgcggcggcaaccacggttgaagttttaaagaactcctacaatgtgttgattcccgcccagcgcaaacagttgattagagctttggagagcgagatgcttgaacacgcgaaaaaattggagtttgagcaggcggcggcgattagggatgagattgcgaagattagggagatggggtaa

SEQ ID NO: 23834 - protein, 314 aa, Unknown
  Obtained from environmental sample
  DOMAIN (278)...(313): UvrB/uvrC motif
  misc_feature (1)..(314): Xaa is any amino acid
MYAGDRSRKQSLVDYGFRLPSALDNRPLRYDEFVDRLDKAIFVSATPGKTEIEQSARVVQQLIRPTGLLDPEIEVRPSEGQMEDIYGEVQKRIKAGERSLILTLTKKMAEDLTDYLSGLGLKVRYIHSEVETIERVEILTQLRQGDFDILVGINLLREGIDLPEVSFIAILDADKIGFLRSLTSLVQIIGRAARNAAGKVIMYADRMSEAMEKAIAETNRRREVQIAYNKKHGITPATVKKAIAEILTRHVEEADNAAATTVEVLKNSYNVLIPAQRKQLIRALESEMLEHAKKLEFEQAAAIRDEIAKIREMG

SEQ ID NO: 23835 - DNA, 912 bp, Unknown
  Obtained from environmental sample
  misc_feature (1)..(912): n is a, c, g, or t
ttggagcaggctcagccgccgaaggccaagccgccgaaggcggcactgcacatagtacacggtatggcggaacacgccctgcgttacaaaagacttgcggaaaaattaaccgccgggggaatagaagtttgggcggctgatcagcgcgggcacggtaaaaccgccgatcttggcgtaaacaagcccgacaggggagggcttcttgggcattgcggtgacggcgccggttttgcccctattataaaagacattcacgccataaatagcgaaataaaaaaaacgataaacgcgccgcttttccttcttggccattcgtggggttcttttcttgttcaggattatatagaagaatattccggcaatatgttaataaacggctgtatactttcgggaacgaaggggcctgccgcaagcaatttaatttataaagcgggaattcccgttttaacttttttagccgcgataagggggcagcgcaaaggctccaacattgccaaagcgatggcggacgggccgtacaataaaccgtttaaaccaaaccggactacctttgactggatttcccgcgatgaaaacgaagtggataaatacattgccgatcctttcagcggcatgctgtgttccacaggtttttacagggagcttgcgaagctgttgtatcatattcaccgcggcgaagaaatggcgaaaattaaccgtaatttgccggtgtatatatttgcgggaagcgaagatcctgtaggcgacatgggcgcaagtcctgccgcccttgttaacgcgtaccgcaatttggggatcgttgatcttgagtttgcgctgtacaaaggcgcaagacatgaaacgctaaacgaaattaaccgtgaggaggttatggacaaccttctttcatggttaaaaaaacattttaaatga

SEQ ID NO: 23836 - protein, 303 aa, Unknown
  Obtained from environmental sample
  misc_feature (1)..(303): Xaa is any amino acid
MEQAQPPKAKPPKAALHIVHGMAEHALRYKRLAEKLTAGGIEVWAADQRGHGKTADLGVNKPDRGGLLGHCGDGAGFAPIIKDIHAINSEIKKTINAPLFLLGHSWGSFLVQDYIEEYSGNMLINGCILSGTKGPAASNLIYKAGIPVLTFLAAIRGQRKGSNIAKAMADGPYNKPFKPNRTTFDWISRDENEVDKYIADPFSGMLCSTGFYRELAKLLYHIHRGEEMAKINRNLPVYIFAGSEDPVGDMGASPAALVNAYRNLGIVDLEFALYKGARHETLNEINREEVMDNLLSWLKKHFK

SEQ ID NO: 23837 - DNA, 534 bp, Unknown
  Obtained from environmental sample
  misc_feature (1)..(534): n is a, c, g, or t
ttggcgtgcctaaagctgtacgaggggcggatagcggcagtggaaaagctgatggagaaggaatcggaaggggacaaggagatagagcggctgcagacagtacctggtgtagggccaaagatatcgtttgtgtttgttgcgcatgtggcggcggagcggtttgagaatgggtctcaggtaagcaactatattggattagtgccgcgggtgtatatgtccggggagactgtgaggtatgggcgtataacgaaacgcgggaatgggtttctgcgggcgctgctggtacaagggtcgtgggcgctcatacggtcaaaggctgggggaagcctgaaggaacggtacgaatacatgacgaaggagaaggggataagcaagaagaaagcgatagtggcgatagcgcggcggctggcggaattattgtatgccctcatgagggatgggacgagctacgaagtgagaaaattcaaactgggaagtgaagaagggaaaaaattcaaactgggggaagggaaaaaattagccaagatagcgtaa

SEQ ID NO: 23838 - protein, 177 aa, Unknown
  Obtained from environmental sample
  DOMAIN (4)...(114): Transposase IS116/IS110/IS902 family
  misc_feature (1)..(177): Xaa is any amino acid
MACLKLYEGRIAAVEKLMEKESEGDKEIERLQTVPGVGPKISFVFVAHVAAERFENGSQVSNYIGLVPRVYMSGETVRYGRITKRGNGFLRALLVQGSWALIRSKAGGSLKERYEYMTKEKGISKKKAIVAIARRLAELLYALMRDGTSYEVRKFKLGSEEGKKFKLGEGKKLAKIA

SEQ ID NO: 23839 - DNA, 603 bp, Unknown
  Obtained from environmental sample
  misc_feature (1)..(603): n is a, c, g, or t
ttgaacactgacaggcgggtcttgcgcnccatgaattacccggaatcaaaatgcctggattttgcaaacgcaggtagaggctgggcaaaatnggaaaagccttccccctggggacctgttacctggctaacggtaaacctgcagggccgggaatttatgaaagccattgactgcccgtttatggtgtttgacgtatttgaatatgaaattaataacccggatcccaatgcggatgaactgcctgtcgaaaatcccattattctggtggatttccacgccgagtcaacccgcgaaaaggaatcccttgcctattaccttgacggacgcgtcagccttattgccggaacccacacccacatacaaaccgccgacgaaaggctcctccccaaaggcagcgcctacatcaccgatctgggtatgaccggaaccctggacggaattatcggcatggacaccaaaatatgccttgaccgcgcccgaaaccaggtactctaccgcatggaagtcgcgggggcgtctcaggaaggaagaacggcggtacagggtattatcgcggaaattgacgcggaaagccggaaagcgttgtcgataagacgactataa

SEQ ID NO: 23840 - protein, 200 aa, Unknown
  Obtained from environmental sample
  misc_feature (1)..(200): Xaa is any amino acid
MNTDRRVLRXMNYPESKCLDFANAGRGWAKXEKPSPWGPVTWLTVNLQGREFMKAIDCPFMVFDVFEYEINNPDPNADELPVENPIILVDFHAESTREKESLAYYLDGRVSLIAGTHTHIQTADERLLPKGSAYITDLGMTGTLDGIIGMDTKICLDRARNQVLYRMEVAGASQEGRTAVQGIIAEIDAESRKALSIRRL

SEQ ID NO: 23841 - DNA, 1152 bp, Unknown
  Obtained from environmental sample
  misc_feature (1)..(1152): n is a, c, g, or t
atgagcagcggaagttcttatacacagataaagggttattttattcatgcgattatgatttttcttggacttttggcggtagtacctatttattttttgttgcttaacgctacccgctctactgaacaaataaatacagggtttgttattattccgcttaaagactcgtttttttcgtcttccaaagatataatttccggttggaattccaatgaggaaagcggtaccgtaaaatatcttgacttggttatgggaaaaacgttaaaagaggaagttaacaaaaaaacaggaaaaagtgatacaatcgcggttaagaaatttacggaaaacacaacgccgcgtctttcaattttagacgatgaagatcaagtgatcgcgaattttaatcttgaaaataacactgtaattcatgttaaaaacggacaaagggtaaaaaaaggcgagactcttgccacgcataataaaccgtcgaatgttacttataactggggcatcttaaccggaagaggctttcaaatttttcaagggtttggaaacagcgcgtttatagccatttgtactacggtattaggcatttatttttcggcaatgactgcttatggtttacatgtctataggtttaaaggaagactggcgttatggactgttatattggttataataatgcttcccggtactctttccattatcggtttttatcaattcatggcagtgttaaaactccgtgacagttatattccccttattattccgagtatgnccgcggcaggaacggtgttgtttctcaggcagtatatgatgtccgccatttccatcgaacttattgacgcagcgcgaattgaaggcgcgggtgagtaccgtatatttaattctatcagccttccggttatacttccggcgcttgcggcccagtcgatttttacttttgtaggttcgtggaataactttattacaccgtttatactgctttccagcgagaaaaaatatactttacccatgcttgttcaatctctgcgaggtaatatttaccgtgccgaagttggcgcgatttatctgggggttgccatttcattgatacctattatattattttatgctttcatgtcgcggtttatcatttccggtatttctatgggcggcctgaaggaatag

SEQ ID NO: 23842 - protein, 383 aa, Unknown
  Obtained from environmental sample
  DOMAIN (173)...(378): Binding-protein-dependent transport system inner membrane component
  misc_feature (1)..(383): Xaa is any amino acid
MSSGSSYTQIKGYFIHAIMIFLGLLAVVPIYFLLLNATRSTEQINTGFVIIPLKDSFFSSSKDIISGWNSNEESGTVKYLDLVMGKTLKEEVNKKTGKSDTIAVKKFTENTTPRLSILDDEDQVIANFNLENNTVIHVKNGQRVKKGETLATHNKPSNVTYNWGILTGRGFQIFQGFGNSAFIAICTTVLGIYFSAMTAYGLHVYRFKGRLALWTVILVIIMLPGTLSIIGFYQFMAVLKLRDSYIPLIIPSMXAAGTVLFLRQYMMSAISIELIDAARIEGAGEYRIFNSISLPVILPALAAQSIFTFVGSWNNFITPFILLSSEKKYTLPMLVQSLRGNIYRAEVGAIYLGVAISLIPIILFYAFMSRFIISGISMGGLKE

SEQ ID NO: 23843 - DNA, 804 bp, Unknown
  Obtained from environmental sample
  misc_feature (1)..(804): n is a, c, g, or t
atgcttgagcatttggaagaacatttgataaaagccgatgttggagtggaagcagcatttttattaaccgatgctttgagagaacacgggcttggaaaaagtttaacgcaaaacgaaataaattcaattttgcgaaacgaagcacagcgtttgctgatagaccctcccgaactcaaatgggaaaataaaccgcacgttgttttgattataggcgtgaatggagccggcaaaaccaccaccattggcaaacttgctcaccgcttaaagcaagagggaaaatccgttttgctagccgcaggcgataccttcagagcagcagccattgaacaactggaaacttgggcgcagcgttccggtgcagactttgtgcggcaccaagaaaactccgacccaagcgcagtagcctacgatgcctgcaaagccgccattgcaagggagagcgatattgtgtttatagataccgctggaaggttgcacaacaaagagcatttaatggaggaactgcacaaaactgtacgagttgtgaaaaaaataaatgaaaacttcccgcacgatatttggcttgttatagatggaaattctggacagaatgttattaagcaggttcaaacctttcaccaaaattttaagctcaccggtttgatagtcacaaaattagacggcaccgcaaaaggcggttctgtactttccatagcgagtgaactcaaaattccgattatttggattggagttggagaaaaaattgagcagcttgttccctttgacaaagcagaatatatcaatggtttatttgaggagggataa

SEQ ID NO: 23844 - protein, 267 aa, Unknown
  Obtained from environmental sample
  DOMAIN (63)...(265): SRP54-type protein, GTPase domain
  misc_feature (1)..(267): Xaa is any amino acid
MLEHLEEHLIKADVGVEAAFLLTDALREHGLGKSLTQNEINSILRNEAQRLLIDPPELKWENKPHVVLIIGVNGAGKTTTIGKLAHRLKQEGKSVLLAAGDTFRAAAIEQLETWAQRSGADFVRHQENSDPSAVAYDACKAAIARESDIVFIDTAGRLHNKEHLMEELHKTVRVVKKINENFPHDIWLVIDGNSGQNVIKQVQTFHQNFKLTGLIVTKLDGTAKGGSVLSIASELKIPIIWIGVGEKIEQLVPFDKAEYINGLFEEG

SEQ ID NO: 23845 - DNA, 774 bp, Unknown
  Obtained from environmental sample
  misc_feature (1)..(774): n is a, c, g, or t
atgaaaaccattgttgttaaaataggtggctcgctggctatagatgatagcaaattactggactttgctcgtgcttcagcagaaatgtctaaaagttgcaaattgattattgttcacggtggcggcaaagatataaatgcaaacctcgccttgctaaacgaagaaccaaaatttttaaacgggctaagggtaacaactcctgcgataatggatatggtggagatgactttgagcggcaaggttggcaaaaaacttgttagaatgttgctaacagagggtgcaaacgcagcaggaatttctggtgtggatgcaaaactccttgaagctaaaaaattggaaggcaaaggagatttgggagcagttggcgatattttcagcgtgaatacaaaaattttggaagttcttatggaagcaggcataactcccgttgtttctcctgtgtcttatggcgatggaatttcttacaatgtgaatgcagatacagcagcatctgaaattgcagttgctttgaaagcggattgttttattttaataagcgatataagcggagttttagacggagacaagaaaataattccgcatttgaataaagaacttgcaaatgaactgattaaaagcgaagttatatccggcggtatgataccaaaagttcagggtgctttggaatccatagaaaggggattgaagtccattcacattgtggggtgggaaggtgcggaggcattcaaaaagcaaattgaagagacgactaacagtgggactatttatcgttaa

SEQ ID NO: 23846 - protein, 257 aa, Unknown
  Obtained from environmental sample
  DOMAIN (2)...(235): Amino acid kinase family
  misc_feature (1)..(257): Xaa is any amino acid
MKTIVVKIGGSLAIDDSKLLDFARASAEMSKSCKLIIVHGGGKDINANLALLNEEPKFLNGLRVTTPAIMDMVEMTLSGKVGKKLVRMLLTEGANAAGISGVDAKLLEAKKLEGKGDLGAVGDIFSVNTKILEVLMEAGITPVVSPVSYGDGISYNVNADTAASEIAVALKADCFILISDISGVLDGDKKIIPHLNKELANELIKSEVISGGMIPKVQGALESIERGLKSIHIVGWEGAEAFKKQIEETTNSGTIYR

SEQ ID NO: 23847 - DNA, 930 bp, Unknown
  Obtained from environmental sample
  misc_feature (1)..(930): n is a, c, g, or t
atggagacaaaagtttttctgggtactaagcctaaaggcattgagcgcggcaaggatgggcgccttgtgaataatcttgcgccgcagatacctctctctatgccagtgatgttttctgctatgagctatggctcaataagttataacgctcacgaaagccttgcacgtgccgctgaggaactcggtattttgtataatactggcgagggtggcttgcacgaggatttctatcgctatggaaagaacactattgtgcaagttgcttcgggtcgctttggagttcatccagattacttgaacagcggtatggcaatagagattaaaatggggcagggagcaaaacccggtattggcggacatttgcccggtgctaaaatcgttggcgatgtttcgcgtacaagaatgattcctgagaggagtgatgctatatctcctgcgccgcatcacgatatttattcaatagaagatttgaggcagctcgttttttcgctcaaagaagcgactaactacacaaagccggtaattgtaaaaatagctgcggttcataatgtttctgctattgctagcggcattgcgagaagtggagcggatatcatcgctatagatggttttcgtggcggaacgggagccgcccccacgcgcatacgcgaccacgttggtattcccattgagcttgcgttggctggcgttgacaagcgtcttagagacgagggcattcgcgacaatgtttctatagttgttggagggagcattcgttccagcgcggatattgtcaaggctgttgcattgggtgcggactgcgtatatgttggtacagcggcgttgcttgcacttggatgccatctttgcagaagctgccacggcggtaaatgcaactggggcattgctacacaggtgccagagcttgtgaaacggctgaatcctaaatag

SEQ ID NO: 23848 - protein, 309 aa, Unknown
  Obtained from environmental sample
  DOMAIN (1)...(309): Conserved region in glutamate synthase
  misc_feature (1)..(309): Xaa is any amino acid
METKVFLGTKPKGIERGKDGRLVNNLAPQIPLSMPVMFSAMSYGSISYNAHESLARAAEELGILYNTGEGGLHEDFYRYGKNTIVQVASGRFGVHPDYLNSGMAIEIKMGQGAKPGIGGHLPGAKIVGDVSRTRMIPERSDAISPAPHHDIYSIEDLRQLVFSLKEATNYTKPVIVKIAAVHNVSAIASGIARSGADIIAIDGFRGGTGAAPTRIRDHVGIPIELALAGVDKRLRDEGIRDNVSIVVGGSIRSSADIVKAVALGADCVYVGTAALLALGCHLCRSCHGGKCNWGIATQVPELVKRLNPK

SEQ ID NO: 23849 - DNA, 1026 bp, Unknown
  Obtained from environmental sample
  misc_feature (1)..(1026): n is a, c, g, or t
atgataaccgttactgatctcagccttggctttggcgagcgaagtctttttaaagatgtaaacctgaaattcacacccggcaactgctatggtatcatcggagccaacggcgctggcaagtctactttcctgaaaatccttgcgggggaaacagaacatgacaaaggcgaagtttccattagcaagggagaaagaattgccgtgctgaagcaggatcattttgcctatgacaacaactccgtacttgaaacggtgataatgggcttcgataagctctacaaaattcaaaaagaaagggaagagatctacgccaaagaaaatttctccgaagcggacggactaagggcaagcgagcttgaggcggactttgctgaacttggcggctgggaagccgaagcgcaggcgggccagctactttcgggcctgggtcttgacgaaggggatcacgggaagctcatggcagagctggacgaaaaccggaaggttcgcgtgcttttggcccaggctttgtttggcaaccccgagatactccttttggacgagccgacaaacggcctcgatcttgaatcaatctcctggcttgaagaatttctgatggatttcccaaacacggtaatcgtggtttcgcatgatcgccattttttaaacgcggtgtgcacccatatctgcgatattgattttgggaggataaccctctattcgggaaattacgatttctggtaccagatgagccagatgctccaaaggcaggcaagggatcagcaaaagaagaacgaggaaaaagcaagggagcttcgggaatttatccagaggtttgccagcaacgccagcaagagcaggcaggctacaagccggaaaaaagtcttggaaaaactcgacctggaaaatgtgcatgtaacaagccggaaatttccttacgccggttttaagccgggcagggaaatcggcaacaacgtgcttcgcatcgaaaaactctgctacaattttgaaggagtgccggtcttaaaagacttcagcctgacgtaa

SEQ ID NO: 23850 - protein, 341 aa, Unknown
  Obtained from environmental sample
  DOMAIN (27)...(228): ABC transporter
  misc_feature (1)..(341): Xaa is any amino acid
MITVTDLSLGFGERSLFKDVNLKFTPGNCYGIIGANGAGKSTFLKILAGETEHDKGEVSISKGERIAVLKQDHFAYDNNSVLETVIMGFDKLYKIQKEREEIYAKENFSEADGLRASELEADFAELGGWEAEAQAGQLLSGLGLDEGDHGKLMAELDENRKVRVLLAQALFGNPEILLLDEPTNGLDLESISWLEEFLMDFPNTVIVVSHDRHFLNAVCTHICDIDFGRITLYSGNYDFWYQMSQMLQRQARDQQKKNEEKARELREFIQRFASNASKSRQATSRKKVLEKLDLENVHVTSRKFPYAGFKPGREIGNNVLRIEKLCYNFEGVPVLKDFSLT

SEQ ID NO: 23851 - DNA, 561 bp, Unknown
  Obtained from environmental sample
  misc_feature (1)..(561): n is a, c, g, or t
atgccttctatgcgcctagctatgtcgtctgcactctgcgcgctctggttggcgagttctttgatttcgtttgccacaacagcaaagcctttgcctgcctcgcctgccgaagccgcttctatagttgcgttcaaagcgagaaggttggttttgtcggctatcttctttatcacatcggtcacctggcctatttccttagccgctatgcctagcttgttcatcgcttcggttgcgtctttggatttgatggtggcttcgcctgctactttgctggcatcgccggcggtgtgggatatctcttttatgcttgcactcatctcttctactgcagccgctaccgtgttcatattggcagacatctgctctgccgcgcctgctacctcgttggcgttcacggaggcttcttcggctgcgcttgccattgcgtttatgttgagtgcaacctgctcaacggcgttcgctacatcgtttatatttgctgaagcttcttcggcaccgcttgccatagtgtttatgttcactgtcatctgctcaactgcgctggctacatcgtttatttga

SEQ ID NO: 23852 - protein, 186 aa, Unknown
  Obtained from environmental sample
  SIGNAL (1)...(25)
  misc_feature (1)..(186): Xaa is any amino acid
MPSMRLAMSSALCALWLASSLISFATTAKPLPASPAEAASIVAFKARRLVLSAIFFITSVTWPISLAAMPSLFIASVASLDLMVASPATLLASPAVWDISFMLALISSTAAATVFILADICSAAPATSLAFTEASSAALAIAFMLSATCSTAFATSFIFAEASSAPLAIVFMFTVICSTALATSFI

SEQ ID NO: 23853 - DNA, 795 bp, Unknown
  Obtained from environmental sample
  misc_feature (1)..(795): n is a, c, g, or t
ttgttaaaatatcttgacactgcggcggattgggcgcagaaacatcaaatctatcttattattgataatcattcgtttcatcctgttaatccgacagacgacaaaatcgataaaatacttgtccctgtatgggaacaaatcgcccgtcattttaagagtcgtgacaaatatgtcatatacgaagtgttaaatgagcctcacggaataacggataaacgctggggtgaaatccaaaagaaaacggtaaaggcgatacgaaaaatcgataaagagcgtccgattatcgtaggcggaacaaattacaattcaatcgccaagttatttcaaattcctgaatataccgataaaaatttaatttacacttttcatttttatgatccgcatgtttttacgcatcagggcgcgacatggaataaaccgtcgcttgatccgctgtcaaatcttaagtttcccgctcctgaaaattttaatccgcaaatccatgaaacctttaagggtacatgggtggaagattccttaaaacagtacgagcatgactcaaaatattctacattgagcgaaacgcttgaaaaggcagtgtctttttccaaggaaagaaacgcccccgtattctgcggcgagttcggcgtatttatgaaacaaagcccgaaggaagatcgtgttaaatggtataagtttattcgggaagagtttgaaaagaaaaacatcccgtggatatgctgggattatttcggcggtttcggggtatttaagacccagttagaggcgctttcctgcggattagctcgccgataa

SEQ ID NO: 23854 - protein, 264 aa, Unknown
  Obtained from environmental sample
  DOMAIN (1)...(248): Cellulase (glycosyl hydrolase family 5)
  misc_feature (1)..(264): Xaa is any amino acid
MLKYLDTAADWAQKHQIYLIIDNHSFHPVNPTDDKIDKILVPVWEQIARHFKSRDKYVIYEVLNEPHGITDKRWGEIQKKTVKAIRKIDKERPIIVGGTNYNSIAKLFQIPEYTDKNLIYTFHFYDPHVFTHQGATWNKPSLDPLSNLKFPAPENFNPQIHETFKGTWVEDSLKQYEHDSKYSTLSETLEKAVSFSKERNAPVFCGEFGVFMKQSPKEDRVKWYKFIREEFEKKNIPWICWDYFGGFGVFKTQLEALSCGLARR

SEQ ID NO: 23855 - DNA, 777 bp, Unknown
  Obtained from environmental sample
  misc_feature (1)..(777): n is a, c, g, or t
ttggtcttggggataaagcccatagccataagccttgacgattattatgtggggacggaccggacgccgagggacgagaaaggagagccggactacgaatgtcttgaggcgatggacattcccctgttaaacgatcatcttctggcgctgtacaggggcgaggaagtgaccatgcccgtttacgattttaagacgggatcccgcctggaccatgggggcaagaagatacgcatggacgaaaaaaggcgcacggcgcttattgtcgagggcattcacgcactcaacgacaaacttacgcctgacattccgcgcgacaccaagtttaaggtttatgtttccgcccttacccagttgaatctggacgaccacaaccgcattcccacaagcgacaaccggctgctgcgcagaatggtgcgcgacaaccagttcaggggcaaagacgcggcggggacaataagaatgtggcctaacgtgcaggccggcgagcgaaagcatatattcccgtatcagaacaccgcggacgcggcgtttaactcagcccttgattacgagctttccgttcttaaatactacgccgacccgttactgcgggcggtaaagcccggccagcgcgaatacgccgaagcctcgcgcctctattctttccttgaaaacttcgcccccatacctccccaactggtgccgggaacgagcatattgagggaatttatcggggatagcgagtttaaatattacgggttatttttctgtcgtccatttcttttgtttcagctataa

SEQ ID NO: 23856 - protein, 258 aa, Unknown
  Obtained from environmental sample
  DOMAIN (2)...(186): Phosphoribulokinase / Uridine kinase family
  misc_feature (1)..(258): Xaa is any amino acid
MVLGIKPIAISLDDYYVGTDRTPRDEKGEPDYECLEAMDIPLLNDHLLALYRGEEVTMPVYDFKTGSRLDHGGKKIRMDEKRRTALIVEGIHALNDKLTPDIPRDTKFKVYVSALTQLNLDDHNRIPTSDNRLLRRMVRDNQFRGKDAAGTIRMWPNVQAGERKHIFPYQNTADAAFNSALDYELSVLKYYADPLLRAVKPGQREYAEASRLYSFLENFAPIPPQLVPGTSILREFIGDSEFKYYGLFFCRPFLLFQL

SEQ ID NO: 23857 - DNA, 456 bp, Unknown
  Obtained from environmental sample
  misc_feature (1)..(456): n is a, c, g, or t
gtgaaacggtttaagttcggccttgaaaaagtattgaaactgcggcagcacaatgagcatgaggccagagttgaactgggcagggccattggcgttcttgccggcattgaaaatgaaatcaagcgaaacgccgctgtccgaagcgaagccgccatggaacgctttgccggaataagcacggttgacggttcaggtaatggttatggaggctctctttccatgcacgcatgggacgcttacataaaccgcctggaacaggaagctgaccgcctgatggaagaggccgtccgcgcggaaacggtagttgaagaaaaacgcggcctctacattgaggcttcccgcgagcttaaggtaatggaaaacctgaaagaaaggcgcgaaaaagaacaccggaaagagatgtttatagctgaaacaaaagaaatggacgacagaaaaataacccgtaatatttaa

SEQ ID NO: 23858 - protein, 151 aa, Unknown
  Obtained from environmental sample
  misc_feature (1)..(151): Xaa is any amino acid
MKRFKFGLEKVLKLRQHNEHEARVELGRAIGVLAGIENEIKRNAAVRSEAAMERFAGISTVDGSGNGYGGSLSMHAWDAYINRLEQEADRLMEEAVRAETVVEEKRGLYIEASRELKVMENLKERREKEHRKEMFIAETKEMDDRKITRNI

SEQ ID NO: 23859 - DNA, 519 bp, Unknown
  Obtained from environmental sample
  misc_feature (1)..(519): n is a, c, g, or t
atggcgtcaggaagcagccaggcatttattgccaaaaacagggcgccccgggtccagatcgattacgatgtggaggtttacggggcgcagaaaaaggtaaatattccctttgtcatgggggttatatcggatctttcgggaaaatccgaggaaccgcttcccaaagttgacgaccgtaaaccggcggaatttacatcggataatttcaatgagcgcctgaaggccataaaaccccgcgtcgcctttacggttcccaatacccttagcggagaaggaaatatcgccgtggacatgacctttcagaacatggacgatttttcccccgccgcgatagcttcaaatgttcaaggcttaaaacaactgatggaatcccgtcagcagttggcgaatcttctttcctacatggacggaaaggccggggctgaggatctcttgaacaaggttctttcggatccggccctgctaaaggctctggcggcaaaagccaaagacgcggggcaggagggggcaaatggctaa

SEQ ID NO: 23860 - protein, 172 aa, Unknown
  Obtained from environmental sample
  DOMAIN (7)...(165): Protein of unknown function (DUF770)
  misc_feature (1)..(172): Xaa is any amino acid
MASGSSQAFIAKNRAPRVQIDYDVEVYGAQKKVNIPFVMGVISDLSGKSEEPLPKVDDRKPAEFTSDNFNERLKAIKPRVAFTVPNTLSGEGNIAVDMTFQNMDDFSPAAIASNVQGLKQLMESRQQLANLLSYMDGKAGAEDLLNKVLSDPALLKALAAKAKDAGQEGANG

SEQ ID NO: 23861 - DNA, 468 bp, Unknown
  Obtained from environmental sample
  misc_feature (1)..(468): n is a, c, g, or t
ttgggcagttccattacaaagggaaccggttcgcctctaaaaattgctttttccatcataaagcctgaaattacgccgaagaaaattcccaatagatacaaactgctcataatcagcacaggatgctgcgggaaaaaagcggcggcaaataaggcgtatataggtacttttgcgctgcaactcataaaaggcgtaagcagtatggtcatttttttatcgcgttcgcttgcaagtgtccttgtcgccataatcgccggaacagaacaaccgaaacccatgagcatcggcacaaaactgcgccctgaaagaccgattttacggagaggcttgtccatcacatacgccacccgcgccatatatcccgaatcttccaacagagacaggaagaagaacaatacaataattatgggaataaaactcaagaccgctccaacaccagcaaatatgccgttaatcaacagcgaatga

SEQ ID NO: 23862 - protein, 155 aa, Unknown
  Obtained from environmental sample
  misc_feature (1)..(155): Xaa is any amino acid
MGSSITKGTGSPLKIAFSIIKPEITPKKIPNRYKLLIISTGCCGKKAAANKAYIGTFALQLIKGVSSMVIFLSRSLASVLVAIIAGTEQPKPMSIGTKLRPERPILRRGLSITYATRAIYPESSNRDRKKNNTIIMGIKLKTAPTPANMPLINSE

SEQ ID NO: 23863 - DNA, 384 bp, Unknown
  Obtained from environmental sample
  misc_feature (1)..(384): n is a, c, g, or t
atggccgaggagggattcttggcgcaaatccaacattccatcatcggcaaattccacgaaaagatcacaaaaatctatgtagagatggcatggctgtcgggaaaaatccccatagacgcgcccccagaggatttttaccgcccaatttggtggccgcgatcttgggattgggtcgatccccaaaaagacgtaaacgcagacgtgatagcccttgacaactgccttgcgacataccaggaaatccttggcaagcgcggaattgactggcgcgaacacatgaagcagcgcaagcgggaagaggattttgcagccgaaattgacctagtgttatccgccaaaaccaaacaagcccttttgcaaccaccccccggaggccccaagtga

SEQ ID NO: 23864 - protein, 127 aa, Unknown
  Obtained from environmental sample
  misc_feature (1)..(127): Xaa is any amino acid
MAEEGFLAQIQHSIIGKFHEKITKIYVEMAWLSGKIPIDAPPEDFYRPIWWPRSWDWVDPQKDVNADVIALDNCLATYQEILGKRGIDWREHMKQRKREEDFAAEIDLVLSAKTKQALLQPPPGGPK

SEQ ID NO: 23865 - DNA, 660 bp, Unknown
  Obtained from environmental sample
  misc_feature (1)..(660): n is a, c, g, or t
ttgggcattgtcaccgcctcgccaaagaccgcaaaaagcatgatgaaatacacgcgccaaatggtgcttcagaatgtcgaagcctttgaaccgatactccagaaagatttgctggaaaatgatgccctggtcattgacagcgccgccctgatcgggacggggagcgactaccagccacgcggcctactggaaaccccaggcatcggtgccgtgtctcttggcgcaaatggggcccgcccgacttacgccaacctgacaaagctgaaaaccctgatcaaaaaagccaatgcccttggcctcggcgcagccggttatctgaccacgcccgaaatagaagatttgctccagaacacagcgaaactcagcaacaccatcgcccaagccatttgggaggatgacaaagttgcgggttataccgccatcgccgcaaaccaagtgccagacaacctccacaaaggcaccgccgagcagtgccacgccatcatctttggcatttggtcagaattgttcattttggagtggggagccctcgaaatggttgttgacccctacacagccgcaggccgcgatgtagtgaggatcaccacctcgcatctagtagatgtatttgttcgccgccccaaggcattcgccgccatcaaagacgctttagccatctaa

SEQ ID NO: 23866 - protein, 219 aa, Unknown
  Obtained from environmental sample
  misc_feature (1)..(219): Xaa is any amino acid
MGIVTASPKTAKSMMKYTRQMVLQNVEAFEPILQKDLLENDALVIDSAALIGTGSDYQPRGLLETPGIGAVSLGANGARPTYANLTKLKTLIKKANALGLGAAGYLTTPEIEDLLQNTAKLSNTIAQAIWEDDKVAGYTAIAANQVPDNLHKGTAEQCHAIIFGIWSELFILEWGALEMVVDPYTAAGRDVVRITTSHLVDVFVRRPKAFAAIKDALAI

SEQ ID NO: 23867 - DNA, 669 bp, Unknown
  Obtained from environmental sample
  misc_feature (1)..(669): n is a, c, g, or t
atggttagcgagaaaattatggaagttatatcgcttttgcccgaggcgacggttgagacagtgtacatgacttttgtgtcaacatttttcgcttgcctccttggttttcccttaggcgcatacctttacatcacgtccccctccggccttactccccgccccgttttatataacgtgctttcccgccttgtgaacctgttccgctcgcttccctttatcatactgatgatcctgcttatccccctgacgcggctgattataaaaacgagcataggccccacggcggtaatcatccccctttcaatagccgccgcgccctttgtcgcgcgcgtagccgaatccgccctgtccgaggttgacaagggcgtgcttaccgccgcgcgggcgatgggctcgacaaattttcagatcgtctacaaggtgctgatcccggaagccatgccagcgctggtttccggcctcgccctgaccatcatcaatcttataggctattcggccatggccggggccataggcggcaggggcctcggcgacctcgccatacgctacggctattaccgtttcaggacagacgtaacaatcggcgcggttattgtcataatgatactggtggaagcggtgcagattataggcacggctataagtcgaagtcttcaggcgaaacgctga

SEQ ID NO: 23868 - protein, 222 aa, Unknown
  Obtained from environmental sample
  DOMAIN (17)...(220): Binding-protein-dependent transport system inner membrane component
  misc_feature (1)..(222): Xaa is any amino acid
MVSEKIMEVISLLPEATVETVYMTFVSTFFACLLGFPLGAYLYITSPSGLTPRPVLYNVLSRLVNLFRSLPFIILMILLIPLTRLIIKTSIGPTAVIIPLSIAAAPFVARVAESALSEVDKGVLTAARAMGSTNFQIVYKVLIPEAMPALVSGLALTIINLIGYSAMAGAIGGRGLGDLAIRYGYYRFRTDVTIGAVIVIMILVEAVQIIGTAISRSLQAKR

SEQ ID NO: 23869 - DNA, 684 bp, Unknown
  Obtained from environmental sample
  misc_feature (1)..(684): n is a, c, g, or t
gtgtccagccaccttatcaaagacgagataaaggaactccttatggagcaggacgcctttgaaggggtgctgttcggctattcggcttataacttccagacaaggcaggccgcttttgacgcgatacgcaaaaacaaacttggcgctgtggtgatgaatcccttgggcggcggcgttatcccacagcaccctgaaaaatttggctatttgcgccgctcagatgaaagcgtcgtaacggcggctttgcgcttcctctgggatcacccggatataacttccacccttgtaggatttgaaaccgttgaacaggtgaaagaagcccttgccgcgatggaaacttacaagccccggacagaagcggaactggaagaggtaaagtcccgcgccctttcttcctttgagggtatatgtacaggctgcgcctattgtgacgactgcccccaggacattcccatccccatgtttatggacgcctacaaccataagatactcaataaggaaaaacctggcgatcatataggagaccggctgcgctggcattggaacctggagcgttcagtcgcgggcaattgcaccgcctgcggccagtgcgagaacgcctgcacgcagcacctgaacattattgacaggctgaaagaaatagcgtcgcctttggcgcggccagaggcgactacagggacatag

SEQ ID NO: 23870 - protein, 227 aa, Unknown
  Obtained from environmental sample
  misc_feature (1)..(227): Xaa is any amino acid
MSSHLIKDEIKELLMEQDAFEGVLFGYSAYNFQTRQAAFDAIRKNKLGAVVMNPLGGGVIPQHPEKFGYLRRSDESVVTAALRFLWDHPDITSTLVGFETVEQVKEALAAMETYKPRTEAELEEVKSRALSSFEGICTGCAYCDDCPQDIPIPMFMDAYNHKILNKEKPGDHIGDRLRWHWNLERSVAGNCTACGQCENACTQHLNIIDRLKEIASPLARPEATTGT

SEQ ID NO: 23871 - DNA, 927 bp, Unknown
  Obtained from environmental sample
  misc_feature (1)..(927): n is a, c, g, or t
atgcggaaaagttggctatatcgggatgagcctgttcattatgtttttcttcgcaaggttaatcccacaatcgacttttccgagtttaagacaagaattagctcaggtgaaataaaacgggtagaattaacagattcctattttacaggatatacaaccgttacccctcagagggaaatgggccgggtactccgcaatatggcggcacaggatccggtctaccgcacggttcccatcaatgatcccgatataatcaaactgatggacgaaaaaggcgtggcctattacgcggatgcgcgggaaggcagcgccatactcaacatcatattcagctgggtgctgccaatcgcttttttcctgcttcttttccgtttcgtgatgaagcggctgggtactatgggcggcaatgttctttccgtggggcagaaccgcgcggtgatcgtggcggaaggggatattgccacgcggtttaacgatgtcgccggagttgacgaagcaaaggaagaactggtagaagtggtggactttttgaagaacccgaagaagtacaccgatattggcggcaagataccgaaaggcgttctgctggtagggccaccgggaacaggcaagaccctgctggcgcgcgctgttgccggagaagccggcgttgtgtttttccgcatgagcggcgcggactttgtggagatgtttgttggcgtcggcgcggcaagggtgagggatctgttcaagcaggcccgcgacaaggctccatgcattatctttattgatgagttagacgcaatcggcaaaagccggatcaacaatgtcgccgggggcaacgacgagcgcgagcagacactgaaccagcttttggtagagatggacggctttgacaacacgggcgggctatcatcttgcggccacaaaccgccccgatgttcttga

SEQ ID NO: 23872 - protein, 308 aa, Unknown
  Obtained from environmental sample
  DOMAIN (193)...(308): ATPase family associated with various cellular activities (AAA)
  misc_feature (1)..(308): Xaa is any amino acid
MRKSWLYRDEPVHYVFLRKVNPTIDFSEFKTRISSGEIKRVELTDSYFTGYTTVTPQREMGRVLRNMAAQDPVYRTVPINDPDIIKLMDEKGVAYYADAREGSAILNIIFSWVLPIAFFLLLFRFVMKRLGTMGGNVLSVGQNRAVIVAEGDIATRFNDVAGVDEAKEELVEVVDFLKNPKKYTDIGGKIPKGVLLVGPPGTGKTLLARAVAGEAGVVFFRMSGADFVEMFVGVGAARVRDLFKQARDKAPCIIFIDELDAIGKSRINNVAGGNDEREQTLNQLLVEMDGFDNTGGLSSCGHKPPRCS

SEQ ID NO: 23873 - DNA, 738 bp, Unknown
  Obtained from environmental sample
  misc_feature (1)..(738): n is a, c, g, or t
ttgaatgaatctttaaaatcgcttccctgccctttacatcgggtttgtcaacaagcacctgcctgtcgaaacggcccgggcgcagaagcgcgggatcaagaacatcggggcggtttgtggccgcaagatgatagcccgcccgtgttgtcaaagccgtccatctctaccaaaagctggttcagtgtctgctcgcgctcgtcgttgcccccggcgacattgttgatccggcttttgccgattgcgtctaactcatcaataaagataatgcatggagccttgtcgcgggcctgcttgaacagatccctcacccttgccgcgccgacgccaacaaacatctccacaaagtccgcgccgctcatgcggaaaaacacaacgccggcttctccggcaacagcgcgcgccagcagggtcttgcctgttcccggtggccctaccagcagaacgcctttcggtatcttgccgccaatatcggtgtacttcttcgggttcttcaaaaagtccaccacttctaccagttcttcctttgcttcgtcaactccggcgacatcgttaaaccgcgtggcaatatccccttccgccacgatcaccgcgcggttctgccccacggaaagaacattgccgcccatagtacccagccgcttcatcacgaaacggaaaagaagcaggaaaaaagcgattggcagcacccagctgaatatgatgttgagtatggcgctgccttcccgcgcatccgcgtaa

SEQ ID NO: 23874 - protein, 245 aa, Unknown
  Obtained from environmental sample
  misc_feature (1)..(245): Xaa is any amino acid
MNESLKSLPCPLHRVCQQAPACRNGPGAEARDQEHRGGLWPQDDSPPVLSKPSISTKSWFSVCSRSSLPPATLLIRLLPIASNSSIKIMHGALSRACLNRSLTLAAPTPTNISTKSAPLMRKNTTPASPATARASRVLPVPGGPTSRTPFGILPPISVYFFGFFKKSTTSTSSSFASSTPATSLNRVAISPSATITARFCPTERTLPPIVPSRFITKRKRSRKKAIGSTQLNMMLSMALPSRASA

SEQ ID NO: 23875 - DNA, 897 bp, Unknown
  Obtained from environmental sample
  misc_feature (1)..(897): n is a, c, g, or t
ttgacaacacgggcgggctatcatcttgcggccacaaaccgccccgatgttcttgatcccgcgcttctgcgcccgggccgtttcgacaggcaggtgcttgttgacaaacccgatgtaaagggcagggaagcgattttaaagattcattcaaaaaatattacgggtatctccaatgttgatcttgaagttgtcgccagaattacatccggtttttcaggagccgaccttgccaacattgtaaacgaagccgcgcttttggctgtcagagcggggcggaaaatggtggttcagcttgattttgacgaagctatcgaaaaaaccgtagccggcctgcagaaaaaaacaagagttatcaaggaagaagaaagaaggcttaccgcctaccacgaagcgggtcatgccatgatagctgcctttacacctaacgccgatcctgttcagaaaatttcgattattccgcgcggctttgcgcttggttacacgatgcagcttcccatggaagaccgctatacggttacaaagtcggatcttttgggaaggatagacattcttcttggagggcgcattgccgaagaaatgatttccggcgaatattccacgggagcgtcaaacgatcttacaaaagcgaccgacatcgcccgaaagatgattaccgattacggcatgagcgaccgtttccgcaatgtcgcgcttacttcgcgcggtatgagcatgaccgggcaggaaaggcatgagccgtcttttcagcgcgaatacgcggaaagcacccagcagtatattgatgaggaaattgcgcggattattgatattgaatactcaaaggcaaggaagatactgacagaaagacgcgatattttggacagtgtttccgccgcgcttctgaaaaagaaaccctga

SEQ ID NO: 23876 - protein, 298 aa, Unknown
  Obtained from environmental sample
  DOMAIN (1)...(89): ATPase family associated with various cellular activities (AAA)
  misc_feature (1)..(298): Xaa is any amino acid
MTTRAGYHLAATNRPDVLDPALLRPGRFDRQVLVDKPDVKGREAILKIHSKNITGISNVDLEVVARITSGFSGADLANIVNEAALLAVRAGRKMVVQLDFDEAIEKTVAGLQKKTRVIKEEERRLTAYHEAGHAMIAAFTPNADPVQKISIIPRGFALGYTMQLPMEDRYTVTKSDLLGRIDILLGGRIAEEMISGEYSTGASNDLTKATDIARKMITDYGMSDRFRNVALTSRGMSMTGQERHEPSFQREYAESTQQYIDEEIARIIDIEYSKARKILTERRDILDSVSAALLKKKP

SEQ ID NO: 23877 - DNA, 627 bp, Unknown
  Obtained from environmental sample
  misc_feature (1)..(627): n is a, c, g, or t
atgacccggaatcctgttattacccatcccgacctttcgcttagcgacgcgcgcttgttaatggacagggaaaaagtcggtcatataccggtactcaacaagaataaagagcttgtgggccttatcacaagagtcgatctattgaaggccggcccgtcgcccgcgaccacccttgacgtgtacgagatcagctatctgctttcaaaactcacggtggacaaggtgatggaaaaaaaggtaataaccgttcaggaaaacgaagttgtggaagaggcggcgagaatcatggcggacaacgggattggctgcctgcccgtgttgaacggctcccttttaaccggtattattacagatacggatatattccatttttttattaacgcttacggagcgcgccacaagggtattcgcgtaacaattaatttcagggaagggcccggccagcttgcggacttcgccggcgcgttagctaaaaagggcggcaatatcgtcgcctttgtcacctccgaaggtgatgatgtcgcccaccggcgggcgaccagcaaaattaccggcatcagccgcgccgccgtagaggaagccatcggctctttggacggcgtggaaattgaggatatacgggaataa

SEQ ID NO: 23878 - protein, 208 aa, Unknown
  Obtained from environmental sample
  DOMAIN (1)...(126): CBS domain pair
  misc_feature (1)..(208): Xaa is any amino acid
MTRNPVITHPDLSLSDARLLMDREKVGHIPVLNKNKELVGLITRVDLLKAGPSPATTLDVYEISYLLSKLTVDKVMEKKVITVQENEVVEEAARIMADNGIGCLPVLNGSLLTGIITDTDIFHFFINAYGARHKGIRVTINFREGPGQLADFAGALAKKGGNIVAFVTSEGDDVAHRRATSKITGISRAAVEEAIGSLDGVEIEDIRE

SEQ ID NO: 23879 - DNA, 453 bp, Unknown
  Obtained from environmental sample
  misc_feature (1)..(453): n is a, c, g, or t
atggccgagcggcgaggagccgatattatcgcgggccttgaattgggggccgatgattatgttgtcaagccgtacagcccccgcgtattggcggccaggatacgggcgggcctcaggcggaaagaggccgtttcatcacagggcgaaactgcccaaaagaaactattccggcatggcaaaatcagtctggatattgatcggcatacggttcttctggaagaaaagcccctcgatcttttccccactgaattcgcgattcttgtccagtttatgaacaaccccgatattgttttttcccgccaaaaacttatcactgctatacgcggagatgattatcccgtaaccgatcgttccattgacgtgcagataatgggactaagaaaaaaattgggtgactcaggagatatgatagaaaccatccggggcatcggctaccggtttaaaacagaatga

SEQ ID NO: 23880 - protein, 150 aa, Unknown
  Obtained from environmental sample
  DOMAIN (74)...(147): Transcriptional regulatory protein, C terminal
  misc_feature (1)..(150): Xaa is any amino acid
MAERRGADIIAGLELGADDYVVKPYSPRVLAARIRAGLRRKEAVSSQGETAQKKLFRHGKISLDIDRHTVLLEEKPLDLFPTEFAILVQFMNNPDIVFSRQKLITAIRGDDYPVTDRSIDVQIMGLRKKLGDSGDMIETIRGIGYRFKTE

SEQ ID NO: 23881 - DNA, 921 bp, Unknown
  Obtained from environmental sample
  misc_feature (1)..(921): n is a, c, g, or t
atgaaaatcagcgcgtactatctgccgaagagtttatcctacgctctgcccatatccctgttattcgcctcggcctataccctgggggatctctacgcgcgtaacgagcttacttcaattttttcatcggggatccccttttggcggttcagcatgccgttagttgtaattgggcttctggcttcggttttttcgtttttctttgatgacaatctggttatcccgaccttgcgggtaaagaacgagctttcgcggcgtttcctgcgccagacaaccgccgagaacaattcagacattgtaatcaaggcaagaaacggagagcttatatattcgattgattattatgattataacgcgaaaatccttaacggggtaagtattgtggaacaggactcttcgggtaattttatttcactgatccgcgcgcaaagggcgacatggacaggcgagtattgggattttgtcaatccggtgatttattattgggaggaaagctttttgcgggtcaggcaccttccctctacggacgcgtatcgcgcggaccctgacatcttcaggcgcaatgccgtcaaaccggaagaacttcccgccatgcaggaaaaattgctgatagaggatcttaaaggcgcggggcttccgtacatggaggcccaggctgattattaccaccggttttcatactctacaatatcatttatagtaatggttctttcaatatcaatgggcggcagattcagaaaaaacatccttttaatgagccttttggcaagcctttcagcggcggttgttttttacgtgatggaaatgatctccatgatgatggccaagctgggctatatccctacgctgattggcgcgtggtttccggtcgtgatctttatcgcgattggcgcgatgctcctgatatgggcgaaaacttaa

SEQ ID NO: 23882 - protein, 306 aa, Unknown
  Obtained from environmental sample
  SIGNAL (1)...(25)
  DOMAIN (1)...(303): Predicted permease YjgP/YjgQ family
  misc_feature (1)..(306): Xaa is any amino acid
MKISAYYLPKSLSYALPISLLFASAYTLGDLYARNELTSIFSSGIPFWRFSMPLVVIGLLASVFSFFFDDNLVIPTLRVKNELSRRFLRQTTAENNSDIVIKARNGELIYSIDYYDYNAKILNGVSIVEQDSSGNFISLIRAQRATWTGEYWDFVNPVIYYWEESFLRVRHLPSTDAYRADPDIFRRNAVKPEELPAMQEKLLIEDLKGAGLPYMEAQADYYHRFSYSTISFIVMVLSISMGGRFRKNILLMSLLASLSAAVVFYVMEMISMMMAKLGYIPTLIGAWFPVVIFIAIGAMLLIWAKT

SEQ ID NO: 23883 - DNA, 387 bp, Unknown
  Obtained from environmental sample
  misc_feature (1)..(387): n is a, c, g, or t
atgagcaagtattattttcacgataatggaattatgaatgctttaacaaataattttttgcctttggaaaacagaaaagacacaggctcgctttgggaaaattatttggtatctgagcgcagaaaattcaatgagcatcacgggttgaaacccaattcttatttttggagaacgcattcgggaaatgaaattgacttgatagaagaattcaacggcgaactcgttccttttgaatttaagtacaactcagaaaaatttgcccgtggggcaaattcttttgttgaaagctataagtcaaaagatattcgggttgttaataagaataatatgtttgaatggctgggtgaagtgggttttcacaaaagcgaacccaaaatccgcaaataa

SEQ ID NO: 23884 - protein, 128 aa, Unknown
  Obtained from environmental sample
  misc_feature (1)..(128): Xaa is any amino acid
MSKYYFHDNGIMNALTNNFLPLENRKDTGSLWENYLVSERRKFNEHHGLKPNSYFWRTHSGNEIDLIEEFNGELVPFEFKYNSEKFARGANSFVESYKSKDIRVVNKNNMFEWLGEVGFHKSEPKIRK

SEQ ID NO: 23885 - DNA, 567 bp, Unknown
  Obtained from environmental sample
  misc_feature (1)..(567): n is a, c, g, or t
ttgctacagcaaaatttcaacactttgccctttattttaattctcaataaatgcgatttaatggaaaatataccaancgagattcaggaatttattgagctaacggataataccattttaacaagcgcggaaagcggcaatggcatagaagaattaaaggaaaaactgtgtggcaaaatttctgtttttagcggtcaaagcggggtgggaaaatcctctttgataaataaacttgtgccaagtgctttgctgaacaccagcgaggttagaaaaaaagacggcaagggtaggcacacaaccgttgcatcttcttatttggatttacctgggggtggtgcagttatagacacgccaggcatccgcgcccttgggattatgaacctgagcacagacgaactagcccgttgctttccggggttctttgaaagcaatgtgtttgactgcaaattcaaagactgcaaacaccaaagcgaaccggattgcgcggttttgaaaagaatatcagaggggcagatttccgaagcgagatataagagttatttgcggattttgggttcgcttttgtga

SEQ ID NO: 23886 - protein, 188 aa, Unknown
  Obtained from environmental sample
  DOMAIN (2)...(185): Protein of unknown function, DUF258
  misc_feature (1)..(188): Xaa is any amino acid
MLQQNFNTLPFILILNKCDLMENIPXEIQEFIELTDNTILTSAESGNGIEELKEKLCGKISVFSGQSGVGKSSLINKLVPSALLNTSEVRKKDGKGRHTTVASSYLDLPGGGAVIDTPGIRALGIMNLSTDELARCFPGFFESNVFDCKFKDCKHQSEPDCAVLKRISEGQISEARYKSYLRILGSLL

SEQ ID NO: 23887 - DNA, 618 bp, Unknown
  Obtained from environmental sample
  misc_feature (1)..(618): n is a, c, g, or t
atggatcagatcggccgaggaatctatcgtgtagaaacctatgaatatcccaaagaggccgtgcgcgaagcaatacataatgcaatagcacacaaggattattcgggtgcaattcctattcaaatcagtgtttataaagataagataatgatttggaattatggacaactgcccgaagattggacaattgaagatttgttaaaaaaacactcttcgcgcccatataaccctgatattgccaacgcatttttccgaattggttacatagaatcgtggggacgcggaatggataaaatgaaaaatcagtgcattgaagccaatatgcctgtccctacactttctgccaaaggacacgatttttggattactttccgtaaagatatttacaatacagtagatttaggattgttgggactgagtgatagacagataaaagcggcgttgtatgtgaaagaaaaaggtaaaattacaaatagcgaatatcaggcattaaattctgtgtctaaaagaactgccacaaacgacctgacagaattggtaaataaatttgctttattaacaaaaattggaacttctggctctaatatttggtatgaaatagatagtgggggtagttaa

SEQ ID NO: 23888 - protein, 205 aa, Unknown
  Obtained from environmental sample
  misc_feature (1)..(205): Xaa is any amino acid
MDQIGRGIYRVETYEYPKEAVREAIHNAIAHKDYSGAIPIQISVYKDKIMIWNYGQLPEDWTIEDLLKKHSSRPYNPDIANAFFRIGYIESWGRGMDKMKNQCIEANMPVPTLSAKGHDFWITFRKDIYNTVDLGLLGLSDRQIKAALYVKEKGKITNSEYQALNSVSKRTATNDLTELVNKFALLTKIGTSGSNIWYEIDSGGS

SEQ ID NO: 23889 - DNA, 417 bp, Unknown
  Obtained from environmental sample
  misc_feature (1)..(417): n is a, c, g, or t
ttgggggctcatgcggtgctgctaatcgctgccctgctggacgcgaaggcccttgccgtttacgtcaaaacagccgccgagttggggctttctgcgttagttgaaatacacagcgaggcggaggcggaacaggcgctggaagcaggggcgcgaattatcggtatcaataaccgcgacttaaaaacctttaaggtggacattggcgttactgcccggattaaaaagctcatacccgccggaattatcaccgttgccgaaagcggcatcaagtcggcggatgacgcgcgggcgatgaaagagattggcgttgacgctgttttaatcggagaaagcctgatgcgttcggcagacaaaaaacagttccttgcggaactgaaaacggcagccagtgaaagttatagtgaaagtttaaattga

SEQ ID NO: 23890 - protein, 138 aa, Unknown
  Obtained from environmental sample
  SIGNAL (1)...(19)
  DOMAIN (1)...(125): Indole-3-glycerol phosphate synthase
  misc_feature (1)..(138): Xaa is any amino acid
MGAHAVLLIAALLDAKALAVYVKTAAELGLSALVEIHSEAEAEQALEAGARIIGINNRDLKTFKVDIGVTARIKKLIPAGIITVAESGIKSADDARAMKEIGVDAVLIGESLMRSADKKQFLAELKTAASESYSESLN

SEQ ID NO: 23891 - DNA, 318 bp, Unknown
  Obtained from environmental sample
  misc_feature (1)..(318): n is a, c, g, or t
ttgaaaattaaaatctgcggcgtttcccgcgaggaagacatcgagtacatcaacgaagcctgtcccgattataccggcttcgtgtttgccgaaagcaggcgaaaagttacgcccgctcaggcggctaaactgcgccggcgtctggccgaaggaatagcggcggttggcgtctttgtgaacgcccaaattgacaagattaccggtctttaccgcgacgggatcatttcacttgtccagcttcacggaacggaagacgacgcgtatatagcgcggcttaaagaagtctgttgcggcgttcgggtaataaaaggttattaa

SEQ ID NO: 23892 - protein, 105 aa, Unknown
  Obtained from environmental sample
  DOMAIN (3)...(105): N-(5'phosphoribosyl)anthranilate (PRA) isomerase
  misc_feature (1)..(105): Xaa is any amino acid
MKIKICGVSREEDIEYINEACPDYTGFVFAESRRKVTPAQAAKLRRRLAEGIAAVGVFVNAQIDKITGLYRDGIISLVQLHGTEDDAYIARLKEVCCGVRVIKGY

SEQ ID NO: 23893 - DNA, 321 bp, Unknown
  Obtained from environmental sample
  misc_feature (1)..(321): n is a, c, g, or t
ttggtatcgctgacagaggcgggcaaaaccatagcgccggacgccaattattaccttgtcgactcaggggcgggcagcggcaaagcttttgactgggatcttttgcgagccggtatgccctgcgcttcgtggctgcaatcgtcgggaaagcagtggtttctggcgggtggcataactcctgaaaatatcgagcgggcaatggagcttaatccgttcgccatcgacgtttccggcggtgccgaaaccgacggtataaaagacagaaataaaatagtacaattaacggcaatggtcaggaaacttaaggaaaaagcagtatga

SEQ ID NO: 23894 - protein, 106 aa, Unknown
  Obtained from environmental sample
  misc_feature (1)..(106): Xaa is any amino acid
MVSLTEAGKTIAPDANYYLVDSGAGSGKAFDWDLLRAGMPCASWLQSSGKQWFLAGGITPENIERAMELNPFAIDVSGGAETDGIKDRNKIVQLTAMVRKLKEKAV

SEQ ID NO: 23895 - DNA, 483 bp, Unknown
  Obtained from environmental sample
  misc_feature (1)..(483): n is a, c, g, or t
atgatcagatcggccgagatacaccaggtcattcaggacgcttccgaggcgattcgattagcccccgccgacagtgataacgaggcggtgacgccgttcacggcggcggcatacggcctccgctccatggcatacgcggaaaaaaggaattttgaccgggcgctcgaggacgcttccacagcaattacaataatgccggatgccgcggagttgtataactcgcgcgcttggatatatacgcatcacatgaaaagggactttgaccgcgccattgaggacgttaacaaagcaatcgaactcgacccgaatatggcggcctattatgacactcgcggctggacatatttgggtaagggcgaatacgacaacgctgaggatgatttttccagagcgctgcagcttgacccggatttggcggaatccaaagacggcttagagaaagttcgtgaggcgcgggcggcaaagccggcggaatccccgtaa

SEQ ID NO: 23896 - protein, 160 aa, Unknown
  Obtained from environmental sample
  DOMAIN (69)...(104): Tetratricopeptide repeat
  misc_feature (1)..(160): Xaa is any amino acid
MIRSAEIHQVIQDASEAIRLAPADSDNEAVTPFTAAAYGLRSMAYAEKRNFDRALEDASTAITIMPDAAELYNSRAWIYTHHMKRDFDRAIEDVNKAIELDPNMAAYYDTRGWTYLGKGEYDNAEDDFSRALQLDPDLAESKDGLEKVREARAAKPAESP

SEQ ID NO: 23897 - DNA, 912 bp, Unknown
  Obtained from environmental sample
  misc_feature (1)..(912): n is a, c, g, or t
gtggatatttcgccttggttccttatctttttctgtattttcttcggcatgatcttcggggacgccgcttacgggcttattctttcacttgtcgccattattggaattattaaaactgcaagaaagggcgtgcctcaggctttgcagatgttattgcttcttggtatttttaacacggcatggggcgtgattacctgcacatggttcggtgttgaagttcaaaaagtgcccaaagaactgcaggatatatcgctgtcgtttttttcaacggcgaaaacagaggaagccatcgtcaaacagaaccttcagattttctgtttctctctcggtcttttgcagttaacgattgcccacatcaaagggtttttcagaaatatcagatctttaaaacttttctcggagcttggttcgatagcgatgctctggggaatgttcaatgttgtattgttccttgttgtaagcaatgccacacgaaaaatacaattaatacctatggaatattcaatttatctccttggcggcggatttttcctgaatttcgtttttgcctcttacaacggaagcattgggaaatctatattggaaagctgtaaaaacttcatttccgtcgtattgggtattaccaacgtattctccgacataatgtcatatatcaggctttgggcggtaggtcttgccggagcgtcaatcgcttcgacggtaaacacgatggccggccccatgctcggcggatttttgatcttcgccggaattatattattggtattcggacacggactgaatttaatacttaacgtgctgtcggtccttgttcacggagtaaggcttaatacactggagttttcatcacatattggtttaacttggtcgggtacggcatacaggccgtttgcaaaaagagaggtcaattaa

SEQ ID NO: 23898 - protein, 303 aa, Unknown
  Obtained from environmental sample
  misc_feature (1)..(303): Xaa is any amino acid
MDISPWFLIFFCIFFGMIFGDAAYGLILSLVAIIGIIKTARKGVPQALQMLLLLGIFNTAWGVITCTWFGVEVQKVPKELQDISLSFFSTAKTEEAIVKQNLQIFCFSLGLLQLTIAHIKGFFRNIRSLKLFSELGSIAMLWGMFNVVLFLVVSNATRKIQLIPMEYSIYLLGGGFFLNFVFASYNGSIGKSILESCKNFISVVLGITNVFSDIMSYIRLWAVGLAGASIASTVNTMAGPMLGGFLIFAGIILLVFGHGLNLILNVLSVLVHGVRLNTLEFSSHIGLTWSGTAYRPFAKREVN

SEQ ID NO: 23899 - DNA, 438 bp, Unknown
  Obtained from environmental sample
  misc_feature (1)..(438): n is a, c, g, or t
atgatgaatttaggtttattgggtgccggattggtaatgggtatcgcagcagtcggttccggaattggggttggttttgcgggtcaggctactattggtgcatggaaaaagtgctatgttggcaataaagcggctcccatgatgctgctggcttttgcaggtgcgcctttaacacagactttttatggttttattctgatgggacagatgaaggatgcggcatcagtaagcactgaaaacgcatggctttaccttggttatggtcttgcttcaggttttgccattgcattttcagccatcgtacagggaaaagcaggagccgccgctgccgacgcacaagcggaaaccggcaaaggttttgctcagtacattgccgttgtaggtattgcggaaactgtcgctctgttcgcgatggtactgacaatgataagcctgtag

SEQ ID NO: 23900 - protein, 145 aa, Unknown
  Obtained from environmental sample
  SIGNAL (1)...(27)
  misc_feature (1)..(145): Xaa is any amino acid
MMNLGLLGAGLVMGIAAVGSGIGVGFAGQATIGAWKKCYVGNKAAPMMLLAFAGAPLTQTFYGFILMGQMKDAASVSTENAWLYLGYGLASGFAIAFSAIVQGKAGAAAADAQAETGKGFAQYIAVVGIAETVALFAMVLTMISL

SEQ ID NO: 23901 - DNA, 414 bp, Unknown
  Obtained from environmental sample
  misc_feature (1)..(414): n is a, c, g, or t
gtgccgtccatcgagataaaacggagttatccgcatattttccatgacgcgatacggatatttatgcggagcggttccacggtgagcattggccccacgcccaaggttctggaaaaatcggtggtcaggccggaatattcccggcggggcaaagtgatcatttcagaggcggccttgagccaaatggttattcactgcgtcgatgaatacaatcagaatatacgaataaaaaaaatcctcgtgcgcgacaaagaaatggggtatcaactggtgattaccattgacgtgccctatggcattcagttggggggtaacatccatgaattacagaactatatcattgacaacattgagcgttatacgggaattttaattgaagaagtcaatattattattgacaaaatagttcaataa

SEQ ID NO: 23902 - protein, 137 aa, Unknown
  Obtained from environmental sample
  misc_feature (1)..(137): Xaa is any amino acid
MPSIEIKRSYPHIFHDAIRIFMRSGSTVSIGPTPKVLEKSVVRPEYSRRGKVIISEAALSQMVIHCVDEYNQNIRIKKILVRDKEMGYQLVITIDVPYGIQLGGNIHELQNYIIDNIERYTGILIEEVNIIIDKIVQ

SEQ ID NO: 23903 - DNA, 321 bp, Unknown
  Obtained from environmental sample
  misc_feature (1)..(321): n is a, c, g, or t
atgaaaaagatttacagcaagatagaatctataaccggtaacgtaattaccgtacgtgcggagggagtccgttacggagacttggcgaggatcgatacgagcttcggttcctccctcgcggaagtgaaccgccttgccggggatctggtatccctgcaggtatttgccggaggccgtggtatttcgaccggcgacacaatcgaattcctgggccatccaatggaggtttccttttcggaaaaccttctgggccgggtttttaacggttcaggctctccccgcgataacgggccaagtctggaagaaaaccttatcccctag

SEQ ID NO: 23904 - protein, 106 aa, Unknown
  Obtained from environmental sample
  DOMAIN (8)...(71): ATP synthase alpha/beta family, beta-barrel domain
  misc_feature (1)..(106): Xaa is any amino acid
MKKIYSKIESITGNVITVRAEGVRYGDLARIDTSFGSSLAEVNRLAGDLVSLQVFAGGRGISTGDTIEFLGHPMEVSFSENLLGRVFNGSGSPRDNGPSLEENLIP

SEQ ID NO: 23905 - DNA, 1209 bp, Unknown
  Obtained from environmental sample
  misc_feature (1)..(1209): n is a, c, g, or t
ttgtcagatcggccgaggtgtgcctttctttcactggccggtcagcgggcgatcaactgctacgacgaacggttcaggcccgaagtgccgctggtaacccagatccggcttatcgatacgttcttcccggtagcccgtggaggtaccttctgcgtgcccggcccctttggcgcggggaagacggtactgcagcatcaaatgagccagcacgcggatgtggacatagttattgttgccgcctgcggcgagcgggcgggcgaagttgtggaagtcctgaaggaattccctgaacttatcgatcccaaaaccgggaaatccctcatggaacggaccatcatcatctgtaacacttcgtccatgcctgtggcggcccgcgaagcgtcgctctatacagcggttaccatggcggaatactaccgccagatggggcttaacgtgctcctccttgcggactctaccagccgctgggcgcaggccctgcgcgaaatgtccgggcgcctggaagaaatccccggcgaagaagcgttccccgcttatttggaatccaccattgccggcttctacgaaagggcgggcattgtgaggcttaaggacggttcctttggatcggtaaccataggcggtacggtcagccctgccggcggcaactttgaagagccggtaacgcaggcgacgctcaaggtagtaggcgcgttccacggcctttcccgcgagcgttcagacgcccgcaagttccctgccattcatcccctcgattcctggtccaaataccggggaatcatttcggaagaaaaggtcggctatgcgcgcanagttctcatgcgcggaaccgaggtggaacagatgatgaaggttgtcggcgaagagggaaccagtctggacgactttatcacttacctgaaaggcgagttccttgactctgtgtatttccagcagaactcatttgacgccgtggatcaggccgcaagtcctgaacggcaaaaatacgtctttgatcaaatactcaggattctgggaagtgtttttaacttcaaagacaaggaagaagcccgtacctggtttaacggcctgcgccagaagttcattgactataacttctcgccctggcagagcgacgggttcaagagaattgaggcggatcttttggctttagtcaaagataaggccggcaaactggattcaacagcggaaaaattgataaccggctag

SEQ ID NO: 23906 - protein, 402 aa, Unknown
  Obtained from environmental sample
  DOMAIN (33)...(255): ATP synthase alpha/beta family, nucleotide-binding domain
  misc_feature (1)..(402): Xaa is any amino acid
MSDRPRCAFLSLAGQRAINCYDERFRPEVPLVTQIRLIDTFFPVARGGTFCVPGPFGAGKTVLQHQMSQHADVDIVIVAACGERAGEVVEVLKEFPELIDPKTGKSLMERTIIICNTSSMPVAAREASLYTAVTMAEYYRQMGLNVLLLADSTSRWAQALREMSGRLEEIPGEEAFPAYLESTIAGFYERAGIVRLKDGSFGSVTIGGTVSPAGGNFEEPVTQATLKVVGAFHGLSRERSDARKFPAIHPLDSWSKYRGIISEEKVGYARXVLMRGTEVEQMMKVVGEEGTSLDDFITYLKGEFLDSVYFQQNSFDAVDQAASPERQKYVFDQILRILGSVFNFKDKEEARTWFNGLRQKFIDYNFSPWQSDGFKRIEADLLALVKDKAGKLDSTAEKLITG

SEQ ID NO: 23907 - DNA, 720 bp, Unknown
  Obtained from environmental sample
  misc_feature (1)..(720): n is a, c, g, or t
ttgactatgacagcgaaccagaaagaggttacaatccagtcatggcggcgaagaacaagtatgtcctgcattcaaagattccggaggcaaattcagacagttcgcaaggctgttctgcgtggacctgaacgccacccagatagccctggtgactggcctcaaccgcaacaccgtcaacagactcctccacgggctgcgggagcggatagctgccgcctgcgggggcgggcagcccgtgaagggcgaggtcgaggtggacgagtcctacttcggtgccaggagggtcaggggcaagcgggggcgcggcgcctccggcaagaccatcgtcttcggcatattcaagagggagggcggcgtgtacaccgagatcgtgcccgactgctccaaggcgacgctgcagggggtcatcaggggcaggataaaccccgacaccgtcatccactcggacggctggcccggcacaacgggctggtggacgtgggctacaagaagcactacagggtcagccacggcgggaacgagttcgccagggggcgctgccacgtcaacggcatggagagcttctggggctacgccaagaccaggctggcacgcttcaggggcctgcacaaacacactttcctgctacacttgaaggagtgcgagttcaggttcaaccaccggcacgatgacctctacccgcttatactcaaaatgtgccgcaaaaaccctctgtcctag

SEQ ID NO: 23908 - protein, 239 aa, Unknown
  Obtained from environmental sample
  misc_feature (1)..(239): Xaa is any amino acid
MTMTANQKEVTIQSWRRRTSMSCIQRFRRQIQTVRKAVLRGPERHPDSPGDWPQPQHRQQTPPRAAGADSCRLRGRAAREGRGRGGRVLLRCQEGQGQAGARRLRQDHRLRHIQEGGRRVHRDRARLLQGDAAGGHQGQDKPRHRHPLGRLARHNGLVDVGYKKHYRVSHGGNEFARGRCHVNGMESFWGYAKTRLARFRGLHKHTFLLHLKECEFRFNHRHDDLYPLILKMCRKNPLS

SEQ ID NO: 23909 - DNA, 516 bp, Unknown
  Obtained from environmental sample
  misc_feature (1)..(516): n is a, c, g, or t
gtggacctgaacgccacccagatagccctggtgactggcctcaaccgcaacaccgtcaacagactcctccacgggctgcgggagcggatagctgccgcctgcgggggcgggcagcccgtgaagggcgaggtcgaggtggacgagtcctacttcggtgccaggagggtcaggggcaagcgggggcgcggcgcctccggcaagaccatcgtcttcggcatattcaagagggagggcggcgtgtacaccgagatcgtgcccgactgctccaaggcgacgctgcagggggtcatcaggggcaggataaaccccgacaccgtcatccactcggacggctggcccggcacaacgggctggtggacgtgggctacaagaagcactacagggtcagccacggcgggaacgagttcgccagggggcgctgccacgtcaacggcatggagagcttctggggctacgccaagaccaggctggcacgcttcaggggcctgcacaaacacactttcctgctacacttga

SEQ ID NO: 23910 - protein, 171 aa, Unknown
  Obtained from environmental sample
  misc_feature (1)..(171): Xaa is any amino acid
MDLNATQIALVTGLNRNTVNRLLHGLRERIAAACGGGQPVKGEVEVDESYFGARRVRGKRGRGASGKTIVFGIFKREGGVYTEIVPDCSKATLQGVIRGRINPDTVIHSDGWPGTTGWWTWATRSTTGSATAGTSSPGGAATSTAWRASGATPRPGWHASGACTNTLSCYT

SEQ ID NO: 23911 - DNA, 798 bp, Unknown
  Obtained from environmental sample
  misc_feature (1)..(798): n is a, c, g, or t
atggcgcatatcaggggcctcaacgcgaggaaagaccgggtaggtaatcctgagttcagaatggtaacggaaaaggaaaccctgacgtttataatatcggtccccattattaacagcgctaccaaaaatgtagtaggaagcgtgggctgtgtcttagacgccggcttaatccagcctgtaattatgaatactgtcaaaataaacgacataatccgcgttgcggcaatgtattcagataacggaaccattctggcgcatttcaagccagaccgtataggcaaaaaaatatttgacgtcgatacggaactgggagatttcatgccggatgttttcgcggcgatacaaaacaagactaccctgcatgccacaatatatgatccgaaccttcgtgaaaatgtcggatttgtattaaagtcatttgaaatcggcaattcggggcaaaacatggcggttttaattggaacctctgaatcgtacatttttaaggacattaaaacaatcaccagatatataattattctggcggtacttgctttgtcattctcaggcgtcatcgtatattatgcttttaataaatttaccaaaccaatagttaaggcaacagaaaccataaaggacattcccaagggacatctgacccggatactaacagaaaacggcagcggcgagattcccgatctgacccgtttattcaacaaaactccggaaaagataaatgggcggactgtaaccctatccggcgccggtggagggatggtcgtcagtttggactatgtccaggactgcatgctaagttga

SEQ ID NO: 23912 - protein, 265 aa, Unknown
  Obtained from environmental sample
  DOMAIN (171)...(240): HAMP domain
  misc_feature (1)..(265): Xaa is any amino acid
MAHIRGLNARKDRVGNPEFRMVTEKETLTFIISVPIINSATKNVVGSVGCVLDAGLIQPVIMNTVKINDIIRVAAMYSDNGTILAHFKPDRIGKKIFDVDTELGDFMPDVFAAIQNKTTLHATIYDPNLRENVGFVLKSFEIGNSGQNMAVLIGTSESYIFKDIKTITRYIIILAVLALSFSGVIVYYAFNKFTKPIVKATETIKDIPKGHLTRILTENGSGEIPDLTRLFNKTPEKINGRTVTLSGAGGGMVVSLDYVQDCMLS

SEQ ID NO: 23913 - DNA, 678 bp, Unknown
  Obtained from environmental sample
  misc_feature (1)..(678): n is a, c, g, or t
atgtctcaaataaaagaaaaccgtaattcggcgcaatattatatttttctttcgcactttcattgggatcatatacagggactgcctttttttggtcccagttatatcccgtcggtagcgatgaatttttatactccttttgcgaatgtcgaaaaattgttaagcgggcaaatggtaagcccttatttcccgattggccttgacgttatggtagcaaagaaaacatttaaccagcttacagataaagtaaatatttccggccgcactgtaagttacaaaaaaatgaatcatcccggagattcttacgcgtactgtgttaacgataacggcaaacgggtaatttattctacggatactgaacttacctcggacgattttcagaaaacggaagaaaatgtttctttttttaaagacgccgatatgattattattgactgccagtatacgctcggcgaagctatcgaaaaatacaactggggacacagtgcgttcagccttgccgtagactttgcggctaactgggggattaaacatatggttatgttccatcacgatccttcttatgatgatcataaactttacggaatattgcagtccgccagatggtatcttgaaaagatgaatataaaagaaatagagttgactcttgcctatgaaggtctgaaaatatctctatag

SEQ ID NO: 23914 - protein, 225 aa, Unknown
  Obtained from environmental sample
  misc_feature (1)..(225): Xaa is any amino acid
MSQIKENRNSAQYYIFLSHFHWDHIQGLPFFGPSYIPSVAMNFYTPFANVEKLLSGQMVSPYFPIGLDVMVAKKTFNQLTDKVNISGRTVSYKKMNHPGDSYAYCVNDNGKRVIYSTDTELTSDDFQKTEENVSFFKDADMIIIDCQYTLGEAIEKYNWGHSAFSLAVDFAANWGIKHMVMFHHDPSYDDHKLYGILQSARWYLEKMNIKEIELTLAYEGLKISL

SEQ ID NO: 23915 - DNA, 957 bp, Unknown
  Obtained from environmental sample
  misc_feature (1)..(957): n is a, c, g, or t
atggggcaaacggcgctcattaacgcatctccatggtttaacaaagcgcaaggttcaataactctcgccgccatgttcttcccgatacagggaggagggggatgcgttttattctcaagcgaaaacctgaacgaaagttttggaatgggcgtaaatgcgtcatatcttataaacgccgagggcgatattatcgcggatgccgacccggaaaaggtaaaaacagccgtaaatctttctaaacaaaacattatccgccagatttttaacagccctgaccgtaacaaacagatgttagtcgagcttgacgcccagttaacgcggggcgatacgaaaccccgcccgttaatcgtccgcctgtgggaaaatgtcaaacaaaaactaaacagaaatcaggacgatggaaaagttcgccattatcttgcctacacgcggcttaacgctgcggggagcgtcgtaatcaccaccatcgaatacgaaaaagtgtttgaaggaatagccgccactacaaggcgcaacctgtacctgaccgccgcggttttattcctctctataatgtgcatttggtttttcgcaaaaagcatttccgttccccttaaagcgcttgccggagccgcgcgtaaagtcgaaggcggcatttttaacctggaattacagcccgcaggcagcgatgaaatcggtttattaacatccagctttggaaagatgtgttccgctctgaacatctttggcaagtttacaaaccgcgacatcgcggttcaggcaatgcgcggcgaaataaaccgggcggcctccacaaacacgccacaatctttttttccgatatacgcggctttaccgcgctgtctgaaaattttacaaaaacattcggagacaaggcttcggataaaatcgtcttctggcttaacaactaccttacaagcatggtcgaatgcgtggaaaaaacaggcggcgttgtag

SEQ ID NO: 23916 - protein, 318 aa, Unknown
  Obtained from environmental sample
  DOMAIN (172)...(241): HAMP domain
  misc_feature (1)..(318): Xaa is any amino acid
MGQTALINASPWFNKAQGSITLAAMFFPIQGGGGCVLFSSENLNESFGMGVNASYLINAEGDIIADADPEKVKTAVNLSKQNIIRQIFNSPDRNKQMLVELDAQLTRGDTKPRPLIVRLWENVKQKLNRNQDDGKVRHYLAYTRLNAAGSVVITTIEYEKVFEGIAATTRRNLYLTAAVLFLSIMCIWFFAKSISVPLKALAGAARKVEGGIFNLELQPAGSDEIGLLTSSFGKMCSALNIFGKFTNRDIAVQAMRGEINRAASTNTPQSFFPIYAALPRCLKILQKHSETRLRIKSSSGLTTTLQAWSNAWKKQAAL

SEQ ID NO: 23917 - DNA, 765 bp, Unknown
  Obtained from environmental sample
  misc_feature (1)..(765): n is a, c, g, or t
gtgttccgctctgaacatctttggcaagtttacaaaccgcgacatcgcggttcaggcaatgcgcggcgaaataaaccgggcggcctccacaaacacgccacaatctttttttccgatatacgcggctttaccgcgctgtctgaaaattttacaaaaacattcggagacaaggcttcggataaaatcgtcttctggcttaacaactaccttacaagcatggtcgaatgcgtggaaaaaacaggcggcgttgtagataaattcatcggagacgcggtaatggcgcattggggcacggcttacacggcgggcagccccaaaaaagacgcttttaactgcgttaaggcggcgcttatgatgcgccacgcgctgataacattaaacaaaaaccgggcggaaaatgatcccggcgacccgcctatcagaataggatgcggaattaattcgggaattgttaccgcgggacaaatcggaagcgatcttcgcatggagtacacggtaataggcgacccggtaaatctcgcttcccgcgtcgaagcgcttaccaagccgcttgctacagatattcttataaccgaagatacatttaatctaatcggagacagccttattactgaagaaatgccgccggtaacggtaaaaggaaaagcaaagccggtgcgtttgtttgccgtcgttaattttgttgaagcaaaagggggaccaagaactatagcggaagtccgtaaatttattgggcgtcgaggctcccgaactttcccatgttga

SEQ ID NO: 23918 - protein, 254 aa, Unknown
  Obtained from environmental sample
  DOMAIN (25)...(226): Adenylate and Guanylate cyclase catalytic domain
  misc_feature (1)..(254): Xaa is any amino acid
MFRSEHLWQVYKPRHRGSGNARRNKPGGLHKHATIFFSDIRGFTALSENFTKTFGDKASDKIVFWLNNYLTSMVECVEKTGGVVDKFIGDAVMAHWGTAYTAGSPKKDAFNCVKAALMMRHALITLNKNRAENDPGDPPIRIGCGINSGIVTAGQIGSDLRMEYTVIGDPVNLASRVEALTKPLATDILITEDTFNLIGDSLITEEMPPVTVKGKAKPVRLFAVVNFVEAKGGPRTIAEVRKFIGRRGSRTFPC

SEQ ID NO: 23919 - DNA, 714 bp, Unknown
  Obtained from environmental sample
  misc_feature (1)..(714): n is a, c, g, or t
ttgtttttttttctcgcggcattcccccttttctctcaggaagcgtcgcctcctatcggaggcgcgtcgtctcctttaagagacgctccgacaggagacgacgataccacgttattcgtcatcaccgcatacaaatttaacgtcaagggccgttcccgtccgaatgcccttctctataaacttattgagcacggcgaatttcgggaaggcgaattgattaaggggaaagcaaatcttgaaaagtatataagcgatgttgcccaaatttataccaaccagcgggtcctgaaagataatgttgaggttaactattccacaggcgccctgaatgaggagggaatatatcctgtaaccataacgacaaatgtcgaggatacatggaatatcatcgccctgcccaggccgtattataaaaatgatgtttttgatcttacaataaaggcaagggactacaatttccttggctccatgaatcccctgcggatcgaccttggctacaattataatgaagataaacgtcattcattcctgcttggcgtattcttcaatacccccttcagggctttgggctattactggaatttaacttttgataacacattccagtaccgcgttaacgctcctttttattaccagaatacaacaggactttcaatggacgtgccgttccattcaactacatttacctttggcgttaatgaaaaacttttttga

SEQ ID NO: 23920 - protein, 237 aa, Unknown
  Obtained from environmental sample
  misc_feature (1)..(237): Xaa is any amino acid
MFFFLAAFPLFSQEASPPIGGASSPLRDAPTGDDDTTLFVITAYKFNVKGRSRPNALLYKLIEHGEFREGELIKGKANLEKYISDVAQIYTNQRVLKDNVEVNYSTGALNEEGIYPVTITTNVEDTWNIIALPRPYYKNDVFDLTIKARDYNFLGSMNPLRIDLGYNYNEDKRHSFLLGVFFNTPFRALGYYWNLTFDNTFQYRVNAPFYYQNTTGLSMDVPFHSTTFTFGVNEKLF

SEQ ID NO: 23921 - DNA, 615 bp, Unknown
  Obtained from environmental sample
  misc_feature (1)..(615): n is a, c, g, or t
gtgtatattcctctggaaagcctggcaagcctgccgcccactgaatggaaatccggtatggcggagcttataaagacagcggttctggagggcgatgagtttctcgctctgattgaggggcttgacggcggttttacggttatgaccaagacaatcacgccctgtatagaccgcgcggtccggtttaaaggacgcattgtcgaagaagacccttttgagacgggaagcaggcgcatgctgcttaaccttgggcatacttttggccatgcgctggaagccgccgtcgggctgggacgcgtatcgcacggcgaagcggtcgcctggggcattgcgcgttcctgcgaactgggccttgctttgggcgtctgccccccgccgagggcaaagagaataatgtcgcttttaacagcctttgattatgagactgcggccccccatccccttgccgccggcgccgaaataattcaggccctgggcagtgataaaaagaaacgcaggggaaaacttgtttttatcgtccctgacgaaaaaagcgcccggcctgtaacggcggatgcgcctgggtttatggatacggtcagccggataatcgaaggagccgcgtcatacctgtaa

SEQ ID NO: 23922 - protein, 204 aa, Unknown
  Obtained from environmental sample
  DOMAIN (1)...(165): 3-dehydroquinate synthase
  misc_feature (1)..(204): Xaa is any amino acid
MYIPLESLASLPPTEWKSGMAELIKTAVLEGDEFLALIEGLDGGFTVMTKTITPCIDRAVRFKGRIVEEDPFETGSRRMLLNLGHTFGHALEAAVGLGRVSHGEAVAWGIARSCELGLALGVCPPPRAKRIMSLLTAFDYETAAPHPLAAGAEIIQALGSDKKKRRGKLVFIVPDEKSARPVTADAPGFMDTVSRIIEGAASYL

SEQ ID NO: 23923 - DNA, 345 bp, Unknown
  Obtained from environmental sample
  misc_feature (1)..(345): n is a, c, g, or t
atgcgatacggcttgccagaactgctgacgccggataagctcaataaggtcacaaacgggtgtactcccttgatgtacgcaatcgaacgaactcacaccaagatcgtccgcatgcttcttgacaaaggggccaacgttggtatacctgacaggtacggtcaaactccattgatgctggccgtgaggattggagacaaggaaattgtttcgatgcttctgcaaaccggcgcaaacgtgctgacccgatcccctggaggagatacggctctggacatagcgcaaaaaaaacacagaagagttatagccgtccttttggcggaagcgatgggaggtgtggtgcaatga

SEQ ID NO: 23924 - protein, 114 aa, Unknown
  Obtained from environmental sample
  DOMAIN (52)...(84): Ankyrin repeat
  misc_feature (1)..(114): Xaa is any amino acid
MRYGLPELLTPDKLNKVTNGCTPLMYAIERTHTKIVRMLLDKGANVGIPDRYGQTPLMLAVRIGDKEIVSMLLQTGANVLTRSPGGDTALDIAQKKHRRVIAVLLAEAMGGVVQ

SEQ ID NO: 23925 - DNA, 603 bp, Unknown
  Obtained from environmental sample
  misc_feature (1)..(603): n is a, c, g, or t
atggatttgctgtgtccagtctgtaaagataagctaataaatggtaaatgcgcgaattgctcgtttgaagataatgaacacgattatttgtacctggacggtaatcagactcgcttctggatggaacagttccatgccagggaccgcaaagagtgggacgcaaaatggcgggaagagaaagaaaaattctgtcaagaggcagaagaagccagacggcaggctaaagaagcccaatggcaacttgacgatcttaggaaagaaatgttcaggatagaagaagagttgcgccagaaaatagaggaagaagtaaaaccacagcttaaaactccaggggctgatgaaagatacaataaagcggccaccgaaaaattattgagatcggctgaaagggcaactctggataaagttaatcaatttatcgacgaaggggcggatgtcaatgcgaaaaatgaagttggtttgacgcccttgcataaggcagcacaaaaaaacacgcgggaagtgatatttgccctgatagacgcgggcgcggatgtcagggcagtagataaatacggaaatacacccttgcataggcagtcactcggccgattctgtccatga

SEQ ID NO: 23926 - protein, 200 aa, Unknown
  Obtained from environmental sample
  DOMAIN (152)...(184): Ankyrin repeat
  misc_feature (1)..(200): Xaa is any amino acid
MDLLCPVCKDKLINGKCANCSFEDNEHDYLYLDGNQTRFWMEQFHARDRKEWDAKWREEKEKFCQEAEEARRQAKEAQWQLDDLRKEMFRIEEELRQKIEEEVKPQLKTPGADERYNKAATEKLLRSAERATLDKVNQFIDEGADVNAKNEVGLTPLHKAAQKNTREVIFALIDAGADVRAVDKYGNTPLHRQSLGRFCP

SEQ ID NO: 23927 - DNA, 798 bp, Unknown
  Obtained from environmental sample
  misc_feature (1)..(798): n is a, c, g, or t
gtgcgcgagtttccacttgagccttttttggccgacatggagaccctgattaataaaggtgctaaaacctttaaattcctggaccgtacttttaacctggacattgatcgggcgcaaaggataattgaatttttttttaatcaaattaacgggcgaataaatgacaggcccttttgcgtgcatttcgaaatggttccttcccgctttcccggatcgttaaaagaactgctttgccgttttcctgccggaaccctgcggctggaactcggaatccagactttcaacacgcggaccagggcattgcttcaaatgtcagggaacattgaagaagagcttaagacgctggaatttctcagggagaaaaccagcgcgatacttcacgttgatcttattgccggacttcctggcgagggccttgcctctttcaaaagcggttttgatcggctttggcaagtactatcgaaacaaggcggagatagaactccaggcgggctttttgagattcaacttggcatcttaaaatgccttcccggaactcccattgcacgtcacaatgaagcgtacaaaatgaaatactcagccgctcctccctatgaagtgattgaaacaggcgcactctctaccgccgagctggacaaaataaaaaacttcgcccgcttctgggagcttatcgttaaccgcgctccatttcccgcgctgattcccgctttgctgccgatgggtaaaccagtttttgacaggtttatggagctttctgacaagcttcttgaacacttcggtaaaaacatggggcattga

SEQ ID NO: 23928 - protein, 265 aa, Unknown
  Obtained from environmental sample
  misc_feature (1)..(265): Xaa is any amino acid
MREFPLEPFLADMETLINKGAKTFKFLDRTFNLDIDRAQRIIEFFFNQINGRINDRPFCVHFEMVPSRFPGSLKELLCRFPAGTLRLELGIQTFNTRTRALLQMSGNIEEELKTLEFLREKTSAILHVDLIAGLPGEGLASFKSGFDRLWQVLSKQGGDRTPGGLFEIQLGILKCLPGTPIARHNEAYKMKYSAAPPYEVIETGALSTAELDKIKNFARFWELIVNRAPFPALIPALLPMGKPVFDRFMELSDKLLEHFGKNMGH

SEQ ID NO: 23929 - DNA, 1197 bp, Unknown
  Obtained from environmental sample
  misc_feature (1)..(1197): n is a, c, g, or t
atggaaaaagcaacgctcatctttctccctgccccatcttccctaaatgacgacatgcaaaaattttcgcatggcttaaaagccgaagccgggattctgcttcctgtggagctggcaccaggggaaaaaagccttgatcctgagacgctgtcatgggaaatgatcatttcggggatgctgaaggtaatatcctcccctgaaacagtaacccttcaaggggtctcaaatattcctgacgaatggattgattattaccggcgttttgttttagccgtaaagcccgaaatttaccatgagtttaccagcgcttccataatcaaagccagaaacgaggaattcgacatagccctggagatcaacgccatcctggaaggccttttcccaggatctccgggcgtacttttaaacaaggccctgatactggaagacagggcggaggatcttgaaaaaaagggccgacaggcggacagggaaaacgccgaggccctgcaagcttacgaaacgaccctttcactgcaaccagttttgccggacactttatttaacgcgggttttttctttctgcgccggaataactttacaagagcaagggattgtttttctcgttacatcgcggcgggggaaaaagatgtacttgccaccgagcctgaccgcttacagtggtcaggcgtcgaagcgaaggttcgcggttcccctccggttattccattggacaaaaaaaagcaggcggaaaaaataatcaaggacttgggcgactttgacgacaacggttttcaggaagcttacgattgcattaacaggggaaaagacgaagatgccttgaaaaaaattcgcgccctcatcgaaaagcatcccagggtttggaacggctggttcctcctgggctggacactgcgaaagctgaagcgttacggcgacagccttgagtcccttaaaaaagcagaagagctgggcggaacaaacagcgacgttaaaaacgaaatggccatttgccttatggaactgggcgacctaaagggtgccagaaaagagctggagctagccctgcgcgaagaacctgaaaacatcaagataatttccaacctgggagtgctggcattgaaggcaggcaagcgcgaggaagcggacgcttttttcagaacggttctggaactggaaccggaggacgcgctggcgaggcggtatctggaagagtaa

SEQ ID NO: 23930 - protein, 398 aa, Unknown
  Obtained from environmental sample
  DOMAIN (356)...(389): Tetratricopeptide repeat
  misc_feature (1)..(398): Xaa is any amino acid
MEKATLIFLPAPSSLNDDMQKFSHGLKAEAGILLPVELAPGEKSLDPETLSWEMIISGMLKVISSPETVTLQGVSNIPDEWIDYYRRFVLAVKPEIYHEFTSASIIKARNEEFDIALEINAILEGLFPGSPGVLLNKALILEDRAEDLEKKGRQADRENAEALQAYETTLSLQPVLPDTLFNAGFFFLRRNNFTRARDCFSRYIAAGEKDVLATEPDRLQWSGVEAKVRGSPPVIPLDKKKQAEKIIKDLGDFDDNGFQEAYDCINRGKDEDALKKIRALIEKHPRVWNGWFLLGWTLRKLKRYGDSLESLKKAEELGGTNSDVKNEMAICLMELGDLKGARKELELALREEPENIKIISNLGVLALKAGKREEADAFFRTVLELEPEDALARRYLEE

SEQ ID NO: 23931 - DNA, 879 bp, Unknown
  Obtained from environmental sample
  misc_feature (1)..(879): n is a, c, g, or t
atgccaaaggagtgttttatgataattaatcacaacttgagcgcaatgttcgccgacagatcccttaaagtcaccaatgttagtcttgacaaaaatatggagaaactgtccagcggcttgcggatcaaccgcgcaggtgatgatgcttcgggactcgctgtttctgagaaattgcgagctcaaatccgcggtctgaatatggcgtcattcaatgccatgaatggtatttcattcattcaggtatcggaaggttatctccaggaatcccaggatgttgtccagcgtctccgtgagttggcggtacaggctgccaacggcgtttataccgaggaggatcgccaatacatccagatcgaagtttcggccctggtcgcagaaatcgacaggattgcgtcgcacgcccagtttaacgggatgaatatgttaaccggacgctttggccggcctataggtgaaaatctggttaccgcctctatgtggttccatattggcgccaacatggatcaaaggacacaagtgtatatcggcactatgaccgcgaagggtcttggaatccgaaacgtaggcgatgatacatttatttcgctgtccgcgccggagacagctaaccgcgccattggaacccttgatgtcgcgcttaaaaaaataaacaaacaacgggccgatctcggcgcctaccagaaccgccttgaacacgcaatccgcggtattaacatcggcgctgaaaacctgcaagccgctgaatcccgcataagggacgccgacatggctaatgagacagtcagttacaccaaaaatatgatcctcacccagtccggtacagccatgctggctcaggcaaatcaaaaaggacagacggtgctgcagcttctgcagtaa

SEQ ID NO: 23932 - protein, 292 aa, Unknown
  Obtained from environmental sample
  DOMAIN (199)...(270): Bacterial flagellin C-terminus
  misc_feature (1)..(292): Xaa is any amino acid
MPKECFMIINHNLSAMFADRSLKVTNVSLDKNMEKLSSGLRINRAGDDASGLAVSEKLRAQIRGLNMASFNAMNGISFIQVSEGYLQESQDVVQRLRELAVQAANGVYTEEDRQYIQIEVSALVAEIDRIASHAQFNGMNMLTGRFGRPIGENLVTASMWFHIGANMDQRTQVYIGTMTAKGLGIRNVGDDTFISLSAPETANRAIGTLDVALKKINKQRADLGAYQNRLEHAIRGINIGAENLQAAESRIRDADMANETVSYTKNMILTQSGTAMLAQANQKGQTVLQLLQ

SEQ ID NO: 23933 - DNA, 423 bp, Unknown
  Obtained from environmental sample
  misc_feature (1)..(423): n is a, c, g, or t
atggtgttgcctatcaaaataaagttcggaaagaatgggaagattaagttgagactccttcttgataccaacgtaattatagatttcttaaaacaagaaaatgagcctttggatttatcttcgttaatttttgatcatgaatgttttgtcagtgttattgtcaaacttgaactattaaaataccctgatattacgccgaacgaagaatacgctattaatgaatttttgcgatttgttcccattataccgctgaatgaagcgatagaaaacgaaaccatagcgttaagccgatctgtaaaatttaaattgccggacgctattatcggagcaacggcgattgtatatgacgcaaaattagttacacgtgatccgcatttcctaaaatgccaatataaaaaattgatgatatgggagaattcctga

SEQ ID NO: 23934 - protein, 140 aa, Unknown
  Obtained from environmental sample
  DOMAIN (19)...(136): PIN domain
  misc_feature (1)..(140): Xaa is any amino acid
MVLPIKIKFGKNGKIKLRLLLDTNVIIDFLKQENEPLDLSSLIFDHECFVSVIVKLELLKYPDITPNEEYAINEFLRFVPIIPLNEAIENETIALSRSVKFKLPDAIIGATAIVYDAKLVTRDPHFLKCQYKKLMIWENS

SEQ ID NO: 23935 - DNA, 414 bp, Unknown
  Obtained from environmental sample
  misc_feature (1)..(414): n is a, c, g, or t
atgcctatgccaaataatatgtctttaataaaaagcaaagataccggcatagaggttatttttcgcaaggctctttggaaggcggggtttcgttatagaaaaaattacaagaagctgcccggcaagccagacatcgctttgacaaagcaaaagattgcaattttttgcgatggcgaattttggcacggcaaaaactgggaagtgtccaaagaaaaaataaaacgcaaccgtaattattggattccaaaaattgacaagaatataaaacgggattttgaaaaagacagggacttgaagctcatgggctgggaagttctgcatttttggggcacggatatagagaaggatatggcaagctgcattgagcaggttaaggaagcgattttttataggaatattgagtgggagccgtga

SEQ ID NO: 23936 - protein, 137 aa, Unknown
  Obtained from environmental sample
  DOMAIN (4)...(69): DNA mismatch endonuclease Vsr
  misc_feature (1)..(137): Xaa is any amino acid
MPMPNNMSLIKSKDTGIEVIFRKALWKAGFRYRKNYKKLPGKPDIALTKQKIAIFCDGEFWHGKNWEVSKEKIKRNRNYWIPKIDKNIKRDFEKDRDLKLMGWEVLHFWGTDIEKDMASCIEQVKEAIFYRNIEWEP

SEQ ID NO: 23937 - DNA, 837 bp, Unknown
  Obtained from environmental sample
  misc_feature (1)..(837): n is a, c, g, or t
atgcgggacaataaaggcaaaggggacgttattggcaggcgccggctggatacccattttctcgcgcttacggagctgggggcaaaggtaaaaacaatactcaccaacgcggcaagcgagccgcatgtgcaggatctctgccgtatgcttgttatgatgggcgcgcagatcgagggcatcggttcaaacatactgactatcaccggggtaaaaaaactctccggctgcgattttacaataggggctgattacatggaggtcggttcttttatcgggcttgccgccgtcaccggaggggatctccacattgaagggacacgaccccaggatttacgcccggcgaaaatcgcttttggcaagctgggcatctcctgggcgcatgagggaacaactatccatgtccctcagaaacaacctatggaggttaactgcgacttanggggcatgattcccaagatagacgatgcgccctggcccggtttttcgcccgaccttaccagcatcatcaccgtggtagccactcaggtaaagggaaccgtgttaatccacgaaaaaatgtttgagtcgcggatgttctttgtagacaaacttatcgcaatgggggcgcggattgtgttatgcgatccccaccgggcggttgtttccggcccttcaagacttcacggctcggacctcatcagtcccgatgtccgcgccggtatggcgatgctcattgccgccctctgcgccgacggaaaaagcattatacgcaatgtttaccagattgaacgcggctacgagcatctggtaaaccgtctttccacactgggcgcgcgcattgtcagaagcggctattaa

SEQ ID NO: 23938 - protein, 278 aa, Unknown
  Obtained from environmental sample
  DOMAIN (1)...(266): EPSP synthase (3-phosphoshikimate 1-carboxyvinyltransferase)
  misc_feature (1)..(278): Xaa is any amino acid
MRDNKGKGDVIGRRRLDTHFLALTELGAKVKTILTNAASEPHVQDLCRMLVMMGAQIEGIGSNILTITGVKKLSGCDFTIGADYMEVGSFIGLAAVTGGDLHIEGTRPQDLRPAKIAFGKLGISWAHEGTTIHVPQKQPMEVNCDLXGMIPKIDDAPWPGFSPDLTSIITVVATQVKGTVLIHEKMFESRMFFVDKLIAMGARIVLCDPHRAVVSGPSRLHGSDLISPDVRAGMAMLIAALCADGKSIIRNVYQIERGYEHLVNRLSTLGARIVRSGY

SEQ ID NO: 23939 - DNA, 585 bp, Unknown
  Obtained from environmental sample
  misc_feature (1)..(585): n is a, c, g, or t
atgggtatcgtatctaccgcgttaagtcttgaacagctttctttattttttatctcatttttaaggggcactcccatagtactgcagatactcattatctacagtcttctgccaagccttcttaacgcctttataaaaagcaagggatggaacatcaatatcttcgatattaatcccatcttctacgcttttatcgtctttgcggtaaacaactccgcccagcttgcggaacttttccgttcaagcattctcgccgtagacaagggacaatacgaagccgccctcgcaagcggcctgtccccggtaaagagctacatacgcataataataccccaggcgctggtaacggcgatacccaacttttccaatctggtaataatccttattaaaaacacgtccctcgcctttttaatgaccgtaagggacatcaccgcgaccgctaaaattgaggcaagctacggttataattatatagaagcatattttgatattttccttatatacatcatagtctgcgccgtagtacagctgttatttgaccgcgtggaatcccattttgccgcgtttcgtttagtgaagaaataa

SEQ ID NO: 23940 - protein, 194 aa, Unknown
  Obtained from environmental sample
  DOMAIN (1)...(188): Binding-protein-dependent transport system inner membrane component
  misc_feature (1)..(194): Xaa is any amino acid
MGIVSTALSLEQLSLFFISFLRGTPIVLQILIIYSLLPSLLNAFIKSKGWNINIFDINPIFYAFIVFAVNNSAQLAELFRSSILAVDKGQYEAALASGLSPVKSYIRIIIPQALVTAIPNFSNLVIILIKNTSLAFLMTVRDITATAKIEASYGYNYIEAYFDIFLIYIIVCAVVQLLFDRVESHFAAFRLVKK

SEQ ID NO: 23941 - DNA, 831 bp, Unknown
  Obtained from environmental sample
  misc_feature (1)..(831): n is a, c, g, or t
atgaggtatcctgccagaagaaaaatcccagttcccatgaagaaaaaaaaatcntacagcatggacgacaatctttggcatatttctcacgaggggctggagcttgaagacccggcgaatgagccgatgtacaaaaaaatgctctccatgacggttacgcctgaaaaagcgcctaacaagccagaatatgttgatattgaatttgaaaagggcattcccgtttcgcttaatggaaagaaaatggacggtgtcgctcttattaatcagcttaacaaaatcggcggggcgaacggaatcggcatcgtagaccttgttgagaacagggttgtcggtatgaagagccggggtgtgtacgaaacgcccggcgggtctattctttattacgcgcacggcgagcttgaacacatctgtcttgacaggcagacttactctttcaaacagcaggcggctcttaaaatgggcgagcttatctacgggggcttgtggtttactccgttacgcgaagccatttccgcttttgttgactgcactcaacagacggtcagcggcaaggtgaggcttaaactttacaagggttcgattagcgcggcgggagttacgtccgccaattcgctttacaataccagtctcgccagttttacaacgggtgaattgtttaatcacgcggacgcaaaggggtttatcaaactttacggcttgccggtttatgttcgggcgcttatgcagcttgaaaagaaaggtggcgccaaagtcgccttagctaaggcggccgtggcgaaggcggctgctgggaaagcgagtgcgggtaggaagacggcggggaagaagtag

SEQ ID NO: 23942 - protein, 276 aa, Unknown
  Obtained from environmental sample
  DOMAIN (1)...(241): Arginosuccinate synthase
  misc_feature (1)..(276): Xaa is any amino acid
MRYPARRKIPVPMKKKKSYSMDDNLWHISHEGLELEDPANEPMYKKMLSMTVTPEKAPNKPEYVDIEFEKGIPVSLNGKKMDGVALINQLNKIGGANGIGIVDLVENRVVGMKSRGVYETPGGSILYYAHGELEHICLDRQTYSFKQQAALKMGELIYGGLWFTPLREAISAFVDCTQQTVSGKVRLKLYKGSISAAGVTSANSLYNTSLASFTTGELFNHADAKGFIKLYGLPVYVRALMQLEKKGGAKVALAKAAVAKAAAGKASAGRKTAGKK

SEQ ID NO: 23943 - DNA, 420 bp, Unknown
  Obtained from environmental sample
  misc_feature (1)..(420): n is a, c, g, or t
atgccgcccggatttgccgtcggggtgtttccgggattctctggccgcaggttatcggattcatcggtcttatgtgaccggatccgttgtccggataagcccggattgcatggtcagatgtttccggatttcacggtcggatgttttaggattttctggtcggatgttttaggattcactggtcaagtgtcgacggattacccaccgaaacatggcagttggcttaacatggcagaaatagaaatcaatgtacttgtgaaccacggcctttcaaaacgggttccattcatgaagcagatgataaaagaagtcaccgcgtggaacaaagcccggaatcaggaggcaagtaaaatcaattggcggttttcaacagaagatgcgaggattaaacttaaacgactttatccactatttgaatag

SEQ ID NO: 23944 - protein, 139 aa, Unknown
  Obtained from environmental sample
  misc_feature (1)..(139): Xaa is any amino acid
MPPGFAVGVFPGFSGRRLSDSSVLCDRIRCPDKPGLHGQMFPDFTVGCFRIFWSDVLGFTGQVSTDYPPKHGSWLNMAEIEINVLVNHGLSKRVPFMKQMIKEVTAWNKARNQEASKINWRFSTEDARIKLKRLYPLFE

SEQ ID NO: 23945 - DNA, 870 bp, Unknown
  Obtained from environmental sample
  misc_feature (1)..(870): n is a, c, g, or t
ttgacgcggggaggtaccattcttggggcaagccgggaaaaaccctttaagagggaattccatgtagaggcggaagatcgctttgatggtgaaatagggcaggacaaagtagcttttatcatagaaaactataaaaaactcgccctggattgccttgtggtgttgggcgggaacggaaccaacactacaggataccggctcgctggggaagggctcaatgttcttggacttcccaagaccatagacaacgacattgaaggcactgaccggactttcggtttcgattctgcccttgccatagccacagacgccattgaccgccttcattcgaccgcgcaaagtcacagcagggttatggtgatcgagcttatgggccataaggccggatggctcgccctttacgcgggagtcgctggcggcggggacgttattctcattcccgaaataccatatgacatcaaaagtattggccgccacctatatgagcgcacacggagcggcaagagtttttccattgttgttgtagcggaaggggccctttcggttgaagaaaaaaaaatggacaaacaggacagaaaaaaataccgggcggaaacggtaaatccctccatcgcataccgggtagccagggagatacaggccgaaacaggcatggataccaaagccacagtcctgggctatgtacaaaggggcgggatgccggtggctactgaccgcattcttgccancagcctcggcaccgcagcggcggaactcctggcccatggcgaatacggccgcatgattgccctaaaaggaaacgaaatatgcccggtagatcttagcgttccagcagtaaaacaaagaccattccccgttctcactacatga

SEQ ID NO: 23946 - protein, 289 aa, Unknown
  Obtained from environmental sample
  DOMAIN (1)...(255): Phosphofructokinase
  misc_feature (1)..(289): Xaa is any amino acid
MTRGGTILGASREKPFKREFHVEAEDRFDGEIGQDKVAFIIENYKKLALDCLVVLGGNGTNTTGYRLAGEGLNVLGLPKTIDNDIEGTDRTFGFDSALAIATDAIDRLHSTAQSHSRVMVIELMGHKAGWLALYAGVAGGGDVILIPEIPYDIKSIGRHLYERTRSGKSFSIVVVAEGALSVEEKKMDKQDRKKYRAETVNPSIAYRVAREIQAETGMDTKATVLGYVQRGGMPVATDRILAXSLGTAAAELLAHGEYGRMIALKGNEICPVDLSVPAVKQRPFPVLTT

SEQ ID NO: 23947 - DNA, 738 bp, Unknown
  Obtained from environmental sample
  misc_feature (1)..(738): n is a, c, g, or t
atgggcttttctctctcggcaaatgacgaattcctttttgtcgtagcaagccttttcggcgcggctttcagggaagctgctcccattgcctgggaaagccaggctttggaggaaagcattgcctgggttcaaaagtggattgaagaggcaaataccagcattcaggtagaagatgactttgcctttaagtacttttacgatccgccggataagctggttaattccgggcgcatactctttacgtttatgaacagttccagtttttttacctttccggaagaacggcggacgaacctggatttccgttggattgccgcaaatgacatgatccccctggatgcggggggcgtgtactacggtatccataagaaaacaaaggcactgaacgcagccaaagcctttacaaagtggttttttgcggcggaaacccaaaggctgcttctggaaacggcaagaaacaacaggttgaacgaatcatcgtttggcatagccggaggtttttcggccatgagaaccgtaacggaacaggtcttcccgcaattctaccccgaccttttaggcaggatgccccccgagagctatctttcaccgcctaatattctgccgagaaactgggtagccatgaagcagcgggtaatactcccgtatctgcgggatagaatccgccatgccacaagggaagaagtcagatccctggaacggcggatcagcgactggcaccgcttaaacagggattag

SEQ ID NO: 23948 - protein, 245 aa, Unknown
  Obtained from environmental sample
  misc_feature (1)..(245): Xaa is any amino acid
MGFSLSANDEFLFVVASLFGAAFREAAPIAWESQALEESIAWVQKWIEEANTSIQVEDDFAFKYFYDPPDKLVNSGRILFTFMNSSSFFTFPEERRTNLDFRWIAANDMIPLDAGGVYYGIHKKTKALNAAKAFTKWFFAAETQRLLLETARNNRLNESSFGIAGGFSAMRTVTEQVFPQFYPDLLGRMPPESYLSPPNILPRNWVAMKQRVILPYLRDRIRHATREEVRSLERRISDWHRLNRD

SEQ ID NO: 23949 - DNA, 1341 bp, Unknown
  Obtained from environmental sample
  misc_feature (1)..(1341): n is a, c, g, or t
atgaacgcgcgagagaatctggaaaaaatacttgagagcccggaatttgcacctgatataattattaaccgtctgttaccagcccaagagggaatttttgccccgtttcctgaagggttagacgaaagaatagtcaaatcttttgttaaaaggggcatagaaaggctctattcccaccagactgaggtctttaaactcgcgcaggcaggcaagaatgcggtagtagtaacgccgaccgcctcagggaagacgctttgttacaatcttccctgtttacaggcgcttttagccgatgaaagcgcgcgctgtctgtacctttttcccacaaaagcgctttctcaggaccaacaggccgaattgaacgagaccgtaggcggcgattccgccggttttaacataaaaataactacttatgacggagatacgcccgaatccctgcgaatttcagcgcgtgatacaggcagaatcatcatttccaatcccgatatgctgcatacgggcatccttcccaatcacccaaagtggataaagttcttttctaaccttaaatttattgtgattgacgaagcccacgcctaccgtggcgtattgggcagccatgtctccaacgttatccgccgcttgcgccgcatcgccgctttttacggctcgcatccgcagttcattctctgttccgccaccattggcaaccccagggaactggccgaggcgctcattggccagccggttgaacttgttgacaaaaacggcgccccacgcggcgaaaagcgcatcatcctctacaacccgccgctggtagattccgtgcagggcatacgccgctccgccgttaccgaaagccgccgctggatgatagccctgctgcgggcgggcattaaaacgatactgtttgcccattcccgcattaaaaccgaagttaccgcttcctacgtgaacgaagatttggcaaatatttttaccgataattcgcggatacgggttgagccgtaccggggcggcctgctgcccaacgaacgccacgagattgagcgcggcctgcgcgagggcagcatccagggggtagtttcaactaacgcgctggaactcggcattgacattggcggcctggacgcctcggtggtggcgggcttccccggttcgttcaacagcttttggcagcaggcaggcagggcgggcaggcgcggcggcacatcggtttcggtgtttgtcgccacatcttctcccatcgatcaatttattatgaacgacccggactggtttttccgcagaagcgccgaggagggcagggtagacccgctgaacccctacatccttaccgatcacgtcaagtgcgcctgttga

SEQ ID NO: 23950 - protein, 446 aa, Unknown
  Obtained from environmental sample
  DOMAIN (53)...(230): Type III restriction enzyme, res subunit
  misc_feature (1)..(446): Xaa is any amino acid
MNARENLEKILESPEFAPDIIINRLLPAQEGIFAPFPEGLDERIVKSFVKRGIERLYSHQTEVFKLAQAGKNAVVVTPTASGKTLCYNLPCLQALLADESARCLYLFPTKALSQDQQAELNETVGGDSAGFNIKITTYDGDTPESLRISARDTGRIIISNPDMLHTGILPNHPKWIKFFSNLKFIVIDEAHAYRGVLGSHVSNVIRRLRRIAAFYGSHPQFILCSATIGNPRELAEALIGQPVELVDKNGAPRGEKRIILYNPPLVDSVQGIRRSAVTESRRWMIALLRAGIKTILFAHSRIKTEVTASYVNEDLANIFTDNSRIRVEPYRGGLLPNERHEIERGLREGSIQGVVSTNALELGIDIGGLDASVVAGFPGSFNSFWQQAGRAGRRGGTSVSVFVATSSPIDQFIMNDPDWFFRRSAEEGRVDPLNPYILTDHVKCAC

SEQ ID NO: 23951 - DNA, 576 bp, Unknown
  Obtained from environmental sample
  misc_feature (1)..(576): n is a, c, g, or t
gtggcgttcgttgggcagcaggccgccccggtacggctcaacccgtatccgcgaattatcggtaaaaatatttgccaaatcttcgttcacgtaggaagcggtaacttcggttttaatgcgggaatgggcaaacagtatcgttttaatgcccgcccgcagcagggctatcatccagcggcggctttcggtaacggcggagcggcgtatgccctgcacggaatctaccagcggcgggttgtagaggatgatgcgcttttcgccgcgtggggcgccgtttttgtcaacaagttcaaccggctggccaatgagcgcctcggccagttccctggggttgccaatggtggcggaacagagaatgaactgcggatgcgagccgtaaaaagcggcgatgcggcgcaagcggcggataacgttggagacatggctgcccaatacgccacggtaggcgtgggcttcgtcaatcacaataaatttaaggttagaaaagaactttatccactttgggtgattgggaaggatgcccgtatgcagcatatcgggattggaaatgatgattctgcctgtatcacgcgctga

SEQ ID NO: 23952 - protein, 191 aa, Unknown
  Obtained from environmental sample
  misc_feature (1)..(191): Xaa is any amino acid
MAFVGQQAAPVRLNPYPRIIGKNICQIFVHVGSGNFGFNAGMGKQYRFNARPQQGYHPAAAFGNGGAAYALHGIYQRRVVEDDALFAAWGAVFVNKFNRLANERLGQFPGVANGGGTENELRMRAVKSGDAAQAADNVGDMAAQYATVGVGFVNHNKFKVRKELYPLWVIGKDARMQHIGIGNDDSACITR

SEQ ID NO: 23953 - DNA, 435 bp, Unknown
  Obtained from environmental sample
  misc_feature (1)..(435): n is a, c, g, or t
ttgccgcgtggtttattggaggggaaggtgctcacggcttttgtagaccgcgaggggcaaaataccaccttcccccagacaattggtctcgctacgagttgggataaggaacttttgcgaaaagttggtgaaatatgtgctattgaagcacgagttttctacaaaacccacgagtgtaaggggggccttgcaatctgggcgcctaccattgacatggaacgggatccccgctggggtcgtaccgaggaagggtacggagaagatccatttttggcttccgagctttcatcttcatacatccggggagcgccgggggacgatcccttttatctgcgggtaagctgcgggcccaaacatttgtttgcgaacaacgacgaaaaggatccggactcctgctcctgttcgattcctccccgctgtctgcatgaatactga

SEQ ID NO: 23954 - protein, 144 aa, Unknown
  Obtained from environmental sample
  DOMAIN (6)...(144): Glycosyl hydrolase family 3 N terminal domain
  misc_feature (1)..(144): Xaa is any amino acid
MPRGLLEGKVLTAFVDREGQNTTFPQTIGLATSWDKELLRKVGEICAIEARVFYKTHECKGGLAIWAPTIDMERDPRWGRTEEGYGEDPFLASELSSSYIRGAPGDDPFYLRVSCGPKHLFANNDEKDPDSCSCSIPPRCLHEY

SEQ ID NO: 23955 - DNA, 717 bp, Unknown
  Obtained from environmental sample
  misc_feature (1)..(717): n is a, c, g, or t
gtgcaatgtcctccaaaggatttttttatgaagatgcttaatcgatacgttcaagcgccgctgttcgtggtgacggtgattgcggtctgcctgtcaggttgcgccaagaaagccggacacaagcccgccgaggcggaatccgccgccgttgccgacggcgggtgcggcacggctgatattctgatggaaacggttgatccggcgggggcgccgtacctgacgttcaccgactccagagactgccggaggtatcgggcggtaaagataggcggcgatgtgtggatggcggagaaccttaattataagacgccgcgcaactcttggtgcggggaaaacgaggaatccaactgcgagaaatacgggcggctgtatgattgggagacggcgaaaaccgcctgccccgcgggctggcatctctccgccgcagaagaatgggacagcctgctgacgacggtgggcggtaaaaggatggatgatgatgaagacagatgggcgggcgcaagcaaaaaactgagagcgaagagcggttggattatggacgacgactataaagaggtaaccggcaacggcacggacgattacggttttgcggcgctgcccggcggcgagcgttacggcaacggcaaattcgagaaacccggcactccggacagcaggggccattggtggattgccgacgaanatacggtttcagcgcgcataggcgggagatcttaa

SEQ ID NO: 23956 - protein, 238 aa, Unknown
  Obtained from environmental sample
  misc_feature (1)..(238): Xaa is any amino acid
MQCPPKDFFMKMLNRYVQAPLFVVTVIAVCLSGCAKKAGHKPAEAESAAVADGGCGTADILMETVDPAGAPYLTFTDSRDCRRYRAVKIGGDVWMAENLNYKTPRNSWCGENEESNCEKYGRLYDWETAKTACPAGWHLSAAEEWDSLLTTVGGKRMDDDEDRWAGASKKLRAKSGWIMDDDYKEVTGNGTDDYGFAALPGGERYGNGKFEKPGTPDSRGHWWIADEXTVSARIGGRS

SEQ ID NO: 23957 - DNA, 846 bp, Unknown
  Obtained from environmental sample
  misc_feature (1)..(846): n is a, c, g, or t
gtgaccgccggaagcggcggggcggcgtccgttgccccgcgtaaggatgcctacgctgtcggcgagagggttacgcttacagccgcccccgacgacgggtacgtcttcgccggttggacgggcgcccgcgtcacggattccgcctcattggtcaccagcgccgccgtacgctctgacatggccgtgaccgcgaatttccggcgtatcgattacggtgagctcgccgacgggagggacgggaagacgtaccgcacggtaaagataggtcataaaacgtggatggcggagaacctgaaccacaagcccgaaggatcggcgggcgaatcaggatgtcttgacggcaaagcgggcaactgcgcgaagtacgggcggttgtacgattggcccacggcgacggaggtctgcccgtccggctggtatctgccgtcgtttgacgattggaacaagctgggagtttacgtcgggggagcctacgtggccggcaagaagttgaaagcggcgaacggctgggtcggggaatccggctatcgcggcggcggcacggacgattacggattctcggccctgcccgggggcggcgaacccgaacggttcgagaatataaacatttttggcgcgtggtggacgactacgacatccgattatttgtacaacggcgccgtanacgcacgattaacgctccaccaagacaaactgagcgggcttgccgttgacgagagcgatatgtattccgtgaggtgcgtcatggacgagggcgggtcgctggtgttgggcaccgaggcgggcgggacggtgtcaagcaatccgcgcaagacgtcctataaggcgggggacaggctacgataa

SEQ ID NO: 23958 - protein, 281 aa, Unknown
  Obtained from environmental sample
  misc_feature (1)..(281): Xaa is any amino acid
MTAGSGGAASVAPRKDAYAVGERVTLTAAPDDGYVFAGWTGARVTDSASLVTSAAVRSDMAVTANFRRIDYGELADGRDGKTYRTVKIGHKTWMAENLNHKPEGSAGESGCLDGKAGNCAKYGRLYDWPTATEVCPSGWYLPSFDDWNKLGVYVGGAYVAGKKLKAANGWVGESGYRGGGTDDYGFSALPGGGEPERFENINIFGAWWTTTTSDYLYNGAVXARLTLHQDKLSGLAVDESDMYSVRCVMDEGGSLVLGTEAGGTVSSNPRKTSYKAGDRLR

SEQ ID NO: 23959 - DNA, 954 bp, Unknown
  Obtained from environmental sample
  misc_feature (1)..(954): n is a, c, g, or t
atgatgtccgtttttgaggacgtgcccgattttgtgcggatgttcaccgtctggaaaccgggcgccgttgacggcatggacgccgaaaacataggcaggaccggctcgacccccacagggcagttcgcctacgccctggcaagagacacaggggagataaagcctttaaccgccgttgttgtcaatgaagtaatggagcaaattaccgggcccaacgcaagggcggtcgggatgagcgatcccgccccgttcaagaatatgggaaaagacacttacgccgtcaggattgtagtccccgtcttaaacaaacggctcaacgaagtggtcggggccgtaggctgccagctggatatcggcatgatacagcccagggtggagcagactataaaagatttcgaagaagtcacctcaatggttgtttattccgataacgggtttgtcctggcgaattacctgccggagtttataggaaaacaaattgacacggaaacgcagtacggcccttacctaagcgatgtcaaaacggctgttaaaaacgcccaggaatgggagggggaagcttacgaccccgaactgaaaacaaacatggtaatggccgtcgccaatatccccataggggtttccccgacgacatggtcggtaatggtcggctcgaccgaggcttacatcctgaaagacgtcaacgcgatgagaaactttgtcattatccttgcatcaatagcccttgccgcggcggtggcgcttatataccttgtcctgagcaggactaccgcccccatcgtcaaggtggcggagacgctgaaagacatctccgaaggcgagggcgacctgacgcggactatcacagtcaattccaaagagagtataggtggccttgccctgcaattcgacaaaacgggggaaaagatcaagaataggatcgtccagatcagggacgaggcgaacggcctgtga

SEQ ID NO: 23960 - protein, 317 aa, Unknown
  Obtained from environmental sample
  DOMAIN (234)...(305): HAMP domain
  misc_feature (1)..(317): Xaa is any amino acid
MMSVFEDVPDFVRMFTVWKPGAVDGMDAENIGRTGSTPTGQFAYALARDTGEIKPLTAVVVNEVMEQITGPNARAVGMSDPAPFKNMGKDTYAVRIVVPVLNKRLNEVVGAVGCQLDIGMIQPRVEQTIKDFEEVTSMVVYSDNGFVLANYLPEFIGKQIDTETQYGPYLSDVKTAVKNAQEWEGEAYDPELKTNMVMAVANIPIGVSPTTWSVMVGSTEAYILKDVNAMRNFVIILASIALAAAVALIYLVLSRTTAPIVKVAETLKDISEGEGDLTRTITVNSKESIGGLALQFDKTGEKIKNRIVQIRDEANGL

SEQ ID NO: 23961 - DNA, 987 bp, Unknown
  Obtained from environmental sample
  misc_feature (1)..(987): n is a, c, g, or t
atgatcccgaatatgtacaaaatcgcaggcgaacttacatcaactgtattccatgtatcagcaagagctttggcggcatccagcctttcaattttcggcgaccatcaggacgtaatggcttgccgccagaccggctgggctatgctggcttcaaacagcgttcaggaagtaatggattttgcgcttatcgcccatgccgctactctcagatcccgtttgcccttccttcacttctttgacggtttccgtaccagccatgaattgcagaaagttgaagaaatttcttacgaagatatgcaccagatgatcgacgatgatcttgtcgccgaacaccgcaaacgcggtcttactcccgaaagccccagtatccgcggaaccgctcaaaaccccgacacatatttccaagggcgtgaaggcgttaacaagtattacgaaaaaattcccgagattgtccagaaagaaatggataaactcgccaaacttacaggacgccagtatcatgtatttgattactacggcgcaaaagacgccgacaaagttatcattataatgggttcaggcgctgaaactgttgaagaaacaattgactacctgaataagaaaggcgaaaaaacaggcatggtaaaaatccatctgttccgccccttcgacgcaaaattatttgtagaagcgctgccttccagcgtgaaatccattgccgttttggatcgtactaaagaaccgggctccctcggcgaacctttgtacgaggatgtccgcaccgctgtcgcggaaatgcaagccgccggtaaattcaaagcgactccggttattatcggcggacgctacggtctcggttcaaaagaatttacacccgcaatggtaaaagccgtatttgacaacctttccggcaaanaaatcgcanactttatcgtcggtattaaagacgacgttttgggcaagagccttgaatatgatcataatttctttattgcggagaaggcataa

SEQ ID NO: 23962 - protein, 328 aa, Unknown
  Obtained from environmental sample
  DOMAIN (1)...(156): Pyruvate flavodoxin/ferredoxin oxidoreductase, thiamine diP-binding domain
  misc_feature (1)..(328): Xaa is any amino acid
MIPNMYKIAGELTSTVFHVSARALAASSLSIFGDHQDVMACRQTGWAMLASNSVQEVMDFALIAHAATLRSRLPFLHFFDGFRTSHELQKVEEISYEDMHQMIDDDLVAEHRKRGLTPESPSIRGTAQNPDTYFQGREGVNKYYEKIPEIVQKEMDKLAKLTGRQYHVFDYYGAKDADKVIIIMGSGAETVEETIDYLNKKGEKTGMVKIHLFRPFDAKLFVEALPSSVKSIAVLDRTKEPGSLGEPLYEDVRTAVAEMQAAGKFKATPVIIGGRYGLGSKEFTPAMVKAVFDNLSGKXIAXFIVGIKDDVLGKSLEYDHNFFIAEKA

SEQ ID NO: 23963 - DNA, 495 bp, Unknown
  Obtained from environmental sample
  misc_feature (1)..(495): n is a, c, g, or t
gtgcttggccgcttctgccttgccttacaaaattttggcatacaacacctgataagggccacgggcgacaatccctttgtttttgctgacgcggcctataccattaccactgaggcattggccctgggcgcggactacgccggatacagcggcctccccttgggcgcgggagttgaatcggtaaccgcgaaggccctgctgcgcgccggagccgaagccgcctccccatatgagcgcgaacacgtctgcccttatctttacgcccaccctgaaaagtttctccttcaccgcccgcttgccccgcagcattggcaagcccctgaaattcgcctaacgatagacacccaacaggactacgagcaggcgaaggttttatacgccgcgctggatcgcctggaaaatgccggcaagctggcagaaggcgagcggtataggggagaggtgataattaaggcatacaagggaaatagggagtggggagtggggagtaggtag

SEQ ID NO: 23964 - protein, 164 aa, Unknown
  Obtained from environmental sample
  misc_feature (1)..(164): Xaa is any amino acid
MLGRFCLALQNFGIQHLIRATGDNPFVFADAAYTITTEALALGADYAGYSGLPLGAGVESVTAKALLRAGAEAASPYEREHVCPYLYAHPEKFLLHRPLAPQHWQAPEIRLTIDTQQDYEQAKVLYAALDRLENAGKLAEGERYRGEVIIKAYKGNREWGVGSR

SEQ ID NO: 23965 - DNA, 735 bp, Unknown
  Obtained from environmental sample
  misc_feature (1)..(735): n is a, c, g, or t
atgacaacgaacaataagaattccctgcttcctattttggtgattcccgtttgcgaagcgggccgcggcgggggacatcttgtccgcagcatggctctggtacgcgaactgcgggccttgggcagagaggcttggctatacatcacgtcatcaaacggggacgcggttttggaaacggcgcaattcgacagagcatggcttattgccgaaacaggcctgcttgagaaaagctggcgatgtatcatccttgaccggtttcaaacctccgcggatgagcttgccggttggcaaaaactcgcccctgttatcggaatcgacgaaggcggaaaacacaggggctattttgatttcctgattgacattcttcccaactgtggcagaattacacctaacatcgcctgtccctcccttctgcccctgcccaaaaacaagccgcatcccccatcccgtcctgaaacagaacccctcaaagttttgttaagtttcggacaggaagactccgccggacttggtcccgcgctcgcaaaaacacttgcgggccataaaaacatcgaaatcaccttattaaaaggaaatctatcaaaagaaaatcttcacttctcacttctcacttctcactgctcactgaaacaatccattcccaatcttaacgaacaccttacagattacgatttagtcattactcattttgggcttacctctttgaagcctatacgcggggtccgctcgccataa

SEQ ID NO: 23966 - protein, 244 aa, Unknown
  Obtained from environmental sample
  misc_feature (1)..(244): Xaa is any amino acid
MTTNNKNSLLPILVIPVCEAGRGGGHLVRSMALVRELRALGREAWLYITSSNGDAVLETAQFDRAWLIAETGLLEKSWRCIILDRFQTSADELAGWQKLAPVIGIDEGGKHRGYFDFLIDILPNCGRITPNIACPSLLPLPKNKPHPPSRPETEPLKVLLSFGQEDSAGLGPALAKTLAGHKNIEITLLKGNLSKENLHFSLLTSHCSLKQSIPNLNEHLTDYDLVITHFGLTSLKPIRGVRSP

SEQ ID NO: 23967 - DNA, 927 bp, Unknown
  Obtained from environmental sample
  misc_feature (1)..(927): n is a, c, g, or t
atgggacacttgcttaggggcgaggatcatttttcggtcaggtcttcaacgccggcaagcattgactccataacaagggaagaccttttggcattccattcgcgcatcaagcacccatcaaacttcatcgtgacgatttcgggcaagtttgacagaaagcccgtgatggacaagctaaacgccactgtagggtcaatgaaggcttcaaaggacgcccaaataagccccaaaatccctgcccccgaattcacccgcaccccaggcatctacgttgttgacagagcaaacgctccgcaggccgttgttcaatgggcattccccggcatgcgccgcggcgaccaggattggcacgcagcagtggtgatgaaccaaatcttgggtggtggctttactagcaggctgatggccaaaatccgctccgacgagggactaacctatggcatcagaaccgcgctaggagaaggggccaactggacaggcgattttactggcagcgcccaaacgagcaacaacacggtggcttacttgatgaaactggccctggccgagatggacaagcttaaaaaagtggtactcaccaacgatgagctaaaagccgtaaaggaaggcttaattgattcgttccccagccagtgggccaaatctgcgattgtcagcaggttcgcatcagaagctatggatggctggccggaagattggtggatcaactaccgcgaaaagatacaggcagtcactgcggctgacgtgcagcggatggcgaatcgccttctcgacatgaacaaaatgatcatccttgccgtcgggcaggccggtataatcgaagccggcgaccacgaccgcaaagtcctgctgaaagacattttgcccttgcccatgaagcgcctgccgctgagggatcccatgactgggaagcccatgcctaagtag

SEQ ID NO: 23968 - protein, 308 aa, Unknown
  Obtained from environmental sample
  DOMAIN (23)...(204): Peptidase M16 inactive domain
  misc_feature (1)..(308): Xaa is any amino acid
MGHLLRGEDHFSVRSSTPASIDSITREDLLAFHSRIKHPSNFIVTISGKFDRKPVMDKLNATVGSMKASKDAQISPKIPAPEFTRTPGIYVVDRANAPQAVVQWAFPGMRRGDQDWHAAVVMNQILGGGFTSRLMAKIRSDEGLTYGIRTALGEGANWTGDFTGSAQTSNNTVAYLMKLALAEMDKLKKVVLTNDELKAVKEGLIDSFPSQWAKSAIVSRFASEAMDGWPEDWWINYREKIQAVTAADVQRMANRLLDMNKMIILAVGQAGIIEAGDHDRKVLLKDILPLPMKRLPLRDPMTGKPMPK

SEQ ID NO: 23969 - DNA, 813 bp, Unknown
  Obtained from environmental sample
  misc_feature (1)..(813): n is a, c, g, or t
atgcacccaacattatttcacatcttttcgtttcccgttccttcttacgggactatgctggcgctctcctttttgagcgggattcttttgtctatgtacttcgccaagaagcgggggcttgatccgaatgttgtgtcggacgcggggctttaccttataatctcggctattgtcggcgctcgcgcttattatgttatgacgcacttcggcgagtttcgcgggaatttgttatctattgtcaatccatatcaggacgggcgcattggtatcagcgggcttgtgatgtacggggggtttatcgcggctattgtcacaacggcattgttttttaagattaagaagcttcctattttgcggtatttggatgtattctcgcctggggtcggggtggggatcgcccttacgcgtatcgggtgctttcttaacgggtgctgctacggggtggcggctaaggcggggagctttttgtcggtaagctacccgattgagacgcactctccggcgggatactatcagcgttcaatcggcgccgcgggattgctgcccacgcagttttttgaatccgcaggcgggataatcattgccgttaccttgtatttggtcggcaggagcaagtttgcgtttgcggggttgcagttctatttattaattgtgatgtacgcggcgctgcgcttttttatcgagagcgtccgttatatcgagaccgtgaggataggaccgttttcgcataatcagttgatatgtatcgtttcgtttttggtgttcggggggatcattgtcaggaagtttatcaggattaatacggcgcgttga

SEQ ID NO: 23970 - protein, 270 aa, Unknown
  Obtained from environmental sample
  DOMAIN (1)...(264): Prolipoprotein diacylglyceryl transferase
  misc_feature (1)..(270): Xaa is any amino acid
MHPTLFHIFSFPVPSYGTMLALSFLSGILLSMYFAKKRGLDPNVVSDAGLYLIISAIVGARAYYVMTHFGEFRGNLLSIVNPYQDGRIGISGLVMYGGFIAAIVTTALFFKIKKLPILRYLDVFSPGVGVGIALTRIGCFLNGCCYGVAAKAGSFLSVSYPIETHSPAGYYQRSIGAAGLLPTQFFESAGGIIIAVTLYLVGRSKFAFAGLQFYLLIVMYAALRFFIESVRYIETVRIGPFSHNQLICIVSFLVFGGIIVRKFIRINTAR

SEQ ID NO: 23971 - DNA, 807 bp, Unknown
  Obtained from environmental sample
  misc_feature (1)..(807): n is a, c, g, or t
ttgtgggctgtttttagcgcctctatcgctgaggcggtaaaggcttcatcttcagcaagcaatttaaccagcttttcaaagtattctgtttcgcttgcatcgagatggcccaaaaaaacaaaacgtctttccgcgttccttacgaggttcgcagctttccgtaatcgctgtgaacgcgggagctgggttagtttatatagtgggatcataggcgctccatacgttataatacacatgatgttactggggcagaaatttttcaatcagccaaccgtggagctggccagggcgcttttgggcaagtttctggtattgggggatttgcagggcaaaatcgtggaaaccgaagcttaccttttccacgacgaccccggctgccatgcgagcaggggtatgactccccgcaacgcccccatgttcggccccgccggtcatacttacgtttattttatttacgggatgtactattgccttaacattgtcagcggaaaaatcggcgaaggcgaagcggtcttgatccgcgccctagaacccattcagggaattgagatcatgatgcaaaggcggaacacaaacaaaatagaaaacctctgcaacgggcccggtaagctaacgcaagccttcggcatcaccaaagaacacaacaaccgaagcctttttaccggggaattgaagatccacaacagccgtgaaaaaccggaaatcggaaccagtaaacggatcggcttgtcggcaggcggggagcttgagctgaggttttttattaagggaaataggtttgtgtcaaagcagtcatataaaccctaa

SEQ ID NO: 23972 - protein, 268 aa, Unknown
  Obtained from environmental sample
  DOMAIN (83)...(260): Methylpurine-DNA glycosylase (MPG)
  misc_feature (1)..(268): Xaa is any amino acid
MWAVFSASIAEAVKASSSASNLTSFSKYSVSLASRWPKKTKRLSAFLTRFAAFRNRCERGSWVSLYSGIIGAPYVIIHMMLLGQKFFNQPTVELARALLGKFLVLGDLQGKIVETEAYLFHDDPGCHASRGMTPRNAPMFGPAGHTYVYFIYGMYYCLNIVSGKIGEGEAVLIRALEPIQGIEIMMQRRNTNKIENLCNGPGKLTQAFGITKEHNNRSLFTGELKIHNSREKPEIGTSKRIGLSAGGELELRFFIKGNRFVSKQSYKP

SEQ ID NO: 23973 - DNA, 681 bp, Unknown
  Obtained from environmental sample
  misc_feature (1)..(681): n is a, c, g, or t
atgaacggattagcgatacttatcatttccgcagtagttttatctcttgcttatttaatttacggacgctaccttgcaaagaaatggggaattgagcccaataaaaaaactcccgctcatgagctggaagacggcatggattatgtgcctaccgaacctagtgtggtttttggtcaccagtttgcttcaattgccggagctggtcccatcaatggtccgattatagcggcgatgttcgggtggttgccggtattgctttggattctcattgggggaatattctttggtgcggttcaggattttgcttctctttacgcctcggttaagaataagggaaaaacaatcggctttatcatagagacttatataggcagagcgggcaaacggctgtttctcatttttgtatggcttttttcaattttggtaattgcggctttcgcagacattgtatcgggaacttttggcgggttttccaaagcagcaagcggcgaagctgtagagattcaggctaacgcttcggtggctaccacatccatcttattcattttagcggcaatagggcttggtttttttgcgaggcgaattaaacccaaagcatttgcgagcggaataattgcctgcgccattttaatattttgcattgctataggtctctctttccaatatacatctcggccataa

SEQ ID NO: 23974 - protein, 226 aa, Unknown
  Obtained from environmental sample
  SIGNAL (1)...(17)
  DOMAIN (1)...(224): Carbon starvation protein CstA
  misc_feature (1)..(226): Xaa is any amino acid
MNGLAILIISAVVLSLAYLIYGRYLAKKWGIEPNKKTPAHELEDGMDYVPTEPSVVFGHQFASIAGAGPINGPIIAAMFGWLPVLLWILIGGIFFGAVQDFASLYASVKNKGKTIGFIIETYIGRAGKRLFLIFVWLFSILVIAAFADIVSGTFGGFSKAASGEAVEIQANASVATTSILFILAAIGLGFFARRIKPKAFASGIIACAILIFCIAIGLSFQYTSRP

SEQ ID NO: 23975 - DNA, 360 bp, Unknown
  Obtained from environmental sample
  misc_feature (1)..(360): n is a, c, g, or t
ttgcgacctgttggttttgctagtggttcggcagaccttaaggatcagggtaaggaaattttaaaagatattagcgatattataaagaataactcagatttgaaagttcgcgttgaagggcatacagatgatgttcccataaattccaatcgttatcgcagtaactgggaactttccagttcaaggtctctttcagtggttcagttgctttcggggcaaacaggcattcagccgcaaaatatgagtgcggttggctatggtgaataccgtcccattgttccaaacacaagtcccgagaatcgtgccaaaaaccgccgcatccaaatttttgtggattacataaacgacgagaaaaaataa

SEQ ID NO: 23976 - protein, 119 aa, Unknown
  Obtained from environmental sample
  DOMAIN (5)...(105): OmpA family
  misc_feature (1)..(119): Xaa is any amino acid
MRPVGFASGSADLKDQGKEILKDISDIIKNNSDLKVRVEGHTDDVPINSNRYRSNWELSSSRSLSVVQLLSGQTGIQPQNMSAVGYGEYRPIVPNTSPENRAKNRRIQIFVDYINDEKK

SEQ ID NO: 23977 - DNA, 879 bp, Unknown
  Obtained from environmental sample
  misc_feature (1)..(879): n is a, c, g, or t
gtggattcaaagggtcgcaattttttaattgtgaaaagcattccatatatggtgaacaaaaaagaacttttggaaaccataggcaaacttgtaaacgacgacaaactggaaggcattaaccacgccaacgatgaaagcgaccgcgagggaatgcgaattgttgtggggctaaaaaaagatgccgtgccagaagttgtaaaaaacaatctgttcaaatacacaaggctgcaagagagttttagcatttacaatttagctcttgtaaaccgtcagccaaaacttttgaccttaaaggatttgtgcgcaaattacatagaacaccgctacattgtgattcgccgccgcacggaatttgaactgagaaaagcaaaagagagagcgcatattttagagggttttaaaatagcccttgcccccgaaaacatagacgaagttgtacgcataatccgttttgaagacgagccagatcaagttttgcaaacccgttattctctttctgaattgcaagtaaaggcaattttggaaattcgtttgcgaaacataaagaaaatagaagtaaaaaagtttgaggacgagcttgcagaacttttggtgaaaatcgcagatttagaagatattttggcaaaaaaagaacgcataatggatattgtgaaaacaaggcttcaagaaattgccgataaatacggcgatgcgcgccgcacaaaaatagcagatgatgaggatgatttagaatacgaagacttaattgccgaagaagagcaggttatcactctttccaaaagaggctatattcgcaggttgcctatagatacattcaagatacagggtaggggaggcaaaggagttattggtacagggctaaagacctcggccatctga

SEQ ID NO: 23978 - protein, 292 aa, Unknown
  Obtained from environmental sample
  DOMAIN (252)...(291): DNA gyrase C-terminal domain, beta-propeller
  misc_feature (1)..(292): Xaa is any amino acid
MDSKGRNFLIVKSIPYMVNKKELLETIGKLVNDDKLEGINHANDESDREGMRIVVGLKKDAVPEVVKNNLFKYTRLQESFSIYNLALVNRQPKLLTLKDLCANYIEHRYIVIRRRTEFELRKAKERAHILEGFKIALAPENIDEVVRIIRFEDEPDQVLQTRYSLSELQVKAILEIRLRNIKKIEVKKFEDELAELLVKIADLEDILAKKERIMDIVKTRLQEIADKYGDARRTKIADDEDDLEYEDLIAEEEQVITLSKRGYIRRLPIDTFKIQGRGGKGVIGTGLKTSAI

SEQ ID NO: 23979 - DNA, 1050 bp, Unknown
  Obtained from environmental sample
  misc_feature (1)..(1050): n is a, c, g, or t
atgcgtgttacaggcggcggcgatccctcaggcggccttcgggacaccctggttggcaaactgccccagatcaagatcgcccgtgaggcagcagctggttattcgtcctacggcaaccagattggccttgccaacggacaggtggcggaattctaccacccaggctttatcgcanaacgaatggaactgggcgcggtaatcggcgcggtaccgaaggcctgggtacgccgcgaggaacccgttgcaggcgacatggtgattctcgtggggggaagaaccggcagggacggcatcgggggcgcaaccggttcctccaaggttcacaccggcgaatccgtagagagcgccggagcggaagtgcagaagggaaacgccgtagaagagcggaagctccagcgccttttccgcaaaagcgaagtaagccgcttgattaagcgctgcaacgacttcggcgcaggcggcgtttccgtctcggtgggagagcttgccgctggcctcgacataaacctcgacgcggcgccgaaaaagtacgccggccttgacggaacagaactggcaatttcggaatcccaggaaagaatggcggttctttgttcatcagacgatgcagaagcttttataaaagcggcggcggcggaaaacctcgaggcggttatcatagctaaagtaaaaagcgataaccgcctgcgcatgagctggcgcggtaaaaccatcgtggacatttccagagacttcctcgacacaaacggcgccccccgtactgcgaaagcattgttactgaaaattaaccacggagaacacggagctatagatggtgatctaccaaccagtgttctattagacaaccttgagcgggaacttgtaagcctccggagcggaagtcggcgggggcttcaggaacgtttcgactctacgatcggcgcgaactccgtgctttatccctggggtggcggcgagcagggaacacctgaatgcggcatggcggccctgcttccgtcattgggaaaacagagccgcaccgcgagcctgatgacttggtacccgccataa

SEQ ID NO: 23980 - protein, 349 aa, Unknown
  Obtained from environmental sample
  DOMAIN (81)...(234): AIR synthase related protein, C-terminal domain
  misc_feature (1)..(349): Xaa is any amino acid
MRVTGGGDPSGGLRDTLVGKLPQIKIAREAAAGYSSYGNQIGLANGQVAEFYHPGFIAXRMELGAVIGAVPKAWVRREEPVAGDMVILVGGRTGRDGIGGATGSSKVHTGESVESAGAEVQKGNAVEERKLQRLFRKSEVSRLIKRCNDFGAGGVSVSVGELAAGLDINLDAAPKKYAGLDGTELAISESQERMAVLCSSDDAEAFIKAAAAENLEAVIIAKVKSDNRLRMSWRGKTIVDISRDFLDTNGAPRTAKALLLKINHGEHGAIDGDLPTSVLLDNLERELVSLRSGSRRGLQERFDSTIGANSVLYPWGGGEQGTPECGMAALLPSLGKQSRTASLMTWYPP

SEQ ID NO: 23981 - DNA, 351 bp, Unknown
  Obtained from environmental sample
  misc_feature (1)..(351): n is a, c, g, or t
ttgtcaacttatgtttttatattatatatggcttttaccatacaggaacaaattgccggggcgcgcaagatagtattcaagtttggttccggcacccttgccggcggcgacgggaaaatgaacgcctcttttctggacgaatttgccgtgcagacggctaacttgatcgccaaagggaaacaggttgtcattgtttcatccggcgcgcaggtagccggtctttcaaccatgggaaattgggcgaggaaaaaggacatacattaccgccaggccctctgcgccgtggggcaggtacagcttatgaacgcctggcaaatggctttgagccgcacggctgcctctcggccataa

SEQ ID NO: 23982 - protein, 116 aa, Unknown
  Obtained from environmental sample
  misc_feature (1)..(116): Xaa is any amino acid
MSTYVFILYMAFTIQEQIAGARKIVFKFGSGTLAGGDGKMNASFLDEFAVQTANLIAKGKQVVIVSSGAQVAGLSTMGNWARKKDIHYRQALCAVGQVQLMNAWQMALSRTAASRP

SEQ ID NO: 23983 - DNA, 456 bp, Unknown
  Obtained from environmental sample
  misc_feature (1)..(456): n is a, c, g, or t
atggcttttgaacctgttatgagcgctcaggaaaaagcggctaccgcccaatgggtagacgcggcgaataaaaaactcagtattgaactcaataaaagcaatgtcgcgacaaatcagaatcttggaaaagaggattttttgaagctccttttggcccagttggcccatcaggacccttcggctcccatggaggacaaggaatttatcgcccagatggcccagttttcaagccttgagcagatgaccaacatggcggctgatttcgcgaaaatggcgcgtatgctaaaggttacggaagcctcagtctctttaggcaaggccgtcgagataaacctggaagataataccatccagggcgttgtccgggcggtaaccagagaagaagctccccaggtacttgtgaacggaaggttctacgattgggagcaagttgccattgtttatgacgaattctaa

SEQ ID NO: 23984 - protein, 151 aa, Unknown
  Obtained from environmental sample
  DOMAIN (18)...(151): Flagellar hook capping protein
  misc_feature (1)..(151): Xaa is any amino acid
MAFEPVMSAQEKAATAQWVDAANKKLSIELNKSNVATNQNLGKEDFLKLLLAQLAHQDPSAPMEDKEFIAQMAQFSSLEQMTNMAADFAKMARMLKVTEASVSLGKAVEINLEDNTIQGVVRAVTREEAPQVLVNGRFYDWEQVAIVYDEF

SEQ ID NO: 23985 - DNA, 477 bp, Unknown
  Obtained from environmental sample
  misc_feature (1)..(477): n is a, c, g, or t
ttgcgctgttatgatttttataacaaacagtcttctcctaccattaaacaaggtattgcggccttgcggtgcgcgtggcttcttgatgaacttaataaaaaattccccggacagcattacgactggctcggtgttcttttcaggaaaaaagcccagtatttgtataacgaagcgcttaaccgcgaacagggcggaaaggaaacgctttcaggcattaaagttatgggacctgataccgataaaaattattcctacgaaggaatgctttacatttgcgcgtatctccgctacaaatacggtcccgcgcataacagcgaagagagaaaattatcccttgaagaagcgcgcagaacgattgcaaaacttttcggtatgggtaaatcatccaaggataaaccgggagctttccttgaaatcgcaagaaagttatacgacacgattaacgcggaaataacagaaaattttccggacgcataa

SEQ ID NO: 23986 - protein, 158 aa, Unknown
  Obtained from environmental sample
  misc_feature (1)..(158): Xaa is any amino acid
MRCYDFYNKQSSPTIKQGIAALRCAWLLDELNKKFPGQHYDWLGVLFRKKAQYLYNEALNREQGGKETLSGIKVMGPDTDKNYSYEGMLYICAYLRYKYGPAHNSEERKLSLEEARRTIAKLFGMGKSSKDKPGAFLEIARKLYDTINAEITENFPDA

SEQ ID NO: 23987 - DNA, 885 bp, Unknown
  Obtained from environmental sample
  misc_feature (1)..(885): n is a, c, g, or t
ttgcgtctttgggttgtttcgttgctattcttcacgattattctgtttgtgtacaaaccgcttcacgaaaagacaatatattatctgtttgagtataaattcaactcgctaaacaaaaaacagaatatcatttatgtatgtttagtcattctgacgataattttttcatggttctgtgtttatacatccgtttcggaagaattttcaaatactccgatgaatcatcaatacaacaggtatttagttgacgcttttatagccggcaggacgaatatagatttcggtcatcctgaaaaactactcaacgcggaacgaccctacgattattattggctctactcaaacggctatgaatggggtactgattgggcatgggacatcgcctattacaagggaaagtactacacatactatggaccggtcgcggcggtgctcctttatctcccgtacaagcttgtcaccggtaaatatttgtcgcatcgtaccggaatattcgtgttcgccacggttgccgtgattttactggcgttgctttggaggtttttagtcaaaaaatatatgccaaatgcgcgattcgtgttttatctgctctcatttttaaccttgttcttcgtaagccacctctcggccggtttgagatatccggccgtctggcttattgtgcaggtagcaggattcgcgtttatcgttgccggaacgtttttgttgcttaaatcggttgataaagagcatataaatcatttacaactattcttcgcgtgcctctgtttggcgctgtctgttggctgccgtgtcaatatgggttttggtatctatacttgttccagcccgttctgtggaaacgcaagtcttggaaaattggcgctgtttatctcaatcccttaa

SEQ ID NO: 23988 - protein, 294 aa, Unknown
  Obtained from environmental sample
  misc_feature (1)..(294): Xaa is any amino acid
MRLWVVSLLFFTIILFVYKPLHEKTIYYLFEYKFNSLNKKQNIIYVCLVILTIIFSWFCVYTSVSEEFSNTPMNHQYNRYLVDAFIAGRTNIDFGHPEKLLNAERPYDYYWLYSNGYEWGTDWAWDIAYYKGKYYTYYGPVAAVLLYLPYKLVTGKYLSHRTGIFVFATVAVILLALLWRFLVKKYMPNARFVFYLLSFLTLFFVSHLSAGLRYPAVWLIVQVAGFAFIVAGTFLLLKSVDKEHINHLQLFFACLCLALSVGCRVNMGFGIYTCSSPFCGNASLGKLALFISIP

SEQ ID NO: 23989 - DNA, 603 bp, Unknown
  Obtained from environmental sample
  misc_feature (1)..(603): n is a, c, g, or t
atggcttatagaggcccaaaagcaaaagttgctcgctctcttgatttggcggtcactcccaaaacccaaaaaattttagaacgccgcaagttcccaccaggccagcacggaatgagccgcaaaaaaaatgccggagtttacaaacagcagttggttgaaaaacagaggctaaaattcacatacaacatttccgaagcccaactagccaaaacctacacagaagcaaaccgcagggaaggttcctctggagataacttgatggttcttttggaaactaggctagacgctcttgtatatcgcgcaggctttgcccgcacaattttcgcagctcgccaatacgttgctcacggtcattttcaggtgaacggaaggcgcagtttttccccaaaccgccagattaaaccaaacgatttaatagagcttcgcgaaaaatcaaaaaaccatccgcaaataaaagaagcgatagaaggcgcgccagaagctccaaattatttgtcggtgaacaaagacaaaaaagaagccaagctggtaaatgtaccgctccgcgaccagattccagtgaagctgaatgagcagttggttgtggaatattacagtaagtaa

SEQ ID NO: 23990 - protein, 200 aa, Unknown
  Obtained from environmental sample
  DOMAIN (1)...(91): Ribosomal protein S4/S9 N-terminal domain
  misc_feature (1)..(200): Xaa is any amino acid
MAYRGPKAKVARSLDLAVTPKTQKILERRKFPPGQHGMSRKKNAGVYKQQLVEKQRLKFTYNISEAQLAKTYTEANRREGSSGDNLMVLLETRLDALVYRAGFARTIFAARQYVAHGHFQVNGRRSFSPNRQIKPNDLIELREKSKNHPQIKEAIEGAPEAPNYLSVNKDKKEAKLVNVPLRDQIPVKLNEQLVVEYYSK

SEQ ID NO: 23991 - DNA, 315 bp, Unknown
  Obtained from environmental sample
  misc_feature (1)..(315): n is a, c, g, or t
gtgatacgcgcggtgaaatacgcagccctagcaggtttttttattccgtttaacgtaaaattaaaaataacaagacaatcgggtttgctgtattctatttgtccttccggccttgcggaagaaattttaaaaatcattaatttggacatcgctgcgggtattgtggatatgatggataaaatgggattgtataattatttgcagcccaatgccgcagacgttatgcggaagaatccgtctttcagccaaaattatctaaaaagcatgacggctttaggcggcagcggacaggtctctaggcgcgctcttttatga

SEQ ID NO: 23992 - protein, 104 aa, Unknown
  Obtained from environmental sample
  misc_feature (1)..(104): Xaa is any amino acid
MIRAVKYAALAGFFIPFNVKLKITRQSGLLYSICPSGLAEEILKIINLDIAAGIVDMMDKMGLYNYLQPNAADVMRKNPSFSQNYLKSMTALGGSGQVSRRALL

SEQ ID NO: 23993 - DNA, 321 bp, Unknown
  Obtained from environmental sample
  misc_feature (1)..(321): n is a, c, g, or t
atgagatacagatattccgtcgcggaaaacggcaaacatgaaaaaaaagccgccatttataccaaagacgagcacggcataaatttcgccgatgtagacggcgaagccgtaagtattgtaaagaaacttaaaaattcaggctacgattcctacattgtcggcggcgcggtgcgcgatttgatactgggaaaaaagcctaaggattttgacattgtaagcgcggcaacccccacgcgtataanaaaaatattccgcaattccagaatcatagggcggcgtttccgtctagtgcatatttacttaggagaaagagtgctttga

SEQ ID NO: 23994 - protein, 106 aa, Unknown
  Obtained from environmental sample
  misc_feature (1)..(106): Xaa is any amino acid
MRYRYSVAENGKHEKKAAIYTKDEHGINFADVDGEAVSIVKKLKNSGYDSYIVGGAVRDLILGKKPKDFDIVSAATPTRIXKIFRNSRIIGRRFRLVHIYLGERVL

SEQ ID NO: 23995 - DNA, 423 bp, Unknown
  Obtained from environmental sample
  misc_feature (1)..(423): n is a, c, g, or t
ttgccaaagcgatggcggacgggccgtacaataaaccgttcaaaccaaaccgaacttcctttgactggatttcccgcgacgaaaacgaagtggataaatacgttaatgatcctttcagcggcatgctgtgttccaccgngtttttacagggaacttgcgaagttgttgtatcatattcaccgcggcgaagaaatggagaagattaaccgtaatttgccggtgtatatatttgcgggaagcgaagatcctgtaggcgacatgggcgcaagtcccgccgcccttgttaacgcgtaccgcaatttagggatcgttgatcttgagtttgcgctgtatcagggcgcaaggcacgaaacgctaaacgaaattaaccgcgaagaggttatggaaaaccttctttcatggttaaaaaaacattttgaatga

SEQ ID NO: 23996 - protein, 140 aa, Unknown
  Obtained from environmental sample
  misc_feature (1)..(140): Xaa is any amino acid
MPKRWRTGRTINRSNQTELPLTGFPATKTKWINTLMILSAACCVPPXFYRELAKLLYHIHRGEEMEKINRNLPVYIFAGSEDPVGDMGASPAALVNAYRNLGIVDLEFALYQGARHETLNEINREEVMENLLSWLKKHFE

SEQ ID NO: 23997 - DNA, 624 bp, Unknown
  Obtained from environmental sample
  misc_feature (1)..(624): n is a, c, g, or t
gtggtgatgcgggttgaacaaattggctcagctactctttacctcggcgactgcatgaaacttatggcaactctgcaagataaaagcatagacttggcaattgttgatcccccgtatgggaacggaaaccaaaaaccagtgagaacaggcggcacatgggcggtaaaatataaaaagaaaataaaagaatgggatattgcgcccactcaagagtattttcaagaattatttagagtttccaaacatcagattatctggggcgggaattattttagcttgctgcctagcagaaactttataatatggcaaaaaactataccagaaaactttacgatggctatgtgcgaatacgcatggacgaacataattggaaatgcaaagttatttaaataccatagttttgacaaaaatagaattcaccctacgcaaaaaccagtagccctatatgaatggctgttatataaatacgcaaaacagggagatataattcttgacacccactttggaagcggatcaatagcaattgcctgcaataaattgggatttaacttaatagcttgcgaaattgacaaagattattttaatgccgcctataaacggataaaggagacaataaaactatga

SEQ ID NO: 23998 - protein, 207 aa, Unknown
  Obtained from environmental sample
  DOMAIN (30)...(199): DNA methylase
  misc_feature (1)..(207): Xaa is any amino acid
MVMRVEQIGSATLYLGDCMKLMATLQDKSIDLAIVDPPYGNGNQKPVRTGGTWAVKYKKKIKEWDIAPTQEYFQELFRVSKHQIIWGGNYFSLLPSRNFIIWQKTIPENFTMAMCEYAWTNIIGNAKLFKYHSFDKNRIHPTQKPVALYEWLLYKYAKQGDIILDTHFGSGSIAIACNKLGFNLIACEIDKDYFNAAYKRIKETIKL

SEQ ID NO: 23999 - DNA, 888 bp, Unknown
  Obtained from environmental sample
  misc_feature (1)..(888): n is a, c, g, or t
ttggctcaaacgcgtggtgttcaatcttggcaagaccgcgtttattatctgggtcaatactattttcattccgacgatcccatctcacggctcatcgcggaggtggaaaccggaacgctcaagcggtggattgccgtgcgcctctcctgcttccgtcccgacggttccccgctctggccggaatactggtccgcagaagctttggaagaaaagcgtgagcagcttggctttgacagtttctcaaccgagtggaataatgagccgttatctgacgagcaacgcattattcaacgctcttggatcaaagcccacgagtaccgcgaactgcctccggcaaacgaactgatctttttatgcggcgtagacccggcaaccggcaagcacgaccgcacatcagaagttccgatagccgtccacaaaaagaccggcattatttacgttctgccaccctgggcaaaagtgtgcagtgaaacggcaaccgtcaggcagttaataatcatacaccgcctttatggatttgtactcatcggatgggaagatgttgtattttccggcatctacggaaattatgtgcaaaaaatggctgcggaagaaaacgtatatcttccaattaaaaaactgtccaactcactgtcaaaagacgcgaaagcccgttttctctctccgctgattgagaacggcattatccgttttcccgccgaaggcgctgctgacatgattgatgaactagttaattttccaaagtggaaatttgacgatcaaatggacggcctgtatctggctgtcaaagtgataccttccggcagcggtacgccggtagtggagcaggtaaaaatcacggctaacacgacagcgcggaaaattatagacatggtgaggaggtggtga

SEQ ID NO: 24000 - protein, 295 aa, Unknown
  Obtained from environmental sample
  misc_feature (1)..(295): Xaa is any amino acid
MAQTRGVQSWQDRVYYLGQYYFHSDDPISRLIAEVETGTLKRWIAVRLSCFRPDGSPLWPEYWSAEALEEKREQLGFDSFSTEWNNEPLSDEQRIIQRSWIKAHEYRELPPANELIFLCGVDPATGKHDRTSEVPIAVHKKTGIIYVLPPWAKVCSETATVRQLIIIHRLYGFVLIGWEDVVFSGIYGNYVQKMAAEENVYLPIKKLSNSLSKDAKARFLSPLIENGIIRFPAEGAADMIDELVNFPKWKFDDQMDGLYLAVKVIPSGSGTPVVEQVKITANTTARKIIDMVRRW

SEQ ID NO: 24001 - DNA, 474 bp, Unknown
  Obtained from environmental sample
  misc_feature (1)..(474): n is a, c, g, or t
atgaatgatggcagagacaacttaatacctatgtcggcgcgaagcgaggacgaagcaagggagctggggcgtaaaggcggcagggcaagcggcaagaaacgccgcgagcgtaaatcaatacgagatggcttaaacgctattttatccgctcccgtcaaggacaaagctgtactcgcagaacttaaaaaagcggacgcggacaagaacgcgcaagggctgctgctgctccgtatataccagcgggcgattaacggcgatatgcaagccgctaaactgctcttaaccgcaataggcgaagcagaccccgccgcgcaggaaatagcacatgtgaaacttgacctaggatttttaagattggaattagcgagtgatctgattgagaaaaacgaacccactccaaattcaaatcttattgaagccctgaacgcaaccgtcggcgaattttggggcaacgaaaacaaaaacggaggataa

SEQ ID NO: 24002 - protein, 157 aa, Unknown
  Obtained from environmental sample
  misc_feature (1)..(157): Xaa is any amino acid
MNDGRDNLIPMSARSEDEARELGRKGGRASGKKRRERKSIRDGLNAILSAPVKDKAVLAELKKADADKNAQGLLLLRIYQRAINGDMQAAKLLLTAIGEADPAAQEIAHVKLDLGFLRLELASDLIEKNEPTPNSNLIEALNATVGEFWGNENKNGG

SEQ ID NO: 24003 - DNA, 372 bp, Unknown
  Obtained from environmental sample
  misc_feature (1)..(372): n is a, c, g, or t
gtgatcagatggccgagattttgggctttattttccaaagcaaatcgaaataccagtgttaaggatattaaaactaaaaaaattatacttgaaactgacgttatgctggaaaacggcgataaagccatgttggttgaaataaaaacccagcttaccgttgaacgaataaaaaaacatatagaacggcttgagaaaatgcggaaacacgctgatttatacggcgacaaacgtacttttttaggtgcggttgccggtgttgtggtagaagatgatgtaagagaatatgccttaaatcaaggtctttatttaattgaacctgcgggagaagaccttactattaccccgccaaacggcaaaccgaaagaatggtaa

SEQ ID NO: 24004 - protein, 123 aa, Unknown
  Obtained from environmental sample
  misc_feature (1)..(123): Xaa is any amino acid
MIRWPRFWALFSKANRNTSVKDIKTKKIILETDVMLENGDKAMLVEIKTQLTVERIKKHIERLEKMRKHADLYGDKRTFLGAVAGVVVEDDVREYALNQGLYLIEPAGEDLTITPPNGKPKEW

SEQ ID NO: 24005 - DNA, 1116 bp, Unknown
  Obtained from environmental sample
  misc_feature (1)..(1116): n is a, c, g, or t
atgatggccgantgggccggcgaaggttatatttacccgcacgcataccgcgaccactgggcggcccagcaatacctgcccacggctctgcgcggcaggaccttctatattccctccgttatcggctatgaggggaagctcagggacgaggtgctgcaaaaaagggaactgcaggcggcggttattttaggcgactttcagtcgccagacgaccaaacggccgaaggggagcttttaagctggtcggcggcggcgaaaggaagagagggctggttcaagcgccttgagtcgggcagaagcgcccttctgcttaaagaccgcgacgcgattttcaatgccgcctcccctgcccgccaggcccggatccttatcccgcttgccgccgacggacttttgctctgggaaagcctgcgccgctgccccgagggcctcaccgccgcgttagtcgctaacgaagccagccgcgaggcgctgctccgttacgcggcgctacttgatgaaattgagcagccggaaatcgccgtgctggaatcggggtttttgccctcttcccaacaggccggcgaatggtttgcctcaagcgttttcgattttattttgctaagggaaccctggcgcaggggtttttcggcagccggtcctgaggctgaatttacaagcctcgccgaatccgcaaaagccctgcttgcccccgaaggccgtattattctgctctgctcgccgccaatgatgggccagcgaatatcgcggttcatcatggatgatgaccaattattggcggaaaaactggccggggctgaggacgccttcttttcgcgtcagaaaggcccgcttaccgcgtggaactgggccgccgaagatctgtccgcttcctttgaatcaatgggcttcaaggtaaaacttgaggttcttgaacagaaagaagaacggcttatcagcccgaaagacattagcgcgtggtttgacaaagaaaattcccgctggggcgcctttatgggaaaagctctcgacgcagccgatttttcccgcgccgaagaactgctgacaaagcgaatccaggcggggccattgccgtggaggtggaagagtttgttaatatcagggattggggactag

SEQ ID NO: 24006 - protein, 371 aa, Unknown
  Obtained from environmental sample
  misc_feature (1)..(371): Xaa is any amino acid
MMAXWAGEGYIYPHAYRDHWAAQQYLPTALRGRTFYIPSVIGYEGKLRDEVLQKRELQAAVILGDFQSPDDQTAEGELLSWSAAAKGREGWFKRLESGRSALLLKDRDAIFNAASPARQARILIPLAADGLLLWESLRRCPEGLTAALVANEASREALLRYAALLDEIEQPEIAVLESGFLPSSQQAGEWFASSVFDFILLREPWRRGFSAAGPEAEFTSLAESAKALLAPEGRIILLCSPPMMGQRISRFIMDDDQLLAEKLAGAEDAFFSRQKGPLTAWNWAAEDLSASFESMGFKVKLEVLEQKEERLISPKDISAWFDKENSRWGAFMGKALDAADFSRAEELLTKRIQAGPLPWRWKSLLISGIGD

SEQ ID NO: 24007 - DNA, 858 bp, Unknown
  Obtained from environmental sample
  misc_feature (1)..(858): n is a, c, g, or t
ttgacgattggtaaacgaataaaatccgcccgtgcttacattgcaacagccggactttacgagttatatataaatggtggaaaaatcggaaatcaccgcctcgatccgatgttcactcgttacgaccgccgcaatttatatgttacctacgacattacgcggcaacttcaacaggggaaaaatgcggtcggcgtactgctcggaaacggctggtacaaccaccaaagccgcgccgtatgggattttgaccgtgccccatggcgtgcacgaccagcgttttgtctgaatattcgcattgtgtatgaagatggaacggtgcagaccgtttctaccgacaatacgtggaaaaccgcttcgggcagtctgattttcaacagcatttatacaggcgaacacgttgatttcaatcttgaacaaaagggatggaacacaaacgctttcgatgatacaaaatggcaatatgccgttgtacgttctgcgccttccaaaaacgttacagcgcaacaattgcagcctatacgaaatgttactacttttgaggcaaaaaatcttacaaaacttgatgataaaacgtatgttttcgatttcggacaaaatatggccggagtgacccgtttgaaagtcaatggaagaaaaggcgttgttgttaaattaaaacatggcgagcggctttacgcgaacggacatgtagatttgtctaacattgaggaattctatcgcggcgacagtaaaagcgatccgtttcaaaccgatattataattttgagtggcaaagacgacgagtttatgccgcgctttaattacaaagnggtttcgttatgtagaagtaacggcaagcagtccgttaaatttggataa

SEQ ID NO: 24008 - protein, 285 aa, Unknown
  Obtained from environmental sample
  DOMAIN (5)...(179): Alpha-L-rhamnosidase N-terminal domain
  misc_feature (1)..(285): Xaa is any amino acid
MTIGKRIKSARAYIATAGLYELYINGGKIGNHRLDPMFTRYDRRNLYVTYDITRQLQQGKNAVGVLLGNGWYNHQSRAVWDFDRAPWRARPAFCLNIRIVYEDGTVQTVSTDNTWKTASGSLIFNSIYTGEHVDFNLEQKGWNTNAFDDTKWQYAVVRSAPSKNVTAQQLQPIRNVTTFEAKNLTKLDDKTYVFDFGQNMAGVTRLKVNGRKGVVVKLKHGERLYANGHVDLSNIEEFYRGDSKSDPFQTDIIILSGKDDEFMPRFNYKXVSLCRSNGKQSVKFG

SEQ ID NO: 24009 - DNA, 507 bp, Unknown
  Obtained from environmental sample
  misc_feature (1)..(507): n is a, c, g, or t
atggatattgccggcacacaggttttttatcttaatagtcttaataatatcggtaatgacgggattgttgaccgcgcgaaaaatcaggctaacgacgtttccaaattcgaggagactctcagaagaaccgcgtctcaggcaaaccaggataaagccgaggaaacgcatgagtccctagtccctgagtcccagtccccagtccccagtccccgatccccatcttccatatacgccaaaatcgacaagaccgacaaactctacgagcagtgcgttgagcttgaaatttttcttgttaaaacccttgtcagcagtatgaggaacaccgtgcaaaaatcagggcttatcaatgaaggctatgccggaaaaatgtacgaagatatgttatacgatgaatacgccaaagactttgccaaaaacgccaatttcggcatggctgaaatggcctatctggaattaacaggacaaagagggaaaataatagcaaagggaccagggatcagggactag

SEQ ID NO: 24010 - protein, 168 aa, Unknown
  Obtained from environmental sample
  misc_feature (1)..(168): Xaa is any amino acid
MDIAGTQVFYLNSLNNIGNDGIVDRAKNQANDVSKFEETLRRTASQANQDKAEETHESLVPESQSPVPSPRSPSSIYAKIDKTDKLYEQCVELEIFLVKTLVSSMRNTVQKSGLINEGYAGKMYEDMLYDEYAKDFAKNANFGMAEMAYLELTGQRGKIIAKGPGIRD

SEQ ID NO: 24011 - DNA, 756 bp, Unknown
  Obtained from environmental sample
  misc_feature (1)..(756): n is a, c, g, or t
atgcctgccatgggaggatcatctatgagccgcaccgtttttgtcacaggttccggcaggggcataggcttgggcatagccagggcttttgcggctaacggcgacagggtgatacttaacgcccgttcggacgccgaaacgctgaatgcggcggcagccgggatacggctcgaattcggcgcggcagccgcgtttttggcagatatgtccgactatgacgcagcccgcgaatgtttcaggcagattgaagccacattcgggtcagtagaagtgctggtcaacaacgcgggcgtctcgcatttcgggctgtttgccgaaacccagccaagcgactgggacaggttgctgcacggcaacctttacacggcgctgaacgcctgccatctggcgttgcccgcgatgctgcgtgcgaaaaacggcgtgattgtcaacatatcctctgcctgggggatagccggagcgtcctgcgaagctgtgtacgcggcgtccaagggcgcggtcaacgcctttaccaaatcgcttgccaaagaattcggcctttccggcatacgggtgaatgccatcgcctgcggcgcgttcgacaccaggatgaatgcgcggctgaccgctgaagaacggcaaatgtttgcggaaagcgtaccgctggggcgctttgggcagccggaggaagcgggcgcgctgtccgtgtttctggcgtcggacgcggcacgttacctgactgggcaaatcataccgctggacgggggtttgctgtga

SEQ ID NO: 24012 - protein, 251 aa, Unknown
  Obtained from environmental sample
  DOMAIN (11)...(179): short chain dehydrogenase
  misc_feature (1)..(251): Xaa is any amino acid
MPAMGGSSMSRTVFVTGSGRGIGLGIARAFAANGDRVILNARSDAETLNAAAAGIRLEFGAAAAFLADMSDYDAARECFRQIEATFGSVEVLVNNAGVSHFGLFAETQPSDWDRLLHGNLYTALNACHLALPAMLRAKNGVIVNISSAWGIAGASCEAVYAASKGAVNAFTKSLAKEFGLSGIRVNAIACGAFDTRMNARLTAEERQMFAESVPLGRFGQPEEAGALSVFLASDAARYLTGQIIPLDGGLL

SEQ ID NO: 24013 - DNA, 372 bp, Unknown
  Obtained from environmental sample
  misc_feature (1)..(372): n is a, c, g, or t
gtgcaaattgccgtttccgcatggactgccgaagccctgaaaaacacgatgcccgccagcgtattctcccgttccaccgaatgtcataatcaggacaaagtcagcatggggactatcgccgcccgcgactgcgtacgagtcaacaaacttaccgcgcaggtaagcgccgccctgctgttagccgcttttcaggccattgacctcaggttaaaaaaaggcgaacttaaacccggcgatttgggacagacggaaaaaacgtataatgaaattgccgctttcttcaaaccgctggaagacgaccggccgctggaagacgagctgcgcgcaacgctgaaattaatagaggaacggcatttttgcctgcgcccatga

SEQ ID NO: 24014 - protein, 123 aa, Unknown
  Obtained from environmental sample
  misc_feature (1)..(123): Xaa is any amino acid
MQIAVSAWTAEALKNTMPASVFSRSTECHNQDKVSMGTIAARDCVRVNKLTAQVSAALLLAAFQAIDLRLKKGELKPGDLGQTEKTYNEIAAFFKPLEDDRPLEDELRATLKLIEERHFCLRP

SEQ ID NO: 24015 - DNA, 435 bp, Unknown
  Obtained from environmental sample
  misc_feature (1)..(435): n is a, c, g, or t
ttgcctgcgcccatgaaactgaaactgatttatccccggtggaacaaattgccggggcagacaacctttaatctgcctccccacgggccggtggtgtttgccgccgccctgcccgccaatgtggagattacctttaccgatgaaaatgtccagagccttgactttgatgaagactgcgatctggtggcaatctccatgatgctcagcactcaggtaaagcggggctgggctatcgcggatgaataccgcatgaggggcaagcaggtcattttcggcggcattgccgccatgctccatgccgaggaaaccattccgcacgcggactcggtgtttttgggcgaggccgaaacccgcatggagcaggttatcgccgactggagcgaaggccgtttgcggcaagtgtacaattttatgcccccaactgccgccggttga

SEQ ID NO: 24016 - protein, 144 aa, Unknown
  Obtained from environmental sample
  misc_feature (1)..(144): Xaa is any amino acid
MPAPMKLKLIYPRWNKLPGQTTFNLPPHGPVVFAAALPANVEITFTDENVQSLDFDEDCDLVAISMMLSTQVKRGWAIADEYRMRGKQVIFGGIAAMLHAEETIPHADSVFLGEAETRMEQVIADWSEGRLRQVYNFMPPTAAG

SEQ ID NO: 24017 - DNA, 822 bp, Unknown
  Obtained from environmental sample
  misc_feature (1)..(822): n is a, c, g, or t
ttgtacaaccacaaaggcgttcagatggtagaccttttccacgcgtcccggggctgtcgatttagctgttacccntgcgcggtttcctatcttggcggccgttcgttccgcccccgccccctggacaaagtgatcgaagaactttccggcattgaaaacaaccggctctttgtcgtggataactcactggcgcaggataaaaaatgggaaatggaactgttccgtgaaatgataccgcttaaaaaaaagtggatcagccataccatcgaagacgacccggaagtgctggacctggctgcccgcgccggagcatggtatgtgtatcaggccatttatgatacgtcggattatattaaagaacgggttaagcgttaccacgatcacggcatcggcgtagagggtacgattctgctgggattggataatcaaacagaagacgacattaagcggctcatagacttcctgctggaaattaaccttgatcttgcggagtttaccgtcatgacccccttccctcatacaaaagcatgggatgaccttgcgcggcagggacgtattgttgaccgcgactgggatcattttaacgcgggtcaggtggtctttacaccgaaaaacatcagcgccgaacgtctgcaggaactgtacgattacgcatggaaaactttttatcaggatgagtctcaggaagaaaaaatgttccacctgctttcaaccgtagtcagccgtgaaatggacgatggaacttaccgtccccgcaaccggcggcttattcataaatcattcggaaaagacgttgtacggagcgccggaacaggcaattag

SEQ ID NO: 24018 - protein, 273 aa, Unknown
  Obtained from environmental sample
  DOMAIN (13)...(155): Radical SAM superfamily
  misc_feature (1)..(273): Xaa is any amino acid
MYNHKGVQMVDLFHASRGCRFSCYPCAVSYLGGRSFRPRPLDKVIEELSGIENNRLFVVDNSLAQDKKWEMELFREMIPLKKKWISHTIEDDPEVLDLAARAGAWYVYQAIYDTSDYIKERVKRYHDHGIGVEGTILLGLDNQTEDDIKRLIDFLLEINLDLAEFTVMTPFPHTKAWDDLARQGRIVDRDWDHFNAGQVVFTPKNISAERLQELYDYAWKTFYQDESQEEKMFHLLSTVVSREMDDGTYRPRNRRLIHKSFGKDVVRSAGTGN

SEQ ID NO: 24019 - DNA, 405 bp, Unknown
  Obtained from environmental sample
  misc_feature (1)..(405): n is a, c, g, or t
gtggtatcgcccgtgcgcctaaaaacccttgggccgaccgcggcgattattctggaacagggcgtggagttaagcggcgtctccatcgcggcgcgttcgcaaaccatccgtatcggcgcgtatacgatgattgcccccggctgtgtgctggcggattccgattttcacgcgctccagcccccggagcggcgccggaacgaccccggctatgaacgcgatgccggaatagatatcggcgaatacgtctggataggcatgcgctgttgcatcctcaagggcgtgcgcataggccggggaagcattgtcgccgccggcagcgtggtgacgcgcgacctgccggaaaactgcctggccgccggcgttccggcccgcgtcgtcaagcagtggacggaaagaacggcttga

SEQ ID NO: 24020 - protein, 134 aa, Unknown
  Obtained from environmental sample
  misc_feature (1)..(134): Xaa is any amino acid
MVSPVRLKTLGPTAAIILEQGVELSGVSIAARSQTIRIGAYTMIAPGCVLADSDFHALQPPERRRNDPGYERDAGIDIGEYVWIGMRCCILKGVRIGRGSIVAAGSVVTRDLPENCLAAGVPARVVKQWTERTA

SEQ ID NO: 24021 - DNA, 465 bp, Unknown
  Obtained from environmental sample
  misc_feature (1)..(465): n is a, c, g, or t
ttgataatgacaagcaacgccggagcaaaggaaatcggcaaagggcttataggtttcggagagcgcataatggacgacagcgcgataaacgacgcgatagaaaaaacctttacccccgaattccgcaaccgccttgacgcggttgtgcgtttcggacatctgtcgcgggaaatcatggtttccatcgtcaacaaggaactcgacgctttctcggcccagcttgccgaaaagaacattacgcttaccgtaacatccgcctgcgtggacaaaatagcggaagaaggctacagccgcgagttcggcgccagaaacgccggccgtcttatcgaagaaaagattaaaagcttctttgtggacgaagtgcttttcggccgtttaagcgagggcggaagtgccgtcgtagactgggacggggaatatcttatgaatatcgagggagcggctttagaagcgtccctcgtttaa

SEQ ID NO: 24022 - protein, 154 aa, Unknown
  Obtained from environmental sample
  misc_feature (1)..(154): Xaa is any amino acid
MIMTSNAGAKEIGKGLIGFGERIMDDSAINDAIEKTFTPEFRNRLDAVVRFGHLSREIMVSIVNKELDAFSAQLAEKNITLTVTSACVDKIAEEGYSREFGARNAGRLIEEKIKSFFVDEVLFGRLSEGGSAVVDWDGEYLMNIEGAALEASLV

SEQ ID NO: 24023 - DNA, 459 bp, Unknown
  Obtained from environmental sample
  misc_feature (1)..(459): n is a, c, g, or t
gtggtgggccaagaagagctgtgcggagagtccgtgattcttggcaacgccgacgtgttttgggaagacaacatcctgtctgtgcttttaggcgaaacgcgtgactgcgtgatgctgtgcgacaccagccgcgtggagcaaggcgactacctctttaacgtgcaagatggcaaggtggtggcctttggcaagggcatggactgccacaaggcaaattgcgagtacgttggcttggcccgaatccaaggcagttttatcgccgagtgcaaaagccacttggaagctatggcggccagtcaaaggcatggagattggtgggaacagattctgtacgacatgatcaacgcccgcccaatctggacagccgacatagccgggcagttttgggccgaggtggatttcatcgaagactacaaccgcattttggactacataaaacaaaagaagggcggttcttga

SEQ ID NO: 24024 - protein, 152 aa, Unknown
  Obtained from environmental sample
  misc_feature (1)..(152): Xaa is any amino acid
MVGQEELCGESVILGNADVFWEDNILSVLLGETRDCVMLCDTSRVEQGDYLFNVQDGKVVAFGKGMDCHKANCEYVGLARIQGSFIAECKSHLEAMAASQRHGDWWEQILYDMINARPIWTADIAGQFWAEVDFIEDYNRILDYIKQKKGGS

SEQ ID NO: 24025 - DNA, 1524 bp, Unknown
  Obtained from environmental sample
  misc_feature (1)..(1524): n is a, c, g, or t
gtgcgtcctaaggtggatttgaagaagggggtttacgatagggaaatagaggtcaccggcgtcgcgggcggcgttaatacggcaagcaatacggtaaaggccacgttcacagtgacggatacgccggtgttagaggtcgttgtgtcgccgtccgacaccgttaagttcggttcccggcagaagccgtacacgcagcctaatccgaagaccgtgacgataaccaacgtcggtaccgatatggttgaggtaagtttggatgcaggttcggcgcagtcgttcatcgtcaacccgtcgccgtttaaggcgacaatatcggtcggatctacggcgacatttactgtccgtcctaatgaagatctggatgtggggatgttcaaagaggttataacaatctccggtactggtgtcggtgcccatgctagtgccgttatgaagaaagttgatgttcctgtttcgttcaccgttacggatcagcccaagacgtacaatatggttgtgacgccgacggagatatctttcggtacggcgcttaagggctatgcgcagattgccgcgcagacggtgacgatagagaacaagagtccatttggcacgatagcgttgacgccattgaagtcgcgtaagaattactttgtgcttacggcgttgacgccgtccgcgaccatcgcgtccggggccaaggcgacctttacggcgcgtccgcaaacggggctttccgcgacgggcggcgacgactttgacggtgtgtacgaggattggatagtgcttgacggcggcgaaagcgcgagggattcggtgttgctcangttcagcgttgcgagcgagccgatgtttgcgatcacggccacggagctgttgccgttcggcagtctgctcggcccgaattacacgcagccgcagccgcagacggttacggtgacgaatacgggtacgagcgcggttacgttgaccaagccgacggctgacaaatacttgataggagatttgtcggcggcgagcgtggcggccaacgcctctgtgacctttacggttcagcccaaggcgggtttgaacttcgggaatcacgcggaggttataacgatcaacggcagcaacgggacgagcgcgacggtgcatgccgagttcagcgttgtgaaggatgcgaagctcgatttgagcgcgtcggagttggcgtcgttcgggactgcgctgtataagtcgggcgttactccgccgtacgcgcagccggcggcgcagacggttacggtaaccaatacgggaacgaacgcgattgtgggattgagggtggaggagttgcagtcgtcgtcgtcgaccgtttacggttacattataggggatctgaataagacgaccctaatggcgggcgagagggcgacctttaccgttcagcctaaggcggatctgcagcggcttggggattacacgagggatatagagatcagcggcacggcggtggacggcacggccgtgagctgcacggtaacggcgaagttcatagtgacggatcagaacaagcccgaatag

SEQ ID NO: 24026 - protein, 507 aa, Unknown
  Obtained from environmental sample
  misc_feature (1)..(507): Xaa is any amino acid
MRPKVDLKKGVYDREIEVTGVAGGVNTASNTVKATFTVTDTPVLEVVVSPSDTVKFGSRQKPYTQPNPKTVTITNVGTDMVEVSLDAGSAQSFIVNPSPFKATISVGSTATFTVRPNEDLDVGMFKEVITISGTGVGAHASAVMKKVDVPVSFTVTDQPKTYNMVVTPTEISFGTALKGYAQIAAQTVTIENKSPFGTIALTPLKSRKNYFVLTALTPSATIASGAKATFTARPQTGLSATGGDDFDGVYEDWIVLDGGESARDSVLLXFSVASEPMFAITATELLPFGSLLGPNYTQPQPQTVTVTNTGTSAVTLTKPTADKYLIGDLSAASVAANASVTFTVQPKAGLNFGNHAEVITINGSNGTSATVHAEFSVVKDAKLDLSASELASFGTALYKSGVTPPYAQPAAQTVTVTNTGTNAIVGLRVEELQSSSSTVYGYIIGDLNKTTLMAGERATFTVQPKADLQRLGDYTRDIEISGTAVDGTAVSCTVTAKFIVTDQNKPE

SEQ ID NO: 24027 - DNA, 987 bp, Unknown
  Obtained from environmental sample
  misc_feature (1)..(987): n is a, c, g, or t
atgcaccgtcgcgctcgtcccgttgctgccgttgatcgttataacctccgcgtgattcccgaagttcaaacccgccttgggctgaaccgtaaaggtcacagaggcgttggccgccacgctcgccgccgacaaatctcctatcaagtatttgtcagccgtcggcttggtcaacgtaaccgcgctcgtacccgtattcgtcaccgtaaccgtctgcggctgcggctgcgtgtaattcgggccgagcagactgccgaacggcaacagctccgtggccgtgatcgcaaacatcggctcgctcgcaacgctgaacntgagcaacaccgaatccctcgcgctttcgccgccgtcaagcactatccaatcctcgtacacaccgtcaaagtcgtcgccgcccgtcgcggaaagccccgtttgcggacgcgccgtaaaggtcgccttggccccggacgcgatggtcgcggacggcgtcaacgccgtaagcacaaagtaattcttacgcgacttcaatggcgtcaacgctatcgtgccaaatggactcttgttctctatcgtcaccgtctgcgcggcaatctgcgcatagcccttaagcgccgtaccgaaagatatctccgtcggcgtcacaaccatattgtacgtcttgggctgatccgtaacggtgaacgaaacaggaacatcaactttcttcataacggcactagcatgggcaccgacaccagtaccggagattgttataacctctttgaacatccccacatccagatcttcattaggacggacagtaaatgtcgccgtagatccgaccgatattgtcgccttaaacggcgacgggttgacgatgaacgactgcgccgaacctgcatccaaacttacctcaaccatatcggtaccgacgttggttatcgtcacggtcttcggattaggctgcgtgtacggcttctgccgggaaccgaacttaacggtgtcggacggcgacacaacgacctctaa

SEQ ID NO: 24028 - protein, 328 aa, Unknown
  Obtained from environmental sample
  misc_feature (1)..(328): Xaa is any amino acid
MHRRARPVAAVDRYNLRVIPEVQTRLGLNRKGHRGVGRHARRRQISYQVFVSRRLGQRNRARTRIRHRNRLRLRLRVIRAEQTAERQQLRGRDRKHRLARNAEXEQHRIPRAFAAVKHYPILVHTVKVVAARRGKPRLRTRRKGRLGPGRDGRGRRQRRKHKVILTRLQWRQRYRAKWTLVLYRHRLRGNLRIALKRRTERYLRRRHNHIVRLGLIRNGERNRNINFLHNGTSMGTDTSTGDCYNLFEHPHIQIFIRTDSKCRRRSDRYCRLKRRRVDDERLRRTCIQTYLNHIGTDVGYRHGLRIRLRVRLLPGTELNGVGRRHNDL

SEQ ID NO: 24029 - DNA, 936 bp, Unknown
  Obtained from environmental sample
  misc_feature (1)..(936): n is a, c, g, or t
atgtacaatagaactcagtctgcttatcgaaaagctcttcgccgaaagcggctgatatttaccgccgcagtactggtatttgtcggttttgcggtatttgcatcggtgcacattgcggggaaatttcgggagtgggcatcaaagggcgatcgcaaagaaatgttgcgtttatgggatgccggggattttaacgaggtattcaaccttagccagtcagcgcttgattcccgcccaacggattattttctgttgaccatgcacgggttttccgcttaccagcttggtatttcccagataaacagcctgaacgcggaacagtattttgataagtgtatctcatcgcttcggcaggcaatgatagataaaaaatcggagaatgacgggcggctatactatgttttgggaaaagcgtatagttacaagggtgagaactatgccgattccacaataaagtatctggagaaagccagagcgttgtccgatagcaccgccgatatcccggaatatttgggtatggcgtatttttcggttggagattataaaaacagcgtggcggcttttagcgaagcccttggaaaaagcgcggaagggccttccgggcctttgctgttgtttatggcgcgggcctatattgccttgggtgaatttgataacgcgcacccgtatctgcagcgctgtatagagatttctccggatttccggactgttctttcggcgcgcttccttctggcggaggcgctcaagggtaaggatgacatagaaggggcggtaaagcagcttcaggaaataattgcggaaacaggcgataatgccgaagcgcattaccagttgggggaactgtatgccttgcaggggaataccacacgggcccgcgccgaatggcggcttgcgcttagggcggatccggcgcacgcaaaggcaagggcaaggctttag

SEQ ID NO: 24030 - protein, 311 aa, Unknown
  Obtained from environmental sample
  DOMAIN (271)...(304): Tetratricopeptide repeat
  misc_feature (1)..(311): Xaa is any amino acid
MYNRTQSAYRKALRRKRLIFTAAVLVFVGFAVFASVHIAGKFREWASKGDRKEMLRLWDAGDFNEVFNLSQSALDSRPTDYFLLTMHGFSAYQLGISQINSLNAEQYFDKCISSLRQAMIDKKSENDGRLYYVLGKAYSYKGENYADSTIKYLEKARALSDSTADIPEYLGMAYFSVGDYKNSVAAFSEALGKSAEGPSGPLLLFMARAYIALGEFDNAHPYLQRCIEISPDFRTVLSARFLLAEALKGKDDIEGAVKQLQEIIAETGDNAEAHYQLGELYALQGNTTRARAEWRLALRADPAHAKARARL

SEQ ID NO: 24031 - DNA, 498 bp, Unknown
  Obtained from environmental sample
  misc_feature (1)..(498): n is a, c, g, or t
atgagcggttacaaaagcaaaaaaatgccggacgggaaaacgtggatgacggagaatttgaactgcaaagttgcggatagcgagtgctatgataaaaatgaaagcaactgcaatacctacggcaggctttacacttgggaagcggcaaagaaagcctgttctggtggttggcgtttgccaagcgatgccgaatgggatgccttggtggcagcggttggaggtgcatctaccgcagggactaaattaaaggctagagacggttggaattcatatagcggagttggcacggacgactttggcttttccgcccttccgggtggcggcggcctttcgggtggctttttcgactttgtcggctccgtcggcgtctggtggagttccacagagggcgatagcaacgacgcttactacagggatatgagctacagcagcgtgagcgtagacaggggcctcagcgataagctctacttgtttagtgtccgttgcttgcaggactaa

SEQ ID NO: 24032 - protein, 165 aa, Unknown
  Obtained from environmental sample
  misc_feature (1)..(165): Xaa is any amino acid
MSGYKSKKMPDGKTWMTENLNCKVADSECYDKNESNCNTYGRLYTWEAAKKACSGGWRLPSDAEWDALVAAVGGASTAGTKLKARDGWNSYSGVGTDDFGFSALPGGGGLSGGFFDFVGSVGVWWSSTEGDSNDAYYRDMSYSSVSVDRGLSDKLYLFSVRCLQD

SEQ ID NO: 24033 - DNA, 450 bp, Unknown
  Obtained from environmental sample
  misc_feature (1)..(450): n is a, c, g, or t
atgatgaagtcagagaggcaagatataaacgctatgaacgcaattattgatactaacattgtaattgatgctattatagcacgagaaccttttaaagaaatatctcaaaatataattcgctcagtttcaaaaaaagaatttaacggtgctattactacgagtacgattaccgacatttattacattacgaataaatatttgaaagataaagaaaaaacagcgaatgaagtaaaaaaattattcattctttttgatgtaattgctgttacaaaagaagattgcctaaaggcttttgatacgggaattaaagattatgaagattctttactttatatctgtgcttttaaatggaatgcagattttatagtcaccagaaatttgtctgatttttcaaattctgctatttctgtaatatcaccagaaaattttttagaaaatttaccgaaataa

SEQ ID NO: 24034 - protein, 149 aa, Unknown
  Obtained from environmental sample
  DOMAIN (14)...(140): PIN domain
  misc_feature (1)..(149): Xaa is any amino acid
MMKSERQDINAMNAIIDTNIVIDAIIAREPFKEISQNIIRSVSKKEFNGAITTSTITDIYYITNKYLKDKEKTANEVKKLFILFDVIAVTKEDCLKAFDTGIKDYEDSLLYICAFKWNADFIVTRNLSDFSNSAISVISPENFLENLPK

SEQ ID NO: 24035 - DNA, 315 bp, Unknown
  Obtained from environmental sample
  misc_feature (1)..(315): n is a, c, g, or t
atggcgtctattactttagaaagtctgccgcgtgaagttattttcggcgtgacggatgttgttcttgaagttatgcaaaattgcaggactatactcacaacccggaaaggcacggttccgctggaccgcgaatttggaataagggcagatttccttgacagccctatgccgaccgtgagggcgcaagccgaacaagatatttttatggcgttcaaaagatatgaaccgcgggcagttttgagagaaattacctgggatgctgacattttatcaggaaaggtaatgcccagcataaaaatagaggtggtaccataa

SEQ ID NO: 24036 - protein, 104 aa, Unknown
  Obtained from environmental sample
  DOMAIN (21)...(102): GPW / gp25 family
  misc_feature (1)..(104): Xaa is any amino acid
MASITLESLPREVIFGVTDVVLEVMQNCRTILTTRKGTVPLDREFGIRADFLDSPMPTVRAQAEQDIFMAFKRYEPRAVLREITWDADILSGKVMPSIKIEVVP

SEQ ID NO: 24037 - DNA, 423 bp, Unknown
  Obtained from environmental sample
  misc_feature (1)..(423): n is a, c, g, or t
atgctgctccaaaacttttcaatactgagtatattacctccaaatttggccgttgatccgaatgtgaaattagtggcggaagcatacgatgaagttatgcgggaaataatcgctaagattcccgatgtggccgttatacccaatctggtacagaataaaattgtagatgagatgctgatcgatctattggcatggcaattccatgtagatttttatgagcctgacttgccaatagaaactaaacagtctttagtccttaattctctttcttggcatacgcgcaaaggtacaccttctgtcgtggaagaaattgtatcgacagtattctctaaggcgaaaatagaggaatggtttgaatacggcgggcttccgtataggttccgtgtttctacagaggatgaaatactggatccgaaaacttag

SEQ ID NO: 24038 - protein, 140 aa, Unknown
  Obtained from environmental sample
  misc_feature (1)..(140): Xaa is any amino acid
MLLQNFSILSILPPNLAVDPNVKLVAEAYDEVMREIIAKIPDVAVIPNLVQNKIVDEMLIDLLAWQFHVDFYEPDLPIETKQSLVLNSLSWHTRKGTPSVVEEIVSTVFSKAKIEEWFEYGGLPYRFRVSTEDEILDPKT

SEQ ID NO: 24039 - DNA, 531 bp, Unknown
  Obtained from environmental sample
  misc_feature (1)..(531): n is a, c, g, or t
ttggacatggaatcgttccgggaatttcttgaaccatggggcgtaactaatccgcaggggttctacgacgccttaaacaactattacagggaaagcggaacagggcctggtaacgtgaatatcacctgccttttacaagacggggaagtaccgagcgaggaagtaaagcagcaggtttatgatacgttgtcggcaaagaaccggcggccgctgacagattacgtccatgtgaaacccccggaaaccgtggagtttaacgttgacgtgcggtactggatcagcttggatagggcaacagaagcatcgtcaattatccagaatgttgaaagctcggtagagcgttttgtcagataccaaaggtcaaggctgggcttagatattgttccggatctgctccattcaatgattatggaagcgggtgtcaagagaatggaaataatggaaccggtatttacaaaaatccagccctgggaagtgggaatttttaccggcgaacaaagcgtaatttatgagggattagaggaagcctga

SEQ ID NO: 24040 - protein, 176 aa, Unknown
  Obtained from environmental sample
  misc_feature (1)..(176): Xaa is any amino acid
MDMESFREFLEPWGVTNPQGFYDALNNYYRESGTGPGNVNITCLLQDGEVPSEEVKQQVYDTLSAKNRRPLTDYVHVKPPETVEFNVDVRYWISLDRATEASSIIQNVESSVERFVRYQRSRLGLDIVPDLLHSMIMEAGVKRMEIMEPVFTKIQPWEVGIFTGEQSVIYEGLEEA

SEQ ID NO: 24041 - DNA, 1149 bp, Unknown
  Obtained from environmental sample
  misc_feature (1)..(1149): n is a, c, g, or t
ttgcgcggcgggctcgcacgcgcatgccatgcggcggctatgaaggggaaaatggaagctcctgagagggcggctttagtcgaggaagggaaaaggctaaaagactcaatagcggcagccgaagcggaattgggccaggtggaggcggagcttgaaaaagaggcgctgaaaataccgaacatggcccacccagacgcccctgtcggaaaggaagacaaggacaacctcgaagttaagcgttttggagagccaaaaaaatttgattttgagccgctggatcatgtcgcgcttgggcaaaacctggacattattgactttgactcggcaacgaaagtgtccggcatcaaattttattatttaaagaacgaaggcgtttttcttgaacttgccctggtgcgctatgccctggatattttgcagaaaaaaggcttcaccccctttattacacccgatgtggccagggaagaaatccttgaaggcataggctttaacccgcgtggcgcggaatccaatgtttacgcccttgaaggagagggaacctgccttgtaggcacagcagaaataaccctgggcggctattactcaaacatgattctgccgaaggaaaaactcccgatacgcatggccgggatttcccactgtttccgtcgcgaggccggagccgcagggcagttctcaaaaggcctttacagggtacaccagtttacaaagcttgaaatgttcgtctgctgcctccctgaggattcggattcccttcatgaagaactccgtaccatagaggaagaaattttctccggccttgaaataccgttcagggtggtggacacctgcaccggcgaccttggtgcaccggcctaccgcaagtgggatctggaagcctggatgccggggcgcaacggcggcgagtggggcgaagtaacttctacatccaactgcaccgattaccaggcccgcaggctcaacgtaagatttaaagacagcgacggaaaaaataaatttgttcacatgctcaacgggactgccattgcagtatcaagggcaatcattgccgtcctggaaaatttccagcagagcgacggctctgtcaaaattcccaaagcactcgtcccatattgcgggtttgagtatataagaaggagtaaacaatga

SEQ ID NO: 24042 - protein, 382 aa, Unknown
  Obtained from environmental sample
  DOMAIN (127)...(298): tRNA synthetase class II core domain (G, H, P, S and T)
  misc_feature (1)..(382): Xaa is any amino acid
MRGGLARACHAAAMKGKMEAPERAALVEEGKRLKDSIAAAEAELGQVEAELEKEALKIPNMAHPDAPVGKEDKDNLEVKRFGEPKKFDFEPLDHVALGQNLDIIDFDSATKVSGIKFYYLKNEGVFLELALVRYALDILQKKGFTPFITPDVAREEILEGIGFNPRGAESNVYALEGEGTCLVGTAEITLGGYYSNMILPKEKLPIRMAGISHCFRREAGAAGQFSKGLYRVHQFTKLEMFVCCLPEDSDSLHEELRTIEEEIFSGLEIPFRVVDTCTGDLGAPAYRKWDLEAWMPGRNGGEWGEVTSTSNCTDYQARRLNVRFKDSDGKNKFVHMLNGTAIAVSRAIIAVLENFQQSDGSVKIPKALVPYCGFEYIRRSKQ

SEQ ID NO: 24043 - DNA, 456 bp, Unknown
  Obtained from environmental sample
  misc_feature (1)..(456): n is a, c, g, or t
atgaaatggttaaaaatttttgcggcaatatttttatttctggctttaacaacatgccagacgctcagttcaataatacaggatcccaagctatctttaaaatcggttgatattgcaaacatcagtcttagcggtattgatttaatatcccatattatcattgaaaacccaaacagctttacacttccaacgccgaaaatcgactgggcactttcgataaataaaaatccatttattaatggcatttttccaggcgataaatccatcaagggacaggaaaaagttaccgtggatcttcccattagcatcccttacgacgggctttacaaaacttttacatcccttatgagtagcanagaaagcgcatataacctcgcngtgggaatacttttccttatcnntatttggaaaaacaggttttcccgcttacttaatcggggcagattccccctttag

SEQ ID NO: 24044 - protein, 151 aa, Unknown
  Obtained from environmental sample
  SIGNAL (1)...(23)
  DOMAIN (9)...(151): Late embryogenesis abundant protein
  misc_feature (1)..(151): Xaa is any amino acid
MKWLKIFAAIFLFLALTTCQTLSSIIQDPKLSLKSVDIANISLSGIDLISHIIIENPNSFTLPTPKIDWALSINKNPFINGIFPGDKSIKGQEKVTVDLPISIPYDGLYKTFTSLMSSXESAYNLAVGILFLIXIWKNRFSRLLNRGRFPL

SEQ ID NO: 24045 - DNA, 1074 bp, Unknown
  Obtained from environmental sample
  misc_feature (1)..(1074): n is a, c, g, or t
ttgagcggtatgcgcggcgcggcggatatgaccggcgacggaaaggtgtcggtcagcgaggcctatcagtacgcctttaacgagacgttgcattatacgcagaacacgcgggccggaacgcagcacccgagccgcgatatgaatttggtggggaccggcgacgtcgtgatgaccgatttgcgcgagacgagcgcggcgctctctttggacgtaaatcttgagggcaggttcttcatacgtgataagaacggaaatttattcgccgaactgcgcaaatatcgcggacggacgatagaactcggtatgccgccggggaagtactcgatagaggcggagacgccctcgctgtcgtggatgagcggcggtgtggagatcgcggcaaacaagaggacggcgctgtctatgagcgacatgaaggcaatggagaggaagaggggcgtggcgcggggcgatgataatgcggcgtacagcgagaagacgcccatagtccgcctatttaataacatcatcggcaaagctgtttacgggttgccgtactatgtggaactcgacggtctgatggacgtttcggtttatgcgggtacgccgtggctgtacgcgcagtttgagtacgctcagcccataggctctttgggcagacggcccaaagcgtacgggggcggcctcggtacgcggtttgggatgaccgcgccgttttacgtgaattcggatcttttgctgatgaaattttacggggatgtcgatacgctttttgacagtaacggtatattcgatgatcctgttttggacgatacggtgggcacgattgtgggacataatcggcaaagcggcaactatctgcttaaattgcgcttgggcgcaaactacgctccgatacggcacgcggcgattttcggcggcgcgtatttgagttgcttggtcgcggataggaacgatgaatttattgtcataccgggaaagggtcttgacgtacacacgggatcaaacgctaatagggaacagatcgactaccacgaaacaaaggtgcgcgtgtggccgggggtgtacgcgggggtaacattatttttaaaataa

SEQ ID NO: 24046 - protein, 357 aa, Unknown
  Obtained from environmental sample
  misc_feature (1)..(357): Xaa is any amino acid
MSGMRGAADMTGDGKVSVSEAYQYAFNETLHYTQNTRAGTQHPSRDMNLVGTGDVVMTDLRETSAALSLDVNLEGRFFIRDKNGNLFAELRKYRGRTIELGMPPGKYSIEAETPSLSWMSGGVEIAANKRTALSMSDMKAMERKRGVARGDDNAAYSEKTPIVRLFNNIIGKAVYGLPYYVELDGLMDVSVYAGTPWLYAQFEYAQPIGSLGRRPKAYGGGLGTRFGMTAPFYVNSDLLLMKFYGDVDTLFDSNGIFDDPVLDDTVGTIVGHNRQSGNYLLKLRLGANYAPIRHAAIFGGAYLSCLVADRNDEFIVIPGKGLDVHTGSNANREQIDYHETKVRVWPGVYAGVTLFLK

SEQ ID NO: 24047 - DNA, 867 bp, Unknown
  Obtained from environmental sample
  misc_feature (1)..(867): n is a, c, g, or t
atggaatctgcccagcgcgcctttgcaagggcgtcggccatcctcaccgacatacagggcgagcatgaccgcatgagaagcgcgatgctggaactggatgacctgcaatctagggcagaggacgaatacgcaaaatggtcttccaagggcgcggacaagcttgaatttgtcgaagagcggctgtccaagtacgagcgcctagccagaaggcaccagtgcgagccaaacgagctgcatgaaactttggccagcctaaaaaaagagcgggcaacactgatggatgggggcgcgtccatcagcgaaatgcaaaaggcgctggacattgccgcggagaattaccgcctcaaagcagaggcacttcatcaacaaaggcaggcggccattccgcagatagagaaaaaagtccacaagcgcttggcgcagcttggaatggagggcgccaagctgcaaatcagggccagcctttgtgaagacgcaaaaagccccgtcatgcagcaggggcgaagcgtccgcgtgtcgaaaaaggggttcaccaatttggccttttggatcgagcccaacgcgggcgaaggcttccgccccctagaaaaaattgcttccggcggcgaactgagccgcctgatgctggccctgatgggtgccggcaaaggcgcgggcgaggggctgacgctggttctggacgaagttgacgttggccttgggggtgaaaccgccctagcggtagggaaatcaataagggaactggggcaaaggcacccagtcctagccgtgacccacctagcccaagttgccgccagagcggacaatcatggtgtactaagcaaggaaacgctcgatgggagaacaaggccnaccttgcgtggatag

SEQ ID NO: 24048 - protein, 288 aa, Unknown
  Obtained from environmental sample
  misc_feature (1)..(288): Xaa is any amino acid
MESAQRAFARASAILTDIQGEHDRMRSAMLELDDLQSRAEDEYAKWSSKGADKLEFVEERLSKYERLARRHQCEPNELHETLASLKKERATLMDGGASISEMQKALDIAAENYRLKAEALHQQRQAAIPQIEKKVHKRLAQLGMEGAKLQIRASLCEDAKSPVMQQGRSVRVSKKGFTNLAFWIEPNAGEGFRPLEKIASGGELSRLMLALMGAGKGAGEGLTLVLDEVDVGLGGETALAVGKSIRELGQRHPVLAVTHLAQVAARADNHGVLSKETLDGRTRPTLRG

SEQ ID NO: 24049 - DNA, 687 bp, Unknown
  Obtained from environmental sample
  misc_feature (1)..(687): n is a, c, g, or t
gtgcttcgtttcatggaagaaggttttttcaggaatatgctgccgggaacaacggtaattttaatttcccgttccatatcccgcttaaacatcgcgggcataacataccgggatcaaatattcaatgtaaacgaaagcgatctgcgttttaccgaaaatgaattggcccaatatttccgccggatggatatttcattacggacggaaagcctgcgcgaaattatgcaggataccgaaggctgggcgttcgcgatcaaccttatcgcgcgttcataccaaaaagctcccggctacggcggctatgtgcgcagcgcgatgaagcagaatattttccggcttttggaaatggaaatatgggccgcgctgtcggaacctctgcagatttttttggttcgtctttcgctcatcgatcatctgtctgttgatttattcatccaactggcgggaaaagaagaaaagattgtcgaggaattggaaaagcaaagcgcttatgtgcgccgggacagctatatcaacgcgtaccttattcaccctttgtttttggaatttttaagaacaaagcaaacattgcttacggaggaacagaaaagggaaacttacgccgtatcaggcgattggtgcgcccgtaacggttttaagatagacgcgattcctattatgaaaagacagaaaactatcagtcaatag

SEQ ID NO: 24050 - protein, 228 aa, Unknown
  Obtained from environmental sample
  misc_feature (1)..(228): Xaa is any amino acid
MLRFMEEGFFRNMLPGTTVILISRSISRLNIAGITYRDQIFNVNESDLRFTENELAQYFRRMDISLRTESLREIMQDTEGWAFAINLIARSYQKAPGYGGYVRSAMKQNIFRLLEMEIWAALSEPLQIFLVRLSLIDHLSVDLFIQLAGKEEKIVEELEKQSAYVRRDSYINAYLIHPLFLEFLRTKQTLLTEEQKRETYAVSGDWCARNGFKIDAIPIMKRQKTISQ

SEQ ID NO: 24051 - DNA, 633 bp, Unknown
  Obtained from environmental sample
  misc_feature (1)..(633): n is a, c, g, or t
atgcgttcgctgagaacaaaaatactgacaatcgtgcttaccttcctgatgcttgtcagcgcggcgtttgtcatatactcggtgtttaccgccagaaattacaagcgtctgcgtcatgagaacatcatgagaaccgtggaatttgaaacggaaaaggtaaacaaaacaatagccgaaattgagcgcggcgcgatattcttcgccgctatcgggcaggtgagttatgaggcgaggtcaaaggcttcgggcgaagcgatggctttggagttattccgaggcttccccacggttatcggcggcgggttttggtttgtgccgtacacgtatgacaaaaatacttatcgcgaggggttttacgcgttctatgacaaagaacgggacgcggtgcggcttgacgacaccttctttacggacgagtacgactatcaccattcaagttggtacgttgaaatttccgaaaacctgactaagccgtatcaggtggcatggactgcgccttattatgacgaaaccggttctttggcgctgatgacgacagccgggcgcgggcggtttttgacaaaaacggcgctcttatcgcgctttcccacatttgattgggagattaaggagggtggtggaggaattatctaa

SEQ ID NO: 24052 - protein, 210 aa, Unknown
  Obtained from environmental sample
  SIGNAL (1)...(21)
  misc_feature (1)..(210): Xaa is any amino acid
MRSLRTKILTIVLTFLMLVSAAFVIYSVFTARNYKRLRHENIMRTVEFETEKVNKTIAEIERGAIFFAAIGQVSYEARSKASGEAMALELFRGFPTVIGGGFWFVPYTYDKNTYREGFYAFYDKERDAVRLDDTFFTDEYDYHHSSWYVEISENLTKPYQVAWTAPYYDETGSLALMTTAGRGRFLTKTALLSRFPTFDWEIKEGGGGII

SEQ ID NO: 24053 - DNA, 471 bp, Unknown
  Obtained from environmental sample
  misc_feature (1)..(471): n is a, c, g, or t
ttgaaacggtcattaaatatttttgggaaaataaacgacgtatgtatgttcgttacggcggttcatggggggttctcgacataccggcgggcaaatttacctttgtcaacgcggggacacaacgcgccgcttatcaaaagagcgggcggggaatattcgttcctaaaaacagaccccgctttcatactcgccggattcgaggaaacggcgtacacggaagaagaaacaaaactttttgcgggtgatgtggtttatttatataccgacggcgttaccgaagccatgaacgcaaaaggcgaactgttttcagacccgcgtctgctggaaacggtcaaccggtacaaggagtgcgatataaaaggattgttggcgtctattaaaaaagagatagacatattcgcaaacggcgcggagcaggcggatgatattaccatgctggcgctgcaaattacaggagggtcgaatgggtag

SEQ ID NO: 24054 - protein, 156 aa, Unknown
  Obtained from environmental sample
  DOMAIN (1)...(151): Stage II sporulation protein E (SpoIIE)
  misc_feature (1)..(156): Xaa is any amino acid
MKRSLNIFGKINDVCMFVTAVHGGFSTYRRANLPLSTRGHNAPLIKRAGGEYSFLKTDPAFILAGFEETAYTEEETKLFAGDVVYLYTDGVTEAMNAKGELFSDPRLLETVNRYKECDIKGLLASIKKEIDIFANGAEQADDITMLALQITGGSNG

SEQ ID NO: 24055 - DNA, 672 bp, Unknown
  Obtained from environmental sample
  misc_feature (1)..(672): n is a, c, g, or t
ttgatcgccaaggacagcacactcgtcgccggtacaaaaataggaagcagcaccagcgctggtccgcaattcgtcaacctatttgccggtacagttatcaccaagggcgacgccgacaaaactttctccggcagcgtgactttcgccgaccaaggcaagaacttccagttctccgccaacaccggcgacggtctggccgcccgttactacgacctgaaggtgcaagacagtttcacgttcatcttcaccgaatacgacccgccgtcatcgcagctcaacgactcgctcatgtcgcagatcggcgccaacagcggccagacgacgttcctgtcgatcaacgacatgcgttgcaaggctttgggcgtctccgacgtagacatcagcacgaagtggggcgcggctacggccatagagacggtgaacaacgcgttgcagaaggtttcgcatcagcgcgcttctctcggtgcgttgcagaaccgcttggagcacacgataaagaacctcgacacggccgccgagaacttgcaggctgccgagagtcgtatccgcgacgtggatatggcgaaagaggtgatggagttcaccaggacgaacatcctgcagcaggcttcgcaggcgatgttggctcaggcgaaccagcagccgcagtctgttttgcagctgttgaggtaa

SEQ ID NO: 24056 - protein, 223 aa, Unknown
  Obtained from environmental sample
  DOMAIN (130)...(201): Bacterial flagellin C-terminus
  misc_feature (1)..(223): Xaa is any amino acid
MIAKDSTLVAGTKIGSSTSAGPQFVNLFAGTVITKGDADKTFSGSVTFADQGKNFQFSANTGDGLAARYYDLKVQDSFTFIFTEYDPPSSQLNDSLMSQIGANSGQTTFLSINDMRCKALGVSDVDISTKWGAATAIETVNNALQKVSHQRASLGALQNRLEHTIKNLDTAAENLQAAESRIRDVDMAKEVMEFTRTNILQQASQAMLAQANQQPQSVLQLLR

SEQ ID NO: 24057 - DNA, 894 bp, Unknown
  Obtained from environmental sample
  misc_feature (1)..(894): n is a, c, g, or t
atgaaatttaccgataagataaaaaatttctttgccggacgatccgctgtttcgcaggaattttttgacgaccttgccgatctgctggtggaaggggatataggcgcgcaggaggcttacgatacagtggaactcctgcagcagatatgcaggaaagaaaaaatttcacaaccggaggaagcgcgggaaaaacttgccggcttgctggaaaaaatgctggccgacggcgcgggcgggcttccgccatctcagtcagacagacagactgtgattctgctgctcggtgtcaacggcgtaggcaagacgaccacggcggccaagatcgcttcaatgtataaggaacagggacaacatcctgttctggcggcggcggacacattccgggcggccgcaatagatcaattaaaaatacacggagagaggctgggcctcagggttgtcgcccaccagcagggaggagatcccgccgccgtcgtgtatgacgcgatagaagccgcaggcagtggcgccatgaatggtggcgccattcatggcattgtcatcgccgatactgccggaaggatgcacacaaagtccgcgctggtagaggaactgcggaagatcgacagaattgtggaattaaaagcctcaggggcatgttatgtgaaatacctggtgcttgacgccactaccggcagaaacgcactgtcccaggccgagattttcagcgaagccgtttctcccagggcggcgatacttacaaagtacgattccacggcaaagggaggggttgtcttctcacttgcttccgttctgcatatgcctgtggcttatctttgcacaggcgaaaaatacggggatatcagggcatttgatccccatgattttgcgagggaatttgcgggaattacctga

SEQ ID NO: 24058 - protein, 297 aa, Unknown
  Obtained from environmental sample
  DOMAIN (87)...(295): SRP54-type protein, GTPase domain
  misc_feature (1)..(297): Xaa is any amino acid
MKFTDKIKNFFAGRSAVSQEFFDDLADLLVEGDIGAQEAYDTVELLQQICRKEKISQPEEAREKLAGLLEKMLADGAGGLPPSQSDRQTVILLLGVNGVGKTTTAAKIASMYKEQGQHPVLAAADTFRAAAIDQLKIHGERLGLRVVAHQQGGDPAAVVYDAIEAAGSGAMNGGAIHGIVIADTAGRMHTKSALVEELRKIDRIVELKASGACYVKYLVLDATTGRNALSQAEIFSEAVSPRAAILTKYDSTAKGGVVFSLASVLHMPVAYLCTGEKYGDIRAFDPHDFAREFAGIT

SEQ ID NO: 24059 - DNA, 717 bp, Unknown
  Obtained from environmental sample
  misc_feature (1)..(717): n is a, c, g, or t
atggccgagaggatcatccgtgaaaacggcgttttgaacggaaaaattaaaatgtcccctccgactgatgccgacattgccgaagcgaagacgtactcaatcgtcaacgcggtagccgccgtatcatcgcgctctgttgcaaaaattctccctgacaaatcgcaggtaaaaaaacgcgtggcgttgatggattacggagcgaagcgggggatagcgcgggcgctggcggcgcggggctgtgaggtgtggtcttttccgcatgacgcaagcgctgatgagatactggcatttaagccgcatgggattatgctgtctaacggccccggggatcccgcggaaccggccaataacggaattatcgaaacgctccgcgttttacagaagggcaatgcgccgatcttcggaatttgcctgggacaccaactgctcgcgctggcaaacggttatacgacgaagaagctcaagtttggccacagaggggccaatcagccggttaaagatctgtcaaccgggcgcgtgtacatcaccagccagaatcacggctacgcggtcgtgacggataacggctcattcatgaacgtaaacgacggaacctgcgaaggcatggattacgggaattcgttttcggtgcagtttcaccccgaggcctgcggcggcccgcttgacactgcttttctgtttgaccgttttatggaaaggatggacaaatgtcactag

SEQ ID NO: 24060 - protein, 238 aa, Unknown
  Obtained from environmental sample
  DOMAIN (49)...(215): Peptidase C26
  misc_feature (1)..(238): Xaa is any amino acid
MAERIIRENGVLNGKIKMSPPTDADIAEAKTYSIVNAVAAVSSRSVAKILPDKSQVKKRVALMDYGAKRGIARALAARGCEVWSFPHDASADEILAFKPHGIMLSNGPGDPAEPANNGIIETLRVLQKGNAPIFGICLGHQLLALANGYTTKKLKFGHRGANQPVKDLSTGRVYITSQNHGYAVVTDNGSFMNVNDGTCEGMDYGNSFSVQFHPEACGGPLDTAFLFDRFMERMDKCH

SEQ ID NO: 24061 - DNA, 1008 bp, Unknown
  Obtained from environmental sample
  misc_feature (1)..(1008): n is a, c, g, or t
atgaattactacatagaaagccgcagtaccgatccataccacaatctggcgctggaacagtttgtctttgattctcttgatcgcagctgtaattatttcatgctctggcaaaaccacaattccataatcgtgggaaaacatcagaatacattggccgaaattaacgcggcctttgttaacgcgcataagatcaacgttgtaagaaggctttccggcggcggcgcggtgtaccacgatcttggaaaccttaattacacgtttatcaccaaggccgaggacgccgcccgcgtgaccatggaacgcttcaccctgcccatcgtgcgggcgctgtccgccttgggggttcaggccgagacaggcggccgcaacgacatcctggctggcgggcgcaaaatttctggcaacgcccaagccttgcaccggcaacgcatcctgcaccacggcacgatgctttttgattccgacctctccgtgctcgccaaagccctgcaggtcaaaccggaaaaatttctctccaaaggcgtcaagtccgtacgctccagagtggccaacatccgggaatttctcccggatgccggtttcaccatccaggatctcagggagcatatcatccggtgcatctcgcgggaacagcccacggaggacgtgcgcctcagccccgaggatatggaggccatccgcggcttgcacgacagtaaatacgcgacctgggagtggaatttcggccagtctccgccctacaatttcaaaaacgcgcggaagtgcgaagggggttttctggaagtgctgctggacgtgcaggacgggcgcctggcatcctgcgcttttttcggcgactttctggccctgcggcctgcggaagaagcggcgagccgccttctgggcctgcgccatgcccgccaggaactgcggaaagcccttgagagcctgccccttgacgaatacttcgggggcatcgccctggaggaagtgctggactgcctcctgggcgtggaaagcgcggattaa

SEQ ID NO: 24062 - protein, 335 aa, Unknown
  Obtained from environmental sample
  DOMAIN (44)...(128): Biotin/lipoate A/B protein ligase family
  misc_feature (1)..(335): Xaa is any amino acid
MNYYIESRSTDPYHNLALEQFVFDSLDRSCNYFMLWQNHNSIIVGKHQNTLAEINAAFVNAHKINVVRRLSGGGAVYHDLGNLNYTFITKAEDAARVTMERFTLPIVRALSALGVQAETGGRNDILAGGRKISGNAQALHRQRILHHGTMLFDSDLSVLAKALQVKPEKFLSKGVKSVRSRVANIREFLPDAGFTIQDLREHIIRCISREQPTEDVRLSPEDMEAIRGLHDSKYATWEWNFGQSPPYNFKNARKCEGGFLEVLLDVQDGRLASCAFFGDFLALRPAEEAASRLLGLRHARQELRKALESLPLDEYFGGIALEEVLDCLLGVESAD

SEQ ID NO: 24063 - DNA, 615 bp, Unknown
  Obtained from environmental sample
  misc_feature (1)..(615): n is a, c, g, or t
atggcgaccgaacgctactggctaggcattcatatcggcgacgggcgttttacggttctctattccgacggcacgttcgaccagccggtaccgtgggacgaaaaatgtttcttgaacaaaacgacatctatctgtgacgacgacgccatagatagcacccgctattgcttcttttcgaacgaggaaaaagaaccgcccgtagccgttttcctttgctccgacggcgttgacgataactatccgccggaagaaaatgaaaaacacttgtacaaactatataaaatcatagcgcaaaccttcgacaaagacggttttgaatccacgtgcaaccaattaaaggaactcgccgaaaaattcgccgacgaaggcaaaggcgacgatacatccatcgccggattcgtagatatggagagacttaaaaacatcgtacggatatgggaagaagaagacaaaacgaagattgatgccgaaaaaccggccgtcgcggaaatgaccgttacggaaaccaccgtaactgaaagcgccgttcatgaaaccgccgccgctgataaatcggtcgatggcaaaaaagacggctcggaaatcgaaatatacgaagttggaaaaacattgtaa

SEQ ID NO: 24064 - protein, 204 aa, Unknown
  Obtained from environmental sample
  misc_feature (1)..(204): Xaa is any amino acid
MATERYWLGIHIGDGRFTVLYSDGTFDQPVPWDEKCFLNKTTSICDDDAIDSTRYCFFSNEEKEPPVAVFLCSDGVDDNYPPEENEKHLYKLYKIIAQTFDKDGFESTCNQLKELAEKFADEGKGDDTSIAGFVDMERLKNIVRIWEEEDKTKIDAEKPAVAEMTVTETTVTESAVHETAAADKSVDGKKDGSEIEIYEVGKTL

SEQ ID NO: 24065 - DNA, 300 bp, Unknown
  Obtained from environmental sample
  misc_feature (1)..(300): n is a, c, g, or t
atgtcttccagatttatgccgccgaaacttcccgccagcagggcgaccgtttctacaattacatcaacgtcctttgaacggatgcacagaggaaccgcgtccacgccgccgaaggatttgaacagcacgcatttcccttccatgacgggcattcccgcttccgggccaatgtcgccgagtcccagcaccgcggtaccgtcggtgaccactgccaccgtattccagcgcccggtcagttcccagcttttttgggggtctttttgtatctcaaggcagggccgggcaacgccgggcgtatag

SEQ ID NO: 24066 - protein, 99 aa, Unknown
  Obtained from environmental sample
  misc_feature (1)..(99): Xaa is any amino acid
MSSRFMPPKLPASRATVSTITSTSFERMHRGTASTPPKDLNSTHFPSMTGIPASGPMSPSPSTAVPSVTTATVFQRPVSSQLFWGSFCISRQGRATPGV

SEQ ID NO: 24067 - DNA, 867 bp, Unknown
  Obtained from environmental sample
  misc_feature (1)..(867): n is a, c, g, or t
atggagtatctggaaaaattggttgagccggggcaggtgttcccgctcacccacggaacggacgatacttttgacaacttggcgagccacgggatttccgtttattgcggttcgctgtgggttgcgggcttgcgcgccgcggcaaaaattgcagaaaccctcggagatagggaccgtgctaatcactggaataactgggctaatgatgcccaaagggttttccacgaggttttgtggaacgaaaaggatggctatttcctcttttacgcttccaaatcgcaaggcgtgaacgacgatgtttttgcggacgctcttttggcggatacatatttgcgcttgctgaatatggagcctattatggattcaaaaaaggcaaagcgaactttgacaaaaatttacaacaccaactataaaaagaacagccctttgataggtgctgcgaatttggtgcacaaagacggctcgcccctagatgaattcaattttcaggcgcacgatgtttggataggtattcaatacagccttgcaaccgcgatgtatatgcacggtatgaaaagggaagccgaagatttgctggaagcgtgtttccgcaatctttacaaagaagctcgcattccttttgccgcaccggaaggctttaacgggagctgccgtttgcacgttggcggcaaggtgacaaaagcattgctcgctgatttgaaaaaagcaaaggccttgctagaagataatcgcatatcaccgaatttgccgaggaatttgagcaagtttgaaaagcagtttaagagcatttgcacaaagcacaaggttaaagcctctgagcttttcgctttgctccacgccacagcgttaaaatacacagcagggtaa

SEQ ID NO: 24068 - protein, 288 aa, Unknown
  Obtained from environmental sample
  DOMAIN (1)...(233): Protein of unknown function, DUF608
  misc_feature (1)..(288): Xaa is any amino acid
MEYLEKLVEPGQVFPLTHGTDDTFDNLASHGISVYCGSLWVAGLRAAAKIAETLGDRDRANHWNNWANDAQRVFHEVLWNEKDGYFLFYASKSQGVNDDVFADALLADTYLRLLNMEPIMDSKKAKRTLTKIYNTNYKKNSPLIGAANLVHKDGSPLDEFNFQAHDVWIGIQYSLATAMYMHGMKREAEDLLEACFRNLYKEARIPFAAPEGFNGSCRLHVGGKVTKALLADLKKAKALLEDNRISPNLPRNLSKFEKQFKSICTKHKVKASELFALLHATALKYTAG

SEQ ID NO: 24069 - DNA, 918 bp, Unknown
  Obtained from environmental sample
  misc_feature (1)..(918): n is a, c, g, or t
atgtggagccaccatcttgtccgttttgacgctacaacgggaatgttggagtatattgtagacggaaaaggcgaatcaattatctatgcgacatctactggccgcgaaaacagcgaagtccatattcccgtcgtaggaaacaacggcagattcttgcttggtgggcgttttacgggatttattgatgaatttaaaattcacagagtatgcgcgggacgttcttcaattcaaaggtatgcgtcttggggtggcagaatcgaaacaaaacccgttgacatgggagccgtattaagcggcgttgttaaaattaacgcctgcggaggcagaacaagcattaaaggaaccgccctgcaaaatgaattccgcgagaacggaaggtttaaattttccgacgatgcggaaatgaacttctttgtccgcgcgggggagaatccttattccatggacaatatcccctgggtcatttttacgcccggggtggaaatatcgggagtgcgcggacgttatgtgcaaatagcggtggatttctatccgtctgcggacggcgagtgcagtccctatcttgagcagttaaatattgtctttatgaagggtgaagcgcctctgccgccacgcaatttgaccgcaattgccaaagacggctgtgttcaacttcgctggaaacaaagcacgagcacaagtacggcagggtaccttgtctattatagcgccgtccgaggagaactttttggcaatgactccaagttggggtcttcgccgatagatgtaggaataaccaataatattaatattgacgggttgaagaacggaacgctttattacttcagggttgccgcttatgatctggcgggaggaagccgcaatattggggatttttctgccgaggttacagcgcgtccgcttacggggttgaagtaa

SEQ ID NO: 24070 - protein, 305 aa, Unknown
  Obtained from environmental sample
  DOMAIN (201)...(293): Fibronectin type III domain
  misc_feature (1)..(305): Xaa is any amino acid
MWSHHLVRFDATTGMLEYIVDGKGESIIYATSTGRENSEVHIPVVGNNGRFLLGGRFTGFIDEFKIHRVCAGRSSIQRYASWGGRIETKPVDMGAVLSGVVKINACGGRTSIKGTALQNEFRENGRFKFSDDAEMNFFVRAGENPYSMDNIPWVIFTPGVEISGVRGRYVQIAVDFYPSADGECSPYLEQLNIVFMKGEAPLPPRNLTAIAKDGCVQLRWKQSTSTSTAGYLVYYSAVRGELFGNDSKLGSSPIDVGITNNINIDGLKNGTLYYFRVAAYDLAGGSRNIGDFSAEVTARPLTGLK

SEQ ID NO: 24071 - DNA, 318 bp, Unknown
  Obtained from environmental sample
  misc_feature (1)..(318): n is a, c, g, or t
ttgtggacgtatactatatactgcacgaaaacgcgtttttgcctgtcttttctgaaaatttttcgcaaaattcgcaaaaaaaatcaaagcatatcccatcccggcgcagtaatagctatggaggcagctatgcatgttttagcttttacgccgcagggttcggagggcatcataattcgcgttgaggcggacatccgccggggcataccagggatcgacatcaccggccttgcggaaggggcagtccgggaagcaaaggaaagggtcagggcgagttttcgcaattcaggctttgcctttccgcagaccgcattttaa

SEQ ID NO: 24072 - protein, 105 aa, Unknown
  Obtained from environmental sample
  misc_feature (1)..(105): Xaa is any amino acid
MWTYTIYCTKTRFCLSFLKIFRKIRKKNQSISHPGAVIAMEAAMHVLAFTPQGSEGIIIRVEADIRRGIPGIDITGLAEGAVREAKERVRASFRNSGFAFPQTAF

SEQ ID NO: 24073 - DNA, 594 bp, Unknown
  Obtained from environmental sample
  misc_feature (1)..(594): n is a, c, g, or t
atgacggcaaaactttccgcggaaacattgagcaaacttctgccgcaccgcaaagctttaatcttaaaacggatagcgcatcaaagcgaagtcgcgccggaagtgcttgaacaagtatccgccgcgatgaaagaaaaaatcagaaatgtcagcgccattgccaacgatataaaaattgacggtatgcagactctggcggcgattctaaagcaaggggattattctttcggcgacaaattaataaatgagatagaaaaaaaagacccgttaatcgggcagaatttaaaagaaaaactttatacgcttgacgatgttttactcgcggttgatcgtcccattcaggataaattatccacgatgacggatcatgacattgccgttttattgaagggcagaggaaatgaattctacgaaaaaataatgtcctgtgtttcagcgggacgcagaaaagtaatccgtgaagaaagcgaagttataggagcggttccaaaacgcgattgcgattcagtcgcaaaagaatttcttacatggtttagatttgcccgcgaaaacggagaaattttactttacagtgacgaggatgtggttgtatga

SEQ ID NO: 24074 - protein, 197 aa, Unknown
  Obtained from environmental sample
  DOMAIN (81)...(190): FliG C-terminal domain
  misc_feature (1)..(197): Xaa is any amino acid
MTAKLSAETLSKLLPHRKALILKRIAHQSEVAPEVLEQVSAAMKEKIRNVSAIANDIKIDGMQTLAAILKQGDYSFGDKLINEIEKKDPLIGQNLKEKLYTLDDVLLAVDRPIQDKLSTMTDHDIAVLLKGRGNEFYEKIMSCVSAGRRKVIREESEVIGAVPKRDCDSVAKEFLTWFRFARENGEILLYSDEDVVV

SEQ ID NO: 24075 - DNA, 444 bp, Unknown
  Obtained from environmental sample
  misc_feature (1)..(444): n is a, c, g, or t
ttggggcattcttatctgggcgcctgggcaaacttgggcgccggcacggaaaacagcgacctcaaaaataattatcagcaggtgcgtatccagatcggcgcgggcaagacggtggactcccaactgcagtttgcgggctgctgtatcggcgatcataccaagaccggcatcaagactatgctgaataccggcgcggtattgggttgtttttgcaatgtattcggcgcaggttttcagccgaaatatttgccggcttttacctggaatgacaacaaaaatccgccggaggaatatcatctggaaaatgccctgcaaactgcccggacggttttcctgcggcgcaatctggtcttgaccaaagaattagaaactctctaccgtagtatctatcaggacagcgcacaggagcgccgcaatctcaagattcgtaaaaataaaaaataa

SEQ ID NO: 24076 - protein, 147 aa, Unknown
  Obtained from environmental sample
  misc_feature (1)..(147): Xaa is any amino acid
MGHSYLGAWANLGAGTENSDLKNNYQQVRIQIGAGKTVDSQLQFAGCCIGDHTKTGIKTMLNTGAVLGCFCNVFGAGFQPKYLPAFTWNDNKNPPEEYHLENALQTARTVFLRRNLVLTKELETLYRSIYQDSAQERRNLKIRKNKK

SEQ ID NO: 24077 - DNA, 825 bp, Unknown
  Obtained from environmental sample
  misc_feature (1)..(825): n is a, c, g, or t
ttggggcttgatgacgctgttaatcgggcactggagtacaatctttcattaaagaagagccagattgatctttcggcaagcggttactcggaaaagaatctttggtcggaaatttttccgtcgattagcgcaagcgccagcgcaggatacagaaacaatcttttcagcgatattcctcttaacaattcgggttataattacagcgtcggtttcggcgttacgcttggtctgaacgcaggtattccctatgctatgcgaaacatcaaattggctcatcagggaaatatcttaaaatacgaagacgcaaaaaatcagctttccatacaaattaccaaattgttttattcgcttacagcggagaaaaacaatcttctgctccttgaagaaatttttaatcttgcccaaaggcagtatacaaggagcgaggtttcattcagaaacggtcttgtgggagagctttcccttacgcagagcagtcttgctcttgaaaacgcaaggtacaatcttaacacggcgaaaaccgcccacaaaaacaatatatcggattttctcgcaatgcttgggatgccgtcggacgaagaaataactttgtcgggcgattttaatatcgtaaagattgacgccgacgcggaagcgctgataaaagatcatctttccaatcgtcccgacatcataagagctaatcaggaaattgaaaagctaacattagcgaaaagacaaacattattgcaagccaaagcgccttcattaaatttatcgctggattggnggagttccnattttgatcctttttccgacactttaagcgccacccgcccgcgttaa

SEQ ID NO: 24078 - protein, 274 aa, Unknown
  Obtained from environmental sample
  DOMAIN (3)...(188): Outer membrane efflux protein
  misc_feature (1)..(274): Xaa is any amino acid
MGLDDAVNRALEYNLSLKKSQIDLSASGYSEKNLWSEIFPSISASASAGYRNNLFSDIPLNNSGYNYSVGFGVTLGLNAGIPYAMRNIKLAHQGNILKYEDAKNQLSIQITKLFYSLTAEKNNLLLLEEIFNLAQRQYTRSEVSFRNGLVGELSLTQSSLALENARYNLNTAKTAHKNNISDFLAMLGMPSDEEITLSGDFNIVKIDADAEALIKDHLSNRPDIIRANQEIEKLTLAKRQTLLQAKAPSLNLSLDWXSSXFDPFSDTLSATRPR

SEQ ID NO: 24079 - DNA, 1053 bp, Unknown
  Obtained from environmental sample
  misc_feature (1)..(1053): n is a, c, g, or t
atgcctattctcaaaataaacaacgaaactatcaggcaggcggcggcgagtattatcagcggcgggcttgcggtttttccgacggaaaccgtttacggcctgggagctgacgcgtttaaccctgaagccctcgccatgatttttgaaatcaaaaaccggccgcgctttgaccccctgattatccatatcgcggcgcttggcgctcttgaaaaagtcgccgatctttccatgctggatacgggcataagaaaaaaaatcgacgcgttaactgaaaaattctggcccggccccctcaccctgattctgcctaagcagcaggccgttcccgaccttgcgaccagcggcctgcccacggtagccgtgcgcatcccctcccttgcctcggcaaggcagcttatagccttatcctcgggcgcggtagcggccccaagcgcgaatccctttggctttttaagccccaccagcgcggagcatgtgctggctatgctcggcgacaaggtagaaattatccttgacggcggcccgacgcaggtagggcttgaatccaccgtgcttgacatttgcggcgcacagcagcgcatactcaggcccggcggcgttcccagggaggctatagaagccgtgattggcccacttgccgcgttagacgacactgccatttatggcgccgacattcatggcgccgccgttcacggcgcagtttccccgggcatgactgcaagccactacgccccgcgcgcttctctggaagtacatgatttggaagctttgtgcgcgataccctttgacaataaaagcgcgtatctcttttttgacggaacatcatataaactgtggcaaaagaaacaaaaacaaccttatgataaaactttaattaaagttctcagtgaaacagggaatattaccgaggccgcggcccatttcttccaatccctgcatgaactggacaagcctgaattatgccggatttacgcgcagcccgcgccccaaaaagggctcggcgtagcgattaacgacaggctggaaagggcaaggagcaaaaccagtccctga

SEQ ID NO: 24080 - protein, 350 aa, Unknown
  Obtained from environmental sample
  DOMAIN (200)...(350): SUA5 domain
  misc_feature (1)..(350): Xaa is any amino acid
MPILKINNETIRQAAASIISGGLAVFPTETVYGLGADAFNPEALAMIFEIKNRPRFDPLIIHIAALGALEKVADLSMLDTGIRKKIDALTEKFWPGPLTLILPKQQAVPDLATSGLPTVAVRIPSLASARQLIALSSGAVAAPSANPFGFLSPTSAEHVLAMLGDKVEIILDGGPTQVGLESTVLDICGAQQRILRPGGVPREAIEAVIGPLAALDDTAIYGADIHGAAVHGAVSPGMTASHYAPRASLEVHDLEALCAIPFDNKSAYLFFDGTSYKLWQKKQKQPYDKTLIKVLSETGNITEAAAHFFQSLHELDKPELCRIYAQPAPQKGLGVAINDRLERARSKTSP

SEQ ID NO: 24081 - DNA, 567 bp, Unknown
  Obtained from environmental sample
  misc_feature (1)..(567): n is a, c, g, or t
atggcagtgtcgtctaacgcggcaagtgggccaatcacggcttctatagcctccctgggaacgccgccgggcctgagtatgcgctgctgtgcgccgcaaatgtcaagcacggtggattcaagccctacctgcgtcgggccgccgtcaaggataatttctaccttgtcgccgagcatagccagcacatgctccgcgctggtggggcttaaaaagccaaagggattcgcgcttggggccgctaccgcgcccgaggataaggctataagctgccttgccgaggcaagggaggggatgcgcacggctaccgtgggcaggccgctggtcgcaaggtcgggaacggcctgctgcttaggcagaatcagggtgagggggccgggccagaatttttcagttaacgcgtcgattttttttcttatgcccgtatccagcatggaaagatcggcgactttttcaagagcgccaagcgccgcgatatggataatcagggggtcaaagcgcggccggtttttgatttcaaaaatcatggcgagggcttcagggttaaacgcgtcagctcccaggccgtaa

SEQ ID NO: 24082 - protein, 188 aa, Unknown
  Obtained from environmental sample
  misc_feature (1)..(188): Xaa is any amino acid
MAVSSNAASGPITASIASLGTPPGLSMRCCAPQMSSTVDSSPTCVGPPSRIISTLSPSIASTCSALVGLKKPKGFALGAATAPEDKAISCLAEAREGMRTATVGRPLVARSGTACCLGRIRVRGPGQNFSVNASIFFLMPVSSMERSATFSRAPSAAIWIIRGSKRGRFLISKIMARASGLNASAPRP

SEQ ID NO: 24083 - DNA, 456 bp, Unknown
  Obtained from environmental sample
  misc_feature (1)..(456): n is a, c, g, or t
ttgcctgttcttgggtttgtggcttttgtggtgtttatgtgcgttagcaccgcagagctaaaccgcgccccctttgacatagcagaatccgaacaggaactcaccgcaggcttccataccgaatataccggaaccgcttttgcaatgttctacttaaccgaatacataaacataataggtgcctccgctctagggtcaattttctttttgggcggatttcaagcacctctaataggcattcctattgttgacgaaaaactattgctcattccagatttggtttggatgtttgccaaaatttattttcttatttggctttatatgatgttccgctggacttggctaagacctcgcgttgaccagcttatgagctttgaatggaaatttttgctcccgtcaaatttgattttgcttgggcttggagcattctttatagcaatgggttgggttttatga

SEQ ID NO: 24084 - protein, 151 aa, Unknown
  Obtained from environmental sample
  SIGNAL (1)...(18)
  DOMAIN (1)...(146): NADH dehydrogenase
  misc_feature (1)..(151): Xaa is any amino acid
MPVLGFVAFVVFMCVSTAELNRAPFDIAESEQELTAGFHTEYTGTAFAMFYLTEYINIIGASALGSIFFLGGFQAPLIGIPIVDEKLLLIPDLVWMFAKIYFLIWLYMMFRWTWLRPRVDQLMSFEWKFLLPSNLILLGLGAFFIAMGWVL

SEQ ID NO: 24085 - DNA, 504 bp, Unknown
  Obtained from environmental sample
  misc_feature (1)..(504): n is a, c, g, or t
atggaaatttttgctcccgtcaaatttgattttgcttgggcttggagcattctttatagcaatgggttgggttttatgactgtttccaaatattttcacgctgtgataaccggccctattagcttgctaaaagggatgtctgtcactctcaaatattttataaaccccaaaagaatagtgaccgagcaataccccgaaaacaaagcaacgctcaaaatgcacgagcgttttagagggcgtgttgaacttatccacgatgaaaacggcttgcacgcttgcaccgcctgcggcatttgcgaaaaaaactgccccaataattccataaatgtactctcaacaaaaagcatagctggcaaaaaaattctcggcaaatatctttaccgcatggactcttgcactcaatgcgggctttgcatagagagctgcccctttggttgcttaagaatggcacacgattttgaaatggcttctacagacagaaaaatcgttcaatatggtttttga

SEQ ID NO: 24086 - protein, 167 aa, Unknown
  Obtained from environmental sample
  DOMAIN (86)...(109): 4Fe-4S binding domain
  misc_feature (1)..(167): Xaa is any amino acid
MEIFAPVKFDFAWAWSILYSNGLGFMTVSKYFHAVITGPISLLKGMSVTLKYFINPKRIVTEQYPENKATLKMHERFRGRVELIHDENGLHACTACGICEKNCPNNSINVLSTKSIAGKKILGKYLYRMDSCTQCGLCIESCPFGCLRMAHDFEMASTDRKIVQYGF

SEQ ID NO: 24087 - DNA, 693 bp, Unknown
  Obtained from environmental sample
  misc_feature (1)..(693): n is a, c, g, or t
atgacggataggctgaaagaggaacgcgtccgcaacgtcatcggcccgcttatcatcggcgaagaggtcgccaccagacgcggcgaagactacctatatacaagggacttgggcatcatacgggaacgcgacggcaaggtcgagccggcaaatccgatctacgcggaactgatcgtcagggcgctgaattgggacgtccaagaatccataaaatccgaacacgaagagtacgtcatcccgcgttacctgaaagacggcaagatcgacattgattttttgatgaaagactttcaaccgtattggcgggagaacagcgaaattttggacgaccgctacaagaaacactattacgaatacgacgaatacgcaacccacctcgtcatgcaagctttcctgcaacgtgtgataaacggcggcggacaagtcattcgcgagatggctttcggcaagaaacgcgcggatttgtgtgtggtctacaacggccaaaaatacccgatagaactcaaaatcctgcaaaacatgagaggcgctgccttaggcatagatcaactgctgggatacatggacaaaatcggttcggataacggatggttagttatctttgataaaaatccggagaagagttgggacgagaagatctacatgagggaggagacggttggaggcaagcgggtcatggtcgtcgggtgctga

SEQ ID NO: 24088 - protein, 230 aa, Unknown
  Obtained from environmental sample
  misc_feature (1)..(230): Xaa is any amino acid
MTDRLKEERVRNVIGPLIIGEEVATRRGEDYLYTRDLGIIRERDGKVEPANPIYAELIVRALNWDVQESIKSEHEEYVIPRYLKDGKIDIDFLMKDFQPYWRENSEILDDRYKKHYYEYDEYATHLVMQAFLQRVINGGGQVIREMAFGKKRADLCVVYNGQKYPIELKILQNMRGAALGIDQLLGYMDKIGSDNGWLVIFDKNPEKSWDEKIYMREETVGGKRVMVVGC

SEQ ID NO: 24089 - DNA, 885 bp, Unknown
  Obtained from environmental sample
  misc_feature (1)..(885): n is a, c, g, or t
atggcgaatttaagagatgttcgcctcaggatgcgggccattaggcaaaccctgcaggtaaccaaagcgatgaatttaatctcaaccgccaagctacgcaagggccgccgcatactgctggacgttgagcctttctttaccagagtccaaaaatccatgtttgacatactcgcgggagcgccgcttgaaaaaagcaaataccttgcgtcgcccgaaaaaggaaaagaataccacaccgcgataatcgtgataacaagcgacaagggccttgccggcggttacaacgcgaatattttcaggcaggtaaattcgctctgcgaaaaggtgaagaaccccatcctcattctggttggctcggttgggtacaggtacttcatccattcaccctggcttgtcatggaaaatttttcatttaagtccaggctgcctgagctggatgaggcgaaggaaatcgcggagtatattatttcccaataccaatggggactatttgacgaagtccatcttgtatatacgcatatgtacagttccatcaaacttgttccaagggaaaggcagctgttgccccttgacctggagagtatgcaggaagaatttgaaaggctcggtgggaagcgggagagactcagttttgaatactcgccttcgaaagaagaggtgtttgacgcccttgttcccatgtacgtaaaaggggtaatttacggctcccttgtggaagcttatgttagcgagcaaagcgcccgtatgtccgcgatggacgaagccagcaaaaacgcggaagaaatgctcggcgatttgcagattaactataaccgcgccaggcagtcaggcattacccaggaaatgacagaaattgtcggcggcgcggaagcactgtccaactaa

SEQ ID NO: 24090 - protein, 294 aa, Unknown
  Obtained from environmental sample
  DOMAIN (2)...(292): ATP synthase
  misc_feature (1)..(294): Xaa is any amino acid
MANLRDVRLRMRAIRQTLQVTKAMNLISTAKLRKGRRILLDVEPFFTRVQKSMFDILAGAPLEKSKYLASPEKGKEYHTAIIVITSDKGLAGGYNANIFRQVNSLCEKVKNPILILVGSVGYRYFIHSPWLVMENFSFKSRLPELDEAKEIAEYIISQYQWGLFDEVHLVYTHMYSSIKLVPRERQLLPLDLESMQEEFERLGGKRERLSFEYSPSKEEVFDALVPMYVKGVIYGSLVEAYVSEQSARMSAMDEASKNAEEMLGDLQINYNRARQSGITQEMTEIVGGAEALSN

SEQ ID NO: 24091 - DNA, 441 bp, Unknown
  Obtained from environmental sample
  misc_feature (1)..(441): n is a, c, g, or t
atgtcccgccgctgcgccagaggaccgaagatatccccgatctcgcccngtttttttatgacaaaatatatgaagcagaataaaaaagaattcgccggtttctcgcaagacgcgctggacgccatacttacctattcatggccgggcaatatacgcgaactggaaaactgcgttgagagggcctgcgtaatcgccgccggaaagtggataaataaagaggacctcctgctcaacgccgcgggggcggggcagggcgcttgtggcggcgcccttactggaaacaggaaccttaaaaccgccacgaacgtattcagggcgaatttcatacgcaaagcgcttgatgaaaaccaatggaaccagacggagacggcaaaggcgctggatattcaaagaacctatttatcaaggcttatgaaagatcttaatataaggaacggataa

SEQ ID NO: 24092 - protein, 146 aa, Unknown
  Obtained from environmental sample
  DOMAIN (105)...(141): Bacterial regulatory protein, Fis family
  misc_feature (1)..(146): Xaa is any amino acid
MSRRCARGPKISPISPXFFMTKYMKQNKKEFAGFSQDALDAILTYSWPGNIRELENCVERACVIAAGKWINKEDLLLNAAGAGQGACGGALTGNRNLKTATNVFRANFIRKALDENQWNQTETAKALDIQRTYLSRLMKDLNIRNG

SEQ ID NO: 24093 - DNA, 711 bp, Unknown
  Obtained from environmental sample
  misc_feature (1)..(711): n is a, c, g, or t
atgcagaatcagaacgaaaaacatggcgcggaaaaagaagcaagcgcaagtgaaaagatcaatgaatttattcagaagaacaggaagcccatatttattttggccgtcgctctgttcgcggttttaatcgcggtcattgccgcgctttcgctgatagacgtattcaggaacaaggccattgccgcagtggaagaatttaacgaccgctacgaaacaatgctgccctcgatcaccgaagagtatttctcggaagacgttaattcattggttgaggaattaacggaattcgcgaanaaaaattcaggctatcccggcgggcgcgcctggcttttaatcggcggcatacataccgcgaaaaaagaatgggccgaggccgaggcctcctataccgaggccgctaaatccgcgggtaaaacatacctcgcgccgcttgcctggttcaacgccggggcggccgcggaagagcagggcaaaacatctgaagccatcgggtattatgaaagcagcctcacggctccggccgtgttttcggcggcgccccgcgcccagttttcagtcggacgtctgcatgaggctcttaacgaagacgaaaaggcgatagaagcgtaccgcgccgtcatttccaactggtcctacgaccaggtatggacaaaccttgcccgcagcaggattataacgctggagacaaaatctgccggtgaacaggaatag

SEQ ID NO: 24094 - protein, 236 aa, Unknown
  Obtained from environmental sample
  misc_feature (1)..(236): Xaa is any amino acid
MQNQNEKHGAEKEASASEKINEFIQKNRKPIFILAVALFAVLIAVIAALSLIDVFRNKAIAAVEEFNDRYETMLPSITEEYFSEDVNSLVEELTEFAXKNSGYPGGRAWLLIGGIHTAKKEWAEAEASYTEAAKSAGKTYLAPLAWFNAGAAAEEQGKTSEAIGYYESSLTAPAVFSAAPRAQFSVGRLHEALNEDEKAIEAYRAVISNWSYDQVWTNLARSRIITLETKSAGEQE

SEQ ID NO: 24095 - DNA, 513 bp, Unknown
  Obtained from environmental sample
  misc_feature (1)..(513): n is a, c, g, or t
ttggccgagtccggactttggaacagcggcgttatagattttctttccggaataaccgatccctatctgaactgtttccgccgattctcgtttctccgcctgggttttctggatctctccccaattatagctttaggcgttctcgcgctgtttaaccgtattcttggtatgctcgcgagttacggtaggatttccgttggcgttgtattggccatgacgctccaggttttatggggagctgtttcttttatccttggatttttaattctgattatgatattgcgccttatagcttttttattcaggcaaagcggcgcaaatccattttggaacgttattgataccatttcccagccggtgctttacagaataaaccgcattttttttcgcggcaggattgtgaagcacataacgtctctcctggtttccattataagcctggcctttatttacatggcctttaggcttctcttcgtgtttatttctgtgatgatgctcagattaccggtttag

SEQ ID NO: 24096 - protein, 170 aa, Unknown
  Obtained from environmental sample
  DOMAIN (3)...(58): YGGT family
  misc_feature (1)..(170): Xaa is any amino acid
MAESGLWNSGVIDFLSGITDPYLNCFRRFSFLRLGFLDLSPIIALGVLALFNRILGMLASYGRISVGVVLAMTLQVLWGAVSFILGFLILIMILRLIAFLFRQSGANPFWNVIDTISQPVLYRINRIFFRGRIVKHITSLLVSIISLAFIYMAFRLLFVFISVMMLRLPV

SEQ ID NO: 24097 - DNA, 624 bp, Unknown
  Obtained from environmental sample
  misc_feature (1)..(624): n is a, c, g, or t
gtgtttgggcaactggaaaataaaggctgccggcggatgtttttcaagagaagccagatcggggagatgttgctggttattccctcagacattgtaaagtgggtaagagcatgggatttagcggccacgtctgaggaggaaggcggagaccctgcttacaccgccgggatactgatgggcaagagggaaaatggaaagtacgttattgccgatgtaatcaatgtaaggcaaagcgccggggaagtgagaaccactatcaagcacacgggaagcgttgataattccaagtatgaaaacgtcaaaatcaggctgcctaaagacccagggcaagccgggaaggatcaggcgcaaagctatattatgcaccttgccggatttaatgtatgcgctatagctgaatcaggcagtaaggagtcaagggcggaacccgtcgccgcccagtggcaagccgggaatatagatattgtgataggcgactggaatgaaatgtactttgaccagatggaaagttttcccatgagcaaatacaaggacatggtagacgcgacaagcgccgcgtttaatgagttggagacaggcattggagaggaatccagcgtcggttcggcgcgtatcgtttactga

SEQ ID NO: 24098 - protein, 207 aa, Unknown
  Obtained from environmental sample
  misc_feature (1)..(207): Xaa is any amino acid
MFGQLENKGCRRMFFKRSQIGEMLLVIPSDIVKWVRAWDLAATSEEEGGDPAYTAGILMGKRENGKYVIADVINVRQSAGEVRTTIKHTGSVDNSKYENVKIRLPKDPGQAGKDQAQSYIMHLAGFNVCAIAESGSKESRAEPVAAQWQAGNIDIVIGDWNEMYFDQMESFPMSKYKDMVDATSAAFNELETGIGEESSVGSARIVY

SEQ ID NO: 24099 - DNA, 1098 bp, Unknown
  Obtained from environmental sample
  misc_feature (1)..(1098): n is a, c, g, or t
atgtccctgatgatggaagttcgcaacctgactacctactacaagaccaggatgaacgaaaggatctgctcggtggataacgtttcgtttaccctggaagacggcaagagcctggggatagccggtgaatcgggctgcggaaaatctacccttgccatgagcgttatgggctattattttccgcccctgcattatgaatcggggaatatcattattgatggcaaggagattaccagccttgacccggacgtgatacgccaaaccgttctgggatcgcaaattgcctatattccccaggccgccatgaacgccctcaaccctacaaggaagattattaattttatcgaagacgtacttgaagcccacggtaaggggcttaccaaaaaggaagttttcgatctggcgcgtgagcgttttgccgttctcaatttgccggaaaaggtgttgaaccaatacgccgtggagctttccggcggcatgaagcagaggacgatcattgccatttccactattctgaaccccaaggttctcatcgccgatgagccctcttcggcgcttgatgtttcctcccaaaaaattgtaatcaggctcctttacgatcttttggagaagggctttgtccggtcaatgatttttatcacccatgagctgcccctgctctacaatgttaccgatgacataatggtaatgtacgccggagaaattgtggagcgtggaacagcgaaggaaatggtttttgatcctgtcatgccatattccaaagggctaatgaattcgattattgtaccggaagagggaaccaggggccatgtgctaatggccatccctggcgcgccgccaaatttaaagctcaagcagacgggttgccgcttcgctgaacgttgccgctatgcggatcctgagtgttccaaaggaaccatcgacgaacagtacggcggcgcagaagggcgttcttaccgctgccgccataagctggaagcgctctttcagttgtacgaaaaagatcttcccaatctgttggatcatgacaatttaaaaaacgatggagtaggcgaaaaaaagaaagaacgcaaaaaacgacggagtaagcatgaatag

SEQ ID NO: 24100 - protein, 365 aa, Unknown
  Obtained from environmental sample
  DOMAIN (236)...(302): Oligopeptide/dipeptide transporter, C-terminal region
  misc_feature (1)..(365): Xaa is any amino acid
MSLMMEVRNLTTYYKTRMNERICSVDNVSFTLEDGKSLGIAGESGCGKSTLAMSVMGYYFPPLHYESGNIIIDGKEITSLDPDVIRQTVLGSQIAYIPQAAMNALNPTRKIINFIEDVLEAHGKGLTKKEVFDLARERFAVLNLPEKVLNQYAVELSGGMKQRTIIAISTILNPKVLIADEPSSALDVSSQKIVIRLLYDLLEKGFVRSMIFITHELPLLYNVTDDIMVMYAGEIVERGTAKEMVFDPVMPYSKGLMNSIIVPEEGTRGHVLMAIPGAPPNLKLKQTGCRFAERCRYADPECSKGTIDEQYGGAEGRSYRCRHKLEALFQLYEKDLPNLLDHDNLKNDGVGEKKKERKKRRSKHE

SEQ ID NO: 24101 - DNA, 1101 bp, Unknown
  Obtained from environmental sample
  misc_feature (1)..(1101): n is a, c, g, or t
atggtcaagtcgcgcctgttcagacccgctctgattaaagaaaaagccggcgaggtaaaaatagtttacacgcctctgcacggcacaggcgcgtttcatgtcgaaaaagttttaggcgatcttggcttaaaagtgattactgtccccgaacagcgcgaggggaacggtgatttccccacagtgtcattccccaaccccgaagaagccgccgcgctggaaatggcgattaaactcggcgcaaaagaaaaagccgacgtagtaatggcgacagaccccgacgccgaccgctttggcattgccgttccgaacaagtcgggcggttttacgctggttacaggcaaccaaatgggcgttcttcttgccgattatattttcctgtcgcttaaagaattgggaaaactccccaaaaacgccgctatggttaactccattgttacgaccggaatgcagaaaaaagtagccgaatattacggcggcgaatgtcaggagtgtcttacaggtttcaagtggattgccgatgttatgcgtaagtgggaacacggcgaacttggaggcaaaacctatgttttcgggaccgaagaaagctacggttacaatgtagagacggaagtccgcgacaaagacggagtttccgccgcgacgttaaccgctgaaatgactctctattggcgcagtaaggggaaaactctccttgaccgccttgacgagctttataccatttgcggttactggcaggaattgggtatttcaaaatattttaagggaccggaaggaccttctatcatgaacggaataatggaagaataccgcaaaaatccgccgaagactctgggcggcataagtatcgcgaaagtccgcgatattaaaaacggcgcggacggtcttgcgccaagcgacgtattgcagttcttccttacggacggcactattgtaagcgcgcgtccaagcggcacggagcctaagattaaattttacgctacctgctgcgccgaggttggttcaggcgggttggaaggggcaaaagccgaagccgcccgcaaattggacgctattaataaagacatacgggcggtatcgggacagaaaatgcccccgccataa

SEQ ID NO: 24102 - protein, 366 aa, Unknown
  Obtained from environmental sample
  DOMAIN (4)...(108): Phosphoglucomutase/phosphomannomutase, alpha/beta/alpha domain II
  misc_feature (1)..(366): Xaa is any amino acid
MVKSRLFRPALIKEKAGEVKIVYTPLHGTGAFHVEKVLGDLGLKVITVPEQREGNGDFPTVSFPNPEEAAALEMAIKLGAKEKADVVMATDPDADRFGIAVPNKSGGFTLVTGNQMGVLLADYIFLSLKELGKLPKNAAMVNSIVTTGMQKKVAEYYGGECQECLTGFKWIADVMRKWEHGELGGKTYVFGTEESYGYNVETEVRDKDGVSAATLTAEMTLYWRSKGKTLLDRLDELYTICGYWQELGISKYFKGPEGPSIMNGIMEEYRKNPPKTLGGISIAKVRDIKNGADGLAPSDVLQFFLTDGTIVSARPSGTEPKIKFYATCCAEVGSGGLEGAKAEAARKLDAINKDIRAVSGQKMPPP

SEQ ID NO: 24103 - DNA, 363 bp, Unknown
  Obtained from environmental sample
  misc_feature (1)..(363): n is a, c, g, or t
ttgaagcttacctatacgcaggtaattacattcacctattgcgcgttaatattgttcggcggaattttactctgccttcccatagcctcgcaatcgggcggatggacgccgccgcttgacgctctttttacctccacgagcgcggcctgcgttaccggccttgtgttatatgacacatggacgcattggtcgttgttcggccagattgtcatcctgtttttatttcaaatcggcggtatcggttttatgaccgttattaccatgtttttcatatttttaaacgaaaataggcctgtacgaaaggcaggttttggttcagtcaaccggattattaaagctgggcggggttgttcgccttattaa

SEQ ID NO: 24104 - protein, 120 aa, Unknown
  Obtained from environmental sample
  misc_feature (1)..(120): Xaa is any amino acid
MKLTYTQVITFTYCALILFGGILLCLPIASQSGGWTPPLDALFTSTSAACVTGLVLYDTWTHWSLFGQIVILFLFQIGGIGFMTVITMFFIFLNENRPVRKAGFGSVNRIIKAGRGCSPY

SEQ ID NO: 24105 - DNA, 792 bp, Unknown
  Obtained from environmental sample
  misc_feature (1)..(792): n is a, c, g, or t
ttggttcagtcaaccggattattaaagctgggcggggttgttcgccttattaaaaatattgtcattttgtcgctttgcatggaattcatcggggcggttttattagcgctgcgtttttgccccctaatgggcgttaaaagcggtatctataacgccgtttttcactcggtatccgctttctgtaacgcggggtttgatttaatgggaaaataccggccgttttcgtcgcttggcttttttgttaatgattttccggtaaatattacccttatttttcttattgttacaggtgggataggatttgtcgtattggacgatattcgcatatataaattcaaggttgaaaaatactcattgcatacaaaaattacgcttaccgttacgggaatgcttattgtattgggatttatattattctatgcgtttgaatacaacggcttgctggaggggtttaccgttccggaaaagttacttgcgtcattattccagtccgttaccgccagaacatccggcttttacgcgattgacacgtccggattaaaagaagcaagcgttattttggcaatggtatttatgtttatcggaggcggttccggttctacagccgggggcattaaaacgtcaaccctggcgattcttgttatgagcgcggttaattcaaccagaagaatgaacaaaatgatggtttttaaaagaatgttaagtgataagacggttaaatacgcgagttccattgtcacaatttatttgtttgtcgttctcacggcgaccattattatatgttttttttga

SEQ ID NO: 24106 - protein, 263 aa, Unknown
  Obtained from environmental sample
  DOMAIN (4)...(260): Cation transport protein
  misc_feature (1)..(263): Xaa is any amino acid
MVQSTGLLKLGGVVRLIKNIVILSLCMEFIGAVLLALRFCPLMGVKSGIYNAVFHSVSAFCNAGFDLMGKYRPFSSLGFFVNDFPVNITLIFLIVTGGIGFVVLDDIRIYKFKVEKYSLHTKITLTVTGMLIVLGFILFYAFEYNGLLEGFTVPEKLLASLFQSVTARTSGFYAIDTSGLKEASVILAMVFMFIGGGSGSTAGGIKTSTLAILVMSAVNSTRRMNKMMVFKRMLSDKTVKYASSIVTIYLFVVLTATIIICFF

SEQ ID NO: 24107 - DNA, 666 bp, Unknown
  Obtained from environmental sample
  misc_feature (1)..(666): n is a, c, g, or t
atgagacagaaacgaaaatcaaaatcagtccttataatcgggatggggcgttttgggcgccaccttgcgataaagatgcaggagcttggcaattccgtgatggtcgtggatataaaaacacagctggagcaggatatatcctatttattcaacgactatatgataggggactgtaccaatgaaaatgttcttggcgcgataggcgtggaaaattttgatatatgttttgtcacaatcggaaagaactttgaggcgtcaattattgtcacttcgctcttaaaaacctttggcgcaaaatatattgttacaaagaccgaccgtgatattcagaaagacgtcctcaagaaagtaggggcggatgaggttgtttatccggacagggattttgcggaaaaactcgcggtcaggtacaactctgacaaaatatttgattatatggaactgccgggcgattattcgatctatgaaatagccgtacccaaaaactggataggcaaaaacgttgtcacgcttgacgttcgcaggaaatatgaaataaatattcttgccgtaaaaaataatacgaatttacagcctttaacgggggcggattatatattcacggaaggcgatgaaattatcgtaatggccaaggaaaaggacattttccgcattaccgggcaatga

SEQ ID NO: 24108 - protein, 221 aa, Unknown
  Obtained from environmental sample
  DOMAIN (154)...(217): TrkA-C domain
  misc_feature (1)..(221): Xaa is any amino acid
MRQKRKSKSVLIIGMGRFGRHLAIKMQELGNSVMVVDIKTQLEQDISYLFNDYMIGDCTNENVLGAIGVENFDICFVTIGKNFEASIIVTSLLKTFGAKYIVTKTDRDIQKDVLKKVGADEVVYPDRDFAEKLAVRYNSDKIFDYMELPGDYSIYEIAVPKNWIGKNVVTLDVRRKYEINILAVKNNTNLQPLTGADYIFTEGDEIIVMAKEKDIFRITGQ

SEQ ID NO: 24109 - DNA, 483 bp, Unknown
  Obtained from environmental sample
  misc_feature (1)..(483): n is a, c, g, or t
atggacttaaaagaggcaagcgtaatactggcaatggtatttatgtttatcggaggcggttccggctcgacggccgggggcattaaaacatcaactttggcgattcttgtaatgagcgctgtcaattcaaccagaaggatgaacaaaatgatggttttcaagagaatgttaagtgataaaacggtaaaatacgccagctccatcgttaccatttacttattcgtcgttgtcaccgcggccattcttatatgctgtgtcgaacctttctctttacgggagactttgtttgaatgtgtgtcggccctggggaccgcggggcttagtttgggtattacgccgctattgggaagcgcggcgaaaataatagtaatgattttaatgttttcaggcaggcttgggtggctgacgctccttctcgccttcgcgaagaaacacgtggatccgtcttttgaaagaccgggtgaaaaaatattaataggttag

SEQ ID NO: 24110 - protein, 160 aa, Unknown
  Obtained from environmental sample
  SIGNAL (1)...(25)
  misc_feature (1)..(160): Xaa is any amino acid
MDLKEASVILAMVFMFIGGGSGSTAGGIKTSTLAILVMSAVNSTRRMNKMMVFKRMLSDKTVKYASSIVTIYLFVVVTAAILICCVEPFSLRETLFECVSALGTAGLSLGITPLLGSAAKIIVMILMFSGRLGWLTLLLAFAKKHVDPSFERPGEKILIG

SEQ ID NO: 24111 - DNA, 429 bp, Unknown
  Obtained from environmental sample
  misc_feature (1)..(429): n is a, c, g, or t
gtggcggccccagccgccgtaagtatcgacgatgatcttgcggccggtcagcccgcagtcgcccatgggcccgccgacgacgaagttgccggtggtgttgacgtggaacttggtgtcggcgtccaccatatgagccggcagggtttttttgatgacctcttcgatgatggcttcccggatcttggcctgggagatgttcggggcgtgctgggaggccacgaccaccgcctctatcctcttgggccggccattttcatattgcacggaaacctgggatttgccgtccggccgcaggaaattcagcgcgccgttccggcggacctcggacaggcgccgggtcaggcgatgggccaggtggatggggagaggcatcagggtttccgtatcggcgatggcgtagccgaacatcagccccctcggccgatctga

SEQ ID NO: 24112 - protein, 142 aa, Unknown
  Obtained from environmental sample
  misc_feature (1)..(142): Xaa is any amino acid
MAAPAAVSIDDDLAAGQPAVAHGPADDEVAGGVDVELGVGVHHMSRQGFFDDLFDDGFPDLGLGDVRGVLGGHDHRLYPLGPAIFILHGNLGFAVRPQEIQRAVPADLGQAPGQAMGQVDGERHQGFRIGDGVAEHQPPRPI

SEQ ID NO: 24113 - DNA, 828 bp, Unknown
  Obtained from environmental sample
  misc_feature (1)..(828): n is a, c, g, or t
atgttcggctacgccatcgccgatacggaaaccctgatgcctctccccatccacctggcccatcgcctgacccggcgcctgtccgaggtccgccggaacggcgcgctgaatttcctgcggccggacggcaaatcccaggtttccgtgcaatatgaaaatggccggcccaagaggatagaggcggtggtcgtggcctcccagcacgccccgaacatctcccaggccaagatccgggaagccatcatcgaagaggtcatcaaaaaaaccctgccggctcatatggtggacgccgacaccaagttccacgtcaacaccaccggcaacttcgtcgtcggcgggcccatgggcgactgcgggctgaccggccgcaagatcatcgtcgatacttacggcggctggggccgccacggcggcggagccttttccggcaaggacccttccaaggtggaccgcagcgcctgctacatggcccgccaggccgccaagaacgtggtggccgccggcctggccgaacgctgcgaagtgcagttggcctattccatcggcctggccgagccggtttcggtcatggccaacagcttcggcaccggcctggtggacgacggaatcatcgcccaggcccttcgccgggtctattccttcaagcccgccgccatgatcagctttttagacctgaaaaggcccatttatgaaaaaacggccagttacggccacttcggccgcaccgagccggaattcacctgggaatcaacggccaaggccggagaactgcgcgaagccgccggcctgagcggaccgccaccggcgccggtcaaggctgaccattaa

SEQ ID NO: 24114 - protein, 275 aa, Unknown
  Obtained from environmental sample
  DOMAIN (1)...(109): S-adenosylmethionine synthetase, central domain
  misc_feature (1)..(275): Xaa is any amino acid
MFGYAIADTETLMPLPIHLAHRLTRRLSEVRRNGALNFLRPDGKSQVSVQYENGRPKRIEAVVVASQHAPNISQAKIREAIIEEVIKKTLPAHMVDADTKFHVNTTGNFVVGGPMGDCGLTGRKIIVDTYGGWGRHGGGAFSGKDPSKVDRSACYMARQAAKNVVAAGLAERCEVQLAYSIGLAEPVSVMANSFGTGLVDDGIIAQALRRVYSFKPAAMISFLDLKRPIYEKTASYGHFGRTEPEFTWESTAKAGELREAAGLSGPPPAPVKADH

SEQ ID NO: 24115 - DNA, 543 bp, Unknown
  Obtained from environmental sample
  misc_feature (1)..(543): n is a, c, g, or t
gtgaaccgaatcacacgcctccgttggagcatcttggctacaatgggtgttgggtcaagggggtgcgcgatgctggaacgtctgcaagccgatctgaaagactcaatgatggcaaaggattcggcgcggacgatggtcttgcgctccgccattacagcgtttcgcaacgaggcaatcgcaaagggtctggggccgcagggctccctgtccgacgcggacgcgctccaggtgatgaagcgcctcatcagggcaagcgaggacagcgccgagcagttcgccaaggccggcagggaggacaaggtcgcggcggagatggccgagatagagctgcttaagggctacatgcccgccatgctggagggcccagagttggaggaggccgtccgggccgcagtcctggagaccggcgttaagtccaagagcggcatcggctttgttatgagggccttgcagaccgtgcatggcggcaggtacgacggcaaagaggccaaccagatactgcaaaaaatattcacggaaatcactgacacggacacgaaatga

SEQ ID NO: 24116 - protein, 180 aa, Unknown
  Obtained from environmental sample
  SIGNAL (1)...(25)
  DOMAIN (27)...(171): GatB/Yqey domain
  misc_feature (1)..(180): Xaa is any amino acid
MNRITRLRWSILATMGVGSRGCAMLERLQADLKDSMMAKDSARTMVLRSAITAFRNEAIAKGLGPQGSLSDADALQVMKRLIRASEDSAEQFAKAGREDKVAAEMAEIELLKGYMPAMLEGPELEEAVRAAVLETGVKSKSGIGFVMRALQTVHGGRYDGKEANQILQKIFTEITDTDTK

SEQ ID NO: 24117 - DNA, 453 bp, Unknown
  Obtained from environmental sample
  misc_feature (1)..(453): n is a, c, g, or t
atgggatgcacttacctggacgcggagggcaaagagttcccgatggtcatgggctgctacggcctaggcgtgacgcgcaccattgccgccgtcatagagcagaaccacgacgccgacggcataatctggccctggcccgtggccccataccacgtccacctgctctgcttggacgccggcgaccccgccgtgctggagacggccgaaaagctggaaaaagagctggaatccaacggaatcgaggtcctgcacgatgaccgcgacggcctcagccccggcgtcaagttcaaggacgccgacctgctgggcttccccataagggtggtcgtcggcgctaagggcctgaaaggcggaatcgtggaactgcgcgaccgccggacaaaagagacggtgaaggtcaagcccgacgacctactgcccgccgtaatggaagcccggcggcggatggcctag

SEQ ID NO: 24118 - protein, 150 aa, Unknown
  Obtained from environmental sample
  DOMAIN (51)...(145): Anticodon binding domain
  misc_feature (1)..(150): Xaa is any amino acid
MGCTYLDAEGKEFPMVMGCYGLGVTRTIAAVIEQNHDADGIIWPWPVAPYHVHLLCLDAGDPAVLETAEKLEKELESNGIEVLHDDRDGLSPGVKFKDADLLGFPIRVVVGAKGLKGGIVELRDRRTKETVKVKPDDLLPAVMEARRRMA

SEQ ID NO: 24119 - DNA, 861 bp, Unknown
  Obtained from environmental sample
  misc_feature (1)..(861): n is a, c, g, or t
gtggattttgcagcaggactaggagccattttggctcctttaggggaaaaacgggtgcctcaaattgttgaatgtatccccaatttcagcgagggaagaaacaaggcgctgataaacgaattggcggaggcggtcaggtcaagttccggagtaatgcttttgaattgcagctccgacgagaaccacaaccggacagtgcttaccttcgctggcagtcccgaaggcgttttggacgctgcgttcaaatgcgcgaaaatcgccgtagaaaagattgacctcaccaaacactctggcgagcatccgcgcatgggcgcggtcgacgtgattccctttgtgccgctcagggatattacggcagccgagtgtgtcgagatgtcaaaaaaactcgggcaaaaactttgggacgaattgcgccttccagtgtttttgtacgaggattcggcgtcaaaaccggagcgcaaaaaccttgcggttctcagaaaggggcagttcgaggggatggcggaaaaaatcaaaaatccggcttttgcccccgactacggagacgaacttcacaaaaccgccggcatagtagcctgcggggcaaggcgtccgcttatagcgtttaacatcaacctttccacggcggatgttgaaatagcaaaaaaaatcgcaaggatcatccgcgaatcttcaggcggccttaaatcggtaaagtcaatcggcattatgcttcacgggcgaaacacggcccaggtttcagtaaacatgacgaattatccggacacgccgctttacagggtattggagcttgtaaaaatcgaagccgcccgttttggtgtctcggtcattggcactgaaattattggccttgtccgatga

SEQ ID NO: 24120 - protein, 286 aa, Unknown
  Obtained from environmental sample
  DOMAIN (199)...(285): Formiminotransferase domain
  misc_feature (1)..(286): Xaa is any amino acid
MDFAAGLGAILAPLGEKRVPQIVECIPNFSEGRNKALINELAEAVRSSSGVMLLNCSSDENHNRTVLTFAGSPEGVLDAAFKCAKIAVEKIDLTKHSGEHPRMGAVDVIPFVPLRDITAAECVEMSKKLGQKLWDELRLPVFLYEDSASKPERKNLAVLRKGQFEGMAEKIKNPAFAPDYGDELHKTAGIVACGARRPLIAFNINLSTADVEIAKKIARIIRESSGGLKSVKSIGIMLHGRNTAQVSVNMTNYPDTPLYRVLELVKIEAARFGVSVIGTEIIGLVR

SEQ ID NO: 24121 - DNA, 675 bp, Unknown
  Obtained from environmental sample
  misc_feature (1)..(675): n is a, c, g, or t
atgcatctcgacaacattgttgcggaaaacggcaaggctctgccccttggggcggagcttgtcggcgacggcgttaattttgcggttttttcacggaacgcttccgcaataacgcttatcctctttgagtccgcggatcccggcagtaaatgggttgaaattccccttgataaaagagggaataaaaccggtaatatttggcattgtttcatcaaaggattaaaagccggaacctgttatctttaccgcgcggacgggccttattttcccgaaaagggactgcgctttaacaagaataaaactcttatcgatccttacgccaaggctttaacggatatcagcggatgggattacggaaaatgcgccggttatgatcttgaaaaacccggacacgatcttacatattcatatgtcgataatattgacagtcagccgcgctccatcgttattgacgacaaatttgactggcagggcgataccccggtaaattatcctctgcgtttcagcgtaatttacgaagctcatgtaaaaggccttaccgcccatcacagctcgaaagtaaaacatcccggaacctaccgcggggtaatcgaaaaaattccttacttaaaagatttaggaataaccagtatagaattattacccgtgcaggaatttaacgaaaaagaattctaa

SEQ ID NO: 24122 - protein, 224 aa, Unknown
  Obtained from environmental sample
  DOMAIN (15)...(107): Isoamylase N-terminal domain
  misc_feature (1)..(224): Xaa is any amino acid
MHLDNIVAENGKALPLGAELVGDGVNFAVFSRNASAITLILFESADPGSKWVEIPLDKRGNKTGNIWHCFIKGLKAGTCYLYRADGPYFPEKGLRFNKNKTLIDPYAKALTDISGWDYGKCAGYDLEKPGHDLTYSYVDNIDSQPRSIVIDDKFDWQGDTPVNYPLRFSVIYEAHVKGLTAHHSSKVKHPGTYRGVIEKIPYLKDLGITSIELLPVQEFNEKEF

SEQ ID NO: 24123 - DNA, 813 bp, Unknown
  Obtained from environmental sample
  misc_feature (1)..(813): n is a, c, g, or t
gtgtacgagggcacgggcttggcggcggtatacagcgacaacagtacgattgtcgcccactgggacagctcaaggatcaaggatactctccaaaacaacgccgcggaaagagcgcttttcggaagcgatactgatcccatagtcgaatcgatcttaaacggcggcggaaaaaacagagacccctatgtaacgacacattattctcctgtcaagaaaacagacgtatattttattttcgaacctattcttgtttcgggctttgaaataactccatggtctctgcaattaggactccccgtaccggaaataaccaagccgattcgcgccttggtatcttattccataatgttcgccgttggacttctggtattggcggcggttattactctgttcgtcgctaccggcattgttagaccgattaccaaagtaaccgctactttaagagacatatccgaaggcgaaggcgacctgacgcggactatagccgtcagttcaaaagacgaaatcggcgaccttgccatatacttcaataaaactcttgaaaaaatcaaaaacctagtgttcctgattaaaaaacagtcgcatgttttatcggatatcggcaatgagttgtccagtaatatgaccgaaacagcggcggcaataaacgaaattaccgccaacatacagagtataaagggcagagtaattaaccagagcgccagcgtaaccgagactaacgcgacaatggagcaggttatctccaacatcaacaaactcaacggccatattgaaaaatggcggataatgtccattcagtcaccaaaacgctga

SEQ ID NO: 24124 - protein, 270 aa, Unknown
  Obtained from environmental sample
  DOMAIN (114)...(185): HAMP domain
  misc_feature (1)..(270): Xaa is any amino acid
MYEGTGLAAVYSDNSTIVAHWDSSRIKDTLQNNAAERALFGSDTDPIVESILNGGGKNRDPYVTTHYSPVKKTDVYFIFEPILVSGFEITPWSLQLGLPVPEITKPIRALVSYSIMFAVGLLVLAAVITLFVATGIVRPITKVTATLRDISEGEGDLTRTIAVSSKDEIGDLAIYFNKTLEKIKNLVFLIKKQSHVLSDIGNELSSNMTETAAAINEITANIQSIKGRVINQSASVTETNATMEQVISNINKLNGHIEKWRIMSIQSPKR

SEQ ID NO: 24125 - DNA, 744 bp, Unknown
  Obtained from environmental sample
  misc_feature (1)..(744): n is a, c, g, or t
atggcggataatgtccattcagtcaccaaaacgctgatcgacaacgccgccaatgtaaaaacattattggaagcctccgaagcgggaaagacaggattgcaggaagttgtgactgacattcaggaaatctcccgggaatccgaaggcttgctggaaatcaactccgtaatgcaaaacatagccagccagaccaacctgctttcgatgaacgccgccattgaagccgcccacgcgggggaagcgggaaaagggttcgcggtagtcgccgatgaaatccgcaaactcgcggaaagttccagcgaacagtccaaaacgattggcaatgttttgaagaagataaaagaatcaatcgacaagatagccaaatctacagaaaccgtaacaacgaggtttgagtcgatagacacaaacgtaaaaactgtggcggagcatgaagaaaacatcctcaacgcgatggaagaacagggaagagtaagtgaacatgcgggcagcgccagtttgaccgaaattacacatctggtaaagaccggttccgaagaaatgcttcagggcagtcaggaagttctgcgcgagagccagaaccttgaaggggtaacgcaggaaataacaggcggaatgaacgaaatgtcaaacggagcggatcagataaacatagcggtaaacaatgtcaatgagatgactactaaaaaccgcgacgccattggcgctttgataaaagaggtttcacggtttaaggtcgattaa

SEQ ID NO: 24126 - protein, 247 aa, Unknown
  Obtained from environmental sample
  DOMAIN (2)...(212): Methyl-accepting chemotaxis protein (MCP) signaling domain
  misc_feature (1)..(247): Xaa is any amino acid
MADNVHSVTKTLIDNAANVKTLLEASEAGKTGLQEVVTDIQEISRESEGLLEINSVMQNIASQTNLLSMNAAIEAAHAGEAGKGFAVVADEIRKLAESSSEQSKTIGNVLKKIKESIDKIAKSTETVTTRFESIDTNVKTVAEHEENILNAMEEQGRVSEHAGSASLTEITHLVKTGSEEMLQGSQEVLRESQNLEGVTQEITGGMNEMSNGADQINIAVNNVNEMTTKNRDAIGALIKEVSRFKVD

SEQ ID NO: 24127 - DNA, 330 bp, Unknown
  Obtained from environmental sample
  misc_feature (1)..(330): n is a, c, g, or t
ttgaggatgttttcttcatgctccgccacagtttttacgtttgtgtctatcgactcaaacctcgttgttacggtttctgtagatttggctatcttgtcgattgattcttttatcttcttcaaaacattgccaatcgttttggactgttcgctggaactttccgcgagtttgcggatttcatcggcgactaccgcgaacccttttcccgcttcccccgcgtgggcggcttcaatggcggcgttcatcgaaagcaggttggtctggctggctatgttttgcattacggagttgatttccagcaagccttcggattcccgggagatttcctga

SEQ ID NO: 24128 - protein, 109 aa, Unknown
  Obtained from environmental sample
  SIGNAL (1)...(24)
  misc_feature (1)..(109): Xaa is any amino acid
MRMFSSCSATVFTFVSIDSNLVVTVSVDLAILSIDSFIFFKTLPIVLDCSLELSASLRISSATTANPFPASPAWAASMAAFIESRLVWLAMFCITELISSKPSDSREIS

SEQ ID NO: 24129 - DNA, 435 bp, Unknown
  Obtained from environmental sample
  misc_feature (1)..(435): n is a, c, g, or t
ttgaggattaaaacggctatgattgaaataggaatggacgtttcgactctcgaagagaccgaacgcttgggcggcaagttttacgaagatggaaaggaagccccgttttacgatattcttaaaaaacacggagttaccagtatccgtttgcgcctgtggaacaacccttttgacgaaagaggcgaaaactacggcgccggcggctgtgatatagaaaccgttttacgagaagcgcgccgagcggtagaaaacggaatgaattggatgttggattttcactactcggatttttgggcggatccggcaagacagcttattccaaaaacgtggcagggttttacccttgagcaaatggaaaaggccgtttatgaatatacaaaagaaattttagcccgctgtaaagatgaggcgctctatccagttatgtgcagatag

SEQ ID NO: 24130 - protein, 144 aa, Unknown
  Obtained from environmental sample
  DOMAIN (11)...(142): Glycosyl hydrolase family 53
  misc_feature (1)..(144): Xaa is any amino acid
MRIKTAMIEIGMDVSTLEETERLGGKFYEDGKEAPFYDILKKHGVTSIRLRLWNNPFDERGENYGAGGCDIETVLREARRAVENGMNWMLDFHYSDFWADPARQLIPKTWQGFTLEQMEKAVYEYTKEILARCKDEALYPVMCR

SEQ ID NO: 24131 - DNA, 360 bp, Unknown
  Obtained from environmental sample
  misc_feature (1)..(360): n is a, c, g, or t
ttgttccctggaaaagattttatcaggcgagacgagatctacaacaccggcggagcgatttataaaattgccagcgcccgcgtcgcccttgcccagaggaacatttttatccgcaaagactggcttgataagcttggactcgcggttcctaaaaacatcaatgaattccataacgcgcttatagcgttccgcgacagagacccgggtggagtgggagcaaacagggttataccgtacttccagggatctgacgcgcgctggggccttgccgatctaataggcaacagccttacaccaatgaccgagagggaaatatggataaacagcgcggttggtcaagccggcgcaacgcagtgttaa

SEQ ID NO: 24132 - protein, 119 aa, Unknown
  Obtained from environmental sample
  misc_feature (1)..(119): Xaa is any amino acid
MFPGKDFIRRDEIYNTGGAIYKIASARVALAQRNIFIRKDWLDKLGLAVPKNINEFHNALIAFRDRDPGGVGANRVIPYFQGSDARWGLADLIGNSLTPMTEREIWINSAVGQAGATQC

SEQ ID NO: 24133 - DNA, 642 bp, Unknown
  Obtained from environmental sample
  misc_feature (1)..(642): n is a, c, g, or t
atggaaagccttataattggcaaaacagatcccctgctcagtgaaagcgaaggatttcgcctgtgtcttgatttgggactggttatccgtgaaaaaggtacgccttctgtagccaatcccatttaccgcgaggtgcttgccaggcagatgacaacaggcccgcaggacgcgatccctgaacctgagtggcaatgggaaaagccggatggctctcttgacatggacgcgcttttaaaagaatttcagaaattttggcggcgcaattcggagctttgggaagaaagaatgaattataccgaagcgtttccccacctattattaatggcgtttctccagcgggtactcaacggcggagggcatatagaccgcgagtacgcggcaggccgcggccggatggacctggctgttgaatataataacaagatttatataattgagattaaacttatctattcgtataactcacccgcagaagtacgcgaagaagggctggaacaaatcgcccggtaccgggacaagatggacgcggcggctcccgcttaccttgtaatctttgaccgccgtcctgaaaccaaagagaagtcctgggatgaaaggctttcatggggagttgaaaacggcattaccgtgatcggatgctga

SEQ ID NO: 24134 - protein, 213 aa, Unknown
  Obtained from environmental sample
  misc_feature (1)..(213): Xaa is any amino acid
MESLIIGKTDPLLSESEGFRLCLDLGLVIREKGTPSVANPIYREVLARQMTTGPQDAIPEPEWQWEKPDGSLDMDALLKEFQKFWRRNSELWEERMNYTEAFPHLLLMAFLQRVLNGGGHIDREYAAGRGRMDLAVEYNNKIYIIEIKLIYSYNSPAEVREEGLEQIARYRDKMDAAAPAYLVIFDRRPETKEKSWDERLSWGVENGITVIGC

SEQ ID NO: 24135 - DNA, 1029 bp, Unknown
  Obtained from environmental sample
  misc_feature (1)..(1029): n is a, c, g, or t
atgaaagatttaaaagattacataaccgccgccaaagatggagttccgccaaatccgttgtctccttttaatattaaagaagattctgttttactgggaaatttttcaaaaaatgaaacaaaaagattattcgatcaacggactgaagaaacaggacaacaaatcacgaatgaagctttggagtatgtatgggaacaatcccaggggcagccgtggataattaattcattgtttaaacgtgctactatgcgcgtattgaaacgtaacgattatagtaccgtcacactggaacacataaaacaagcccgtgaacagatgatacttgccagggaaacacatcttgattccctggcggtaaggatacaggaaccggctattcgaagggtaatggaaagccttataacaggaacgcctgaccctgaacttacaacaagtgaaggtttccgtatttgtatggatttagggcttgtaaaaaaagaacgaaataccccagtggtagccaatcccatttaccgcgaggtgcttgccaggcagatgacaacaggcccgcaggacgcgatccctgaacctgagtggcaatgggaaaagccggatggctctcttgacatggacgcgctgctgcgggaattccagattttctggcgggaaaattccgaagtatgggatgaaaagatgcattataccgaagcgtttcctcatttgttaattatggcatttctccagcgtgtgcttaacggcggaggtcacatagaacgggaatacgcggcaggccggggaagaatggatttacttgttgaatataactggcggaaatatgtgattgaaataaaactggtatatgaaaaacaatcgcctgacacgattaaggccagaggcctggaacagattgctaaataccgggataccaaagcgccgaataatcccgcctatctcgttatttttgaccgccggaatgaaaccaaggagcaaccctgggacgaacggctgagttgggaagttgaaaacggcattacggtggttagatgttaa

SEQ ID NO: 24136 - protein, 342 aa, Unknown
  Obtained from environmental sample
  misc_feature (1)..(342): Xaa is any amino acid
MKDLKDYITAAKDGVPPNPLSPFNIKEDSVLLGNFSKNETKRLFDQRTEETGQQITNEALEYVWEQSQGQPWIINSLFKRATMRVLKRNDYSTVTLEHIKQAREQMILARETHLDSLAVRIQEPAIRRVMESLITGTPDPELTTSEGFRICMDLGLVKKERNTPVVANPIYREVLARQMTTGPQDAIPEPEWQWEKPDGSLDMDALLREFQIFWRENSEVWDEKMHYTEAFPHLLIMAFLQRVLNGGGHIEREYAAGRGRMDLLVEYNWRKYVIEIKLVYEKQSPDTIKARGLEQIAKYRDTKAPNNPAYLVIFDRRNETKEQPWDERLSWEVENGITVVRC

SEQ ID NO: 24137 - DNA, 843 bp, Unknown
  Obtained from environmental sample
  misc_feature (1)..(843): n is a, c, g, or t
atgaaaaaactccccgtttcccttatccccatgtatctgtttaccgttgtctttattctgggcccccttgtttacctgctgaggttgagttttatgtggcggagcggcgtctgggatgcggaggcaatattcaccccgtggaactaccgctttatttttcagcctgtctatcttgaaactttcaaacagtcgttaaaactcgcgcttgtaagtaccttagctgtcatactggcaggctatcccttcggctatttcatggcgcgattaagcccgcgctggcggggcagggtaacgctccttttaataatacctttctggaccagcgcccttatgcggctttacggctggataatcgtgttcagatcaaacggcgttcttgaccgcataattatgcgtctcggaattaggcatgagcctttacgcctgttgtacagttatcccgcggttgttaccggcatgatctacgccctgcttccgtttatgatctactcggtatacgcaagcgcggaaaaaatggatcgttccctggtggaagcggcgcgcgtcctgggagcggggcgtttgcgcgccttcctcaccgtaacactgcccctgaccatgccgggcctgttctccggcgttatattaaccttcattccctcaatgggactgtacttcatagcggacatactcggcggtaacaaggtggttctggtgggaaacctgatccgcgagcaggtgatgaacgtgcacaacctgccctttgccgcggcccttagcgttacgctgatggcgctgaccagtctgctcctgtacctgtaccgcctcgccgcccgcaccggtgaaatcgaggggctgatatga

SEQ ID NO: 24138 - protein, 280 aa, Unknown
  Obtained from environmental sample
  DOMAIN (61)...(275): Binding-protein-dependent transport system inner membrane component
  misc_feature (1)..(280): Xaa is any amino acid
MKKLPVSLIPMYLFTVVFILGPLVYLLRLSFMWRSGVWDAEAIFTPWNYRFIFQPVYLETFKQSLKLALVSTLAVILAGYPFGYFMARLSPRWRGRVTLLLIIPFWTSALMRLYGWIIVFRSNGVLDRIIMRLGIRHEPLRLLYSYPAVVTGMIYALLPFMIYSVYASAEKMDRSLVEAARVLGAGRLRAFLTVTLPLTMPGLFSGVILTFIPSMGLYFIADILGGNKVVLVGNLIREQVMNVHNLPFAAALSVTLMALTSLLLYLYRLAARTGEIEGLI

SEQ ID NO: 24139 - DNA, 1488 bp, Unknown
  Obtained from environmental sample
  misc_feature (1)..(1488): n is a, c, g, or t
gtggtggacgaagagtacgccaggctaaaaggggatgtaatagtaagccttaaagacggagccacagttcaccggattaaggcctgggagatattgtacaaccgtacgcgtaacgtaatgacggctacaggaaatgtagagtacaccaaagaggaggggagtaacgttgaaactttcagtggtgagtccatcactgttaatctggataactggtccagtattttcatggacggttcgtcgcaaaaatccaccatcggcagatcggcaacattcagattcgcgggaacggttgtctccagaaacagtgaaggggctacgattcttacaggagccgaaatatcaaacccggcaaacgaagaagcctattggtctttgtacgcttcaaagctctggcttcttcccggaaatgactgggcaattctcaacgctgttctgaaagtgggcaatattcctctgctgtatcttccgtttttcttttaccctgcggatgaaattgtttttcaccccgtgctgggttaccgttccagggaagggacatttctgcaaactacaacatacatactcggcaggccaaagtcttcgggatcgtcggaaaattcaattaccaggatttttgggggcgattcggacagcgaggacaaagtaagagaaggcgtattccttagaacctcaaaagaaaaaaccgcggatcccagcgcaacacagctttcacttctctttgacgcctatgtgaatcttggcgcttacctgggagccgaaatggctactcccgcaaaagggttgttcggggaaaccaaactttctgccggccttggcttgaccagagatatttttattagcggcgcgaattatactccgttctacgacagtagcggggagagcaactggaattcttcaagattttttttcatggatgtaccgttaagatacaggtttgtttataacacttcttttaaagtaagtaatggttccctttccctggaggttccctactattcggatccttatgtgaatcgtgattttatgaggcggagtgaagtcctggactggcttgccatgctcagagaaggggttaccgcttccgatgttgtaagcgacgacagtataagttcctatgagtggaagttaaacggttcctttaaccctccggtttccaaatttgcgccgtatgtcagttccttttcgatatcaaactttagcagtacgctggttttcagccagagatattccggaaggtattcagggccctccgcgccgcccaatcccggcagggcttttttctttccaaaccgtcttaccattttttcaatcagcgccgcggtcgccggtactccgttgcgaacaaggaatacccctcagagccggactgttagtaaaaccgaaccaccgcccggtgacgcgcttcttccggatcttcccatttctccctggggaagtacggaaaataaaactgatgacgcgaatacaagggctgtttcggggttatga

SEQ ID NO: 24140 - protein, 495 aa, Unknown
  Obtained from environmental sample
  misc_feature (1)..(495): Xaa is any amino acid
MVDEEYARLKGDVIVSLKDGATVHRIKAWEILYNRTRNVMTATGNVEYTKEEGSNVETFSGESITVNLDNWSSIFMDGSSQKSTIGRSATFRFAGTVVSRNSEGATILTGAEISNPANEEAYWSLYASKLWLLPGNDWAILNAVLKVGNIPLLYLPFFFYPADEIVFHPVLGYRSREGTFLQTTTYILGRPKSSGSSENSITRIFGGDSDSEDKVREGVFLRTSKEKTADPSATQLSLLFDAYVNLGAYLGAEMATPAKGLFGETKLSAGLGLTRDIFISGANYTPFYDSSGESNWNSSRFFFMDVPLRYRFVYNTSFKVSNGSLSLEVPYYSDPYVNRDFMRRSEVLDWLAMLREGVTASDVVSDDSISSYEWKLNGSFNPPVSKFAPYVSSFSISNFSSTLVFSQRYSGRYSGPSAPPNPGRAFFFPNRLTIFSISAAVAGTPLRTRNTPQSRTVSKTEPPPGDALLPDLPISPWGSTENKTDDANTRAVSGL

SEQ ID NO: 24141 - DNA, 450 bp, Unknown
  Obtained from environmental sample
  misc_feature (1)..(450): n is a, c, g, or t
gtgagttcgaggtatcgtcatcgcttcacgttctatgatagggaagccggggttgaattttccgacatttctgaaattcacacgttggaactgaggaagctgccggaaggtactgacggtacgatattgtacgattgggcaaagtttatcgccgcagaaacggaggaggaattgacaatgcttgcagagagaaacccacaaataggaaaagccgtagttaagctgcgtgagttgtcagcagatgaacgtgcgagggatctgtacgaacggcgtgagaaagcgcgtcgagatcagtctgcacgggagaaatgggcacgacaacaaggcatagaggaacgaaatattgagattgcacggaatcttttagaaataaacatgccgattgaccagatcgtcatggttacaggtttgacacgcgagaaagtggagaaccaacgtaccaccatctga

SEQ ID NO: 24142 - protein, 149 aa, Unknown
  Obtained from environmental sample
  misc_feature (1)..(149): Xaa is any amino acid
MSSRYRHRFTFYDREAGVEFSDISEIHTLELRKLPEGTDGTILYDWAKFIAAETEEELTMLAERNPQIGKAVVKLRELSADERARDLYERREKARRDQSAREKWARQQGIEERNIEIARNLLEINMPIDQIVMVTGLTREKVENQRTTI

SEQ ID NO: 24143 - DNA, 321 bp, Unknown
  Obtained from environmental sample
  misc_feature (1)..(321): n is a, c, g, or t
ttgatacctgaattgtacgattgggcgaagtttatcgccgcagagacggaggaggaattgacaatgcttgcagagagaaacccggaaataggaaaagccgtagttaagctgcgtgagttgtctgcagacgaacgtgcgatggatctgtacgaacggcgtgagaaagcgcgtcgggatattgcggcggagaaaaaatgggcggttaagcaaagcaagtttgagattgcccaaaaacttcgcaaacggaacagaccgattgaggaaatcatagaggacactggtttgacccgtgaggaagtagagaacctgcccacactctga

SEQ ID NO: 24144 - protein, 106 aa, Unknown
  Obtained from environmental sample
  misc_feature (1)..(106): Xaa is any amino acid
MIPELYDWAKFIAAETEEELTMLAERNPEIGKAVVKLRELSADERAMDLYERREKARRDIAAEKKWAVKQSKFEIAQKLRKRNRPIEEIIEDTGLTREEVENLPTL

SEQ ID NO: 24145 - DNA, 933 bp, Unknown
  Obtained from environmental sample
  misc_feature (1)..(933): n is a, c, g, or t
ttgatctattcggaaaaaacctgcgccgcggctgcagtgttcaccacaaaccgggtaaaggcggcaagcgtgcttgtaagccaaaagcatatcgcggggggaaaactccacgcggtcatagccaattcagggaacgccaacgcctgcaccggcgaagcgggacttgccgcggcgagacgcatggcggaactggcagccgatgaatttgcgattagccccggaaccgtcgccgtcgcctctaccggggttatcggcgtgcctctgcccattgacgccatcgaaaacagcatcgaagcgctggtgaacagcctgcgaggggacgaggccggccacgccgcggcgttggaggcgattatgaccaccgatacccgcaaaaaggaaatctccgtggaaattgagggcggggcgcgcataggcggcatggcgaaaggctccgggatgatacacccgaacatggcgaccatgctctgcttcctgaccacggacgtttcgatttcgcgggaactgctggaggcgagcctgcgccgggcggtagatcgatcgtttaacagggtcacggttgacggcgacacctcgacaaacgacatggcgctgatcatggcgaacggggcctcgggcgttacggtcgcctcaaaagccgaacacgacgcttttacccaggcgcttgaacaggtatgcgtgtctcttgcgagggcaatggcccgcgacggcgagggcgcgacaaaactggttaccgtcaccgtaaacggcgctgctgacgaaagaaccgccgtggcgctggcgaagtccgtcgcatcctcaagcctggtcaaggccgcctgttttggcgcggacgccaactggggcagaatcctctgcgccatgggctattccggcgcggaattcgatcctgacaggacaaatgtcagttttaaaagcagggcgggggaatag

SEQ ID NO: 24146 - protein, 310 aa, Unknown
  Obtained from environmental sample
  SIGNAL (1)...(21)
  DOMAIN (1)...(310): ArgJ family
  misc_feature (1)..(310): Xaa is any amino acid
MIYSEKTCAAAAVFTTNRVKAASVLVSQKHIAGGKLHAVIANSGNANACTGEAGLAAARRMAELAADEFAISPGTVAVASTGVIGVPLPIDAIENSIEALVNSLRGDEAGHAAALEAIMTTDTRKKEISVEIEGGARIGGMAKGSGMIHPNMATMLCFLTTDVSISRELLEASLRRAVDRSFNRVTVDGDTSTNDMALIMANGASGVTVASKAEHDAFTQALEQVCVSLARAMARDGEGATKLVTVTVNGAADERTAVALAKSVASSSLVKAACFGADANWGRILCAMGYSGAEFDPDRTNVSFKSRAGE

SEQ ID NO: 24147 - DNA, 405 bp, Unknown
  Obtained from environmental sample
  misc_feature (1)..(405): n is a, c, g, or t
gtggcgaaccccaaaaaagcctgtgttctttttacgggagacggcagtttcagaatgaactgcgcggagatggcgactctcaccaacaataaaatcccgctcttaataattgtctttaacaacggagtcttaggcatggtaaggcagtggcagagtttcttttacgaaaaaagatactcgcaaacaaatctgggagcagcccccgactttttaaaactctgcgaggcttacggcattaacggtttcagagcgggagacagggagtcctttaagaaagcgctccactctgccgtagcggaactgtccgccggaagatcagcgctaatcgaggctgacatcgactgcgatgagaacgtactgccgatggttccgtcggggaaaccgattgacgagcagattttgtag

SEQ ID NO: 24148 - protein, 134 aa, Unknown
  Obtained from environmental sample
  DOMAIN (1)...(111): Thiamine pyrophosphate enzyme, C-terminal TPP binding domain
  misc_feature (1)..(134): Xaa is any amino acid
MANPKKACVLFTGDGSFRMNCAEMATLTNNKIPLLIIVFNNGVLGMVRQWQSFFYEKRYSQTNLGAAPDFLKLCEAYGINGFRAGDRESFKKALHSAVAELSAGRSALIEADIDCDENVLPMVPSGKPIDEQIL

SEQ ID NO: 24149 - DNA, 543 bp, Unknown
  Obtained from environmental sample
  misc_feature (1)..(543): n is a, c, g, or t
gtgatggactttgatttttctatggtcgggtttccgttgcacgtggtcggaaacttgccgtataacatcggcgcgcttatcataaagaaggcgcttttggaagcgccgcgtgtggcctcttgcacgtttatggtacaacgtgaggtggcggcgcggattgtcagcgggccgcgcagcaagcaaaacgggttcttgtctatattctgccaattcttcggcgaggcgaaattgctcttccacgttccgcccggcgcgtttttcccgaggccgaatgtcgattcttcggtatttcaaattataattgacaaagacatagaaaaaaaattgcgccgcgaacaatggaaggacttcttcgctttcgcggacagcggtttttctatgcgccgtaaacagcttgctaaggtattatccgttcgatacgggcgcgacaagagctattaccgcggcgtgttgtcggacatggggatagacgcggcggcgcggcctgaggatttgggtgtcggcgagtggctggatctgtacgggcgggcgggtgcgcgatga

SEQ ID NO: 24150 - protein, 180 aa, Unknown
  Obtained from environmental sample
  DOMAIN (3)...(179): Ribosomal RNA adenine dimethylase
  misc_feature (1)..(180): Xaa is any amino acid
MMDFDFSMVGFPLHVVGNLPYNIGALIIKKALLEAPRVASCTFMVQREVAARIVSGPRSKQNGFLSIFCQFFGEAKLLFHVPPGAFFPRPNVDSSVFQIIIDKDIEKKLRREQWKDFFAFADSGFSMRRKQLAKVLSVRYGRDKSYYRGVLSDMGIDAAARPEDLGVGEWLDLYGRAGAR

SEQ ID NO: 24151 - DNA, 558 bp, Unknown
  Obtained from environmental sample
  misc_feature (1)..(558): n is a, c, g, or t
atgccctcgagcgccgtaacggtaaccgcaaactttgaaacgatttttacagatcaaagagacatgaaagtatacagaacagtgaaaataggtagtcaaacatggatggcagagaatcttaattatgcgatggatagttcttggtgtaatgattgcgacaaatacggtcggctatataattggacggcggcaagaacagcttgtccatctggatggcatctgccgagtcgtcaggaatgggatacattggttaattatgctggtggttcttcagtgggcggtaaaaagctgaaatcgacaagcggttggaacatgtacaacggcgttagcggaaatgggacggataattacggattttcggctttgccaggtggctaccgctacatcagtggcaatttctacactgctggcaacgacggcaactggtggactgccacggaggacggcagcggtggcgcctacttcctgtacatatactacaactacggcgaacgcgtgaccgagggcaccaacgacaagagcttcggtttttcggcgcggtgtttgcaggacgattag

SEQ ID NO: 24152 - protein, 185 aa, Unknown
  Obtained from environmental sample
  misc_feature (1)..(185): Xaa is any amino acid
MPSSAVTVTANFETIFTDQRDMKVYRTVKIGSQTWMAENLNYAMDSSWCNDCDKYGRLYNWTAARTACPSGWHLPSRQEWDTLVNYAGGSSVGGKKLKSTSGWNMYNGVSGNGTDNYGFSALPGGYRYISGNFYTAGNDGNWWTATEDGSGGAYFLYIYYNYGERVTEGTNDKSFGFSARCLQDD

SEQ ID NO: 24153 - DNA, 336 bp, Unknown
  Obtained from environmental sample
  misc_feature (1)..(336): n is a, c, g, or t
atgaacgaaaaaccccatctcggcattactatgggcgatccttcnggagtcggtccggagataagcgtcaggcttttaagccttgaaaagatttatgaactgtgcaggcccgtgatcataggcgacgcgggggttatggaaaaaaccgtccgggaagttataaaacgggaggatatttctgtccgtcctgtatcttctgtaaaagaatgtctttttaaacgcggaaccattgacgtgtatgatcttcgcaatgttgaattggaaaaactcaaaatcggcaaagtagacgccatgagcggggaagcggcttttacttcggtaaaaaaagcagattga

SEQ ID NO: 24154 - protein, 111 aa, Unknown
  Obtained from environmental sample
  misc_feature (1)..(111): Xaa is any amino acid
MNEKPHLGITMGDPSGVGPEISVRLLSLEKIYELCRPVIIGDAGVMEKTVREVIKREDISVRPVSSVKECLFKRGTIDVYDLRNVELEKLKIGKVDAMSGEAAFTSVKKAD

SEQ ID NO: 24155 - DNA, 936 bp, Unknown
  Obtained from environmental sample
  misc_feature (1)..(936): n is a, c, g, or t
ttgtcgcttctcgtttcccgcaaccgaagcattattgaaaacgggctgcttttttcacacggaagctctgattcaggcggtattaacgcaatacaaatttttgcggatcaaacagggcgaaagacggaaaatatacccctcaaggaaatcaggcagggcgttgaaaatatggcggggtttattgatacgcgcaaaaaaaacggaacacaggtttttgtcgctgacgcggtaacagacagtgatttggaaatcgtttataaaacttccgcgtttttgtccgatcatatattggcgggttccgccgggcttgcaaaccagttagcccgttatcaaaataaggcaaatgctgtttctttcaataaaccttcggttttatctcctgtattgataatggttggcacaaggcaaagcgaaaccgcttttcaaatacgctatctttccaaagtgtttcaagttccggtaattaaatttgatgtgcgtttagccgccgggaataaggtcgaagaagcaagtagtcgggcttatgatgaagtttcgcgatatatgaaaaaaaatacgcctctttgcgtaatcgccgtggaaagtatgtttacctccgaaacgaccacgggtgaaaccgcatgcggttgtgccacatgtggcagtgccgcacgcggcagtgcagaaggcgatgatgtgagcgccgcaatatctgtggggcttggcgttttaacaaaaaaacttatggacttttttcattttcctgtaatcctgagcacaggcggagatacttctttgggtatatgccggcagcttggcataaagacaatggagcctttgactgaaatatgtccgggtattccgntagggcgcgttacaggcggcgcttatgacgggtgtttaattgttactaaaagcggaggtttgggaatttcatttcttttgtggaatttttaa

SEQ ID NO: 24156 - protein, 311 aa, Unknown
  Obtained from environmental sample
  DOMAIN (37)...(272): Protein of unknown function, DUF1537
  misc_feature (1)..(311): Xaa is any amino acid
MSLLVSRNRSIIENGLLFSHGSSDSGGINAIQIFADQTGRKTENIPLKEIRQGVENMAGFIDTRKKNGTQVFVADAVTDSDLEIVYKTSAFLSDHILAGSAGLANQLARYQNKANAVSFNKPSVLSPVLIMVGTRQSETAFQIRYLSKVFQVPVIKFDVRLAAGNKVEEASSRAYDEVSRYMKKNTPLCVIAVESMFTSETTTGETACGCATCGSAARGSAEGDDVSAAISVGLGVLTKKLMDFFHFPVILSTGGDTSLGICRQLGIKTMEPLTEICPGIPXGRVTGGAYDGCLIVTKSGGLGISFLLWNF

SEQ ID NO: 24157 - DNA, 858 bp, Unknown
  Obtained from environmental sample
  misc_feature (1)..(858): n is a, c, g, or t
gtgtacatcactatcgcggaaggcggccgggcggtctacagttataaccccatcggggctactccgagcgcggttagcttcgagcacgtgagcattacccgcaacgggacgagcattaccggccgggaagaggcagtttatgttatcggcggaaacgttacgtttaagggcgtgaactcggaactgacggcgacgtcggggacggggtcgattgccatattggccggtaaaaatactattacggcgactaccggcgtgggcggtacggtcacggttgacggcgggaaaatttccggtaacaaggacgctatcgtcgccgacatcattaatgttacggacggtaagacgacgttgacggcggcgggaaccgccactaccgacaagacgagcgttgtgacagtgatttcagctgtgtccggcgtgactcttcgcgcggcgacgagcgttctcgtaaacaacggcgcggcgaaaatcttgttgacgaagggcgcggacgcgccggcgtcgggaaagattgagagcgcggctatcaaaaccggcggcggcgggaatgtccttatcctcaacgcggacacggtctacgcggacggaaaaggcgcggcggctgttttggcccttgccaacgatcagaatgctaacggcaaagtgactgtggttggcggaacaatcagatcgaaccaaggcaccgcgattttggctgacggagaagttattgttaaccaaaggctgctgaagaaagaactaacaccggcgcgtggaattcctcgtggaatgaagaaactgacggctatnatccggggaatgttactagcgggttttatgatgctaaacatcctgttaagtcggcccgcgcgttaa

SEQ ID NO: 24158 - protein, 285 aa, Unknown
  Obtained from environmental sample
  misc_feature (1)..(285): Xaa is any amino acid
MYITIAEGGRAVYSYNPIGATPSAVSFEHVSITRNGTSITGREEAVYVIGGNVTFKGVNSELTATSGTGSIAILAGKNTITATTGVGGTVTVDGGKISGNKDAIVADIINVTDGKTTLTAAGTATTDKTSVVTVISAVSGVTLRAATSVLVNNGAAKILLTKGADAPASGKIESAAIKTGGGGNVLILNADTVYADGKGAAAVLALANDQNANGKVTVVGGTIRSNQGTAILADGEVIVNQRLLKKELTPARGIPRGMKKLTAXIRGMLLAGFMMLNILLSRPAR

SEQ ID NO: 24159 - DNA, 606 bp, Unknown
  Obtained from environmental sample
  misc_feature (1)..(606): n is a, c, g, or t
gtgactattccgcgcagcgtaacttccatagggaatgacgcctttgcctatagcgacntgacatccgtacccatccccggtagcgtgacggcgatcgggcgtcatgcgtttaaggggtgcgtcggtttggcgtcagccacgatgnaagagggcattgcctcaataggatggtacgcttntgaggcttgcaccagcctgacatccatcagaatcccgcgtaccgtggcgtccgtcggagtaggggcatttgcatattgcgtcggcttaacatccgttacgatagaagacggcgtggcgtctataggagacgtggtcggagaaatggccggatcagggttggtgtttgattactgcaggagactgacctccatcacgttccccgcaagcgtaacctttatcggaggcggtacgtttttcgaaacaaaaaaactgacctccatcaccgtattgaatcccgccccgcccgaaatcacggatggaacgttctacggtatttctccgaagacatgtttatacctcccgaaaggcagcatcagcgcctatcgccatgcttggcgtaacgtctggaaggaatttgggcgcgtcagcgaaattaatagcgattaa

SEQ ID NO: 24160 - protein, 201 aa, Unknown
  Obtained from environmental sample
  misc_feature (1)..(201): Xaa is any amino acid
MTIPRSVTSIGNDAFAYSDXTSVPIPGSVTAIGRHAFKGCVGLASATMXEGIASIGWYAXEACTSLTSIRIPRTVASVGVGAFAYCVGLTSVTIEDGVASIGDVVGEMAGSGLVFDYCRRLTSITFPASVTFIGGGTFFETKKLTSITVLNPAPPEITDGTFYGISPKTCLYLPKGSISAYRHAWRNVWKEFGRVSEINSD

SEQ ID NO: 24161 - DNA, 903 bp, Unknown
  Obtained from environmental sample
  misc_feature (1)..(903): n is a, c, g, or t
gtggaggtatttatgaaagtaaacagaaaactcaaagacagtttgttctctttccttttcaacaaccaggatattttaagagaattgtattccgcaatagaggatataacccttccgccggacattcccatcgacatcaataccctttccggcatcatttacaaagataaaattaatgatttatctttcaccatcgacaaccgccttgtcgttcttatagaacatcaatttactattaacgaaaatattcccctgcggctgttgatttatatagcccatgtatatgaaaagatagtcaacatgaaaaaagcgtatcaaaccaaacttgaaaaaattcccgcgcctgaatttattgttttatacaacggcaaagacaactgtcctgattattcagaactcaggctttccggcgctttcaagggcatagatggcttaaaatcagcgaataccataccactggaattaattgtacaggtatacaacattaaccaagggcataatcctaaaatattaaaaaaatgcaaaactctcaataattacagtatttttatcgacaaaattcgagaataccaaaaaaacggattaaagcttgaagaatcggtaaataatgcgatagaatattgtaaagaaaacaacatactgaagaagtttttagcaacacacagctcggaggtgtttaatatgctgttaacagaatggaattgggatgacgcgctggaagtagcccgtgaagaaggccgggaagacggtcttgaggaaggcatagaaaaaggtacggaaaaaggccgcgaagagggcattgaatttacagcccgcaacgctttattaaaaggaatccctgttcaaactgttcaagaaattaccgggctttctctggagaaaataaaagaaataaaattgtaa

SEQ ID NO: 24162 - protein, 300 aa, Unknown
  Obtained from environmental sample
  misc_feature (1)..(300): Xaa is any amino acid
MEVFMKVNRKLKDSLFSFLFNNQDILRELYSAIEDITLPPDIPIDINTLSGIIYKDKINDLSFTIDNRLVVLIEHQFTINENIPLRLLIYIAHVYEKIVNMKKAYQTKLEKIPAPEFIVLYNGKDNCPDYSELRLSGAFKGIDGLKSANTIPLELIVQVYNINQGHNPKILKKCKTLNNYSIFIDKIREYQKNGLKLEESVNNAIEYCKENNILKKFLATHSSEVFNMLLTEWNWDDALEVAREEGREDGLEEGIEKGTEKGREEGIEFTARNALLKGIPVQTVQEITGLSLEKIKEIKL

SEQ ID NO: 24163 - DNA, 885 bp, Unknown
  Obtained from environmental sample
  misc_feature (1)..(885): n is a, c, g, or t
atgaacagtgagaatgacatgaaagataaaaaaggtaaatttaactatataataaataatcaaagtatcgggtttaataatgtgataaaggatattaattttcacgtaactcacagaaattttgacaaggcgctggaaataatcggatcattaataagaaaaatagaagataacggtttgtatttcaatgatgataaaagcgaatattattgttttaataatatgtttgaggaaattatatttacggaaatattcaaaccggaaaaagaaataaagcaaatcccggaaaattacgccaaaatttattttttgtacgggaatattctttttgaaataaaaagatttgacgaggcaaaaatatatttggaaagagcggttggttataacccaatagataccgaatacttatttgaattgggtgaaatatacaagatgagaaaagactggaaaatctttttaaaaattaacagagactgccttgaatacgcgtattcgggcaagtcactcgccagatgttaccgtaatttagggtattatttttttgaagaagaaaaatatgacatagcgatgacaatgtattttttaagtttatattttgatcaggaagacatggtcgcgcatgccgaaataaactttatttcaaataaaaccggtttggaagccaagtgtccggccctggaaaatattttaaaaacgcttaaggagaatgacattcaattcggggcaagcgatttgattttaactatcgcttattctatagggcaggaagcgcataaaaaaaataattatgaaatggcggaatatttttataatattgtttttgaattaacaagagataaagaaataaagaagttaatagaagaattgcgtattgacaataaataa

SEQ ID NO: 24164 - protein, 294 aa, Unknown
  Obtained from environmental sample
  DOMAIN (99)...(132): Tetratricopeptide repeat
  misc_feature (1)..(294): Xaa is any amino acid
MNSENDMKDKKGKFNYIINNQSIGFNNVIKDINFHVTHRNFDKALEIIGSLIRKIEDNGLYFNDDKSEYYCFNNMFEEIIFTEIFKPEKEIKQIPENYAKIYFLYGNILFEIKRFDEAKIYLERAVGYNPIDTEYLFELGEIYKMRKDWKIFLKINRDCLEYAYSGKSLARCYRNLGYYFFEEEKYDIAMTMYFLSLYFDQEDMVAHAEINFISNKTGLEAKCPALENILKTLKENDIQFGASDLILTIAYSIGQEAHKKNNYEMAEYFYNIVFELTRDKEIKKLIEELRIDNK

SEQ ID NO: 24165 - DNA, 396 bp, Unknown
  Obtained from environmental sample
  misc_feature (1)..(396): n is a, c, g, or t
gtgcatatattttctgtggaaaataacaatcagttgtcagacaggcaatggccgcagcacaatatcaagttgccgaaaatttcccaggatggccgggatggcgatgaagaaataggttatgtgacgaatattttaaacaattacggtattggctttaagtattttgactgcaaaggagtcaaaaagatcaagataaaaacgcgcggctacaacagcggcgtctttcatgttaaaacaaaatgggacggcgaacctttagcgtgtattaaaattgaatacagcaatatttggacggaatattcatcggatataaaccttcctgacggaatacacgcgctttactttatttataaaggtacaggttgcgctactatggcttcctttactttggaataa

SEQ ID NO: 24166 - protein, 131 aa, Unknown
  Obtained from environmental sample
  misc_feature (1)..(131): Xaa is any amino acid
MHIFSVENNNQLSDRQWPQHNIKLPKISQDGRDGDEEIGYVTNILNNYGIGFKYFDCKGVKKIKIKTRGYNSGVFHVKTKWDGEPLACIKIEYSNIWTEYSSDINLPDGIHALYFIYKGTGCATMASFTLE

SEQ ID NO: 24167 - DNA, 594 bp, Unknown
  Obtained from environmental sample
  misc_feature (1)..(594): n is a, c, g, or t
atgggagtcaggggagaattattttcaacaaaggtgatattacagaacagaacctatttttttaatggcaaggaaaacaggcttggcgatctttacctgaatattgtagaaagcaagaaccgtgaggaaggcggctttgagcgccagtcggtgatcctctttgccgaggatcttcaggattttcttcggggctttgatgacgcccttcatgttctggaaaaggcggtcagagaaaagcgaagggaaacgccgaacagagagccaagagccagagaacaaagagacaatgagcaaacatacaaagaaccaggatataaagaacaaagaaacagagagcaaagaggcagagagccaagatacgaagaacaaagaggtaaagagccaagggcctccgagcgaagattcaaagaaccgaggggcaatggctttagaaaaaccgaaaatgacagaagacccccgttccgccaatcttcgggacgcaaaaccaaagatgacgcttatgccggcaaaccgcgccggagcgaaggttcaaatcgcgattattcaaagaaaagagtggtggtaaaacacagaaaaccgcgaacagacgaataa

SEQ ID NO: 24168 - protein, 197 aa, Unknown
  Obtained from environmental sample
  misc_feature (1)..(197): Xaa is any amino acid
MGVRGELFSTKVILQNRTYFFNGKENRLGDLYLNIVESKNREEGGFERQSVILFAEDLQDFLRGFDDALHVLEKAVREKRRETPNREPRAREQRDNEQTYKEPGYKEQRNREQRGREPRYEEQRGKEPRASERRFKEPRGNGFRKTENDRRPPFRQSSGRKTKDDAYAGKPRRSEGSNRDYSKKRVVVKHRKPRTDE

SEQ ID NO: 24169 - DNA, 417 bp, Unknown
  Obtained from environmental sample
  misc_feature (1)..(417): n is a, c, g, or t
ttggcggatattatttcctccatgcctgccttttttactacggaaactatttccagcgacgccatactcaatgtagaaactatggatcacggaatattgaaaaggaaataccaaaaaaatttcacccgggaatgggaagaaaaaaaatcgtttttcatggatacttatggtatatctagctggaatgcgatagcatataatggaaccgaagaaaagcggggcatttccagctttgccgaggcagaccgcggcgggcttaaaatagagttttctgatttgtccggcgagacagccgcctttatttggatgcggggatcagggacggagcctgttttccgcgtcatggcggacgccgtggggccggataacagccttgagcgaacgcttattgaacggcagcgccaaattgacgcttaa

SEQ ID NO: 24170 - protein, 138 aa, Unknown
  Obtained from environmental sample
  misc_feature (1)..(138): Xaa is any amino acid
MADIISSMPAFFTTETISSDAILNVETMDHGILKRKYQKNFTREWEEKKSFFMDTYGISSWNAIAYNGTEEKRGISSFAEADRGGLKIEFSDLSGETAAFIWMRGSGTEPVFRVMADAVGPDNSLERTLIERQRQIDA

SEQ ID NO: 24171 - DNA, 1107 bp, Unknown
  Obtained from environmental sample
  misc_feature (1)..(1107): n is a, c, g, or t
ttgccgtttttaagccgcaacggcgaatctttacaggcgcagatggaaatccccacatcggcttaccgccgctattttgcgggagttccgcagggcttttggctgccggaacttggctggtcttccgcgctggaaccgtatttaagagactataatttttcttacaccatcgtagacagccacggtcttttgttcggcagcccgcagccggaaaaaggaactttttaccccgttaaaacacctaacggcacttatatcctcgcaagagacctgtacgccgtgcgcgaaatagaaaaatcggcgggagatgaaatataccgtaacaatgacagagacgtaggttatgaactgccgcctgaaacagtaaaaccgtttttaagcgccgaaggagaaaggcacagaacaggatacaagtattggcagcgttccaacggcaattataacccgcaagccgccgtcggcaaggcggctgaatacgctaaaacattcatggataacacaatcgcccgccttgaagaagcgtcaaaacacatggaagaagcgccgttaagcgtttacgcgaataacgcgggttttttcggaaaccgttggcatgagggttttcaatttgtagagacgcttttccgccttgccaatgaatacaaagagctaaaatttatctgcccaagcgaatatatttttaaacaggatttttccaaaattcaggttgtctctcccgaattttcatcaagcgggataaacggttatgccgaaacatggcttgatgtttccaatgactggatctaccgccaccttacgcgttccatggaacggatgaccgaactggctgaacgtttccccgatgatactggacttaaagagagggcgttaaatcaggcggcgcgggaaatactgctcgcgcaatcttccgattggcccgcccttttattcaggcaggattcaaccgaatacgcgggtaatcaagcaggaaacgcccttcgtaactttacaacgatatatgaggcgcttggcagtaattacatcagcacggaatggcttaccactctggaacgaaagcataatattttcccgaatattaactatagggtttttagaaaaaagaagtag

SEQ ID NO: 24172 - protein, 368 aa, Unknown
  Obtained from environmental sample
  misc_feature (1)..(368): Xaa is any amino acid
MPFLSRNGESLQAQMEIPTSAYRRYFAGVPQGFWLPELGWSSALEPYLRDYNFSYTIVDSHGLLFGSPQPEKGTFYPVKTPNGTYILARDLYAVREIEKSAGDEIYRNNDRDVGYELPPETVKPFLSAEGERHRTGYKYWQRSNGNYNPQAAVGKAAEYAKTFMDNTIARLEEASKHMEEAPLSVYANNAGFFGNRWHEGFQFVETLFRLANEYKELKFICPSEYIFKQDFSKIQVVSPEFSSSGINGYAETWLDVSNDWIYRHLTRSMERMTELAERFPDDTGLKERALNQAAREILLAQSSDWPALLFRQDSTEYAGNQAGNALRNFTTIYEALGSNYISTEWLTTLERKHNIFPNINYRVFRKKK

SEQ ID NO: 24173 - DNA, 729 bp, Unknown
  Obtained from environmental sample
  misc_feature (1)..(729): n is a, c, g, or t
atgggtattttcaaaaaaaggtatcaggtaagaccaaacaccgttggtttcctttatcgaaacaatacatttgagagaaaattgcttccagggtatcatgaagtttgggattggaaaaacagaacggaattgttttcattatctgaaacttcaaagctgttaatcataaacaatcaggaagtgctgacaaaagacaatatagcgcttcgtttttcattttatgcagtttacaaaataacagacggacagaagtttcttggcaagtttgcccttgatagaaatatgtatgcaattatacaggaagcggaacagcgtctttgcaatattgtccaacattacatacgcaacaaaatcgccgaattggacagcgagactttgaatgaaaaacgaaacgaacttaccgacttcaaaacagaagaaatggtgaaggaaatttcagaatttggaataacaattgaacaggcacagcttcgtgatttgacttttccaaaatctattcaggacttatttgccaaacacctggaagcaaaaatcagggcaaagtctgaacttgaaaacgcaagaacagccgttgcgacggcgcgagcgttaaaaaacgcctctgaacttatgaaggatgatgaaaatatcaaattcttccaggtcatagaaactattaccaaaatagcggaaaaaggcaaacatacatttatgattggcgacattaatcaactgacaaaaaagaattaa

SEQ ID NO: 24174 - protein, 242 aa, Unknown
  Obtained from environmental sample
  DOMAIN (6)...(198): SPFH domain / Band 7 family
  misc_feature (1)..(242): Xaa is any amino acid
MGIFKKRYQVRPNTVGFLYRNNTFERKLLPGYHEVWDWKNRTELFSLSETSKLLIINNQEVLTKDNIALRFSFYAVYKITDGQKFLGKFALDRNMYAIIQEAEQRLCNIVQHYIRNKIAELDSETLNEKRNELTDFKTEEMVKEISEFGITIEQAQLRDLTFPKSIQDLFAKHLEAKIRAKSELENARTAVATARALKNASELMKDDENIKFFQVIETITKIAEKGKHTFMIGDINQLTKKN

SEQ ID NO: 24175 - DNA, 318 bp, Unknown
  Obtained from environmental sample
  misc_feature (1)..(318): n is a, c, g, or t
atgatttacaaaacccttggtaaaacaggcgtaaaagtttctgcgttgggttttgtcgcaatgagtcttcccatgaaagaagttgacggcaagaaaattgttgatgaagacctagccgtcctcctcatgcagaaagcctttgtcatgggtattaactatgtagatacagcgcctctttattgtgagtcgttaagcgaacctgcggttggaaaagcattgaagagctaccgcgacaaagtgtatctgtcaacgaagaaccccattgaagacgcggatggcgatcactggatggaacgcttggaaaaatcactgaaataa

SEQ ID NO: 24176 - protein, 105 aa, Unknown
  Obtained from environmental sample
  misc_feature (1)..(105): Xaa is any amino acid
MIYKTLGKTGVKVSALGFVAMSLPMKEVDGKKIVDEDLAVLLMQKAFVMGINYVDTAPLYCESLSEPAVGKALKSYRDKVYLSTKNPIEDADGDHWMERLEKSLK

SEQ ID NO: 24177 - DNA, 702 bp, Unknown
  Obtained from environmental sample
  misc_feature (1)..(702): n is a, c, g, or t
atgaaaaaagcaatcggcttttcgcttaacaacctggggatacacggactgcccgccgggcttcacgcggactggaacgactgcctccgcctcggcgcaaagggcgtttccgtatttgtcgcgcttcagttgtactacgcgttcgagataatgatccgtttcgcgaaatataaaaaagattccacgacagagcaggagatgacaaagcaaaaaaatcgttttggaaaggttatcgaaaagtattgctggaaagatgaccgctttgtgcgcggtatcaccgaggacgatgttacagtcggcaagaagagcgatccggaggcgaacatctggcttaacccccagagctgggcggtgatcagcggttacgcggatgaaaagcgcggcaaacaggtgcttgatttagtctacaagaaactgaacacaaagtacggcgcgcgccttatgtcgccatcttaccgcaaacacgcttttgacggggcgcttgccctgctgttcaatcctggcacaaaagagaacggcggtatcttccttcaaacccagggctggataatccttgccgaagctttgcttggacacggaaaccgcgccgttgagtattacctggaaagctgtcccgccgcgcanaacgaaattgccgatacgcgccttatggaaccttacgcttactcgcaatttnaccgaaagcgtagacagcccctttga

SEQ ID NO: 24178 - protein, 233 aa, Unknown
  Obtained from environmental sample
  misc_feature (1)..(233): Xaa is any amino acid
MKKAIGFSLNNLGIHGLPAGLHADWNDCLRLGAKGVSVFVALQLYYAFEIMIRFAKYKKDSTTEQEMTKQKNRFGKVIEKYCWKDDRFVRGITEDDVTVGKKSDPEANIWLNPQSWAVISGYADEKRGKQVLDLVYKKLNTKYGARLMSPSYRKHAFDGALALLFNPGTKENGGIFLQTQGWIILAEALLGHGNRAVEYYLESCPAAXNEIADTRLMEPYAYSQFXRKRRQPL

SEQ ID NO: 24179 - DNA, 1302 bp, Unknown
  Obtained from environmental sample
  misc_feature (1)..(1302): n is a, c, g, or t
atgatatttaaccctgaacacgaatgtatggacgtacaagcgcgaaaaaaacttcagcttgccgcgctgaaaaatcttgtggaaaccctgtattcccgagtgcctttttacagaaaaaaaatgcaggatatgggggtagcgccaaaagacattcacagtctggccgatattgaaaaactgcccttcacttctaaagacgatttacgggacaattatccctacgggttacgcgcaagcgcgcatgaaaggattgtcgaagtacacatgagttccggcacaacgggtaagcctgtcgtgaatgaatacacgttaaaagacatagacatctggcggcagtccatggcgagaaccatgtcggcggccggttgtacaagcaacgacattgttcagaactgctacggttacgggcttttcacaggaggcgcgggagcgcattacggcgcgcttacaataggcgcggaagtcctgcccatgtccagcggcaacacggaacgtcaattgatggttctgcgcgatttcggttcgactatgcttacctgtactccgtcttacgcgctctaccttgcagaagaagcggccgaagccggcatagccctaaaatcgctgccgatttgcaagggttgttttggagcggaaccatggagcgaaaatatgcgcgtagaaatcgaagaacgtttcaacatgaaagcctatgacatttacggacttacggaaattatcgggccgggagtagcctttgaatgtgaagcccaggaggggctccatgtgaacgaagatcttttctatcccgagataatcgatcccgcgaccggaaaagttctgcctcccggagaaaaaggcgagctggtctttaccaccattacaagagaaggaactcccctgctccgttacaggactcgcgacattacaagctttattaccgaaccatgctcttgcggacgcacaactatcagaatgcgccgcctcttcggcagaacagacgacatgctgatcatacgcggcgttaacgtgttcccaagccagattgagcaggcgctcatcgagattgaggggacggagcctcagtaccttatcattgtcagccgcggcgaaagccatttggacgaagtggaactgcaggttgaagtcaagaaagaacttttcacagacgaaacgcgcggccttgagaaccttcgcagccgcatagaacatgtaatgaagagcaaactgcaaatcggcttgaaggtaaaactggttgaaccgaaaaccattgaacgttcaatcggaaaagcaaaaagagttatcgacaacaggaaaatataa

SEQ ID NO: 24180 - protein, 433 aa, Unknown
  Obtained from environmental sample
  DOMAIN (8)...(357): AMP-binding enzyme
  misc_feature (1)..(433): Xaa is any amino acid
MIFNPEHECMDVQARKKLQLAALKNLVETLYSRVPFYRKKMQDMGVAPKDIHSLADIEKLPFTSKDDLRDNYPYGLRASAHERIVEVHMSSGTTGKPVVNEYTLKDIDIWRQSMARTMSAAGCTSNDIVQNCYGYGLFTGGAGAHYGALTIGAEVLPMSSGNTERQLMVLRDFGSTMLTCTPSYALYLAEEAAEAGIALKSLPICKGCFGAEPWSENMRVEIEERFNMKAYDIYGLTEIIGPGVAFECEAQEGLHVNEDLFYPEIIDPATGKVLPPGEKGELVFTTITREGTPLLRYRTRDITSFITEPCSCGRTTIRMRRLFGRTDDMLIIRGVNVFPSQIEQALIEIEGTEPQYLIIVSRGESHLDEVELQVEVKKELFTDETRGLENLRSRIEHVMKSKLQIGLKVKLVEPKTIERSIGKAKRVIDNRKI

SEQ ID NO: 24181 - DNA, 1521 bp, Unknown
  Obtained from environmental sample
  misc_feature (1)..(1521): n is a, c, g, or t
atgaaaatactgatggtttccagcgaggctgtcccctgggcaaaaacaggcggacttgccgatatggtttccgcgctttcgattaacctcgctaaacttggtcatgacgtcaggattgtaatcccgcggtactactctatcgaccgcggcggcttaaaacagcttcccggcgcgatgggaacgccgatgggcggcatcgaagaatggagcgccgtctactcaacagatatgccgggaacaacaaaaactaatccggtaaaggtttattttatcgatcatgaaatatatttcggtagagacggcatttacggaaattccgcggaaaccgatttttcagacaactccaggcggtttatgtttttttgccgggccgttttccagctttgccgcaagataaaatggtttcccgacgtgcttcacgcccatgactggcccgcggcagtcgctcccgtatatctgaaattcgccgaaagggtaaaaggaagcgcgaaaggttttgaaaaaaccgtttccattctaacgattcacaacctgggttatcagggaatttacggtaaagacaattttaattattccgggcttgggtgggacgttttctacaacggcgggtttgaagactggagtatgcttaatatgctgaaagccggcctttacagcgccgataaactcaacacggtttcacctaactatgccgaagaaacaaagacgcaggaaaacggcttcaggctggacggagttctgcgttacagaaacgcggattattgcggaatattaaacggaattgacacaaacgtatggaatcccgcaaaagataagtatattccggagacttactcattaaaaaatatggaaggcaaggcggcggcgaaaaccgctctgcaaaaagaattcggtctgcctcccgatccgacagttccgataatcggtattgttacgcgcctaaccgatcaaaaaggagtgggcgatcttttcggacccacttacggttccgcgtggtcaatttgccgcgatttaaatttgcaaatggtactgcttggttccggcgaatactggtgcgaacatgaaatatcgggacttgcctctcgtttatcaaacttcaaagcgaaaatcggctacagcgaaaaaaccagccatcttattgaagccggctccgacttttttctgatgcccagccgttacgaaccgtgcggacttaaccagatgtactcgctgatttacggaacattaccgatagtccgcagaacaggcggtctagccgacaccgtagaaaacttcaatgaaaacacaggagagggcacaggtttcatgtttgactatctaagcccttcctctatatacgacaccgtaacatgggcagtatggacatggtacaaccgccccaaagaaatcaaaaagatgcaggaacgcggcatggcgcaagacttctcttgggaactctccgcgaaaaagtatgtggagatgtacgaagccacgtttaagacgcagggaattaaactcccaaagtcggttagtacggagtga

SEQ ID NO: 24182 - protein, 506 aa, Unknown
  Obtained from environmental sample
  DOMAIN (2)...(249): Starch synthase catalytic domain
  misc_feature (1)..(506): Xaa is any amino acid
MKILMVSSEAVPWAKTGGLADMVSALSINLAKLGHDVRIVIPRYYSIDRGGLKQLPGAMGTPMGGIEEWSAVYSTDMPGTTKTNPVKVYFIDHEIYFGRDGIYGNSAETDFSDNSRRFMFFCRAVFQLCRKIKWFPDVLHAHDWPAAVAPVYLKFAERVKGSAKGFEKTVSILTIHNLGYQGIYGKDNFNYSGLGWDVFYNGGFEDWSMLNMLKAGLYSADKLNTVSPNYAEETKTQENGFRLDGVLRYRNADYCGILNGIDTNVWNPAKDKYIPETYSLKNMEGKAAAKTALQKEFGLPPDPTVPIIGIVTRLTDQKGVGDLFGPTYGSAWSICRDLNLQMVLLGSGEYWCEHEISGLASRLSNFKAKIGYSEKTSHLIEAGSDFFLMPSRYEPCGLNQMYSLIYGTLPIVRRTGGLADTVENFNENTGEGTGFMFDYLSPSSIYDTVTWAVWTWYNRPKEIKKMQERGMAQDFSWELSAKKYVEMYEATFKTQGIKLPKSVSTE

SEQ ID NO: 24183 - DNA, 924 bp, Unknown
  Obtained from environmental sample
  misc_feature (1)..(924): n is a, c, g, or t
atgctgcgcgactccgcgttcctgcaggagaaggacttggagtgggtcaacgtcatcaggaagcgccagcaccagccggagatggcgccgctctacaccataggcgatgtggagagggcgatggatctctttcaaggggttgaattcaacgaacagttcgaggtgacgcccggcgtggagatcatgatgcgcgacgcggggcacatactggggtcggcgggcctccacatagaggtgacggagcgcgggtcgggcgggaagccgctgcgcgtggggttcacaggcgacatagggcgccccaatatgccgctgaccaacgacccgaacgtactgcgcgacctggatatgctgattatggagtgcacctacggaaacaggcaccacagcgacttcagcactgtggaggaggaactggtaacggcaatccgcgaagcggccgcggcgggcggaaaggtcatcataccatccttcgcggtcgggagaacgcaactagtcgtctacatactgcacaaactcttcgaccaaaacaggctgcccgaaatgcccatatttgtggatagcccgatggcctgcgacgctacggaggtcttcaaatcgcattatgaattattagatagggagaccaagcgcgtattcctagaccacaacgagcaaccgttcgatttctcacggcttacctacatacacgacgtagacggctcaaagaaactaaacgggctgactttccctcatgtgataatctccagttccggaatggcggagggcggcaggattttgcatcacctgcgcaacaacatggaaaacccaaagacgctgctgctgttcgtaggctacgcggccaaggatacgctggcgcgcaagatcatggacggcgagaagacggtgaaggtattcggcgaagaccaccaagtcgctgcaagataa

SEQ ID NO: 24184 - protein, 307 aa, Unknown
  Obtained from environmental sample
  misc_feature (1)..(307): Xaa is any amino acid
MLRDSAFLQEKDLEWVNVIRKRQHQPEMAPLYTIGDVERAMDLFQGVEFNEQFEVTPGVEIMMRDAGHILGSAGLHIEVTERGSGGKPLRVGFTGDIGRPNMPLTNDPNVLRDLDMLIMECTYGNRHHSDFSTVEEELVTAIREAAAAGGKVIIPSFAVGRTQLVVYILHKLFDQNRLPEMPIFVDSPMACDATEVFKSHYELLDRETKRVFLDHNEQPFDFSRLTYIHDVDGSKKLNGLTFPHVIISSSGMAEGGRILHHLRNNMENPKTLLLFVGYAAKDTLARKIMDGEKTVKVFGEDHQVAAR

SEQ ID NO: 24185 - DNA, 927 bp, Unknown
  Obtained from environmental sample
  misc_feature (1)..(927): n is a, c, g, or t
ttggaggataccatgcaagaaaagaaaaaatgccgcgtttgcggctgtactgaagacaattgtcaacagtgcgttgaaaagacagggattccctgtcattgggtagaagatgatttatgcagcgcgtgtaaaactactgttgtatcttttatttcaagtaaaggcggtgtaggcaagacaaatattgtcataaaccttgctaaatgccttgccgcagctgggaaaagagtcctggctatagacagcgatcttaacaacagtctcggatttcatttccttgttaaagaaatgatggaaaagacaaagaaactgaacatcgcagctgctctaagcgatgaaaaaaacaatctatgcgattacattgtgcctactaattttcccggaattgatcttatagcctcaactccctatttatctgatttaagaacattaagcgaaaaaaggcttaaaagaatgattcatacgctttacgggaaatacgatattttacttattgactgccaccctacatacgataatatcgttttaaacgcggtaaacgcggctgattactcaatcactcctgtattaaaagatttattcagttacaacgccgccgttttcctgtccgaagtgcttccaagagacgtagataatcttgagaactggtttttaataattaacggatacgacaaacgatttgaagaatccaaaagcggccgacaggctgattttttagaattataccggaataaagaacttcctcttactcccgttaaaacatggtttccctggacatctcacatgcatttacttattgattaccaaaaaaagcttacctgcgtaaaagaaaaatccatttcaggagtcgtttataatcctgatctttaccgcgctattaccaatttggccggatgtttcttgagaagaactcaaatctcgcgataa

SEQ ID NO: 24186 - protein, 308 aa, Unknown
  Obtained from environmental sample
  DOMAIN (48)...(249): CobQ/CobB/MinD/ParA nucleotide binding domain
  misc_feature (1)..(308): Xaa is any amino acid
MEDTMQEKKKCRVCGCTEDNCQQCVEKTGIPCHWVEDDLCSACKTTVVSFISSKGGVGKTNIVINLAKCLAAAGKRVLAIDSDLNNSLGFHFLVKEMMEKTKKLNIAAALSDEKNNLCDYIVPTNFPGIDLIASTPYLSDLRTLSEKRLKRMIHTLYGKYDILLIDCHPTYDNIVLNAVNAADYSITPVLKDLFSYNAAVFLSEVLPRDVDNLENWFLIINGYDKRFEESKSGRQADFLELYRNKELPLTPVKTWFPWTSHMHLLIDYQKKLTCVKEKSISGVVYNPDLYRAITNLAGCFLRRTQISR

SEQ ID NO: 24187 - DNA, 555 bp, Unknown
  Obtained from environmental sample
  misc_feature (1)..(555): n is a, c, g, or t
atgtctatcaagtggagcgcattagcagaacaagaaaaaaagaaatttgtaaaaatgaccgaagcgcaaagatttatttattttttactcaaacagtttggctcaccttacggctggggcaaggaaaaccctgaaagctctgattgttcgggggcggtgtgcatggctttgtatgctgccacagggcttctcatcagaactaccgcagacgatttgttaaagcgggtgttcacaataattaacncaaagcaaggcgacattcgggcggtgttttatatcacaaaaaagcaaaagaaacacggagacagttatgtaactgccggaactgcaacccatgtcgccggaattattggcgatggagttattttgaattcccaggaaccttacgcaaaagtcaggcagatctatgaggtttcggattggtatcaaagagaggggcatgaggtgattatcagggggctaaaccgtgaggctctggaaagaatagcgaaagaaggaaaaacgcggtacggcctggacagtgaatttagcaattactttgacacaggtgcgtaa

SEQ ID NO: 24188 - protein, 184 aa, Unknown
  Obtained from environmental sample
  DOMAIN (34)...(151): NlpC/P60 family
  misc_feature (1)..(184): Xaa is any amino acid
MSIKWSALAEQEKKKFVKMTEAQRFIYFLLKQFGSPYGWGKENPESSDCSGAVCMALYAATGLLIRTTADDLLKRVFTIINXKQGDIRAVFYITKKQKKHGDSYVTAGTATHVAGIIGDGVILNSQEPYAKVRQIYEVSDWYQREGHEVIIRGLNREALERIAKEGKTRYGLDSEFSNYFDTGA

SEQ ID NO: 24189 - DNA, 918 bp, Unknown
  Obtained from environmental sample
  misc_feature (1)..(918): n is a, c, g, or t
gtgctgtcattgaccagtaatatgggaaggttggagctttcggggattaaggatttaccatgtgagaaaaatggtattgggctgccactcatgctttcggaggacggtaaggatgtcgcggatgacggtttgttccttgccgctatgaaagaggcgaagcggctgggcttgcccgtctcgtgccactgcgactttggcgggcctgaggcggaggcggcaaagtcctccgctggcaaaagagccgaatggtcgcgtatggaggaaaatttcgccgtgcgccgggcgattgagcttggcaagacggcgggctgccatatccatattgcccatgtttcaacaaaggaagcggtacagataatccgtgaggtgaaaaaaagtcctgttagcggtaatggtttttcacttacctgtgaggcaactccccaccatataggagcgacggaagaagacgcgcactgcatgggcgatgaaacttacggcagggtaaatccgccgctgcgctctgaggctgacagggaggcgcttgtttccgccctttgtgaccgtactatcgacgccattgccacggaccacgcgcctcacagcgacaatgacaaaagcgccggtatgccgggttttaccggactggagaccgcgttcgcgataagtttatcggttttagtgccgggcatcaatttgaggcagctttccgcgcttatgagcgccaacccggcgcgtatactgggccttggggacaggggccgaatagagaaaggtttaagggcggatcttgttattgttgatacagaggcaaattggaaagttgagtctgaaaaatttagatcgcggggaaagtgcagtccttttgccggaaaaacattgcgcggaaagatattaaggacgtttaacgcggggaaaactgtttttgaaggagaatga

SEQ ID NO: 24190 - protein, 305 aa, Unknown
  Obtained from environmental sample
  misc_feature (1)..(305): Xaa is any amino acid
MLSLTSNMGRLELSGIKDLPCEKNGIGLPLMLSEDGKDVADDGLFLAAMKEAKRLGLPVSCHCDFGGPEAEAAKSSAGKRAEWSRMEENFAVRRAIELGKTAGCHIHIAHVSTKEAVQIIREVKKSPVSGNGFSLTCEATPHHIGATEEDAHCMGDETYGRVNPPLRSEADREALVSALCDRTIDAIATDHAPHSDNDKSAGMPGFTGLETAFAISLSVLVPGINLRQLSALMSANPARILGLGDRGRIEKGLRADLVIVDTEANWKVESEKFRSRGKCSPFAGKTLRGKILRTFNAGKTVFEGE

SEQ ID NO: 24191 - DNA, 687 bp, Unknown
  Obtained from environmental sample
  misc_feature (1)..(687): n is a, c, g, or t
ttggtgcgggacggcgacagcatagaagccggtgaacccctctgcatgggcgcaatcaatccgcatgacatcctccacatacttggcgaatcaaaccttcagcgctatttgatgaatgaaatcaagcaggtttacaacttccagggcgtgtccataaacgacaagcacgtcggcgtaattatccgccagatgatgaggaaggttgagattctgcgtgtcggcgataccaggtttatttacggccaactggttgataaatacgcctttaaggaagaaaacaaccgtgtcattaacgaaggcggacagcctgccgttgcccggcccgtgttccaggggatctccaaagcggccttaaatattgattctttcctttctgccgcaagtttccaggaaacaaccagggtgcttaccaacgctgccattgccggttccaccgactatctccgtggccttaaggaaaacatcattatcggccatcccattccggcgggtaccggcatgaagcgttacagggaagtgaagctctttgacgaggatcagcaggatctggatgaatacctgaacgaagttcttgaaaggcgcaagcttgaaaaagccgcggagcttaccagcgacgatttttcagtcgaagatacagatgttgattccgataacgagcccgaagtggaagcggacaacgaggattaa

SEQ ID NO: 24192 - protein, 228 aa, Unknown
  Obtained from environmental sample
  DOMAIN (2)...(126): RNA polymerase Rpb1, domain 5
  misc_feature (1)..(228): Xaa is any amino acid
MVRDGDSIEAGEPLCMGAINPHDILHILGESNLQRYLMNEIKQVYNFQGVSINDKHVGVIIRQMMRKVEILRVGDTRFIYGQLVDKYAFKEENNRVINEGGQPAVARPVFQGISKAALNIDSFLSAASFQETTRVLTNAAIAGSTDYLRGLKENIIIGHPIPAGTGMKRYREVKLFDEDQQDLDEYLNEVLERRKLEKAAELTSDDFSVEDTDVDSDNEPEVEADNED

SEQ ID NO: 24193 - DNA, 600 bp, Unknown
  Obtained from environmental sample
  misc_feature (1)..(600): n is a, c, g, or t
ttgcatataaactccgtaatgaaaggtattgccagccagaccaatctgctttcaatgaacgcggctatagaagcggcccacgccggggaagcgggcaagggtttcgccgtagtcgctgacgagatacgcaaacttgcggagagttccgccgaacaatccaagacaatcggcaacattttgaagaaaattaaaggttccatcgacaagatatccggttccacgcagaatgtactgacaaaattcgaagcgattgactcaagcatcaggatagttgcggagcaggaagaaaacatccgtaacgcgatgcaggagcaggaaacgggaagcaggcagttgctgcaaagcgccagcagcttgaatgaactaaccgagcaggtaaagggcggttcaagcgagatgcttgagggctcaaaggaagttatccaggagagcaacaatcttgaaaaagcgactcaggaaataacctctggcatgaacgagatggcctcaggcgctgaccaaataaacgtcgcggtaagccgcgtcaacgagataagcggcaagaatcgaaaaggcattgagacattgatgcatgaggtttcgcgatttaaggtagcgtga

SEQ ID NO: 24194 - protein, 199 aa, Unknown
  Obtained from environmental sample
  DOMAIN (2)...(155): Methyl-accepting chemotaxis protein (MCP) signaling domain
  misc_feature (1)..(199): Xaa is any amino acid
MHINSVMKGIASQTNLLSMNAAIEAAHAGEAGKGFAVVADEIRKLAESSAEQSKTIGNILKKIKGSIDKISGSTQNVLTKFEAIDSSIRIVAEQEENIRNAMQEQETGSRQLLQSASSLNELTEQVKGGSSEMLEGSKEVIQESNNLEKATQEITSGMNEMASGADQINVAVSRVNEISGKNRKGIETLMHEVSRFKVA

SEQ ID NO: 24195 - DNA, 933 bp, Unknown
  Obtained from environmental sample
  misc_feature (1)..(933): n is a, c, g, or t
gtgaatcttattgccgacatggcggaaattgacagaataattctttaccgcaactacatagagtctgacggcatacatatatctcaagtttaccgttggggcaggaatttaggggccaacacggatttacttgaattacttttcgccgacatatcttctttaaaactcatgcctaactggaaaagccttttgacagaggggaactcaataaacagcccgtcaaggctgttgtccgctccggaggctgacatgctcaaatcgtttggaatcctttcggtcgccgcaataccgatacatatcaataacgctttttggggattcgcgctttttgccgatacaaaaaaagagcgttcttttgaggatgatgtttttgaaatgctgcgctcggcggcatttttgttcgcaaacgctttcatccgcggcgaagcggaatatgacgtgcttacgggcatttataacaggcggttctttaataaaaacataaaacgcaccattaaatccttatcccgcacaggcggtttattaagcgtactgatgatcgacatcgatttctttaagcaatacaacgacacttacggccatgtcgagggcgataactgccttaaaatggtcgctcaaacgctttttaacagcgtaacaagagcggacgattatgtcgcaagatacggcggcgaggaatttgtagttgttctgccttataccgacagacaaggcgcgcaatttatcgcggaaaaacttcttgacaatataagaaattgcaatataccccataaaaaaaacgaagcggctgatcgcctgacaatttccatcggcgccacaacaggtaaagtgctgagcacgcacaacacggatgattttgtaaaaaaagccgacgagatgctgtataaggcaaagcaaaacgggcggaataaatatttttttgagcagctttga

SEQ ID NO: 24196 - protein, 310 aa, Unknown
  Obtained from environmental sample
  DOMAIN (139)...(304): GGDEF domain
  misc_feature (1)..(310): Xaa is any amino acid
MNLIADMAEIDRIILYRNYIESDGIHISQVYRWGRNLGANTDLLELLFADISSLKLMPNWKSLLTEGNSINSPSRLLSAPEADMLKSFGILSVAAIPIHINNAFWGFALFADTKKERSFEDDVFEMLRSAAFLFANAFIRGEAEYDVLTGIYNRRFFNKNIKRTIKSLSRTGGLLSVLMIDIDFFKQYNDTYGHVEGDNCLKMVAQTLFNSVTRADDYVARYGGEEFVVVLPYTDRQGAQFIAEKLLDNIRNCNIPHKKNEAADRLTISIGATTGKVLSTHNTDDFVKKADEMLYKAKQNGRNKYFFEQL

SEQ ID NO: 24197 - DNA, 702 bp, Unknown
  Obtained from environmental sample
  misc_feature (1)..(702): n is a, c, g, or t
gtgcggcttttaaacaagtaccttacagaaatgagcaacataataatggagcaccttggaaccatagacaaatacatgggagacgcgatcatcgcgttcttcggggcgcctttgttccatgccgatcacggcgcccttgcgtgccgcagcgccctcgcgattaaggcggctgagagggagttaaacgaaactataatcagcgaaaagctgagtcctgttcctatttttacccgcataggaataaataccggcgaaatggtagttggcaatatgggcgcagaaaaaaagatggattataccattatgggaaacgcggtaaaccttgcctcgcgcattgaaggggtaaataagtattaccacaccggcggcattttgattagcgagtacacccgcgcgaaaatcggcgacgagtttccgctgcgccgcatcgaccgcgtccgtgtggtagggataaacacgcctctgcgtctgtatgaactgctgccaatggatactgatcaaggcgcggtggagacatgggagaaggcgcttgatttatatgaacagaggaatttcaaaaaagctttcggcttgtttgtttcgctcttaaaaagttatccgaaagacaatgccgccaaagtttacgcgctgcggtgcaagtcctttgttgaaaccccgccgccggacaattgggacgcggtgagaaatttgacgaataagtga

SEQ ID NO: 24198 - protein, 233 aa, Unknown
  Obtained from environmental sample
  DOMAIN (1)...(162): Adenylate and Guanylate cyclase catalytic domain
  misc_feature (1)..(233): Xaa is any amino acid
MRLLNKYLTEMSNIIMEHLGTIDKYMGDAIIAFFGAPLFHADHGALACRSALAIKAAERELNETIISEKLSPVPIFTRIGINTGEMVVGNMGAEKKMDYTIMGNAVNLASRIEGVNKYYHTGGILISEYTRAKIGDEFPLRRIDRVRVVGINTPLRLYELLPMDTDQGAVETWEKALDLYEQRNFKKAFGLFVSLLKSYPKDNAAKVYALRCKSFVETPPPDNWDAVRNLTNK

SEQ ID NO: 24199 - DNA, 567 bp, Unknown
  Obtained from environmental sample
  misc_feature (1)..(567): n is a, c, g, or t
atgattaaaacagtaaaatcagttgatctgaagggcaaacggataataatgcgcgtggactttaacgtgccgatgaaagacggagtagtgcaggacgatacccgcattgtggcggctctgcctactattcagtacattcttgagcaggggataaagaccctgacgctgatgtcccatttgggtgacccgtccaaagacgcgaaaaaagccaaagagaaagccgaaaaagacggcaaaacttttgatgaggccgcttacatcaagggcaaacaccgcatggcgccggttgccgcctacctggaaaaaaagctgggcaagccggtgatttttgccggagaggacggctgctacggcaagaaagcgttcatcgaaagccagcctgacggctcggttatcatgctggaaaatacccgcttccataaggaagaaaccgcgaaagacgcggctgatcttgacaagctggcgaaagaacttgccacttacggcgatgtatttgtcaacgacgcctttggcaccgctcaccgcgaccatgcctctaccgcgtcaatcgccaatttgtgccggtag

SEQ ID NO: 24200 - protein, 188 aa, Unknown
  Obtained from environmental sample
  DOMAIN (1)...(186): Phosphoglycerate kinase
  misc_feature (1)..(188): Xaa is any amino acid
MIKTVKSVDLKGKRIIMRVDFNVPMKDGVVQDDTRIVAALPTIQYILEQGIKTLTLMSHLGDPSKDAKKAKEKAEKDGKTFDEAAYIKGKHRMAPVAAYLEKKLGKPVIFAGEDGCYGKKAFIESQPDGSVIMLENTRFHKEETAKDAADLDKLAKELATYGDVFVNDAFGTAHRDHASTASIANLCR

SEQ ID NO: 24201 - DNA, 354 bp, Unknown
  Obtained from environmental sample
  misc_feature (1)..(354): n is a, c, g, or t
atgggaaaacagccctcaggggaaaatacagatattgctgttgcgaagaattatcttaccgaggcagaactggaatctttggggcgcatagtcaacgcgtatcttgatttagcggaagatcgggcaaaaaagcatatccccatgacaatggaagactgggccaaacgcctcgaccgctttctcgaagccgatgatcggacgattcttcaagactcaggaaagataagcgcccagcttgcaaaggaattcgccgaaagcgaatttgaaaaataccgtattattcaagaccgcctgtttgaatccgattttgacaaggaaatcaaaaaaatcaaaggaaaaaaggggaaagggtaa

SEQ ID NO: 24202 - protein, 117 aa, Unknown
  Obtained from environmental sample
  misc_feature (1)..(117): Xaa is any amino acid
MGKQPSGENTDIAVAKNYLTEAELESLGRIVNAYLDLAEDRAKKHIPMTMEDWAKRLDRFLEADDRTILQDSGKISAQLAKEFAESEFEKYRIIQDRLFESDFDKEIKKIKGKKGKG

SEQ ID NO: 24203 - DNA, 489 bp, Unknown
  Obtained from environmental sample
  misc_feature (1)..(489): n is a, c, g, or t
atggacgaaaaaactgaattatcatcccctcccgctgtgtactttaaccgcgacctgtcgtgggttgattttaacgagcgggtgctggaagaagggctgcgcaaggatttgcccctgtttgagcgttcccgctttttgtcaattgtttcatcaaattttgacgaatttttcatggtgagggttgcggccattaaacgggcgcagagagccggaatttcaggcgatccttccggactcagcccggcggaacagttgaaaaaaatttctgaaaaggttcactccataagccgtcggctgtccgcttgttttatgggcgaaatatttcccggcctcgccgacggcggtcttgaattggtccgccccgattcctacaccgttccccaaatggatcatctggaatcttttttcctcggtcagatttatccggttctgacgcccctgcgcgtcgaagagacaagcccctgcccctttttgaaaacagatgcataa

SEQ ID NO: 24204 - protein, 162 aa, Unknown
  Obtained from environmental sample
  misc_feature (1)..(162): Xaa is any amino acid
MDEKTELSSPPAVYFNRDLSWVDFNERVLEEGLRKDLPLFERSRFLSIVSSNFDEFFMVRVAAIKRAQRAGISGDPSGLSPAEQLKKISEKVHSISRRLSACFMGEIFPGLADGGLELVRPDSYTVPQMDHLESFFLGQIYPVLTPLRVEETSPCPFLKTDA

SEQ ID NO: 24205 - DNA, 699 bp, Unknown
  Obtained from environmental sample
  misc_feature (1)..(699): n is a, c, g, or t
gtgaaagttttgcggaaagcctgcgatgacggtttcacttttgaaccggaagaaaaacgcataaaagaattttccacatggctaaaaaacgaagtccgagacacactacttctacatactaatcctgtgtacttgggtgaggactttgccagatccggcgatcttacctgtatattccttgatgagcagatgccagacggaaaacaactttcattccttgtaattgaattgcgtaacgtgccattttctcaacaatggcaagtcattctttatttaatgaacaccataccgaattttgccggcggagcgtttgactcccgtggcaatggacagtcgatagccgagttcgccacacaggaatatccgggatatgtgagtcaagtaatgatcacaatgggttggtatgcccagaatttccccaaactaaaaatgcgcatggaagacgctgccactactattcccgatgacgcatctatccgtgaggattttcgagttgtcggaatcaaagcgggcgttccctgcgtgcttgagcgttccggcggaattcgtgaacggcggcacggcgacggagcgattgcgaaacttatggcggtctacgccgcggacaatgacgaagaaaaaggctaccagcctatgacatacgaatcggtagaaacacctaacagatataaaacaggaggtaaagacccgtgggactga

SEQ ID NO: 24206 - protein, 232 aa, Unknown
  Obtained from environmental sample
  misc_feature (1)..(232): Xaa is any amino acid
MKVLRKACDDGFTFEPEEKRIKEFSTWLKNEVRDTLLLHTNPVYLGEDFARSGDLTCIFLDEQMPDGKQLSFLVIELRNVPFSQQWQVILYLMNTIPNFAGGAFDSRGNGQSIAEFATQEYPGYVSQVMITMGWYAQNFPKLKMRMEDAATTIPDDASIREDFRVVGIKAGVPCVLERSGGIRERRHGDGAIAKLMAVYAADNDEEKGYQPMTYESVETPNRYKTGGKDPWD

SEQ ID NO: 24207 - DNA, 579 bp, Unknown
  Obtained from environmental sample
  misc_feature (1)..(579): n is a, c, g, or t
atgagcgatgaaaactggtcattaataataaaaccaaaacgaaaattgcttgaaatcccaatcagggaaataatccgttacagggatttaatttatctttttgtcaaacgcgattttacaactcaatacaaacagacaattctgggaccattatggtttatcataagcccgtttttttccacgataatttatacttttatattcggtcagctcgcaaacatcggaactgacggcatacctcacacgctcttttatttttcaggaacaattctttggtcttttttttccggttgttttaatgattcctgtaatgtatttataacaaacgccggtattttcggtaaagtttatttcccccgtcttgtagttcccattaactatgtattaagccactgcataaaatcgtttattcaatttttaatgctgattattttatttgtttattttgttttcaaaggcgcgcctgttcacgcttcatggtatatgtttctttttccgttcatattcatgtggttagccgccattgccgtaggagccggaataataatttcatcgattacaacaaagtaccgcgactaa

SEQ ID NO: 24208 - protein, 192 aa, Unknown
  Obtained from environmental sample
  misc_feature (1)..(192): Xaa is any amino acid
MSDENWSLIIKPKRKLLEIPIREIIRYRDLIYLFVKRDFTTQYKQTILGPLWFIISPFFSTIIYTFIFGQLANIGTDGIPHTLFYFSGTILWSFFSGCFNDSCNVFITNAGIFGKVYFPRLVVPINYVLSHCIKSFIQFLMLIILFVYFVFKGAPVHASWYMFLFPFIFMWLAAIAVGAGIIISSITTKYRD

SEQ ID NO: 24209 - DNA, 861 bp, Unknown
  Obtained from environmental sample
  misc_feature (1)..(861): n is a, c, g, or t
ttggaaaatatttaccattacagagaaaaaggcgcaaaattaaaaaccgccgccgtaatcggctcttcggaaatgattgtcgctatcacagcgtctacaattacaactatctgcgttttcgctcctcttgttatgttccaagggcttttggaaatggcgggagaacttttcgcagggcttgcttttaccgttgttatatcgcttggtatttctctttttacagcagtcttccttgtccccatattatcaagccattacttgccgcttgttacacgaaaacaaaaaccgctgacaggcagatttgcggaaattgacgcaaagtttgagaaattttttatatggctggaaaacaaataccgcaacgccgtaagaaaagtgttaaaacacaagtttattgttattgggtttttgtcattgctgcttatcgtaagtataattttaattcccataatcggctgggaatttatgccgcaacaggaggaagacaatgtaaacatatcggcgactctgccgatgggaacgcctcttgcggaaacagaagctgttttaaaacagcttgaactgattgtaaaaaaagaagttaacagttacgaaagaatagttctcagcgccggcggcggcggaatgatgggcatgggcggcaacaattcaaatacaggttccttgcgtatcaatctaaaaaaatattcggaaagaacggaaaccgctaatcaaataaaagaaaatttgcgcccttattttaaccagttccccggcgtaattttttattttggcggcggtatgcgcggcggaatgatgggcggaggcagcacggtagacatagttttaagaacggacaattggcaaagggcaaagttatag

SEQ ID NO: 24210 - protein, 286 aa, Unknown
  Obtained from environmental sample
  misc_feature (1)..(286): Xaa is any amino acid
MENIYHYREKGAKLKTAAVIGSSEMIVAITASTITTICVFAPLVMFQGLLEMAGELFAGLAFTVVISLGISLFTAVFLVPILSSHYLPLVTRKQKPLTGRFAEIDAKFEKFFIWLENKYRNAVRKVLKHKFIVIGFLSLLLIVSIILIPIIGWEFMPQQEEDNVNISATLPMGTPLAETEAVLKQLELIVKKEVNSYERIVLSAGGGGMMGMGGNNSNTGSLRINLKKYSERTETANQIKENLRPYFNQFPGVIFYFGGGMRGGMMGGGSTVDIVLRTDNWQRAKL

SEQ ID NO: 24211 - DNA, 987 bp, Unknown
  Obtained from environmental sample
  misc_feature (1)..(987): n is a, c, g, or t
atgtccgacgcttccaactcaattcgcgacgcgctgaaacgcatcagaaactacataccgacaggcgcggatacgccgatgattttcaaatttgatccttccatgatcccgatcatggggcttacagtaacgtcgaatagacgaactccggaagaactgcgcgaacttgccgaagacacaatcgtaccgcgcatagaacaaacgcccggcgtagcgacggcgtccgtaaacggaggcagggaaaaaattatccgcgttgaaattccccaaaaccgccttgaagcctacggacttacaatatcacagattcaacagatacttgccgctcagaatatgcaaacggctgccggaaccatcactgaaaggggactatcatacatcctaaccacaatgggcgaatatacgtcgctggatcaaatgagaaatacggttatttcatacaagggcggcggcgttgtaaacggacaggtggaaatgccgaaacaaatctacctgcgcgatcttgccaatgtaattgacggttaccgtgatgaaaccagtactgtctatgtaaacggacaagccgccgtaatgctgatggtgcaaaaacagagcggcaagaattcaatacaaaccgcaaaagacctgcgggtaagattaaaaaaaatcgcttcggaacttccgccggatattaaaattaacgaaatgtttaacactaccgacattattgaacattcgcttaatcaggtaacgtctaccgccgtaagcggagcggtattggcgataataattcttttcatcttcctgcgatcggcaaaaccaacaattatcatcggcatcagtatacctatttcaattataatcaccatgatgctgatgtacttcgcgcaccttacccttaatcttatgactatggcgggtcttgttctgggtataggaatgttagttgacaactcaatcgttatttggaaaatatttaccattacagagaaaaaggcgcaaaattaa

SEQ ID NO: 24212 - protein, 328 aa, Unknown
  Obtained from environmental sample
  misc_feature (1)..(328): Xaa is any amino acid
MSDASNSIRDALKRIRNYIPTGADTPMIFKFDPSMIPIMGLTVTSNRRTPEELRELAEDTIVPRIEQTPGVATASVNGGREKIIRVEIPQNRLEAYGLTISQIQQILAAQNMQTAAGTITERGLSYILTTMGEYTSLDQMRNTVISYKGGGVVNGQVEMPKQIYLRDLANVIDGYRDETSTVYVNGQAAVMLMVQKQSGKNSIQTAKDLRVRLKKIASELPPDIKINEMFNTTDIIEHSLNQVTSTAVSGAVLAIIILFIFLRSAKPTIIIGISIPISIIITMMLMYFAHLTLNLMTMAGLVLGIGMLVDNSIVIWKIFTITEKKAQN

SEQ ID NO: 24213 - DNA, 372 bp, Unknown
  Obtained from environmental sample
  misc_feature (1)..(372): n is a, c, g, or t
atgaatatagtagattcttctctgtggattgaatattttttagaaaatgatattgaccaatctataatcagtaccataaaagataaaaataaactttatgtgcctagcatttgtttgcaagaagtgtataaaaaatttttgtctgtaaatgatattgaaaaagcagatttagccgtcgatattatgcaaaatgctgttgttatcaatttaactccgagaattgcagtatttgcggcaaaattaggtaagcaatacaagctacctacagcagatagcataatttatgcaacagctaagatttataatgcagaaatttatacccaagataagcattttgaaaatttagagaatgtacattattttgcaaaatga

SEQ ID NO: 24214 - protein, 123 aa, Unknown
  Obtained from environmental sample
  DOMAIN (2)...(120): PIN domain
  misc_feature (1)..(123): Xaa is any amino acid
MNIVDSSLWIEYFLENDIDQSIISTIKDKNKLYVPSICLQEVYKKFLSVNDIEKADLAVDIMQNAVVINLTPRIAVFAAKLGKQYKLPTADSIIYATAKIYNAEIYTQDKHFENLENVHYFAK

SEQ ID NO: 24215 - DNA, 705 bp, Unknown
  Obtained from environmental sample
  misc_feature (1)..(705): n is a, c, g, or t
atggcgaggaccaagaggatgacaaagggcggtattttcccagcgattgtgggaacgtgttgccttatagcgggtagtatgctagtggcttttccaattggagttatgtctgcgatatatttgaacgaatacactacaaacggtaaggttgcaaaattcatacgcacaatgacaaataatttaggcggcgttccttctgttatttttggattatttggaatggcactatttgtaaatgcaatgaaatggggcgattccattatcgcaggttcatttacgcttgggcttttggtgttgcctttggtgattcgcaccacagaagaggctttgaaaatggtaccggattcattccgcacagggagctatgctttgggtgcaaacaaattgcaaaccatcaggcgagttgtgctaccaacggcattcccaaatattttgacaggtttaatattagcggttggaagagtttcaggcgaaaccgcacctattttatttacagtagccgcttatttcttgccaaaactcccaacgagtattttcgatcaagttatggcacttccgtatcatctctatgttatatcaactagtggcacaaatttggaagcaacgcgcccaatggcttatggcacggcacttgtgctgattactttggttttgtgcataaatttgctggcagcttatttgaggcggcgatttgggaagatgtag

SEQ ID NO: 24216 - protein, 234 aa, Unknown
  Obtained from environmental sample
  DOMAIN (16)...(233): Binding-protein-dependent transport system inner membrane component
  misc_feature (1)..(234): Xaa is any amino acid
MARTKRMTKGGIFPAIVGTCCLIAGSMLVAFPIGVMSAIYLNEYTTNGKVAKFIRTMTNNLGGVPSVIFGLFGMALFVNAMKWGDSIIAGSFTLGLLVLPLVIRTTEEALKMVPDSFRTGSYALGANKLQTIRRVVLPTAFPNILTGLILAVGRVSGETAPILFTVAAYFLPKLPTSIFDQVMALPYHLYVISTSGTNLEATRPMAYGTALVLITLVLCINLLAAYLRRRFGKM

SEQ ID NO: 24217 - DNA, 927 bp, Unknown
  Obtained from environmental sample
  misc_feature (1)..(927): n is a, c, g, or t
ttggacagcaaacaggttgaggaaatatccaaagaaatcgcgtctattaaaggcgttgacaaggaagaggccgagtcgataatcaccgaattcaaaactctgctaagcggttcctatagataccttgggccgtccttcggcggagtggagacggcaagaaatatgctgcacgcggctttaggtgaggagaaaggtgaggccctgctccaaaaaactatgctcagcctgccacaaaatatttttggctttttggaggaattcaccccggaacagatcgtcttcctgctaaaagacgaaagccccgtaacagcggctctggttctggcaaggctttcgccggaagtttccgcaaagacgctggctaaattcccgcctgccctaaaaccggaaattcttaaaaagatcgcccaccaaagcgaagtgatgccggaggtactggaacaagtcgcaaaagcaatacgggaaagagcccgccatcttggcagcagcggaaaagatgatattgaaattgacggaatgcaggcccttacggcgattttaaaacagggtgactatacctttggcgacaaaattataaaagaactggaaacggacagccccgacatcagcaaaaaactcaaagacaggctgtataccctggacgacgtgctgagggctttcgacaagccgcttgccgaaaaactcgcgaccatgaccgagcaggatatcgccattctgctgaaaggcaggagccccgaattctgcgaaaaaatactttcaaatgtttcatcccggcggcgagatttaatccgcgaggaaggggatataatcggccctatttccaaacgggaaagtctcgaggcggcaagcgattttctcgcgtggttcaggctggcgcgcgctaacggcgagctggcgctaaagagcgatgaggactgggtagtataa

SEQ ID NO: 24218 - protein, 308 aa, Unknown
  Obtained from environmental sample
  DOMAIN (192)...(301): FliG C-terminal domain
  misc_feature (1)..(308): Xaa is any amino acid
MDSKQVEEISKEIASIKGVDKEEAESIITEFKTLLSGSYRYLGPSFGGVETARNMLHAALGEEKGEALLQKTMLSLPQNIFGFLEEFTPEQIVFLLKDESPVTAALVLARLSPEVSAKTLAKFPPALKPEILKKIAHQSEVMPEVLEQVAKAIRERARHLGSSGKDDIEIDGMQALTAILKQGDYTFGDKIIKELETDSPDISKKLKDRLYTLDDVLRAFDKPLAEKLATMTEQDIAILLKGRSPEFCEKILSNVSSRRRDLIREEGDIIGPISKRESLEAASDFLAWFRLARANGELALKSDEDWVV

SEQ ID NO: 24219 - DNA, 777 bp, Unknown
  Obtained from environmental sample
  misc_feature (1)..(777): n is a, c, g, or t
ttgaccataacggcaacgcttatccttacagttttgcaaaaagggtttaggattgaaaaattacagtacaatcagagcatgactttttcgagggaaaccatactggcgcaggaacacgagcgcacacggatagcgagggaattgcacgacacggtagcgcaggacgtattgcgcctgtcgctccagacggagctaatcaaaaaaggaaaattatcagaaacgcaaagccgcctttgcgatcaggtaatggaagggcagacggaattattaagccggataaggggtatatgcgacgatttaatccctcccgatttccagccaagcgtagacaactataaggaacctccggttccacgattgcccgacgcatttcagaccctttgcgacaccttcggaaaacgcacgggcataaactgtaatttaacgatacacgaaagcgcggatttaagttatcttgacgtagacaagcagctgcactgtttccgcatagtacgggaatgtcttgcgaacataggcaaacactcacaggcaagcgaggtacaggtgctagtccgaaacaacgccgagggaaaccttatgatttatgtaacggacaacgggaaaggcattgaaaacaccgacaatgattatctgcgcgcgttaagggcaaaggggcattttggagtgtggaacatgaaggagagagccgcttccatgaacagcaaactcataatagacagcgaaccgggggaaggcacgacaataaagctaatcattcagaggcagggtgagctgtga

SEQ ID NO: 24220 - protein, 258 aa, Unknown
  Obtained from environmental sample
  DOMAIN (40)...(105): Histidine kinase
  misc_feature (1)..(258): Xaa is any amino acid
MTITATLILTVLQKGFRIEKLQYNQSMTFSRETILAQEHERTRIARELHDTVAQDVLRLSLQTELIKKGKLSETQSRLCDQVMEGQTELLSRIRGICDDLIPPDFQPSVDNYKEPPVPRLPDAFQTLCDTFGKRTGINCNLTIHESADLSYLDVDKQLHCFRIVRECLANIGKHSQASEVQVLVRNNAEGNLMIYVTDNGKGIENTDNDYLRALRAKGHFGVWNMKERAASMNSKLIIDSEPGEGTTIKLIIQRQGEL

SEQ ID NO: 24221 - DNA, 852 bp, Unknown
  Obtained from environmental sample
  misc_feature (1)..(852): n is a, c, g, or t
atggagccttcggaaaatgccgaagcggaaaccctgctgaagcggcttgaaacttccgaactgccccagtaccgggaaaaaatagcgaaggcctatcaggacgcggaaaaagaattcaaggatcattttatttcccgtctcaacgaacatatcgaagaagccagagagagttttgacgaaattaacgatattctacgcacccttcattttggccgggatcaatactggtttcatcttgaagaacaaagtgatcgcaaggggcagatcgaggttatcaggcaggcggcaagaataccacccaatgacggcggcctcttttcccaacttgtcgatccggctgaaaaaaaagctgcggaggaactctttaaccgtattctcaattcacctctggattcaaaagaacttaaatcgatttgcgattaccgcacttactttcattacgatattagaataaaagaaaccgacaatcttgacgaagacgacaatccggtgattctttcactttcaaaggtgttaaaagaaaaatcaggcggcgaggcgcagacgccttattacgtggctatcgccgcgagtttctaccgtttttacaaagcccggcccgaaaacaccgtgcgtctggtaatttttgacgaagcctttaaccgcatggatgatgagcggatcggtaagatactttcgttttataataaccttaatttgcagatcatcacctctgtcccgcctngagaaatagaagctatcgctccctacatggacaggatcaatgtgataagccgttttggcaatgcggtaaaagtaagagactgccacattgacgccattgattcaagtgatattggaatagatatgtga

SEQ ID NO: 24222 - protein, 283 aa, Unknown
  Obtained from environmental sample
  misc_feature (1)..(283): Xaa is any amino acid
MEPSENAEAETLLKRLETSELPQYREKIAKAYQDAEKEFKDHFISRLNEHIEEARESFDEINDILRTLHFGRDQYWFHLEEQSDRKGQIEVIRQAARIPPNDGGLFSQLVDPAEKKAAEELFNRILNSPLDSKELKSICDYRTYFHYDIRIKETDNLDEDDNPVILSLSKVLKEKSGGEAQTPYYVAIAASFYRFYKARPENTVRLVIFDEAFNRMDDERIGKILSFYNNLNLQIITSVPPXEIEAIAPYMDRINVISRFGNAVKVRDCHIDAIDSSDIGIDM

SEQ ID NO: 24223 - DNA, 825 bp, Unknown
  Obtained from environmental sample
  misc_feature (1)..(825): n is a, c, g, or t
gtggttgaactggttaagcgcgcgttaaacggcgaaaagctgttattggagtggactctttgcacgtcaacaggagagttgattcataatgaaattacaatggtccgcgcgatgtataaaggcaagtatgtggtgctgggatatcaatacaatctgcatgccagaaaaatgtgggaaatgaaactggcggacgcaaaggacttaatcgaacttcagcttgccaaactgaacctggttgttaaagctacaaaaatcgcactatgggatatggaagttatacatgatgatcccgtaaacccaaacaacgcttttttctggtctgacgaattcagacacatgctcggctacactgacgagaatgattttccgaatgttctgggcagttggagcgccctgctgcacccggatgacaagggaaatacgctgaacgctttcgcggaacacctgttcgacagaacaggcaatactcccttcgatgtagaattccgccttatgcgtaaaacaggagaatacgccttttaccgggcttccggcgagtgccttcgcgacaaggacggcaacgccttacgcatggcgggcgcgttaatggacattacggagaataaaataattcttttggaaaaggagcagcaaaaagaagcggcggaagccgccagccgggagaaaagcaatttcctcgcgaacatgagccatgaactgcgctcgccgttgaacgtggttatagggctgaccaatttaattcttggaaacaaaaatttggacgcgcaaatcactgaaaatctggaaaagataaacaacgccggtacttcgcttttagaaatgtaa

SEQ ID NO: 24224 - protein, 274 aa, Unknown
  Obtained from environmental sample
  DOMAIN (221)...(267): His Kinase A (phosphoacceptor) domain
  misc_feature (1)..(274): Xaa is any amino acid
MVELVKRALNGEKLLLEWTLCTSTGELIHNEITMVRAMYKGKYVVLGYQYNLHARKMWEMKLADAKDLIELQLAKLNLVVKATKIALWDMEVIHDDPVNPNNAFFWSDEFRHMLGYTDENDFPNVLGSWSALLHPDDKGNTLNAFAEHLFDRTGNTPFDVEFRLMRKTGEYAFYRASGECLRDKDGNALRMAGALMDITENKIILLEKEQQKEAAEAASREKSNFLANMSHELRSPLNVVIGLTNLILGNKNLDAQITENLEKINNAGTSLLEM

SEQ ID NO: 24225 - DNA, 306 bp, Unknown
  Obtained from environmental sample
  misc_feature (1)..(306): n is a, c, g, or t
atggaagcggtaatacttaaccctatttgcccgtttgctttatccaaccggccctttgttcttccttccggtctgccgcttgttataacagtgcctgaacaacaacgttcaggcgtactgttaaccattgacgggcaggatacctgtgatcttaaaagcgcggataaaatttttattaatcagtctgaaatatccgcacagttgatatttgcggacaggcacgcctattattccgcgttaaggtctaaacttttctggtcgggcaatctttgggagcagtctcccctggagcgaaccaatgcttga

SEQ ID NO: 24226 - protein, 101 aa, Unknown
  Obtained from environmental sample
  misc_feature (1)..(101): Xaa is any amino acid
MEAVILNPICPFALSNRPFVLPSGLPLVITVPEQQRSGVLLTIDGQDTCDLKSADKIFINQSEISAQLIFADRHAYYSALRSKLFWSGNLWEQSPLERTNA

SEQ ID NO: 24227 - DNA, 576 bp, Unknown
  Obtained from environmental sample
  misc_feature (1)..(576): n is a, c, g, or t
atgcttgaagagctttccatcagaaattacgcgctcattgattccatcactctttctttccgcccgggatttaatgtcctgtcgggagaaactggagcgggaaaatcaataattgtcggctctttaagttttttattgggcggcaaagcggaaacggatgttatccgcacaggctgtgaggaagccggcgtatcggccgttatttcggttaaaaaaaacaattcggaagttacggactggcttaaagggcgcgatattgaatgtgatgaagatacggttatcgtaagaagaaatatcaaaacttcaggcagaggttccgcctatattcagaatgttcccgtaacaaggcaggatctggcggagttcactgcgtttttatttgatcttcacggacagcataaccatgaatcgctcttaaaaaaagaaaaccaccgccgctatcttgaccgttttgccggtatcgaagacgaagttattgccttttacaaggtttttctggagctgacagacaagcgcnaatctctgggagcgtctttgaaaagcgaccgcgaaagggaagacaggctgaaattttaa

SEQ ID NO: 24228 - protein, 191 aa, Unknown
  Obtained from environmental sample
  DOMAIN (1)...(186): RecF/RecN/SMC N terminal domain
  misc_feature (1)..(191): Xaa is any amino acid
MLEELSIRNYALIDSITLSFRPGFNVLSGETGAGKSIIVGSLSFLLGGKAETDVIRTGCEEAGVSAVISVKKNNSEVTDWLKGRDIECDEDTVIVRRNIKTSGRGSAYIQNVPVTRQDLAEFTAFLFDLHGQHNHESLLKKENHRRYLDRFAGIEDEVIAFYKVFLELTDKRXSLGASLKSDREREDRLKF

SEQ ID NO: 24229 - DNA, 726 bp, Unknown
  Obtained from environmental sample
  misc_feature (1)..(726): n is a, c, g, or t
ttggcgggttttatcaataccgccgcctcctgttttacggagggggaacagtcggccttaagccttacgcgcagggcgaagaacgcccttgacggcgcgtccttggtcgatacgtcgcttggggaaataaacagaagatttgaaaacctgtactatgaagctgaggacatcgcctcggaattccgcacttacaaagagaaccttgcttttgatccgcaaaggctggaagaggtaaatgaacggttggcgttcttgaataaattaaaaaagaagtatgccaaagacagccagccgggaaatgaagaagaggcgatactgtcatacaagacaaacgctcaggcggaaatagaagccctgagcggagcggaagaaaacagggacaagttaaaagaggcgattggagttttggaaaaagcgattgtttcaaaagcgcaagttttaaaggaaaaacgaacggcggccgcagttaaactaagccaactgataacggaaatattaaaaaatcttggaatgcccaacgcccgttttcaagcggctgttttaccgaggaaaaatgaagggcagatttcttacggtccttatggaacggaagatatcgactttttaatttctgcaaatacgggtgagccgcttaaagatttggcaaaaatagcctccggtggggagctttccagggtaatgttggctattaaaacncgcccttttatccgatacgcggcgcgataa

SEQ ID NO: 24230 - protein, 241 aa, Unknown
  Obtained from environmental sample
  misc_feature (1)..(241): Xaa is any amino acid
MAGFINTAASCFTEGEQSALSLTRRAKNALDGASLVDTSLGEINRRFENLYYEAEDIASEFRTYKENLAFDPQRLEEVNERLAFLNKLKKKYAKDSQPGNEEEAILSYKTNAQAEIEALSGAEENRDKLKEAIGVLEKAIVSKAQVLKEKRTAAAVKLSQLITEILKNLGMPNARFQAAVLPRKNEGQISYGPYGTEDIDFLISANTGEPLKDLAKIASGGELSRVMLAIKTRPFIRYAAR

SEQ ID NO: 24231 - DNA, 786 bp, Unknown
  Obtained from environmental sample
  misc_feature (1)..(786): n is a, c, g, or t
atgacatcaacatttcttccaattgagatgggcaaacgggcggtagaggcgcatcagcaggccataaatacaacgggccataatctttccaatatgaaaacccccgggtattccaggcaaagggcggagttcactacctttgatccgatttttcttcccggccttacaagggcggaaacacccggccaaataggccagggggtcattgtggcgcgcatagagcgaattcgggacgagcttctggataaacgcatcattgcccaggccggcggggaaggctactggaaagcccgggatccctatattcgggaactggaaaagatctatctggaagtgggaagtaattctatccgcggtaaaatggaccagttctgggacgcgtggcaggagctttccatttaccccaccgataacgcccccaggatggcggttattgaacggggaaagacccttaccgacggcatccacgaacgttacaaggccctcaaaatgcttcaagaccagactgaagaagatgtccgcattacggtaggccaggtgaatgatctcagccgccagattgcggggcttaacgaggagatccagaggataaaagcccagggggacaatcccaatgacctaatggatcgccgggatctcctgactgataggctttcatccctcattaacataaccgttgaccgccgggaccccgatgagtatatgctccataccaacggtaacattctcgtacagggccgtatcggcaggcaattgacctggtacgaatctaaaccgccgcgataa

SEQ ID NO: 24232 - protein, 261 aa, Unknown
  Obtained from environmental sample
  DOMAIN (8)...(38): Flagella basal body rod protein
  misc_feature (1)..(261): Xaa is any amino acid
MTSTFLPIEMGKRAVEAHQQAINTTGHNLSNMKTPGYSRQRAEFTTFDPIFLPGLTRAETPGQIGQGVIVARIERIRDELLDKRIIAQAGGEGYWKARDPYIRELEKIYLEVGSNSIRGKMDQFWDAWQELSIYPTDNAPRMAVIERGKTLTDGIHERYKALKMLQDQTEEDVRITVGQVNDLSRQIAGLNEEIQRIKAQGDNPNDLMDRRDLLTDRLSSLINITVDRRDPDEYMLHTNGNILVQGRIGRQLTWYESKPPR

SEQ ID NO: 24233 - DNA, 1305 bp, Unknown
  Obtained from environmental sample
  misc_feature (1)..(1305): n is a, c, g, or t
atgctggcatatattgagcacggacagggaaagactccgctgtcggaaaatattaaaagcgaccgctttgtcggcgactggtacgtctgtttcagcagagagttaaaagaggaagttgacgggcttgtaaagaacggcgttaaaaaagaagaagcggaagcgcaggcgccgcttatgaaaaaagcgcaggagttgctccgcaaatgggaagccggagacgtcgaaacaattgagctttggaaaaagatgaacagttgggcgatagagggaatgaaaaaaacttacgagcgtaccggcgtttcatttgacaaatattattttgaaagcgaaacctatacgcttggcaaggatgaggttctaaaaggacttgaaaagggaatttttttccgtcaggaagacggttctgtagcggtggatttaagcgcagaaaatttggataaaaagattttattgcgaagcgacgggacttctatttacattacgcaggattttgggactgcgattaacaggcacaaagactggccgtttgatcaaatgatctatgttgttggttccgaacaacaataccattttaaggtgctttttatccttctggataaattaggttttgaatgggcgaaaaatctgtaccatctttcctacggaatggtaaatcttcccgaaagaaaaatgaaaagccgcgagggaacagtcgttgacgccgatgacttaatcgacagccttcgcgatatggcgttagcggaaatccgcgaaaaggaaagggaaggggaggttggcgatcctgagactgtggcggaaaaaatagccattgccgccctgcattatttccttttacagccaagcccggtaaaagatatgttatttgaccctaaagaatctctctcatttaccggcaatacaggtccgtatttacagtatatgggagcgagaatttcctctatgttaagaagaagcggggagggaacagataacaaggaacaggtaacaggtaacagagaacaaggagaagaattacaaagatgtttttctttgctggtttctgatcctgagtgggaattgattaaaattcttgccgcttattctgacgcggttaaagaagcggcggaaagtttgaatccgtcctgtattaccgcttatctttatgaattgtctaaggcgttcagccgtttttatcacgattgccctattcttaacgctcaagatacttctctttccagggcaaggcttgaattgagccgagccgtgatgatggcgctaaaggcggcgtttcatcttgtttgtataccgtttttagaggtgatgtaa

SEQ ID NO: 24234 - protein, 434 aa, Unknown
  Obtained from environmental sample
  DOMAIN (1)...(290): tRNA synthetases class I (R)
  misc_feature (1)..(434): Xaa is any amino acid
MLAYIEHGQGKTPLSENIKSDRFVGDWYVCFSRELKEEVDGLVKNGVKKEEAEAQAPLMKKAQELLRKWEAGDVETIELWKKMNSWAIEGMKKTYERTGVSFDKYYFESETYTLGKDEVLKGLEKGIFFRQEDGSVAVDLSAENLDKKILLRSDGTSIYITQDFGTAINRHKDWPFDQMIYVVGSEQQYHFKVLFILLDKLGFEWAKNLYHLSYGMVNLPERKMKSREGTVVDADDLIDSLRDMALAEIREKEREGEVGDPETVAEKIAIAALHYFLLQPSPVKDMLFDPKESLSFTGNTGPYLQYMGARISSMLRRSGEGTDNKEQVTGNREQGEELQRCFSLLVSDPEWELIKILAAYSDAVKEAAESLNPSCITAYLYELSKAFSRFYHDCPILNAQDTSLSRARLELSRAVMMALKAAFHLVCIPFLEVM

SEQ ID NO: 24235 - DNA, 510 bp, Unknown
  Obtained from environmental sample
  misc_feature (1)..(510): n is a, c, g, or t
atgccgcaagtcagttttttccacggcgttaccgtatcgctggtcgatgtcggttcccgcccgattgaaattccgtcctcttcgattatcggtatcgtcggtgttttcacccccggagccgatacgaaggcaacgccggataccgcaacgctcattaccacctaccgtgaggcggttgccgccttcggcccggtcgcgcccattaccaaggcgctgaaaggggtctatgagcaatcttccgccgttgtggttgcggtcggggttgaagccgtctatacaaacggagtgctggacacgaacgcgacgatttccgcaatcatcggtggtgtgctgatttccgggcaacgtactggcgcgcaggcgcttctggacggcaaaccgaaattcaacgcgcagccgcgcctcctgtgtgcgccgggttggtcgcacaagcaacccgcccgcgcaacatggcattactgccctgcattaaatactgaccactttaattccaaaaggaaaccaccatga

SEQ ID NO: 24236 - protein, 169 aa, Unknown
  Obtained from environmental sample
  misc_feature (1)..(169): Xaa is any amino acid
MPQVSFFHGVTVSLVDVGSRPIEIPSSSIIGIVGVFTPGADTKATPDTATLITTYREAVAAFGPVAPITKALKGVYEQSSAVVVAVGVEAVYTNGVLDTNATISAIIGGVLISGQRTGAQALLDGKPKFNAQPRLLCAPGWSHKQPARATWHYCPALNTDHFNSKRKPP

SEQ ID NO: 24237 - DNA, 678 bp, Unknown
  Obtained from environmental sample
  misc_feature (1)..(678): n is a, c, g, or t
atggcggcaaagttcaaggccaattataacagcctgccctcctatatgaagctggacggccatgacgataagggcggtatcgacgcctatgtcacggacgctcccccgcttctgacctacaacgactacggcatagcaacttacaccaaggctaaaatggcctacaatatgatcaaagagttgaacaccgcgtggatgtccgatcctctgtatgacgggcggcctctcattgagattatgggcatacagggacacgatataatcggcccgactctggcaagcgacaaccaggccgcggttgaattgtacgccggtcttgtcgacgagggcctgctcagcggcatagcgtattcagagcttgatcttaaattatccgactcaggccccggcggcggttctctggcgcctgctattctgaaccggagacaggccgacgcgctgggatatcagtacgccctgctctttaagatgttcgccaaatacgcgcggtatatagaccatgtaataatatggggtatcgccggttggggctggcagaacagttatgtgctatttaacgagaaacagcaggccaatcagggctattacggaataatggacccggacagattcattaagggccattcgtatctggatgcgtattttagggactggggatcggggacaggaaaggaataa

SEQ ID NO: 24238 - protein, 225 aa, Unknown
  Obtained from environmental sample
  misc_feature (1)..(225): Xaa is any amino acid
MAAKFKANYNSLPSYMKLDGHDDKGGIDAYVTDAPPLLTYNDYGIATYTKAKMAYNMIKELNTAWMSDPLYDGRPLIEIMGIQGHDIIGPTLASDNQAAVELYAGLVDEGLLSGIAYSELDLKLSDSGPGGGSLAPAILNRRQADALGYQYALLFKMFAKYARYIDHVIIWGIAGWGWQNSYVLFNEKQQANQGYYGIMDPDRFIKGHSYLDAYFRDWGSGTGKE

SEQ ID NO: 24239 - DNA, 882 bp, Unknown
  Obtained from environmental sample
  misc_feature (1)..(882): n is a, c, g, or t
gtggtctgctgtaacggcggcggcggtgttaccatcggcaaacctttcaggatttttacaacggcttcagaagccaatagtattgaattatgtgggctgtggaaataccgcgtgggagtaaaaacaggaagccgccctgaagaattctttttgcaccgccagcccatgggcctttttaacgcgatgatagccccgctgttaggctttcccctgcgcggcgtgctgtggtatcaaggcgagtcaaacgacaacaaccccaacgaatacgcgaaactattcaaaaccatgataaccgactggcgcgctaagtaccaatccctagtccccagtccccagtccccattcccctttctttttgttcaactccccatttggggcgagcccgaagacaacaatgaatcgtcttcatgggcaatcatccgtgaagcgcagtgttccgtcctgtccctccccatgaccggaatggccgttgccctggagtttggcgagtggaacgatctgcatccggtaaataagaaaggcgttggtcttaggcttgcccttgccgcggaaaaagtggtatttaacaagcaaaacacctccccagggcccttgttgcgcgctatcagccgtggcaaagggcggctgttgctgacatttgacaactgcggcaaagggcttgccgctgacgaaacgccttatgtcagcgtaattgcggaagggcatatttaccgcaggcaagctgttattgaaagccccgaaagtctttcagttgatatttctgagataaagaaccctgaaaaagtgttatacgcctgggcgcgcaacccccgcgatcggcagttgtacaactcggacggattaccggttattcctttcctgtccccgatccccagtccctaa

SEQ ID NO: 24240 - protein, 293 aa, Unknown
  Obtained from environmental sample
  DOMAIN (38)...(105): Domain of unknown function (DUF303)
  misc_feature (1)..(293): Xaa is any amino acid
MVCCNGGGGVTIGKPFRIFTTASEANSIELCGLWKYRVGVKTGSRPEEFFLHRQPMGLFNAMIAPLLGFPLRGVLWYQGESNDNNPNEYAKLFKTMITDWRAKYQSLVPSPQSPFPFLFVQLPIWGEPEDNNESSSWAIIREAQCSVLSLPMTGMAVALEFGEWNDLHPVNKKGVGLRLALAAEKVVFNKQNTSPGPLLRAISRGKGRLLLTFDNCGKGLAADETPYVSVIAEGHIYRRQAVIESPESLSVDISEIKNPEKVLYAWARNPRDRQLYNSDGLPVIPFLSPIPSP

SEQ ID NO: 24241 - DNA, 1257 bp, Unknown
  Obtained from environmental sample
  misc_feature (1)..(1257): n is a, c, g, or t
ttgacagacagcccaaaagcagattatactaaaaatatggtaaaaagaccggattatcttgccaaattggttggttatagggataaagaactcattaaagtggtaaccggcatccggcgctgcgggaaatccacgcttcttggacagtttcattcatggctgctggaaaacggcgtaaacgaaaaacaaatacagagtcttaactttgaagacatggattattcccatttaagagattacaaggttttatatgatcatatattaaagaattgcgttccccaaaaaatgaattacatttttctggacgagattcagcatgtcaatgaatttcaacggactgttgacagtttgttcattaaaaaaaatatcgatctctatatcaccggttccaatgcctggctgctttcaggcgaattggctacgcttctttccggcagatatgtcgaaatttctatgcttccgctttcttttacggagttcctgtccgcttttgacaaccgttacgatctgtcccaaaaatatctggactatgtggtgaacagttcattcccctattgcctggaactcagaagtaaacaggaacaaatacgcgattaccttggcggaatttataataccatagtattaaaggatattgtccaacgaaaaaaaatcgccgacgtttcattgcttgagcgggtcatccgttatatgttcgataacatcggcaacctttgctccacaaaaaaaatcgcggataccctcgtttcatcgggacgctcaatatcagttaacaccctggaatcgtatctttccgcgttgacagacagctttatcctgtaccgtttggggcgttacgacgtgcatggaaaagaatatctgaaaacagggcacaagtattatcttgccgatttaggactgcgtttttatttactgggaagtaaaatatcggataccggcaggatactggagaacatcgtgtttctggaattattaagacgcggatgggaattgagcatcgggaaaatgaacagttatgagattgattttgtcgcgcagcagggagaaaaacgggagtattatcaggttgctttgagcgtccgtgatgaatcgaatctggaacgtgaaatacgcccgctgcaggcaataaaagacagctatccaaaattccttttaactatggacgatgatcctcccacagctcttgacggtatttacagagataatgtattggactggatgactgaccatataagatataaagaaagggccgtctga

SEQ ID NO: 24242 - protein, 418 aa, Unknown
  Obtained from environmental sample
  DOMAIN (12)...(189): Archaeal ATPase
  misc_feature (1)..(418): Xaa is any amino acid
MTDSPKADYTKNMVKRPDYLAKLVGYRDKELIKVVTGIRRCGKSTLLGQFHSWLLENGVNEKQIQSLNFEDMDYSHLRDYKVLYDHILKNCVPQKMNYIFLDEIQHVNEFQRTVDSLFIKKNIDLYITGSNAWLLSGELATLLSGRYVEISMLPLSFTEFLSAFDNRYDLSQKYLDYVVNSSFPYCLELRSKQEQIRDYLGGIYNTIVLKDIVQRKKIADVSLLERVIRYMFDNIGNLCSTKKIADTLVSSGRSISVNTLESYLSALTDSFILYRLGRYDVHGKEYLKTGHKYYLADLGLRFYLLGSKISDTGRILENIVFLELLRRGWELSIGKMNSYEIDFVAQQGEKREYYQVALSVRDESNLEREIRPLQAIKDSYPKFLLTMDDDPPTALDGIYRDNVLDWMTDHIRYKERAV

SEQ ID NO: 24243 - DNA, 543 bp, Unknown
  Obtained from environmental sample
  misc_feature (1)..(543): n is a, c, g, or t
atgaacatcagtataaatcgtaattttgtaaaatttaattatctggtgttagctgtaattatttcttttgcggccgccggaaatttaacagcgcagaatactcagagagtcgatcctttacgctctccggtcggtgcagctccgctatgggagacgccgattggcgacacaataaggggaatgcctcacctgcaggcaagctctgctgtgcttgtcggtgaaagcggaagcgtaagatctttttttatgagtgggacgcctctgtggaactttgacgcaaggggaaaggcagttccgtatatagcacgctcttatgaagcagcgacttatatttgcaatacgaacggcgtttttatggcgataaacaggataggccgtgaactttggcggcttaatcttgggaagccggtttcacattcccctgttgtaggatgggacggcagagtttttatttttattgattccgtaattacatgccgaacggcttccggcaattctctttggacgctcaatttgggaaaccctgtcgcttttctcccatga

SEQ ID NO: 24244 - protein, 180 aa, Unknown
  Obtained from environmental sample
  SIGNAL (1)...(26)
  misc_feature (1)..(180): Xaa is any amino acid
MNISINRNFVKFNYLVLAVIISFAAAGNLTAQNTQRVDPLRSPVGAAPLWETPIGDTIRGMPHLQASSAVLVGESGSVRSFFMSGTPLWNFDARGKAVPYIARSYEAATYICNTNGVFMAINRIGRELWRLNLGKPVSHSPVVGWDGRVFIFIDSVITCRTASGNSLWTLNLGNPVAFLP

SEQ ID NO: 24245 - DNA, 738 bp, Unknown
  Obtained from environmental sample
  misc_feature (1)..(738): n is a, c, g, or t
atgggagatagctggtcgctgacctggagggtcatggatgcccaatactggggcttgccccagcgtcgccgccgcatctaccttgtcgcagattttacaggcagaggtgcaggggaaatactttttaagcaagacggcaaagcaggggattttgagaagggcaaaaatgaggggaaaggaattgccggaaacattgaaaacagcgttagagttgccggcttcaacagatggagaagtataaaaggttcattggaatataaagaaaatagtgcgccttgcatacaagctactatgccgcttaatgttgtaacacaatacaatgttgataaaggcattgatcaatacgctgtagatattggttattctactgaccgaattcaaatgaacgctcaatcatctgtaacattgagggcaaatagcgggggtaatggtgcaaatacagggctgtattttttacctgtaaccaattatcaagatacaataggctctttatgtgcaagggacagtaaaggcattggcaatcaatacatcgatgaagataaatgtatctgtaccagtaaatatgaagtacggagactaactcccctagagtgtgaacggttgcagggttttcccgatgggtggacagaatacggatatgacggaaagctaatctctgacaatcaaaggtataaggcattgggaaacagcgtagctattccatgtgttgaatttgtgctttctggatgtataaattaa

SEQ ID NO: 24246 - protein, 245 aa, Unknown
  Obtained from environmental sample
  misc_feature (1)..(245): Xaa is any amino acid
MGDSWSLTWRVMDAQYWGLPQRRRRIYLVADFTGRGAGEILFKQDGKAGDFEKGKNEGKGIAGNIENSVRVAGFNRWRSIKGSLEYKENSAPCIQATMPLNVVTQYNVDKGIDQYAVDIGYSTDRIQMNAQSSVTLRANSGGNGANTGLYFLPVTNYQDTIGSLCARDSKGIGNQYIDEDKCICTSKYEVRRLTPLECERLQGFPDGWTEYGYDGKLISDNQRYKALGNSVAIPCVEFVLSGCIN

SEQ ID NO: 24247 - DNA, 924 bp, Unknown
  Obtained from environmental sample
  misc_feature (1)..(924): n is a, c, g, or t
atgaaagccgccctcgtcggagatcatgaaaaagccattaatatactcaactccacagaagagcagttgaatcaaacaaaatcgcttgttttcaggatgcgtgatttgtcggccttcgtggtgaatagagcaagccacaacgcggaagttaccgccgaccagtcaaaaacgatgctggggattactaccgccgcttccgttgttgtttcaattttattggctttgctgattgcctcgcttatcgccaacccgataaaagtcatgacggccgtagcgaataatgtcgcgaaaggcaatcttgacgtaaatatcgacacgtcatctaaagacgaaacaggagagttggcaaagagtttcgcggatatcgtaaacgtcgtcaacctgcttaccacagaactgaaaaatttaagcaaagacataaaaaccgacggcgacacggacgtgaaattggatgccgcccatttctcgggcgcttacagcgatgttgtcgaaagcataaatactttcaccgccacccttcttgacgcccagaaatcggccatgctcaccgtgtctaccatgtttgagtcaaacccccaaatcaacttattgtttgacgacaaacttaacctaatcgactgcaatcccgaagcggttagatttctgcgtttcaaaacaaaagaagaaatgctggacggttttcacgaccgcgtgagcaaaaacattcctaaaatcagatccgatggactgcccacgatgtctttgagtgaacagttaaaggtagccgcacaggaaggcaaagccaatttggagacagagcttaatttggaagacggcattcgcagactggtcgtaaatttcagaaagataccgtataagggcagttttgccatagtcggctatgtgttcaatataaccgaaatctttcagcgggaaatacagtag

SEQ ID NO: 24248 - protein, 307 aa, Unknown
  Obtained from environmental sample
  DOMAIN (59)...(128): HAMP domain
  misc_feature (1)..(307): Xaa is any amino acid
MKAALVGDHEKAINILNSTEEQLNQTKSLVFRMRDLSAFVVNRASHNAEVTADQSKTMLGITTAASVVVSILLALLIASLIANPIKVMTAVANNVAKGNLDVNIDTSSKDETGELAKSFADIVNVVNLLTTELKNLSKDIKTDGDTDVKLDAAHFSGAYSDVVESINTFTATLLDAQKSAMLTVSTMFESNPQINLLFDDKLNLIDCNPEAVRFLRFKTKEEMLDGFHDRVSKNIPKIRSDGLPTMSLSEQLKVAAQEGKANLETELNLEDGIRRLVVNFRKIPYKGSFAIVGYVFNITEIFQREIQ

SEQ ID NO: 24249 - DNA, 864 bp, Unknown
  Obtained from environmental sample
  misc_feature (1)..(864): n is a, c, g, or t
ttgctgaaagcgggctggacggcggcaggcgggcggagaccctggcctttgaggactttaccgcgctggcaaaagttttggagtcctgtcaatgacaaaaatatatactttagcggcacaggtaacagtttatggtcggcaaaaaaaatagcgcatataatcggcgaaccttgcgaattgcataatatcggcattgaggctgaaaaagacgaaattattattgaagcgcaggcggtgataattgtttatccttcgtatgcctatggactgccgctgatagtccgccgctttgtaaaggcggctgtttttaatacgcaatatctggcggcgtttgtaacttatggctccgatcccggcggctcacaggcggaattaagcgggttattaaaaaagaaaaagacaggcccgctttactttgggaaaattcccgcaatggaaaattatattcccttcttcggcccgcccaaagaagaacaaatcgcgaaacgcgccgccatgcaggaagaagcgaccgggaaagccgcgctttgcgtgattgaaaggcggacaaacaaaattttccctttccgtcccctgtctttgattatttcgttccttttttcgcttggagtaaaaatattttacaggcattacaaggtaagcggcaaatgtaacggctgcggcgtctgcgaaaaagtttgccctgtagcggcaattaaaatgaaggaaaagcgccccgtattcagcggcaaatgtgaaaattgcgtggcctgtatcgacatctgcccgtcacgcgccatcaagttcggacgcgcaagattcgacacccgtggatattgccaccccgatatcagtattagtgaactcggcagagggcataattaa

SEQ ID NO: 24250 - protein, 287 aa, Unknown
  Obtained from environmental sample
  DOMAIN (238)...(261): 4Fe-4S binding domain
  misc_feature (1)..(287): Xaa is any amino acid
MLKAGWTAAGGRRPWPLRTLPRWQKFWSPVNDKNIYFSGTGNSLWSAKKIAHIIGEPCELHNIGIEAEKDEIIIEAQAVIIVYPSYAYGLPLIVRRFVKAAVFNTQYLAAFVTYGSDPGGSQAELSGLLKKKKTGPLYFGKIPAMENYIPFFGPPKEEQIAKRAAMQEEATGKAALCVIERRTNKIFPFRPLSLIISFLFSLGVKIFYRHYKVSGKCNGCGVCEKVCPVAAIKMKEKRPVFSGKCENCVACIDICPSRAIKFGRARFDTRGYCHPDISISELGRGHN

SEQ ID NO: 24251 - DNA, 546 bp, Unknown
  Obtained from environmental sample
  misc_feature (1)..(546): n is a, c, g, or t
gtgctaaaaacctggcatgaccagacccctgcccaatatctttttggaaacctgccttacaatatagccgcaacgctgcttgctgaccttatcgttaagaggcgttttttcaggcgggtggttgttacagtccagcgggaagtcgccctgcgtatggcggcaggcgtgggaacgtccaattactcctctttttccgttctatgcgtttcggcttaccgtgtaaaaccgctaatggtaattaaaagctcttctttttatccacagcccaatgtggactcccaggctgtcctcatggaactgcgcgatgacgccgaaaaccgtatgcttccgtcatgtttccaccccctgcttcgcgccctgttttcaagcagaaggaaaacgattaaaaataaccttgccgccttccttgcttccggggggaaaaactccgagtctgcgttagctgcaatttttgctgaaagcgggctggacggcggcaggcgggcggagaccctggcctttgaggactttaccgcgctggcaaaagttttggagtcctgtcaatga

SEQ ID NO: 24252 - protein, 181 aa, Unknown
  Obtained from environmental sample
  misc_feature (1)..(181): Xaa is any amino acid
MLKTWHDQTPAQYLFGNLPYNIAATLLADLIVKRRFFRRVVVTVQREVALRMAAGVGTSNYSSFSVLCVSAYRVKPLMVIKSSSFYPQPNVDSQAVLMELRDDAENRMLPSCFHPLLRALFSSRRKTIKNNLAAFLASGGKNSESALAAIFAESGLDGGRRAETLAFEDFTALAKVLESCQ

SEQ ID NO: 24253 - DNA, 471 bp, Unknown
  Obtained from environmental sample
  misc_feature (1)..(471): n is a, c, g, or t
ttgttgantcgatcacttaaggctttgattgagaacaagatctttttgtcctctatatccagtctttttacggcacaactgcttaaaagcattctatatttactaaaacgccggaaaaaaaggtcacgggaactggttgagattcttatctggcgtacgggcggaatgccttccagccatgccgcgctggtttcttctgtttgcacctctatcgcctttgtaagaggtattgcttcggatctgtttattttttcgttctggtttgctttggttgttttacgggacgcgatgggagtcagaaggtccgcgggtcttttggccaaggctttgaataatctgggaagacaggcggcggaaaaaacagggctggaatttcattcagtaaaggaaatccaggggcatactcccctggaagtggtagtaggggcctctttggggataatcatagcggccggaatcaacctgctttga

SEQ ID NO: 24254 - protein, 156 aa, Unknown
  Obtained from environmental sample
  DOMAIN (7)...(153): Divergent PAP2 family
  misc_feature (1)..(156): Xaa is any amino acid
MLXRSLKALIENKIFLSSISSLFTAQLLKSILYLLKRRKKRSRELVEILIWRTGGMPSSHAALVSSVCTSIAFVRGIASDLFIFSFWFALVVLRDAMGVRRSAGLLAKALNNLGRQAAEKTGLEFHSVKEIQGHTPLEVVVGASLGIIIAAGINLL

SEQ ID NO: 24255 - DNA, 729 bp, Unknown
  Obtained from environmental sample
  misc_feature (1)..(729): n is a, c, g, or t
ttgtatatgccaagcgtaataataaccggagctgacagaggattaggactttctctgtgcaaagaatatttgaaccgaggctggatagtttttgcgggaaaatatttagatgattattgtttgctggatgacgaggcgaaaaagaactccaacatgcatatagttaaattggacatgggctgcgcggacagcatagccgccgtaaaggatcacttgcttaatgtaacggattctctggatatgctaatctccaatgcggcgttaatgggtaatgtacaatgtaatttatatgagcctcctatgaatctggaagcggtatggaattcatttagagtcaatgccttgggtcctatttgtcttgtagaaaatcttttaccgctgttggaacggggaaatatgaaacggctttgctttgtatcaagcgaagtgtcatgcattgtgttgatgaaacatcgaggcgacagcccatacccgtatcccatgagcaaagcgtcactcaacatgggcgtgcgaatactgcacaaccaattatattcacagggttacactttccgcctgttccatcccggatggatgaaacgtcgtatgcaggatggatcactgtccgaagaagctctatatgatcctgattatatcggcgatatagccgcaaaatattttgaaacaccgttacgtgacgaacaccgtcttgtgatggtagattattcaggctacgaatggacatattga

SEQ ID NO: 24256 - protein, 242 aa, Unknown
  Obtained from environmental sample
  misc_feature (1)..(242): Xaa is any amino acid
MYMPSVIITGADRGLGLSLCKEYLNRGWIVFAGKYLDDYCLLDDEAKKNSNMHIVKLDMGCADSIAAVKDHLLNVTDSLDMLISNAALMGNVQCNLYEPPMNLEAVWNSFRVNALGPICLVENLLPLLERGNMKRLCFVSSEVSCIVLMKHRGDSPYPYPMSKASLNMGVRILHNQLYSQGYTFRLFHPGWMKRRMQDGSLSEEALYDPDYIGDIAAKYFETPLRDEHRLVMVDYSGYEWTY

SEQ ID NO: 24257 - DNA, 588 bp, Unknown
  Obtained from environmental sample
  misc_feature (1)..(588): n is a, c, g, or t
gtgatttcagaagtttttgcttctccttctttgcaggtaggttttgcggcgcgctcaatgaagtcggcggctttcgacactaacgaacaaattgcggaaatggtgctggctcaccagctttcgaccggtgcgctttgggaggatatccgcatgaagggcggcgcttacggcgcgtttgcgaccagcgacagccttgaaaactgcgtctcccttgcgacataccgcgaccccaacccaatgcgctcgcttgaaactttttccgcaatattgaaaaacagcgcgaacggaaaatgcgacgaggacgctcttgaaaaaaacatcatcgggtgctacgcgaaggagacgcgcccaaggacaagcgccgaaaacgggcttgttgatttttaccgattcctgtgcgggatagaggatagttaccgcaagagaaggctggaaaggcttgtttcaatttccacttcggatattcaagcggctttttcggcgcttgggaaaagggagacgacaggctctgtaattatcgcggggacaaaagccgcggaacaggcggcaaaggcgctaggaacggaagttaagacattgccggtgtaa

SEQ ID NO: 24258 - protein, 195 aa, Unknown
  Obtained from environmental sample
  misc_feature (1)..(195): Xaa is any amino acid
MISEVFASPSLQVGFAARSMKSAAFDTNEQIAEMVLAHQLSTGALWEDIRMKGGAYGAFATSDSLENCVSLATYRDPNPMRSLETFSAILKNSANGKCDEDALEKNIIGCYAKETRPRTSAENGLVDFYRFLCGIEDSYRKRRLERLVSISTSDIQAAFSALGKRETTGSVIIAGTKAAEQAAKALGTEVKTLPV

SEQ ID NO: 24259 - DNA, 957 bp, Unknown
  Obtained from environmental sample
  misc_feature (1)..(957): n is a, c, g, or t
atgacagattggccgagagggcgtagcggcgatatacatgaaatggctaaaaagatagaagaacttatcatggatgtgtttaacaagcttgttaccgaaggcataccgcccgaggagacggaagccgcccttttgtccatggaattctcgcagagggaaatccgccgttcgggagggccgttttcacttgtctggatgcgccgttctctgcgttcgtggctgcacggatgcaagccctgggagagtttgcttcttctgccttcgatgaagaagataaaggaaaaccttgccgccgataaacgctattttgagaaactgataaaaaaatattttctggataacccccaccgcgcccttgttgttcttgagccaaaggaagatttcctgcagaagcaggacgaagaacttttgaacaagcttgccggtatcgaaaaaaacatgagcaaggaagagcgtaataaaattatcgaaaaatcaaaacagcttgagaagacacaaagcgaagccgacagtcctcaggcgcttgccacaattccgcatctttcacgaagcgatcttgcggttgaaaacgacattgttcaccgccgccacgaggatctgggcggggtaccggccttatgccacgagctttacacaaacggcattacatacgcggacttagcgttccctgtagaccttttatcagatgaagattatctgtggcttccgtttttttccagggcgattgtttctgtcggccttcccggaatggattacggcgaagtgtcaagcttgctggcgcgcacggcaggcggctttaacgcggtattgcacacgggttccgccgccgcgggtacggaaaagtttttgaaaaccgcatcgggtcttcttgacctgtcggggcgcgactggcttatctaccgcttaaagtgccttgatgaaaaattgcgccgtctttgnatcttgtcctgcgcctga

SEQ ID NO: 24260 - protein, 318 aa, Unknown
  Obtained from environmental sample
  DOMAIN (122)...(312): Peptidase M16C associated
  misc_feature (1)..(318): Xaa is any amino acid
MTDWPRGRSGDIHEMAKKIEELIMDVFNKLVTEGIPPEETEAALLSMEFSQREIRRSGGPFSLVWMRRSLRSWLHGCKPWESLLLLPSMKKIKENLAADKRYFEKLIKKYFLDNPHRALVVLEPKEDFLQKQDEELLNKLAGIEKNMSKEERNKIIEKSKQLEKTQSEADSPQALATIPHLSRSDLAVENDIVHRRHEDLGGVPALCHELYTNGITYADLAFPVDLLSDEDYLWLPFFSRAIVSVGLPGMDYGEVSSLLARTAGGFNAVLHTGSAAAGTEKFLKTASGLLDLSGRDWLIYRLKCLDEKLRRLXILSCA

SEQ ID NO: 24261 - DNA, 606 bp, Unknown
  Obtained from environmental sample
  misc_feature (1)..(606): n is a, c, g, or t
ttgaatcgttccgcggggacggcttccttacgaccatcgtgcgcccgtcccacaccttcgggccatacgtggataccctcccccataaacggcagcgggttcaccgtggcggcgcggatattggccggacgcgggttcatcatacacgacaagggagagtctctgtggacgctgacagcctcctccgacttcgcccgcgggctggtcggtctcgtgggaaacaaggcggccgtcggcgagacgttccacatcacgagcgacgaggcgcttagctggaacgacatctacaaggaacttggcgcggcgcttggggtggataatataaatccggttcatatcccaacctcgtttatcgtgaagcgctacccggacgccagagggaaactcttgggcgacaaggcggagaacggggtcttcgacaactcgaagattaagaagttcgttccgggttttaaatgcgaaaagagcttcgctaccgcgattcgggagtcggtcgcttggttcatggagaagccggagcggcgggaaattgatttggatgaggataaacttattgaggcgatcgtgggtgcttgggggtgggagtttaggggggagaatatataa

SEQ ID NO: 24262 - protein, 201 aa, Unknown
  Obtained from environmental sample
  misc_feature (1)..(201): Xaa is any amino acid
MNRSAGTASLRPSCARPTPSGHTWIPSPINGSGFTVAARILAGRGFIIHDKGESLWTLTASSDFARGLVGLVGNKAAVGETFHITSDEALSWNDIYKELGAALGVDNINPVHIPTSFIVKRYPDARGKLLGDKAENGVFDNSKIKKFVPGFKCEKSFATAIRESVAWFMEKPERREIDLDEDKLIEAIVGAWGWEFRGENI

SEQ ID NO: 24263 - DNA, 351 bp, Unknown
  Obtained from environmental sample
  misc_feature (1)..(351): n is a, c, g, or t
gtgcctgtaagggacggacatacggctgcgttttcgcttgaattcgccgccaagaagccgtccttggaagaaataaaatctatttgggcggcttacaagggattgccgcaagaggcggatctgccctttgctcccaaacagccgattatttaccgtgaggaagaaaatcgccctcagcccagcaaagaccgtgacgccgacaaggcgatggcggttgttgtcggccggcttcgtccgtgcaatgtgtttgatatccgctttgcggcggtatcacataacaccgtgcggggagcggcgggcggcggtattttgaatgcggaactattaaagcacaagggatatataagctaa

SEQ ID NO: 24264 - protein, 116 aa, Unknown
  Obtained from environmental sample
  misc_feature (1)..(116): Xaa is any amino acid
MPVRDGHTAAFSLEFAAKKPSLEEIKSIWAAYKGLPQEADLPFAPKQPIIYREEENRPQPSKDRDADKAMAVVVGRLRPCNVFDIRFAAVSHNTVRGAAGGGILNAELLKHKGYIS

SEQ ID NO: 24265 - DNA, 549 bp, Unknown
  Obtained from environmental sample
  misc_feature (1)..(549): n is a, c, g, or t
atgttccagcgttaccttcccacgctgatgctcaagaagcagcagttacagggggagatacggctgaccgagttacgaataaaggaactgcacgcccaaaaagagcgtcttgacgaatcttttaaatcatggataggcgttttcggcgaaaaagacgtgttcaccaaagatatacttaaaataaccaaattgaaaacaggcatggggaacatagccggcgtcgcaattccgattttcgagggcgccgagttcaagatcgccccatacgatcttttcgagacgcccctctggctcgacatggcggttgaaaaaatggcgcaggccctcctccttgatcttgaggctgaaattgtcgaggaacagcgcaagcggctggatcatgagttacgcgtaacgacacagcgggtcaaccttttcgagaaagtgaagatacccgaaacaaagggaagcatcaaaaaaattcaggtttaccttggcgaccagcagacctccgccgtggtacggggaaagatcgccaaatccgggcttgtaaaggcggcaaagcaatga

SEQ ID NO: 24266 - protein, 182 aa, Unknown
  Obtained from environmental sample
  DOMAIN (1)...(177): ATP synthase subunit D
  misc_feature (1)..(182): Xaa is any amino acid
MFQRYLPTLMLKKQQLQGEIRLTELRIKELHAQKERLDESFKSWIGVFGEKDVFTKDILKITKLKTGMGNIAGVAIPIFEGAEFKIAPYDLFETPLWLDMAVEKMAQALLLDLEAEIVEEQRKRLDHELRVTTQRVNLFEKVKIPETKGSIKKIQVYLGDQQTSAVVRGKIAKSGLVKAAKQ

SEQ ID NO: 24267 - DNA, 1566 bp, Unknown
  Obtained from environmental sample
  misc_feature (1)..(1566): n is a, c, g, or t
ttgataaaactgatgaacaacctcgcgtccgagcgtaaaaaccttgaagagagaatcgcctttcttgccagggaacaaacgcgcattatggcatggggcgaatttaatcccgatgatctgaaagccctggtttcagatggcattcctgtctatccttatgaaatttccccggcgtttttcaaaaacatccctcaggatgtacgttatataaagatcaacgaagacaaagccgcggtgcgcctgctggtactggacaaggaaattcccgatgtgccgccgttcaaactgccggaaagctccctttcaaaaaccggggcagaactgcatgaacttacaggcaaactggacgcgcttaatgaaaggataaagaattttgccgaccgccgtcccctgctggataaagaaatggcggagattaacagcaagatcaccttcgagcttgcgagggcggaacttgaaaaagttgacggcattcccgacgagcacagcctttcctgtctttccggctatgtccccgccgaagatatgggtaaaatgaaagtcgcggcggcggaaaacaactgggcgctggcagtccgggatcccggaccggatgattatgtgccgactaaacttagaaacaatccgttggcgaatctgataagcccgctgacaggttttcttgaagttgttcccggatataatgaagtcgatatttcaggctggttcatgctctttttcaccatatatttcggcatgatattcggcgacgcggcttacggagccatcgtccttatcgccgcgataatcgggattttcaagaccctcaaaaaaggagtgccggcagtcctcaaactgatgttcatgctgggactttccaactttgtctggggcgtgattacctgtacctggtttggaatggaagccgagaaactgccgcttgccctgcaggaactttcccttccgctcatctccaacgctacggctgccaaatcggagtatttaagcggaattgtccagcagaacctgatgatcctctgtttctcgctggctctgttgcagctttcgattgggcatatcatcgccattggaaggcataaatccctgaaaatcctcgcggagcttggctcaatcgccatgctggtgggtatgtacggcataattctgatcctcatcgccagcaacgaatcccgcaaccttggggactatatccccatgatgccatgcgcgtacatccttggggtcgggtttgtatttaactttgttttcgccagttacgacggaagcgtaggcaaatcgatccttgagagctgcaaaaatatcatttcgatgatacttggtatcgcgaacgtgttttcggatattatgtcctatatcaggctgtgggcggtaggccttgccggagccgccattgcctcaaccgtaaacgctatggcgggcccaatgctggggcattttatcatgtttattttcggtgtggcccttattgtgtttgggcacggcttaaacctcgtattgaacgcgctttcggtgctggttcacggggtgcgcctgaataccctggaattttcaggccatgtggggtaa

SEQ ID NO: 24268 - protein, 521 aa, Unknown
  Obtained from environmental sample
  DOMAIN (1)...(520): V-type ATPase 116kDa subunit family
  misc_feature (1)..(521): Xaa is any amino acid
MIKLMNNLASERKNLEERIAFLAREQTRIMAWGEFNPDDLKALVSDGIPVYPYEISPAFFKNIPQDVRYIKINEDKAAVRLLVLDKEIPDVPPFKLPESSLSKTGAELHELTGKLDALNERIKNFADRRPLLDKEMAEINSKITFELARAELEKVDGIPDEHSLSCLSGYVPAEDMGKMKVAAAENNWALAVRDPGPDDYVPTKLRNNPLANLISPLTGFLEVVPGYNEVDISGWFMLFFTIYFGMIFGDAAYGAIVLIAAIIGIFKTLKKGVPAVLKLMFMLGLSNFVWGVITCTWFGMEAEKLPLALQELSLPLISNATAAKSEYLSGIVQQNLMILCFSLALLQLSIGHIIAIGRHKSLKILAELGSIAMLVGMYGIILILIASNESRNLGDYIPMMPCAYILGVGFVFNFVFASYDGSVGKSILESCKNIISMILGIANVFSDIMSYIRLWAVGLAGAAIASTVNAMAGPMLGHFIMFIFGVALIVFGHGLNLVLNALSVLVHGVRLNTLEFSGHVG

SEQ ID NO: 24269 - DNA, 951 bp, Unknown
  Obtained from environmental sample
  misc_feature (1)..(951): n is a, c, g, or t
ttgtattacaattatcagataattgatagccggaaaggaggacggatgaagcctgcgccgtttctagttttgttttttttgaccgctttaagcgtcttttctcagggaaaaaagcagcccgagcctgttcccgctccttctcagagcggacaaacaggcgacagggcggaacaggttatgaaagcgctttttgccgcctatccaaggcagatagagcgcgtagaattccgaaacggcgactgggctttatatctgcgcggcaactggttttattacgccggcggcaggatactgcccgaaaatcttttaggaagcgcctcaagcataaacccccagcccttttacaattaccaaaaagaactgcccgcatggaaaacgccgaccgccgaagaagccgccagatacaaagaaatggcaaataacagaaatcagaccccattgcgccgttctcctcatttttttgacacactctggcgtatcaacaaccgcggcgaggcggatcaaagggtaaagacgattcgttttttgggaaaatcggtaaacgtccattatttaattatggagaatcttgcccttgttgaagagcaaattcttgccgcctcaaaagctgacccgcaggttcaggcgtgggtaaacggcattaacacgcttgaaggctggacatggcgggacatcgcgcagactcaatcgcgctcgtttcacgcctacggcattgctattgatcttcttcccaaatcgctgggcggcaaagcaacatactggctttgggccgcggaaaagaagcccgaatggtggaatatttcgtataacgagcgttatcatccgcccgccgccgtgataaaggcttttgagacctacgggtttatctggggcggcaagtggctgtattttgatactatgcattttgagtacaggcccggagattttgatattgggcgggatgacgcctga

SEQ ID NO: 24270 - protein, 316 aa, Unknown
  Obtained from environmental sample
  misc_feature (1)..(316): Xaa is any amino acid
MYYNYQIIDSRKGGRMKPAPFLVLFFLTALSVFSQGKKQPEPVPAPSQSGQTGDRAEQVMKALFAAYPRQIERVEFRNGDWALYLRGNWFYYAGGRILPENLLGSASSINPQPFYNYQKELPAWKTPTAEEAARYKEMANNRNQTPLRRSPHFFDTLWRINNRGEADQRVKTIRFLGKSVNVHYLIMENLALVEEQILAASKADPQVQAWVNGINTLEGWTWRDIAQTQSRSFHAYGIAIDLLPKSLGGKATYWLWAAEKKPEWWNISYNERYHPPAAVIKAFETYGFIWGGKWLYFDTMHFEYRPGDFDIGRDDA

SEQ ID NO: 24271 - DNA, 504 bp, Unknown
  Obtained from environmental sample
  misc_feature (1)..(504): n is a, c, g, or t
atgcgctttgccagcctccgctactttaacgccgcaggctacgatgcaaaagggagaaacacggggctggaacaaaaccctgcgaacctgatcccggtgattatggaagttgctgtgggaatgcggagggaactgccgatttatgggaacgattacgaaacaagggacggtacctgtatcagggactacatccatgtaagcgatctttcctccgcacatgcgactgccttggattacataaacaaaaacgacaggagcctaacagtcaacctgggaagcgaaaccggtactacggtgctggaagttcttgaagtcgccaggcgcattacaggcaggcccataccttcaagcgttacagggcggcgaagtggagacccggcgacacttacagcatcgtcaaaacttgccagggagcttttgagctggaaagcggatcattccagtattgacaccataatccaaagcacctgggaagtgtacaaaaaaaccggaataagggcataa

SEQ ID NO: 24272 - protein, 167 aa, Unknown
  Obtained from environmental sample
  misc_feature (1)..(167): Xaa is any amino acid
MRFASLRYFNAAGYDAKGRNTGLEQNPANLIPVIMEVAVGMRRELPIYGNDYETRDGTCIRDYIHVSDLSSAHATALDYINKNDRSLTVNLGSETGTTVLEVLEVARRITGRPIPSSVTGRRSGDPATLTASSKLARELLSWKADHSSIDTIIQSTWEVYKKTGIRA

SEQ ID NO: 24273 - DNA, 363 bp, Unknown
  Obtained from environmental sample
  misc_feature (1)..(363): n is a, c, g, or t
atgaaagaaaagattttcagttttattgacaattcaaacaagcttgcagtggagcttgaaacagagctctgcaagtatcccgcgatttcaccggattcaggtggcgaaggggaacttgataaatgcgaatttcttgcgtcctggctaaaggcccagggcataacccaactggaacgttacgatgccccagaccaacgcgccaagggcggtgttaggccgaaccttgtggcaaccattcccggaaaggacgatccatcgggtaaaagcccgcgcttttgggtgatgagccacatcgacgtggttccgccaggcgaggcttctttttggaacagcgatccctggaaggcaacggtttaccgctga

SEQ ID NO: 24274 - protein, 120 aa, Unknown
  Obtained from environmental sample
  misc_feature (1)..(120): Xaa is any amino acid
MKEKIFSFIDNSNKLAVELETELCKYPAISPDSGGEGELDKCEFLASWLKAQGITQLERYDAPDQRAKGGVRPNLVATIPGKDDPSGKSPRFWVMSHIDVVPPGEASFWNSDPWKATVYR

SEQ ID NO: 24275 - DNA, 480 bp, Unknown
  Obtained from environmental sample
  misc_feature (1)..(480): n is a, c, g, or t
gtgggttctgcttccgaaagctgtcgccatgttttgcaaaggagaaataaaatgaaggttctggtagcaggcggcggaggaagggaacacgccattataaaagcgcttaaaaaagatacgcgcataaaaaaaatttacgcggctccgggaaacggcggaataagttgtgacgcggaatgtgtgcagataaaagccgttgatatcctcaaaatacctgagttcgccgttcaaaataaaattgactatgttgtagtcgcccccgatgatccgctggttcttggaatggttgacgctcttaatgaaaaaggaatccgctgttttgggccggacaagaaggcggcgcggatagaaggaagcaaagtattcgcaaagaatttaatgaaaaaatacggaatacccaccgcagcttacgaaacattttgcgatccggaaaaagcggttgattatttgaaaagggacggcgcgcctttcccggtttaa

SEQ ID NO: 24276 - protein, 159 aa, Unknown
  Obtained from environmental sample
  DOMAIN (18)...(117): Phosphoribosylglycinamide synthetase, N domain
  misc_feature (1)..(159): Xaa is any amino acid
MGSASESCRHVLQRRNKMKVLVAGGGGREHAIIKALKKDTRIKKIYAAPGNGGISCDAECVQIKAVDILKIPEFAVQNKIDYVVVAPDDPLVLGMVDALNEKGIRCFGPDKKAARIEGSKVFAKNLMKKYGIPTAAYETFCDPEKAVDYLKRDGAPFPV

SEQ ID NO: 24277 - DNA, 714 bp, Unknown
  Obtained from environmental sample
  misc_feature (1)..(714): n is a, c, g, or t
gtgcgcctttgtcaaagcgcaagacgcggacgaagcggtgcgtatcctaaaatcatcaggcgaaggcgccgccgtaataggggaaataaaaagcggtatttccggagtaattatagaatgacgcggatagcggttcttgtaagcggcggcggcactaatcttcaggcattaattgacgcgggaagcgggggagaactgggcggcggcgaactttcgcttgttatctcaactaaggcagcagttcaggcgctagaaagagcgcaaaaagcgggaattaaaacaaagacgatagagagaaagaaatattcgaacccggaagaatatgacgccacattcgcggacacgttatctgaagaaaaaatagatcttgtagtccttgccggatttttatcaatactagggcagaagacgctaaaattatatgaaaacaaaattatcaacgtgcatccggccctgataccgtctttttgcggaaagggattttacggccttcatgttcatgaggaagccctaaaatacggcgtgaaagttacgggggcgacagtccactttgtaaacgacgtgatagacggcggcaaaattattcttcagaaagcggtagacgtgcttcccgatgacacgccggaaacattgcagcagcgcgttatgcgcgaagccgagtgggttctgcttccgaaagctgtcgccatgttttgcaaaggagaaataaaatga

SEQ ID NO: 24278 - protein, 237 aa, Unknown
  Obtained from environmental sample
  DOMAIN (41)...(228): Formyl transferase
  misc_feature (1)..(237): Xaa is any amino acid
MRLCQSARRGRSGAYPKIIRRRRRRNRGNKKRYFRSNYRMTRIAVLVSGGGTNLQALIDAGSGGELGGGELSLVISTKAAVQALERAQKAGIKTKTIERKKYSNPEEYDATFADTLSEEKIDLVVLAGFLSILGQKTLKLYENKIINVHPALIPSFCGKGFYGLHVHEEALKYGVKVTGATVHFVNDVIDGGKIILQKAVDVLPDDTPETLQQRVMREAEWVLLPKAVAMFCKGEIK

SEQ ID NO: 24279 - DNA, 657 bp, Unknown
  Obtained from environmental sample
  misc_feature (1)..(657): n is a, c, g, or t
atggccngntcatcaggatgcgcccttgtaggaggtgaaaccgccgaacatccgggcatgatggcgcaagacgaatacgatattgccggtttctccgtaggcatagttgaaaagtcaaaaatattggatataaattccgtaaaaccgggcgatgtaataatagggcttgcgtcatcgggcgtacattcaaacgctttttcacttacgcggaaagtttttggaatagacaataataaaagcatactggaaaagcgctttgacgaacttggctgtactctggcggaaactcttttaacgcccacaaaaatttatgttaagcctgttctcgcgcttcttgaaaaaatacaggtacgttcgttatgccacataacaggcggcggtttttacgaaaacattccgcgcgccttcggtaaaaatgtgggagcccttattaaaaagagcgctctgaacattccgccgatttttaaccttatagcgtcacagggaaaaatcccggaaagggacatgttcaatacttacaatatgggtataggaatgtgcgcctttgtcaaagcgcaagacgcggacgaagcggtgcgtatcctaaaatcatcaggcgaaggcgccgccgtaataggggaaataaaaagcggtatttccggagtaattatagaatga

SEQ ID NO: 24280 - protein, 218 aa, Unknown
  Obtained from environmental sample
  DOMAIN (48)...(218): AIR synthase related protein, C-terminal domain
  misc_feature (1)..(218): Xaa is any amino acid
MAXSSGCALVGGETAEHPGMMAQDEYDIAGFSVGIVEKSKILDINSVKPGDVIIGLASSGVHSNAFSLTRKVFGIDNNKSILEKRFDELGCTLAETLLTPTKIYVKPVLALLEKIQVRSLCHITGGGFYENIPRAFGKNVGALIKKSALNIPPIFNLIASQGKIPERDMFNTYNMGIGMCAFVKAQDADEAVRILKSSGEGAAVIGEIKSGISGVIIE

SEQ ID NO: 24281 - DNA, 885 bp, Unknown
  Obtained from environmental sample
  misc_feature (1)..(885): n is a, c, g, or t
gtggcttcggcaaaggacagaataaaggggataaatccgctggtgaatgtggtgacgcataacgagatgcttaccagcaagaacgcgctggagctttttgccgactacgacattattgcggacggaaccgataactttcaaacccgctatcttgtaaacgacgcctgcgtatttttgggtaaactcaacgcttacggctcggtgtttcaatttgacgggcaagcgactgttttcggcgcgaaagacggtccctgttaccgctgtctttacccctctccgccgccgccggggcttgtcccgtcttgcgcggagggcggagttatgggcgtacttcccggcattatcggaacaattcaggcggcggagacaattaagctgatagtcggcggagcgaagccgcttatcggccgcttgcttttatttgacgcatggcgcatgacgttccgagaattaaaacttgaaaaaaatcccgactgtccggtatgcgggaaaaatccatccattcatgaattaattgattatgaacaattttgcggtttgaaaaaaaatcaagacagcaaaccaatagatgtaataaccgctattgatttaaaaaaacgccttgataacggagatagaattcaatttattgatatacgcgaaccgcatgaacgcgctattgtaaaatttcctgacgcaaaagtaataccgcttggtcaacttgaaaggcgcatggaagagttagatccgtccgtagacgcagtatttctgtgtaaaatcggtcagcgcagtattttaggaataagagctttgcaggaagccggttataaaggaaaattgctgaatctacaagacggtcttaacgcatgggcaagggacgtagataagaatatgcctgtttattaa

SEQ ID NO: 24282 - protein, 294 aa, Unknown
  Obtained from environmental sample
  DOMAIN (193)...(286): Rhodanese-like domain
  misc_feature (1)..(294): Xaa is any amino acid
MASAKDRIKGINPLVNVVTHNEMLTSKNALELFADYDIIADGTDNFQTRYLVNDACVFLGKLNAYGSVFQFDGQATVFGAKDGPCYRCLYPSPPPPGLVPSCAEGGVMGVLPGIIGTIQAAETIKLIVGGAKPLIGRLLLFDAWRMTFRELKLEKNPDCPVCGKNPSIHELIDYEQFCGLKKNQDSKPIDVITAIDLKKRLDNGDRIQFIDIREPHERAIVKFPDAKVIPLGQLERRMEELDPSVDAVFLCKIGQRSILGIRALQEAGYKGKLLNLQDGLNAWARDVDKNMPVY

SEQ ID NO: 24283 - DNA, 336 bp, Unknown
  Obtained from environmental sample
  misc_feature (1)..(336): n is a, c, g, or t
gtgaggctcaaggccaatggggctaatatagaaatcaacgctcccagcgagggaaccgggtatgagctggcatctatgtcccttatcagaggcggaaaagagccggtacaggcccgacagctttacgactgggttctttcctcccctaacgcacagaggttgtttgtcgatgattggtacctcgtacttgtccagaacggcgccagaagacatcccctggcccttactttagaccaaatcagaaccgtgaatcaggacatggcctgggacggagacgcggctaacaggaagcgccttcttgaccggtggaccgctgagatagaatcgagacgttaa

SEQ ID NO: 24284 - protein, 111 aa, Unknown
  Obtained from environmental sample
  misc_feature (1)..(111): Xaa is any amino acid
MRLKANGANIEINAPSEGTGYELASMSLIRGGKEPVQARQLYDWVLSSPNAQRLFVDDWYLVLVQNGARRHPLALTLDQIRTVNQDMAWDGDAANRKRLLDRWTAEIESRR

SEQ ID NO: 24285 - DNA, 708 bp, Unknown
  Obtained from environmental sample
  misc_feature (1)..(708): n is a, c, g, or t
atgaaaacggcgttgagtatcgcggggtctgattgctcaggcggcgcgggaatacaggcggatctaaaaacgttttcggcgcacggcgtgttcggtatgacggccgttacttcggtcgtcgcggaaaacacgttccgcgtgatcgaatatcagaatattcgtccgggcattatcgaaaaacagattgacgcggtgtttgaagacattcctcccgacgcggtaaaagtcggaatgctttcatgcggccagatcatgacggctgtcgcgggaaaattgctggaatggaaaccgcgcaacgtggttattgatcctgtgatgtacgcgaaaaacggcgccccactgatggaaacggacgctatcagtacgctgattaaagaagtagtgccgttggcggatttgataacgccgaatattcctgaagccgaaaaaatatcgggaatggcggttaaaacgcatgacgctatgcgggaagcggccaagcgtattcactcgatgggatgccgcgccgttgtcgttaaaggcgggcacattgagggagacgcgacggatattttgtttgacggaaagaatttctatgaatacccgtcgccgaggatagacaccaaacacacccacggaacgggatgtactttttcttcggcgattgcttcaaacctcgccctggggctccctgtttacaaagcggtgaaaacgcgaaggcgtatataa

SEQ ID NO: 24286 - protein, 235 aa, Unknown
  Obtained from environmental sample
  DOMAIN (11)...(233): Phosphomethylpyrimidine kinase
  misc_feature (1)..(235): Xaa is any amino acid
MKTALSIAGSDCSGGAGIQADLKTFSAHGVFGMTAVTSVVAENTFRVIEYQNIRPGIIEKQIDAVFEDIPPDAVKVGMLSCGQIMTAVAGKLLEWKPRNVVIDPVMYAKNGAPLMETDAISTLIKEVVPLADLITPNIPEAEKISGMAVKTHDAMREAAKRIHSMGCRAVVVKGGHIEGDATDILFDGKNFYEYPSPRIDTKHTHGTGCTFSSAIASNLALGLPVYKAVKTRRRI

SEQ ID NO: 24287 - DNA, 753 bp, Unknown
  Obtained from environmental sample
  misc_feature (1)..(753): n is a, c, g, or t
atgcgcgaccgcaacggaaacgtgattaccgtctgctcgatggaaaactttgatccggtgggcatacacaccggcgacagcatcgtaatcgcgccagccgttaccctggctgacaaagaataccaaatgctccgccttgccgctttgaatattatccgcgcccttggcgttgaaggcggctgtaacgtccagttcgccctgaaccccgacagcttcgactacgcggtcatcgaagtaaacccgcgcgtttctcgctcttccgcgctcgcgagcaaggcaaccggctaccctatcgcgaaagtggcgacgaaaatcgccgtcggctatacgctggacgaaataataaacgccgtcaccggcagcactttcgcggcgtttgagcccacgattgactatgtagcggtgaaattcccaaaatggccttttgataaattcgtttacgcccataaggagctgggtacacagatgaaagcgaccggcgaagtaatggcgcttgcggacaccttcgaggaagcgcttttaaaagccgtgcgcggcgcggaaatcggccttaacagtctcgacctgccccgcctggcggtaaaatcggacgaggaaattcgcgcccttctccataccgtaaccgacgagcgcctgtttgtgctgtacgaggctattaaacgcggcgtcgacgtggacgagttatatgatataacaaaagttgaccgctggtttttgtatggattggttaatataatgaacaatgaacaatga

SEQ ID NO: 24288 - protein, 250 aa, Unknown
  Obtained from environmental sample
  DOMAIN (200)...(250): Carbamoyl-phosphate synthetase large chain, oligomerisation domain
  misc_feature (1)..(250): Xaa is any amino acid
MRDRNGNVITVCSMENFDPVGIHTGDSIVIAPAVTLADKEYQMLRLAALNIIRALGVEGGCNVQFALNPDSFDYAVIEVNPRVSRSSALASKATGYPIAKVATKIAVGYTLDEIINAVTGSTFAAFEPTIDYVAVKFPKWPFDKFVYAHKELGTQMKATGEVMALADTFEEALLKAVRGAEIGLNSLDLPRLAVKSDEEIRALLHTVTDERLFVLYEAIKRGVDVDELYDITKVDRWFLYGLVNIMNNEQ

SEQ ID NO: 24289 - DNA, 522 bp, Unknown
  Obtained from environmental sample
  misc_feature (1)..(522): n is a, c, g, or t
atgggcgaaagtgacagcccgtttgttgttatttcacgaagcagcgcctcgttagccgcattaccgccgcccgtgccgccaagcgtgaaagcgggacgcacgatgacagaatacccgagttcatcggcgaattttaccgccgtctcaacatcggtggcgattaccgagggaacgcagggctgccttatgctttgcatggtttccttgaatatttgccggtcttcggccttgtcgatggtttcgggcgaggaacccaaaaggcgcacgttcattttttcaagaaaaccgtcgcgggcaagctgcatgcacagcgtaagccccgtttgcccccccaggccggataatatgctgtccggcttttctttttcgataatgcgcttaacggtgggaagggtcagcggctcaatgtatatcttgtcggcgatgttgctgtctgtcattatggttgcggggttggaattgacaaggacaatctcaatcccatcctcgcgcagcatacggcaggcctgcgttcccgcgtag

SEQ ID NO: 24290 - protein, 173 aa, Unknown
  Obtained from environmental sample
  misc_feature (1)..(173): Xaa is any amino acid
MGESDSPFVVISRSSASLAALPPPVPPSVKAGRTMTEYPSSSANFTAVSTSVAITEGTQGCLMLCMVSLNICRSSALSMVSGEEPKRRTFIFSRKPSRASCMHSVSPVCPPRPDNMLSGFSFSIMRLTVGRVSGSMYILSAMLLSVIMVAGLELTRTISIPSSRSIRQACVPA

SEQ ID NO: 24291 - DNA, 375 bp, Unknown
  Obtained from environmental sample
  misc_feature (1)..(375): n is a, c, g, or t
atggcgattttggtcgccactttcgcaatagggtatcctgtcgccttgcttgcgagcgcggaagaacgcgacacgcgcgggttaacctcaataaccgcgtattcaaaactgttaggctcaagcgcaagctggacgttacagccgccctccacttcaagcgccttgatgatgtcaagcgaggcggagcgcagcatctggtattccttgtccgcaagagtgacggcgggagcgataacaatactgtcgcccgtgtgtatgccgacaggatcgaagttttccatcgaacagactgtgattacattgccggcgcgatcgcgcatgacttcaaactcaatttctttccagccggcgattgatttttcaatcagcacctga

SEQ ID NO: 24292 - protein, 124 aa, Unknown
  Obtained from environmental sample
  SIGNAL (1)...(20)
  misc_feature (1)..(124): Xaa is any amino acid
MAILVATFAIGYPVALLASAEERDTRGLTSITAYSKLLGSSASWTLQPPSTSSALMMSSEAERSIWYSLSARVTAGAITILSPVCMPTGSKFSIEQTVITLPARSRMTSNSISFQPAIDFSIST

SEQ ID NO: 24293 - DNA, 600 bp, Unknown
  Obtained from environmental sample
  misc_feature (1)..(600): n is a, c, g, or t
ttgacatttcttgacacaaacaaagtgagttgggtcaattggtctatatccaccaaagaacggaatgatactggtccggagaaaacgtccgctttagtgaaaaacgccggtacaacaggcggctggacgaccgacaaactaacggtatccggcaattatatccgcaacaaactgagagaagcggcacaacgcgaggagggcagcaccgccgcccttgatgcggagcgcactgtccccaacacccaacagccgagcggttcggcaaccatagcgcccgtagccgcccaaccgaacaaattctcagctggccccgtcccgacaaacctgacgaacggcggcgtcaaattcttctggcagggaaaacctgtgacgggcgggtcactgtttatctacgacgccgtgggcaacagcgtaaagagcgtcggtataaacgcgacgtccgtgggcgattcatcgaaacggacaataggctcgtgggacttgacagacgcgaaaggccgtcgggtcacggcgggcagctacttagtgagaggcaagatagtcacgcagaacggcgtcacggtgaatgtctcttcaatcttagtggttagtaatcagtga

SEQ ID NO: 24294 - protein, 199 aa, Unknown
  Obtained from environmental sample
  misc_feature (1)..(199): Xaa is any amino acid
MTFLDTNKVSWVNWSISTKERNDTGPEKTSALVKNAGTTGGWTTDKLTVSGNYIRNKLREAAQREEGSTAALDAERTVPNTQQPSGSATIAPVAAQPNKFSAGPVPTNLTNGGVKFFWQGKPVTGGSLFIYDAVGNSVKSVGINATSVGDSSKRTIGSWDLTDAKGRRVTAGSYLVRGKIVTQNGVTVNVSSILVVSNQ

SEQ ID NO: 24295 - DNA, 396 bp, Unknown
  Obtained from environmental sample
  misc_feature (1)..(396): n is a, c, g, or t
gtggcgtgggagaacgccgtagccggattgacggacacgccggagggcggggcgcggtgccgcgaatgtttcttgctgcggttgacgcgggcggcggaggtctgtagggatatggggtggccggcgttcgggacggtgatgagcgtcagcccgcataaaaggatcgcgatgcttgacgaggcgggaaaaaaggcggcggaggcggttggcggggtacagtatgtgccgtttgattttaagaagaaagacgggttcagaaagagcgtagcgcttagccggcggctggggctttatcggcaggattattgcgggtgccgggttagcttggaggaggcgaaaaaaagggcggccgcgcggggccgcccggaaaatatcgataccgccgctaatcactga

SEQ ID NO: 24296 - protein, 131 aa, Unknown
  Obtained from environmental sample
  DOMAIN (2)...(130): Uncharacterized BCR, COG1636
  misc_feature (1)..(131): Xaa is any amino acid
MAWENAVAGLTDTPEGGARCRECFLLRLTRAAEVCRDMGWPAFGTVMSVSPHKRIAMLDEAGKKAAEAVGGVQYVPFDFKKKDGFRKSVALSRRLGLYRQDYCGCRVSLEEAKKRAAARGRPENIDTAANH

SEQ ID NO: 24297 - DNA, 849 bp, Unknown
  Obtained from environmental sample
  misc_feature (1)..(849): n is a, c, g, or t
atgctctccaattcccaagaaacagaaaaccaacgccacgagatgaacttgaaaactctcgtgtttgtgtgcgtatgcgcaatggcgtttattctcttgattgtaaggcttttgcaattgcaatattttgaatacgaaaacaatatgaaaagagctgaggaaaatcgcattcgcaaggttaatataaaagcaagtcgtgggtacatattagaccgcaacggagtggttttggttcgcaacagaccatcttatcaaatatctctgctatacaacagattgaaaaccaaagaaatgagagattcagttttcaataggcttttaagaataacaaacagcaaaggaacccgtttgctggattcggcctctctcgctttttcttttgaaagagggcggtggcagaaattcaagttccaaaggcttgtggaagatgctccagaagaaatggttgcgctttttgaagaacgctcggaagaattgcccggaattgaaattttagttgaatcgcgcagggactatccttttggtgcgcacggtgcgcatatatttggctataccagcgaaatatccgaaaccgagcttgaacttccagaaaacgaacattatgttatgggagaccgcattggcaaaaaaggtttggagctcagctacgaaaaagaattcagaggacaaaacggttccaaatttatagaggtaaatgcaatggggcgtgaaataggtcctgtggtaggaatgccttttatagaacccatatctggaaatgcccttgtgacaacaatagactggaaaattcagcaaggtccccgagaatgccattccagaggggctaaagggggcagttgttgcgcttaa

SEQ ID NO: 24298 - protein, 282 aa, Unknown
  Obtained from environmental sample
  DOMAIN (61)...(242): Penicillin-binding Protein dimerisation domain
  misc_feature (1)..(282): Xaa is any amino acid
MLSNSQETENQRHEMNLKTLVFVCVCAMAFILLIVRLLQLQYFEYENNMKRAEENRIRKVNIKASRGYILDRNGVVLVRNRPSYQISLLYNRLKTKEMRDSVFNRLLRITNSKGTRLLDSASLAFSFERGRWQKFKFQRLVEDAPEEMVALFEERSEELPGIEILVESRRDYPFGAHGAHIFGYTSEISETELELPENEHYVMGDRIGKKGLELSYEKEFRGQNGSKFIEVNAMGREIGPVVGMPFIEPISGNALVTTIDWKIQQGPRECHSRGAKGGSCCA

SEQ ID NO: 24299 - DNA, 768 bp, Unknown
  Obtained from environmental sample
  misc_feature (1)..(768): n is a, c, g, or t
ttggagccaaaaacattaattgttccgggctttttgttcatagttccattcctcctggttttaaaacagccaaatttaagcacggctttggtttttaccgctatgaccatagtgcaattttactgggctggttttcgcctagtggatttatttttgctcataagcccaattgcaagcgttatattttccgctatttccccgctttactggaacttgctaataataagcgcattttttgtttccataaaattcaaatttccgttgtggataataatttttgtgatggctctagatataggagctggctatgctagccaaatggcttggaattccatgaaggaccatcagcgaagtcgcatactgacatttttagatcccatgcgagaccctaaaggcgagggttatcaagttatacaatcgcaagtggcaataggcagtggcgggatgttcggcaaaggttttggcgaaggttcgcaagtgaatctctcattcttgccagaagaacacacggattttatctttagtgttttaggagagcaattcggctttgtaggcacctttgtggttttggttctgttttttcttttgctttggcgaggcataatgatatgcagattgtacgaaaaccgatttgtcaatttggttgttgccggagcttgcacaattttattcttccacacttttgtaaatgtggctatgactgtaggcttaatgccagttacggggcttcctttgccatttttgtcttatggtggttcatttgtttaa

SEQ ID NO: 24300 - protein, 255 aa, Unknown
  Obtained from environmental sample
  DOMAIN (3)...(253): Cell cycle protein
  misc_feature (1)..(255): Xaa is any amino acid
MEPKTLIVPGFLFIVPFLLVLKQPNLSTALVFTAMTIVQFYWAGFRLVDLFLLISPIASVIFSAISPLYWNLLIISAFFVSIKFKFPLWIIIFVMALDIGAGYASQMAWNSMKDHQRSRILTFLDPMRDPKGEGYQVIQSQVAIGSGGMFGKGFGEGSQVNLSFLPEEHTDFIFSVLGEQFGFVGTFVVLVLFFLLLWRGIMICRLYENRFVNLVVAGACTILFFHTFVNVAMTVGLMPVTGLPLPFLSYGGSFV

SEQ ID NO: 24301 - DNA, 501 bp, Unknown
  Obtained from environmental sample
  misc_feature (1)..(501): n is a, c, g, or t
gtgctgatgacgggctttaccgacatcgaagcattaacggaaacttttaagcggggcaacgtttgtttccacagccgcagccggaacaagctctggatgaagggtgagacttccggaagcgttctgaaactagtcaggctgcgcgccgattgcgacagggacgcgctcctcgccgttgccgaacctgccggccctgtttgccatacaggggcgtggtcgtgttttgaaacgggtaaaaaatttacctgggaatttttgcagagcataattacagaccgcttccggaatccgccgccgggatcgtataccgcgacgcttgacgacaaacttgtgagggaaaaactgatggaagaggcggaagaagtgtgtacggcaaaaacacacgacgaagttgtctgggaagccgccgatgttctttattttactaccgtgctgataacccgcgccgggctcaccgttcaggaagttttggacgagcttgaccgcaggcacaaaaagtga

SEQ ID NO: 24302 - protein, 166 aa, Unknown
  Obtained from environmental sample
  DOMAIN (83)...(165): Phosphoribosyl-ATP pyrophosphohydrolase
  misc_feature (1)..(166): Xaa is any amino acid
MLMTGFTDIEALTETFKRGNVCFHSRSRNKLWMKGETSGSVLKLVRLRADCDRDALLAVAEPAGPVCHTGAWSCFETGKKFTWEFLQSIITDRFRNPPPGSYTATLDDKLVREKLMEEAEEVCTAKTHDEVVWEAADVLYFTTVLITRAGLTVQEVLDELDRRHKK

SEQ ID NO: 24303 - DNA, 741 bp, Unknown
  Obtained from environmental sample
  misc_feature (1)..(741): n is a, c, g, or t
atgatggcgagacggcggctcttcccttcggaagaaagtccggttatactcaccgcccattatgaccgtgtgccggacagccccggagccaatgacaacagcgccgctgtttttcaactgcttaaaaccgctctgcggctgggcgagcaaaatgttgataattggataataatttttaccgataaagaagaactgcagcatggcgaggggattcaaaaacagggatcgttcagtctggcaaaaaaactccgcgctcttgggctgagcaacgcccggatttttaattttgacgcctgcggagccggcgatacttttgtgttttccagcaccgttaactatttattgaaaaaaaacaggcgttcgggattcctgcgcgcaagccagacgatcaacaatttgagggaaaaagcccttaataccgcccgtttcctccatttcaacaaaacattgctggcccctactcccttttccgatgacgccggttttttacagggaggtatccccgtccagaccattaccatgctgcccgctattgaagcggccccttttgaattgctgctgactgataaacctgattttgccgattcactcatctccggtccaatgaatgatcccgccgtccgcggaattgtccccgaaacatggcggcgcctgaacagcccggcggacactcacttacacctaactcctgagtattttgaacgggtagtccgtttcgcggcggaactctgccggaactga

SEQ ID NO: 24304 - protein, 246 aa, Unknown
  Obtained from environmental sample
  DOMAIN (13)...(187): Peptidase family M28
  misc_feature (1)..(246): Xaa is any amino acid
MMARRRLFPSEESPVILTAHYDRVPDSPGANDNSAAVFQLLKTALRLGEQNVDNWIIIFTDKEELQHGEGIQKQGSFSLAKKLRALGLSNARIFNFDACGAGDTFVFSSTVNYLLKKNRRSGFLRASQTINNLREKALNTARFLHFNKTLLAPTPFSDDAGFLQGGIPVQTITMLPAIEAAPFELLLTDKPDFADSLISGPMNDPAVRGIVPETWRRLNSPADTHLHLTPEYFERVVRFAAELCRN

SEQ ID NO: 24305 - DNA, 864 bp, Unknown
  Obtained from environmental sample
  misc_feature (1)..(864): n is a, c, g, or t
gtgggaaaaggtatcaatccttttcccattataatttcaaaagccccgaaaatatccgccgttgttgatatttataaatccgactatagtataagccgctctaacctatcattaaaatctctaccggacaataggaaatctccaaattcccacaccctaatattcctaaaaccgtttaaaatcaaatcaaaaccgattggcataatttatatttgcaatttgttttacgcgcccatttcaaaatttaaggctttaggagaaaccattattatgatttacggttacattcgtgttagtaccgataaacagagtgttgagaatcagaggtttgagattaacggtttttgtaagaagaacgtgatggcggttgataggtggattgaggagataatatctggaagtaagacgattcgtgagcggaagctcggtaagcttatcaagaagatgaagcgccatgatattttgatttgctcggaattgtcgcggcttgggcgaaacttgcttatgattatgagtattctcaatgaatgcatgaaccgtgatattcaggtttggacgattaaggacaattaccgattaggcagcgatataaactcaaaggtcctcgctttcgcgttcggtctttcggcggagatagagcgtaacctcatatcacagcgtacaaaggaggctcttgcccgtaagcgggcggaggggacggtattggggcgtcccaggggtagtagatcgaagagtaagaagttgaccggcagggaggatgaaatcaaaggtttgttgaatagaaggatgtcaacaacaaggatagctcgaatgttgggggtgcatcggttgacgttacagtcatttcttagtgatatgttgtag

SEQ ID NO: 24306 - protein, 287 aa, Unknown
  Obtained from environmental sample
  DOMAIN (92)...(234): Resolvase, N terminal domain
  misc_feature (1)..(287): Xaa is any amino acid
MGKGINPFPIIISKAPKISAVVDIYKSDYSISRSNLSLKSLPDNRKSPNSHTLIFLKPFKIKSKPIGIIYICNLFYAPISKFKALGETIIMIYGYIRVSTDKQSVENQRFEINGFCKKNVMAVDRWIEEIISGSKTIRERKLGKLIKKMKRHDILICSELSRLGRNLLMIMSILNECMNRDIQVWTIKDNYRLGSDINSKVLAFAFGLSAEIERNLISQRTKEALARKRAEGTVLGRPRGSRSKSKKLTGREDEIKGLLNRRMSTTRIARMLGVHRLTLQSFLSDML

SEQ ID NO: 24307 - DNA, 330 bp, Unknown
  Obtained from environmental sample
  misc_feature (1)..(330): n is a, c, g, or t
atgcaaaagaattttggaagtatggagaaaaaaaatatgatctccattgaaaaaaaacacttagatatgttgaagcatattttgaatttgcatattcccggtattgaagtcagagcttttggtagcagagtcaagggaaccagcagaaaatactccgatttggatttggcaattgtcggcaatggcaaaatggataatcgttctttatggaaattaaaaaacacccttatggaatctagactgccgtttagggtagatgttttagattataactcaatctcggaaaatttcaggaaaattatcgatgacgaatacgaggttataatttaa

SEQ ID NO: 24308 - protein, 109 aa, Unknown
  Obtained from environmental sample
  DOMAIN (13)...(109): Nucleotidyltransferase domain
  misc_feature (1)..(109): Xaa is any amino acid
MQKNFGSMEKKNMISIEKKHLDMLKHILNLHIPGIEVRAFGSRVKGTSRKYSDLDLAIVGNGKMDNRSLWKLKNTLMESRLPFRVDVLDYNSISENFRKIIDDEYEVII

SEQ ID NO: 24309 - DNA, 1404 bp, Unknown
  Obtained from environmental sample
  misc_feature (1)..(1404): n is a, c, g, or t
atgcgtatcgttattgccggcgccggaactaccggctcacagttagcaaaattcctcattcaggaaaaacatgacgtatctcttatagaagcaaacgaagatcgcgccaagcatatatccaaccgctatgactgtatggttattcacaacaacgccaacaatgtaaaagcgttattggaagcgggaatagaaaaagccgacgcgctgatctgcgttacaggtttcgatgaagttaacatgatcatctgcggtcttgcctcttcacttgtaagcaaagataaaaaattgataaagatcgccagagtgtataacgatgattatatgcagcttatccggccggaaggcggacggcttttgggtatcgatcattttattcatccgggcatggaagccgcgtgctcgataatcaaggcgattgaacacggcgtaataggggatatcgtctctttttcagacacgccttatgaactcggttcaattgaaattgttaaaggcagcgcgatggacggccttgtccttaaggattaccgaaaacttgtaaagcacgaaagccttgtaactttggtagaacacgacaacgatattatgcttccgtccggtacaaccgaattgatacacggagaccgtattcatgttcttgcggataacaaaaacctgccggaaatttacaagctggcgggagacactcaaaagcctatccgcaaaatcggcattgcgggaggcagtaaagtaggcatgttgatcgcggaaggattgctggaaaaagacagtataatttataaaagcataaaaaataaaaattcaaaaaaccacagcgtggttttttttgatcatgattccaaaagatgctataaacttgccgcccgcttcccttccgctctggttctgcatgaggatatttccgacgaaagcttcgcttcctacgatgaattaaacggcattgactgccttattaccgcgacatccaacgatgaactgaacatcattacggcggtatacatgaaatccaaaggcattaaccgtactatagccattgttaacggttccggccacgctgcaatggcgcgtcacttaggcgttgacgtggtaatccctatgatgtccgtagtggtagattcaattctttctcatttaatgggaagcaatgttaaagaagtacattctttgggatacgaaaacattgatttaattgaggctgaaatcgaaaagaacgcgcctgtcattgacaagccgatttcggcttttaaactttcggagggcggccttctgctccttgttaacagggacggggtatcttttattccgaagggcgattatgtttttaaggaaggcgaccgcattgtcgtaattgccagcgtggacagccattccgagatagaaagatattggcgttcgaagcggtaa

SEQ ID NO: 24310 - protein, 467 aa, Unknown
  Obtained from environmental sample
  DOMAIN (157)...(227): TrkA-C domain
  misc_feature (1)..(467): Xaa is any amino acid
MRIVIAGAGTTGSQLAKFLIQEKHDVSLIEANEDRAKHISNRYDCMVIHNNANNVKALLEAGIEKADALICVTGFDEVNMIICGLASSLVSKDKKLIKIARVYNDDYMQLIRPEGGRLLGIDHFIHPGMEAACSIIKAIEHGVIGDIVSFSDTPYELGSIEIVKGSAMDGLVLKDYRKLVKHESLVTLVEHDNDIMLPSGTTELIHGDRIHVLADNKNLPEIYKLAGDTQKPIRKIGIAGGSKVGMLIAEGLLEKDSIIYKSIKNKNSKNHSVVFFDHDSKRCYKLAARFPSALVLHEDISDESFASYDELNGIDCLITATSNDELNIITAVYMKSKGINRTIAIVNGSGHAAMARHLGVDVVIPMMSVVVDSILSHLMGSNVKEVHSLGYENIDLIEAEIEKNAPVIDKPISAFKLSEGGLLLLVNRDGVSFIPKGDYVFKEGDRIVVIASVDSHSEIERYWRSKR

SEQ ID NO: 24311 - DNA, 573 bp, Unknown
  Obtained from environmental sample
  misc_feature (1)..(573): n is a, c, g, or t
ttggacaaaccgacgagtggcgaatatattttagatggcaagccaacttacaagctaaaaaaagatgcgcttgcaacgctcagaaacagaaaaataggttttgtgtttcagagttttaaccttttgccgcgcacaagcgcgcttgagcaagttgaattgcccctgctctacaattcagaaatttcctccaaaaaacgcagaactatggcaatgtcttgtttagaaagagtggggcttgctaatcgcagcgaccatttgccaagccagctctccggtgggcagcagcagagagtagccatagcgcgcgcgcttgtgaataaccccgttatgattttggcagatgaagcaacgggagcattagatgagcgcacaggctacgaaattatggttttgtttcaggaattgaaccaacaaggaaaaacaatagtttttgttacccacaatccagaaataacggaatttagcaatcgtacaataaaattgaaagacggaagactttttagtgatactgccacagaaaatataaaatctgccgcagaagccttggcaaagttgcctgcgcaacaggattag

SEQ ID NO: 24312 - protein, 190 aa, Unknown
  Obtained from environmental sample
  DOMAIN (4)...(164): ABC transporter
  misc_feature (1)..(190): Xaa is any amino acid
MDKPTSGEYILDGKPTYKLKKDALATLRNRKIGFVFQSFNLLPRTSALEQVELPLLYNSEISSKKRRTMAMSCLERVGLANRSDHLPSQLSGGQQQRVAIARALVNNPVMILADEATGALDERTGYEIMVLFQELNQQGKTIVFVTHNPEITEFSNRTIKLKDGRLFSDTATENIKSAAEALAKLPAQQD

SEQ ID NO: 24313 - DNA, 498 bp, Unknown
  Obtained from environmental sample
  misc_feature (1)..(498): n is a, c, g, or t
ttgatggccgagttcaaggtgattctggatctgcttcccggcaaagtgcaaagttctgcggagctggcccttcgttttgtgcttgccaataagaacgtgaatgtcgctttgtcaggggtttccaatgtggaacagcttgaggaaaacgcgagggttgcggacaatgtttctcctctgacggctgaagaacttgagcgaatcgaaaccatgatgaaagagaacgagcgcctcgcgggcctctattgtacgggctgcaagtactgtatgccctgtcccgcaggtattaatatccctgcggtttttaacatcatgaattatcatcgggtgtacaagatcacggatttcgccagaaacaactatgctcaaataggcaaaatgccctggatgaagtacgagaacgcgtcggcgtgtaccgagtgcggcgaatgcgaacgcaaatgcccccaggccattcccatcagggaacagctaaaggagactcataaaaccttaggctaa

SEQ ID NO: 24314 - protein, 165 aa, Unknown
  Obtained from environmental sample
  DOMAIN (130)...(153): 4Fe-4S binding domain
  misc_feature (1)..(165): Xaa is any amino acid
MMAEFKVILDLLPGKVQSSAELALRFVLANKNVNVALSGVSNVEQLEENARVADNVSPLTAEELERIETMMKENERLAGLYCTGCKYCMPCPAGINIPAVFNIMNYHRVYKITDFARNNYAQIGKMPWMKYENASACTECGECERKCPQAIPIREQLKETHKTLG

SEQ ID NO: 24315 - DNA, 393 bp, Unknown
  Obtained from environmental sample
  misc_feature (1)..(393): n is a, c, g, or t
gtggtcaagaatctaggaataggcacaggcagaagaaaaacttctgtcgcacgagtgtatgtcaggtcaggaaatggcaaaatttcggtaaatggcaaggatcttacccagtatttcccccaaggcgagcactgcctgatagtccgccagccgttaatggtaacagccagtgaagacaagtttgatattttgataaatgtgtacggaggcggaaacaacggtcaggcgggagcctgccgccacggtcttgcccgcgccctggtcaatgttgatcaggccaattatactagcctgcggagcaacggatacctcacccgcgattcgcgcatggtggaacggaaaaaatacggtcgccgcggggcgcgcagacgcttccagttctccaaacgctag

SEQ ID NO: 24316 - protein, 130 aa, Unknown
  Obtained from environmental sample
  DOMAIN (10)...(130): Ribosomal protein S9/S16
  misc_feature (1)..(130): Xaa is any amino acid
MVKNLGIGTGRRKTSVARVYVRSGNGKISVNGKDLTQYFPQGEHCLIVRQPLMVTASEDKFDILINVYGGGNNGQAGACRHGLARALVNVDQANYTSLRSNGYLTRDSRMVERKKYGRRGARRRFQFSKR

SEQ ID NO: 24317 - DNA, 852 bp, Unknown
  Obtained from environmental sample
  misc_feature (1)..(852): n is a, c, g, or t
atgtgtacggaggcggaaacaacggtcaggcgggagcctgccgccacggtcttgcccgcgccctggtcaatgttgatcaggccaattatactagcctgcggagcaacggatacctcacccgcgattcgcgcatggtggaacggaaaaaatacggtcgccgcggggcgcgcagacgcttccagttctccaaacgctagggaagaatctacaagttccaattttctcagcatgactattatttctataaggcaagagtccgatgagggcttgcggcgtattgaactttccgatggttctttattttcattcaaaacttgctacctgtcccttgtttttaaagttgccgaaggcattgagataaacgaggccgaggaagaaggtcttcgtttcgcctccgcctgtctgagggcagaaaaagcggcattgcggcttattgcccgtgcggaacagacttgtctggggcttatgcgcaaactggaaaaacgaggtcatgattcagcctgtgttcgcggcgtgatctcgcagctttgcgaatcaggcttactggacgacaggcgttatgcccgtctctggctggacgcacggattagtcggcaacgcaccagtccccgacggctgctcattgcgttaaacgcccggggcattgaccgtgatgacacggcttttgccttgaaagaggcgcttgatgatgaggccgaatttctgcttctgaaacgctatgtggaaaaactgcaacgtaagagaaaaatcaacaccgatgacaatgatgaccgccgctccctgaaatacctgctaaaaaacgaaggcttttcatcatcggccattcagcgatttttgacggaaagctattga

SEQ ID NO: 24318 - protein, 283 aa, Unknown
  Obtained from environmental sample
  DOMAIN (159)...(280): RecX family
  misc_feature (1)..(283): Xaa is any amino acid
MCTEAETTVRREPAATVLPAPWSMLIRPIILACGATDTSPAIRAWWNGKNTVAAGRADASSSPNAREESTSSNFLSMTIISIRQESDEGLRRIELSDGSLFSFKTCYLSLVFKVAEGIEINEAEEEGLRFASACLRAEKAALRLIARAEQTCLGLMRKLEKRGHDSACVRGVISQLCESGLLDDRRYARLWLDARISRQRTSPRRLLIALNARGIDRDDTAFALKEALDDEAEFLLLKRYVEKLQRKRKINTDDNDDRRSLKYLLKNEGFSSSAIQRFLTESY

SEQ ID NO: 24319 - DNA, 867 bp, Unknown
  Obtained from environmental sample
  misc_feature (1)..(867): n is a, c, g, or t
gtgcttgacgcggtcaggaaggcagaggattcttttccgtactgggcgaatacgcaggccgagcaggaagccataaaccgccttacaagcgattatacatctttgcttctgaataatgatatactcgctttctacggacatccccgttctaccgtaatgggcattcttggccgttttccgatagaagaacttgataaaaaactcacgtctcttgccgttgaatacaaagaagccggcggcagaaacgtaataaaagcgttctatatcatttttggcaccgtatggcccgaaggtgagattggcattatcaactcagagcttcttacccaatggattgaatacgcgcgggatcatgatatacttgtttttatcgatcaccaaattggccgttatgatcctgtcgcttccctcaggcgcatgctgccctggcttaaataccccaatgtccacctggcccttgaccccgaatggcgcactaccaagccaatgaaagaaatcggatcggtcaccgctgatgagattaaccgtgcccagcaggaaatggaggattacataatcgccaataacattcccggcgagcgtttcctggttatccaccagtttaacgcgcggatgattggtaacagggatagggtgagaagcgatttccagcgtgtgaggcttgtccactgcgccgacggtttcggtccgccgcacctcaagcgcggttcttacgcgtttaacgccgaagcggctaatattccggttaaggcgttcaaactgttctataatttcggaatacccggcgcgggctacgataaccccctgatgactcccaaagatgtattcgccctgaatccgcgtccctatatcatcatgtaccagtag

SEQ ID NO: 24320 - protein, 288 aa, Unknown
  Obtained from environmental sample
  misc_feature (1)..(288): Xaa is any amino acid
MLDAVRKAEDSFPYWANTQAEQEAINRLTSDYTSLLLNNDILAFYGHPRSTVMGILGRFPIEELDKKLTSLAVEYKEAGGRNVIKAFYIIFGTVWPEGEIGIINSELLTQWIEYARDHDILVFIDHQIGRYDPVASLRRMLPWLKYPNVHLALDPEWRTTKPMKEIGSVTADEINRAQQEMEDYIIANNIPGERFLVIHQFNARMIGNRDRVRSDFQRVRLVHCADGFGPPHLKRGSYAFNAEAANIPVKAFKLFYNFGIPGAGYDNPLMTPKDVFALNPRPYIIMYQ

SEQ ID NO: 24321 - DNA, 516 bp, Unknown
  Obtained from environmental sample
  misc_feature (1)..(516): n is a, c, g, or t
atgcgcttcgcggagtgctttatgctggtgcccgccttcttccttatgctggccctgcggagcgccttcccgataaagatatcaagcgtgcagatatacttcctgatagtggtgataatgagcctggtaggctgggcgggcttcgcccgcgtgataaggggcatggcgctctctataggccggcgcgactacgtgaccgcggccaaggcgcttggcgccggccacttgcggataatcacgcgccacatcctgccgcagacaatgtcctacgccatagtctccgcgacgctgtccgtacccgcgtacatactcggggagtcggcgctgagcctcatcgggctcggaatacaagatccgcacgcctcgtggggaaacctgctgagcgcggctatgaatttgtcgcagatacagctgcacccgtggatactgctgcccggcgtgttcatattcctgacgatcgtggcgtttaattttgtgggcgacgggctgcgggacgctctggatccaaataggtaa

SEQ ID NO: 24322 - protein, 171 aa, Unknown
  Obtained from environmental sample
  SIGNAL (1)...(20)
  DOMAIN (1)...(171): Binding-protein-dependent transport system inner membrane component
  misc_feature (1)..(171): Xaa is any amino acid
MRFAECFMLVPAFFLMLALRSAFPIKISSVQIYFLIVVIMSLVGWAGFARVIRGMALSIGRRDYVTAAKALGAGHLRIITRHILPQTMSYAIVSATLSVPAYILGESALSLIGLGIQDPHASWGNLLSAAMNLSQIQLHPWILLPGVFIFLTIVAFNFVGDGLRDALDPNR

SEQ ID NO: 24323 - DNA, 1020 bp, Unknown
  Obtained from environmental sample
  misc_feature (1)..(1020): n is a, c, g, or t
ttggccgagccgccgggagaggaaaagctggtcgatgtttgtggaaaagcgggggaagagattcgttcttacgcgcatattttgtacacaacgatatttgaactcagccgcgcataccagtggggtttcatgaacgccgaatccgatctcaacaagatcattaatgaagcggtggaacacacagatcggctgtttccgcagcacgcgctggccgcctgtcagggcgtggagggagcgtattcgcagatcgcttgtgacaggttgttcgcaaatccgaacatcttatacttcacgggttttgacggggtgttttcggcaatccgggatggcctgtgccaatacggggtattgcctctggaaaacagcacggcaggctctgttaacgtgatatacgaccttatgatgcgctacagtttcaagatcgtgcggagcgtgcggctgaagattgaccacaacctgctcgcgaaggcaggcgtcaaaaaagagaacatccgcgagataatttcgcacgagcaggcgatacaacagtgcgcggggtacctgaagggctttggcaagggcgtgaaaattaccaccgttgccaacaccgccgaagccgcgaaaatggttgctgaatcggaacggaacgatattgcggcgctgtcctcgcgtgcatgctgtgatttgtacaacctgaaatgcgtggaaagttccgtgcaggacaggggcaataactatacgcggtttatctgcatctcaaaaaacctcgagatatatccgggcgcggatcgtaccagcatcatgctgaccactgcgcacaaacccggttccctttacaaagtgctcggcctgatatacgccctcggcgtgaatgtcgtaaagctggaaagccgcccgatccctgaccgcgatttcgagttcatgttttatttcgatcttgaaacatcggtatattcaaaaaaattcagccagcttatgtgcgagctggaaaatttatgcgaggagtttcattatctcggaagttacacagagattgtttga

SEQ ID NO: 24324 - protein, 339 aa, Unknown
  Obtained from environmental sample
  DOMAIN (71)...(250): Prephenate dehydratase
  misc_feature (1)..(339): Xaa is any amino acid
MAEPPGEEKLVDVCGKAGEEIRSYAHILYTTIFELSRAYQWGFMNAESDLNKIINEAVEHTDRLFPQHALAACQGVEGAYSQIACDRLFANPNILYFTGFDGVFSAIRDGLCQYGVLPLENSTAGSVNVIYDLMMRYSFKIVRSVRLKIDHNLLAKAGVKKENIREIISHEQAIQQCAGYLKGFGKGVKITTVANTAEAAKMVAESERNDIAALSSRACCDLYNLKCVESSVQDRGNNYTRFICISKNLEIYPGADRTSIMLTTAHKPGSLYKVLGLIYALGVNVVKLESRPIPDRDFEFMFYFDLETSVYSKKFSQLMCELENLCEEFHYLGSYTEIV

SEQ ID NO: 24325 - DNA, 615 bp, Unknown
  Obtained from environmental sample
  misc_feature (1)..(615): n is a, c, g, or t
atgaaaaagacattcggcttgttaggcgaaagactggggcacagcttctccccgctgatccacgggtatctcggcgaatataattatttgctgtacgaggtatccgccggcaatcttgattcgttcatgagtgacaggcgctttgacgggattaacataacaatcccctacaaacaacaggtagcgccatactgcgttaccctttcccaggaggcgcaaatgacaggcagtgtgaacacgatcataaaggatagtgatggggcgctgcacggttacaacacagactatcacgggttttgcgtgatgctggaaaagggcggaatagatccgaagggaaaaaaagttttagtgttgggcgacggcggatctgcacagacagtaatggcggctttggacggactgggcgcgcggaagattgtaacgatctcccgccggggaacagaccactacggcaacatcgaccgtcattatgacgcggatgtcatcgtaaacaccacgcccgtcggcatgtatcctgacaacggcagcgaccctttaagccttgagggattccggcaattaaccggcgtggccgatttgatctataatcccacgcgggaccaaactcctgcttga

SEQ ID NO: 24326 - protein, 204 aa, Unknown
  Obtained from environmental sample
  DOMAIN (99)...(204): Shikimate / quinate 5-dehydrogenase
  misc_feature (1)..(204): Xaa is any amino acid
MKKTFGLLGERLGHSFSPLIHGYLGEYNYLLYEVSAGNLDSFMSDRRFDGINITIPYKQQVAPYCVTLSQEAQMTGSVNTIIKDSDGALHGYNTDYHGFCVMLEKGGIDPKGKKVLVLGDGGSAQTVMAALDGLGARKIVTISRRGTDHYGNIDRHYDADVIVNTTPVGMYPDNGSDPLSLEGFRQLTGVADLIYNPTRDQTPA

SEQ ID NO: 24327 - DNA, 1095 bp, Unknown
  Obtained from environmental sample
  misc_feature (1)..(1095): n is a, c, g, or t
gtgggagacgaaaaacaatccatttaccgtttcagaggggcggatgtttcggtatttcggagcctggcggaagaaacagaactaaaactcagcctgaacaaaaattaccgttcccatccttctttgattctggcctttaaccggatcttcggcggttaccgtactgaagatgatcccgatcccctggaaggagtgtttccaccagacaggacaaaaacaaaaaactaccaggcagcataccggtggatgaaaagcggggatacggaagccgctggcaagaatgtgccgcaccttcactttgcgttttttgacgaaggccggctagatgcaaagagccccctaagcgcctgggatcatgaagcggcctacatggcagccgtaatcaggaatatgcgtgatcagaaaacttttttttatgacaagtcccatacagaaaaacggccctatgaatacggtgattttgcggtattgctccgcagtcatacccatcagggttctctggaacgggcctttaaattgtatggtatacctttcagcgccgacaggcccgcttctctttttactgatgcgccggtaaacgatatgtgggcctttttgaaactgctggtttatcccggtgaccgtattgcctacggcgctttgctccgttctccctttgtccgcttaagcgaagaggcctttactttgtgcatgctgccgggaaagggaatctttgacgaatccctggatcaaaaactgccgtttccggatgctcgccgttaccgcagtgcccgccgccgttatcgggaacttttacaaaacgcccggaattgttccgtaagttcccttgttaccaggctctggtacgaagaaggctaccgctgtgaagccctttggtcggcggatgcccaggtctatcttgatctctacgatctgttatttgaacaggccagaaccatagaggaacggggcgggggacttgtcgattttttggattacctggaagatctggcaaacagggaggaaaagcccgatgattccaccctccccgatgaagaaggaagcggagtgaggatcatgacgatccaccacgccaagggcctggaatttccgtag

SEQ ID NO: 24328 - protein, 364 aa, Unknown
  Obtained from environmental sample
  misc_feature (1)..(364): Xaa is any amino acid
MGDEKQSIYRFRGADVSVFRSLAEETELKLSLNKNYRSHPSLILAFNRIFGGYRTEDDPDPLEGVFPPDRTKTKNYQAAYRWMKSGDTEAAGKNVPHLHFAFFDEGRLDAKSPLSAWDHEAAYMAAVIRNMRDQKTFFYDKSHTEKRPYEYGDFAVLLRSHTHQGSLERAFKLYGIPFSADRPASLFTDAPVNDMWAFLKLLVYPGDRIAYGALLRSPFVRLSEEAFTLCMLPGKGIFDESLDQKLPFPDARRYRSARRRYRELLQNARNCSVSSLVTRLWYEEGYRCEALWSADAQVYLDLYDLLFEQARTIEERGGGLVDFLDYLEDLANREEKPDDSTLPDEEGSGVRIMTIHHAKGLEFP

SEQ ID NO: 24329 - DNA, 663 bp, Unknown
  Obtained from environmental sample
  misc_feature (1)..(663): n is a, c, g, or t
atggccggggcgcaaaaattcctgtcgttatcgggaattaaaattacagcgtggacatcttctgtcgccggaatacaaatgccttctttgggagaagccggttttgattttgaagaaattgaacgcaatccgcttcgcgttccggaaaaaaacagctcgcaaaaagcgatggcaaaaattgaagatcttcgcagtgaaggcgacagcgcgggcggcgtaatttcgtgccttattacgggagcagccgcaggtctcggagagcctgtctttgataaactggacgcgcgtcttgcctccgccgttttgggcataggagcgtgcaagggtattgagttcggcgtgggatttgccgccgccggattaaaaggaagcgaaaataacgatatgctttgcgataacggaaagttcatgtcaaataactgcggcggtatattgggcggcatatcttcaggtcaggacattttttttaaagctgctttcaaaccaacgccgtcaataagcaaaccgcagaaagctttggacagtgaaggaaggataagagaaattgaaattaaaggccgccatgacgtatgtattgttccgcgcgctgttcccgtagttgaagctatgaccgctcttgtacttgccgactttattttattggcgcatgccgcaaggctttaa

SEQ ID NO: 24330 - protein, 220 aa, Unknown
  Obtained from environmental sample
  DOMAIN (1)...(216): Chorismate synthase
  misc_feature (1)..(220): Xaa is any amino acid
MAGAQKFLSLSGIKITAWTSSVAGIQMPSLGEAGFDFEEIERNPLRVPEKNSSQKAMAKIEDLRSEGDSAGGVISCLITGAAAGLGEPVFDKLDARLASAVLGIGACKGIEFGVGFAAAGLKGSENNDMLCDNGKFMSNNCGGILGGISSGQDIFFKAAFKPTPSISKPQKALDSEGRIREIEIKGRHDVCIVPRAVPVVEAMTALVLADFILLAHAARL

SEQ ID NO: 24331 - DNA, 699 bp, Unknown
  Obtained from environmental sample
  misc_feature (1)..(699): n is a, c, g, or t
atgaacagattgttaaaaaaaatcgaaaaaacttgcggtttttcacgcgaagcggaaaaatttaattatcaggaaagacttaaaagatgcagggattatattcttgagaaaaacgaaatacgttataacattaaaaaagatgattcactttcatttgaacaacggctggaaaacgtaacaaattccgctctggaaaccgcagagcgaatgctgggaattaaagctgagggtgattttttcgcgcggctttataaggtgcgccatgactgctgggacagaatttttctgccgggaataaacagctttgattcaatgacgggaattgagcgtaatattatggatctcaacgcaggggaggcgtggcatattgcgcgtcatcaggaacttgcggatttttcgtggtatttccgccgtcctgttccggcagaagaaactgctcttcatattagagttgaatatgtccaaaatttatgggattttattagccgtactatgggcggcgcttttaaagatagaataaatattcagccgcgcaaggtaattattcaaactgcctcgcccgtcaatatttcgagtcgtctttcaaattatgtagaaaataaaaaatccgcggtaaatgatcttgtatcagaacttgagaaagcgtatcttggttgtataaaagaagtgaataacggcaaaacggagtgtaattattaa

SEQ ID NO: 24332 - protein, 232 aa, Unknown
  Obtained from environmental sample
  misc_feature (1)..(232): Xaa is any amino acid
MNRLLKKIEKTCGFSREAEKFNYQERLKRCRDYILEKNEIRYNIKKDDSLSFEQRLENVTNSALETAERMLGIKAEGDFFARLYKVRHDCWDRIFLPGINSFDSMTGIERNIMDLNAGEAWHIARHQELADFSWYFRRPVPAEETALHIRVEYVQNLWDFISRTMGGAFKDRINIQPRKVIIQTASPVNISSRLSNYVENKKSAVNDLVSELEKAYLGCIKEVNNGKTECNY

SEQ ID NO: 24333 - DNA, 774 bp, Unknown
  Obtained from environmental sample
  misc_feature (1)..(774): n is a, c, g, or t
ttggccgaggttctcacgcctgaccgctggtattcgggagccgggctttttcgggatatataccttagagtaacgccaaagcttcacttcaccacctggggtcttgcggtaaagactgatattcaaagcgacggatatgcccatgtaaaagttgccgctgaaatagcaaataccgcgcctgaaggcggagattctttcctgcgcctgacagtaaaagatcccaggggccgtgacattacaacagtggaaataccttttaagttttcaccaatatcaaaaacgcttgtagagcacagttttcaaatcaaaaacccccggctctggaacgacaggaatcctttgctttaccgtattagcgcgtctctgggccgggagaatgacgggaccagggaagtaaactttggaattcgcagcattaagatgattgcgaaaaaagggttttttgttaacggggaaaacatcaaattgaaaggcgtctgccttcatcatgactgcggtattttaggagcggctttttaccgcgaagcctggcgcaggcggctccttatactgaaaggtcttggctgtaacgcaataagaaccagtcataacccgcaggcggaagaatttctggatttatgcgacgagctgggtttctatgtaattgacgagtgttttgacaaatggaaatccctgtcctatgaagaaatatttgaccaaaactggaagcaggatttaaccgactttatcatgagggatagaaaccacccctcggtcttttgctggagcgtctga

SEQ ID NO: 24334 - protein, 257 aa, Unknown
  Obtained from environmental sample
  DOMAIN (35)...(137): Glycosyl hydrolases family 2, immunoglobulin-like beta-sandwich domain
  misc_feature (1)..(257): Xaa is any amino acid
MAEVLTPDRWYSGAGLFRDIYLRVTPKLHFTTWGLAVKTDIQSDGYAHVKVAAEIANTAPEGGDSFLRLTVKDPRGRDITTVEIPFKFSPISKTLVEHSFQIKNPRLWNDRNPLLYRISASLGRENDGTREVNFGIRSIKMIAKKGFFVNGENIKLKGVCLHHDCGILGAAFYREAWRRRLLILKGLGCNAIRTSHNPQAEEFLDLCDELGFYVIDECFDKWKSLSYEEIFDQNWKQDLTDFIMRDRNHPSVFCWSV

SEQ ID NO: 24335 - DNA, 456 bp, Unknown
  Obtained from environmental sample
  misc_feature (1)..(456): n is a, c, g, or t
atggcaatagttgcgaagaaattacaagacgccaaggtaacgtccatcggtgaattgaaagaagcgttttcagcttcagaagattttattttcgccaattaccgcggcttaacagtggaacagataacgaatttgcgaaagctgctccggaacaagggcgcccagttcaaggttgttaaaaacaactttgcgaggatcgctttccagcagctttccgcgccggatgaagtaaaaaattaccttactggcccgacggcaatcgcgatagccccaaaagatgccaacgaagtagccaagatactggtggattttgtcaaagaagccccggtcttggcgataaaaggcggcctattgggaaaggatctgtacaatgacaagcagatggaagccttttccaaacttccttccaaactggagcttatttccatgctcatgtccgtctcgtgccgattctga

SEQ ID NO: 24336 - protein, 151 aa, Unknown
  Obtained from environmental sample
  DOMAIN (7)...(106): Ribosomal protein L10
  misc_feature (1)..(151): Xaa is any amino acid
MAIVAKKLQDAKVTSIGELKEAFSASEDFIFANYRGLTVEQITNLRKLLRNKGAQFKVVKNNFARIAFQQLSAPDEVKNYLTGPTAIAIAPKDANEVAKILVDFVKEAPVLAIKGGLLGKDLYNDKQMEAFSKLPSKLELISMLMSVSCRF

SEQ ID NO: 24337 - DNA, 333 bp, Unknown
  Obtained from environmental sample
  misc_feature (1)..(333): n is a, c, g, or t
atgatgaaagacgtaggaaagcttggtatggttttaggccgcaaagggctcatgcccaacccaaagacagggacagtcacctttgatctcaagggagccctcgcggagcttaaaaaaggaagaaccgaattcagggcggacaagacgggggtagtacaccttgcggttggcaaagtgtcgatggaaagtaaaaaaattgcggagaacgtcagtgtggtaatttcggaaatcaagagaaaaaggcctaccgatgttaaaggtgattttgttagaacgatatcggtggcttccaccatggggcccggtgtgtgggtcgcaatgaaggaggagtaa

SEQ ID NO: 24338 - protein, 110 aa, Unknown
  Obtained from environmental sample
  DOMAIN (1)...(102): Ribosomal protein L1p/L10e family
  misc_feature (1)..(110): Xaa is any amino acid
MMKDVGKLGMVLGRKGLMPNPKTGTVTFDLKGALAELKKGRTEFRADKTGVVHLAVGKVSMESKKIAENVSVVISEIKRKRPTDVKGDFVRTISVASTMGPGVWVAMKEE

SEQ ID NO: 24339 - DNA, 441 bp, Unknown
  Obtained from environmental sample
  misc_feature (1)..(441): n is a, c, g, or t
atgatggccgagtggcaagaagacattgcagcttttgtcaagctgcaatgtcctgcggggaaagccactccggccccgcccgtaggtcctgcgctcggtccgcacggagtcagcgcgcctcagtttgtccagcagtttaacgacaggacaaaaggcatggaaccgggacttattattccggttataattacggtttatgcggataaatcatttacttttatcctaaagactccgcccgcgtctgtattgatcaaaaaagcaatcgggctggaaaaaggatcaaaagaatcccacaaggttaaggtaggtaaaatttccagagcgaaacttgaagatattgccaaaaccaaaatggcggatctttcagctaacgatcttaacgccgccgtaaagataattgccggtactgcccggtctatgggtgttgaggtggaaaaatga

SEQ ID NO: 24340 - protein, 146 aa, Unknown
  Obtained from environmental sample
  DOMAIN (12)...(71): Ribosomal protein L11, N-terminal domain
  misc_feature (1)..(146): Xaa is any amino acid
MMAEWQEDIAAFVKLQCPAGKATPAPPVGPALGPHGVSAPQFVQQFNDRTKGMEPGLIIPVIITVYADKSFTFILKTPPASVLIKKAIGLEKGSKESHKVKVGKISRAKLEDIAKTKMADLSANDLNAAVKIIAGTARSMGVEVEK

SEQ ID NO: 24341 - DNA, 723 bp, Unknown
  Obtained from environmental sample
  misc_feature (1)..(723): n is a, c, g, or t
gtgccggttctgattggcgaggtaaaccaccatcacacggacattatccccatacagcagaaggcgaggggctggaccaaaggcttcatcgccgtaaagcccaactgctcgatacaaagctacatgatccccctgcacgccctggcgttggccggctatcaggcgcagaggattatcgtgacaaccctgcaggcggtttccggcgccggctatcccggcgtgccgagccttgacatgcttgacaacatcatcccctacataggcggcgaggaggagaaaaccgaaaaagagccgttgaaaattttcggcagcatctcaggcggagtgatccaaaacgccgctttgccgaaaatttccgcctgctgtaaccgcgtgccggttgtggacgggcatacggcctgcgtcagcctggaattcggtgagaagaaaccttccatagaagaggtaaaaaaaatctgggccgactttaaggctttgccccaggaactggatttgcccacggcgccgaaacagcctattatctaccgcgaagaggacaaccggccccagccgcgcaaggacagaaacctggacaaggggatggcggtggtagccggtaggctgcggccctgcaacgtgtttgacatacgctttaccgcggtttcgcataacacagtccggggcgcggccggcggcggcattttgaacgcggagcttttgaaacacaaaggttatctggggtga

SEQ ID NO: 24342 - protein, 240 aa, Unknown
  Obtained from environmental sample
  DOMAIN (45)...(220): Semialdehyde dehydrogenase, dimerisation domain
  misc_feature (1)..(240): Xaa is any amino acid
MPVLIGEVNHHHTDIIPIQQKARGWTKGFIAVKPNCSIQSYMIPLHALALAGYQAQRIIVTTLQAVSGAGYPGVPSLDMLDNIIPYIGGEEEKTEKEPLKIFGSISGGVIQNAALPKISACCNRVPVVDGHTACVSLEFGEKKPSIEEVKKIWADFKALPQELDLPTAPKQPIIYREEDNRPQPRKDRNLDKGMAVVAGRLRPCNVFDIRFTAVSHNTVRGAAGGGILNAELLKHKGYLG

SEQ ID NO: 24343 - DNA, 672 bp, Unknown
  Obtained from environmental sample
  misc_feature (1)..(672): n is a, c, g, or t
ttgaaagaaaatgtgataaggatatacgacttaatagaaaatttgctccccgagaaaataataaacgcaaaagaaccatttggcaatgacatggagttttatgaatggtatgttttaagaaggattgggagtattggcatacattggttaagaaacgggcttggttggaacggatattttattaatgacaaaaaattgaggatggaaatttttaataacctcgaaaaaaggggattaatccaaaaaataattgttccggaaataaatgatgatttttatatacgccaacaggatattaaaactctccaaaaaaagccggattatgataattgcgtccgttttttagcccccctggataatatgttatgggacaggctaatggtgcaaaaactttttaattttcaatatagctgggaagtgtacttaccaaaagagaaaagaaaatacggctattatgttttaccggtattatatcagaataaaataattgcccgaatggaaccgcaaaaatatgaagttagcaaaccctttacaataaaaaattggtggtgggagacaggaatatcaataaatggcaaattgaaaagcgcaataaagaatggattaaacatattctcagaatatctaaatgcggacggtatagataaaaaattattggaaaggatatattaa

SEQ ID NO: 24344 - protein, 223 aa, Unknown
  Obtained from environmental sample
  misc_feature (1)..(223): Xaa is any amino acid
MKENVIRIYDLIENLLPEKIINAKEPFGNDMEFYEWYVLRRIGSIGIHWLRNGLGWNGYFINDKKLRMEIFNNLEKRGLIQKIIVPEINDDFYIRQQDIKTLQKKPDYDNCVRFLAPLDNMLWDRLMVQKLFNFQYSWEVYLPKEKRKYGYYVLPVLYQNKIIARMEPQKYEVSKPFTIKNWWWETGISINGKLKSAIKNGLNIFSEYLNADGIDKKLLERIY

SEQ ID NO: 24345 - DNA, 1239 bp, Unknown
  Obtained from environmental sample
  misc_feature (1)..(1239): n is a, c, g, or t
gtgtggattgacgttatgaacgaggcgggcggaaggtcgattctcccctttgacggcatgatagccgccgacgcctttctttgggccgcttaccgcgatgacgccctgttagctgaaagactgaaggatattacacagcggagctacggcggcgtccgggggcgctacgggacaataggccgctgcgcggttattaaaagctgcgccatagtaaaggacgcggcggtcggagagcacgcttacataaaaggcgcgaataaactaaaaaatattacgatactttcatcggccgacgagccgacccagataggcgagggcgttgaactggtgaacggcattgtcggctacgcctgccatgttttttacggcgccaaagcggtgcgctttgtcatcgggcggaactgtaacctgaagtacggggcgcggctgatccattcggtgttaggcgataactcgacggtgtcctgctgcgaaattctcaataacctgatctttcccgtgcacgagcagcaccacaacaactctttcctgatcgccagcctgatacaggggcagtccaatattgcggcgggggcaaccataggcagcaaccacaacagcagggcaaacgacggcgaactgcgcgcgaagcggggtttttggcccgggctggctgtgtccctaaaacacccgagcgtctttgcctcgtttgtcatcatcgccaaaggggaatacccttcggaactcaatatacccctgccgttttccctggttacaaacaatgtccataaaaacaggctggaactgtcgcccgcgtacttctggcttcacaacctctacgctcttgagcgtaattcatggaaatccggcgcccgcgaccgccggataataaaattccagcatattgagacggattacctggcacccgataccgcggaggagataatttccggcctttcacttcttgaaggctggctcgccgatgccggatattcgccaatggatttgcacgggcctgaaggtgcccaggatatacgcatgattccgtgccgccatctggagcacagcaagcgcggacaggtgattaagtatccgctcagggcgattgccgcctaccgtcagatgcttcgctggtacgcgatcaaaaccatagccgttttctttgatacccggcccaaattggactacccgggactatgctcgctattgggcggcgaaggggagagggtaacagactgggtaaacagggcgggcagttaa

SEQ ID NO: 24346 - protein, 412 aa, Unknown
  Obtained from environmental sample
  misc_feature (1)..(412): Xaa is any amino acid
MWIDVMNEAGGRSILPFDGMIAADAFLWAAYRDDALLAERLKDITQRSYGGVRGRYGTIGRCAVIKSCAIVKDAAVGEHAYIKGANKLKNITILSSADEPTQIGEGVELVNGIVGYACHVFYGAKAVRFVIGRNCNLKYGARLIHSVLGDNSTVSCCEILNNLIFPVHEQHHNNSFLIASLIQGQSNIAAGATIGSNHNSRANDGELRAKRGFWPGLAVSLKHPSVFASFVIIAKGEYPSELNIPLPFSLVTNNVHKNRLELSPAYFWLHNLYALERNSWKSGARDRRIIKFQHIETDYLAPDTAEEIISGLSLLEGWLADAGYSPMDLHGPEGAQDIRMIPCRHLEHSKRGQVIKYPLRAIAAYRQMLRWYAIKTIAVFFDTRPKLDYPGLCSLLGGEGERVTDWVNRAGS

SEQ ID NO: 24347 - DNA, 831 bp, Unknown
  Obtained from environmental sample
  misc_feature (1)..(831): n is a, c, g, or t
ttgtgggaagagataaaaaaaataattctcttttgggcagacaagggttttgaaatttttagaatagacaacccgcacacaaaaccgttcccgttttgggaatggctcattcgctcaataaaggaagagcatccagaattggtattgctggctgaggcttttacccgcccaaagatgatgaagcgtttgggcaaagttggctttgacatgagctatacttattatgcttggcgcactgaaaaatgggaattggaggagtatttcagggagttaacttcaaaacctgttagtgattatatgcgcggaattttattccccacaacgccggacattttcccggactactttgcaaatcaaggcccgcctacttttaagctgcgttattttttggcggcaacgctttccagtttggtgggaatgtacaacggttatgagctttgcgaaaacgaaaagaaccctgcgaaagaggaactttacaacagcgagaaatatcagtacaaggtgcataactggaactgccctgtgaacataaaggaatttttacgcaaggtgaattttgcccgcaagcaacagagtgcgcttatggaatacgagaatttgcgttttcattatgcggaaaacacaaacataatggtttacagcaagcgtgattggaaaaacgggaacactgtgctctgcattgttaatttggatgttaaaaaaacgcaaaattcctttgtgtatttgaatttgccggagcttgngctttccgatgggcagggttacacggttaaagatttaatatcgggtcagaactttctatggcgtggctcanagaatatgtggagataa

SEQ ID NO: 24348 - protein, 276 aa, Unknown
  Obtained from environmental sample
  misc_feature (1)..(276): Xaa is any amino acid
MWEEIKKIILFWADKGFEIFRIDNPHTKPFPFWEWLIRSIKEEHPELVLLAEAFTRPKMMKRLGKVGFDMSYTYYAWRTEKWELEEYFRELTSKPVSDYMRGILFPTTPDIFPDYFANQGPPTFKLRYFLAATLSSLVGMYNGYELCENEKNPAKEELYNSEKYQYKVHNWNCPVNIKEFLRKVNFARKQQSALMEYENLRFHYAENTNIMVYSKRDWKNGNTVLCIVNLDVKKTQNSFVYLNLPELXLSDGQGYTVKDLISGQNFLWRGSXNMWR

SEQ ID NO: 24349 - DNA, 558 bp, Unknown
  Obtained from environmental sample
  misc_feature (1)..(558): n is a, c, g, or t
gtggtctatatgcgcgattatgcaaaaatttcgtataaatttggtttccgccataggggaactataacgattatatggggaatagggaatagggatcggggatcgcttgtatattacgccgaattccgctactttgaaacaagcatgaaatgggaaaagaaagacatccccccagaaaaagtcaaggagatcagcgcgaaatacggctgcgatttgctcacagcctcgatactgacccgccggggaataacaagcggaggatcaatcaagttttttcttgaagaagacgaaaggtttctgcacagcccctttgaactccccggcatggaagacgcggtagaacggattctcgcggcaaaagaagaaggtgaaaaggttctggtcttcggcgacagcgacgtggacgggataaccggcactgttctgcttaccgagtaccttgaaagcatgggcattgacgtaagctggcggatccccggcgccgacgatccttacgggctttcgctggaggcggttaaggaattcgccgccgcctacggaacgcttatattaccgtga

SEQ ID NO: 24350 - protein, 185 aa, Unknown
  Obtained from environmental sample
  misc_feature (1)..(185): Xaa is any amino acid
MVYMRDYAKISYKFGFRHRGTITIIWGIGNRDRGSLVYYAEFRYFETSMKWEKKDIPPEKVKEISAKYGCDLLTASILTRRGITSGGSIKFFLEEDERFLHSPFELPGMEDAVERILAAKEEGEKVLVFGDSDVDGITGTVLLTEYLESMGIDVSWRIPGADDPYGLSLEAVKEFAAAYGTLILP

SEQ ID NO: 24351 - DNA, 570 bp, Unknown
  Obtained from environmental sample
  misc_feature (1)..(570): n is a, c, g, or t
atggataaaaaagcgcttatttttttggcagacggatttgaggaagtagaagccgtaacccccgttgattacctgaggcgggccggtatcaaggtagttatggtcgcaataggaaaaaatgacgatgttatgggttcccatggcataaactttactgccgataccacccttgaaacaatggagaaacagggcgaacttaatcccagtggctgggactgcgttattattcccggcggcatgcttggctcaaaaaaccttgccgcttgcgctccgcttggaaacttccttaaaaagatgaccggagcaggaaaaatgattgccgccatttgcgcagctcccactatcgttcttgcccccttgggccttttggaagggaaacgctttacctgttatcccggaatggaacaaggattaacaagcggaacctggacagaagacaaagtagtaatcgatggcgctcttattacaagccgcgccgccggtactgccgctgaatttgcttttactataatcagaatacttgcaggcagcgagcaagaaaataaattacgagccgcgctgctgctgtga

SEQ ID NO: 24352 - protein, 189 aa, Unknown
  Obtained from environmental sample
  DOMAIN (31)...(175): DJ-1/PfpI family
  misc_feature (1)..(189): Xaa is any amino acid
MDKKALIFLADGFEEVEAVTPVDYLRRAGIKVVMVAIGKNDDVMGSHGINFTADTTLETMEKQGELNPSGWDCVIIPGGMLGSKNLAACAPLGNFLKKMTGAGKMIAAICAAPTIVLAPLGLLEGKRFTCYPGMEQGLTSGTWTEDKVVIDGALITSRAAGTAAEFAFTIIRILAGSEQENKLRAALLL

SEQ ID NO: 24353 - DNA, 768 bp, Unknown
  Obtained from environmental sample
  misc_feature (1)..(768): n is a, c, g, or t
gtgttaaaactggaaggcctctcggtattttacggcggtattcacgccctgcgcggtatagacatggaagtccctgacggtaaaatcatcaccttaatcggggctaacggcgcgggcaagagtactatgcttaattcgattgtaggcctggtgaaacccgagtcgggaaaaatcacatggaacggcaaagatataacacgcggcgatcccagggacattgtttccggcggcctggtgatgatacccgagggccggcgcatttttcccaatcttaccgttgacgaaaatctttccctgggcgcgtatgcacgcaacgataaagagggaataaaacaggaccgccagcgctgttttgaacttttcccgcgtcttaaagaacgccgccgccagcacgggggtactctctcaggcggcgagcagcagatgcttgccgttgcccgcggccttatgtcacacccgaagatgctcatgcttgatgaaccgagcctgggtcttgctccccttgtttcaaaaatgatctttgaaattatccgcgagataaaccgcaacggaaccacgatctttttgatagaacagaacgcccacgccgcgcttgaaattgccgattacgcatacgttctggaaacaggtgtaatcaccatgcagaacaccgggggctgtgcttttaaaagacgacagcatacgccgagcctacctcggcgaagaaggatgaggaaaagagaacgattcctttttgggcaatgcaatggttttccctatagttggtaa

SEQ ID NO: 24354 - protein, 255 aa, Unknown
  Obtained from environmental sample
  DOMAIN (27)...(210): ABC transporter
  misc_feature (1)..(255): Xaa is any amino acid
MLKLEGLSVFYGGIHALRGIDMEVPDGKIITLIGANGAGKSTMLNSIVGLVKPESGKITWNGKDITRGDPRDIVSGGLVMIPEGRRIFPNLTVDENLSLGAYARNDKEGIKQDRQRCFELFPRLKERRRQHGGTLSGGEQQMLAVARGLMSHPKMLMLDEPSLGLAPLVSKMIFEIIREINRNGTTIFLIEQNAHAALEIADYAYVLETGVITMQNTGGCAFKRRQHTPSLPRRRRMRKRERFLFGQCNGFPYSW

SEQ ID NO: 24355 - DNA, 516 bp, Unknown
  Obtained from environmental sample
  misc_feature (1)..(516): n is a, c, g, or t
gtggttccgttgcggtttatctcgcggataatttcaaagatcatttttgaaacaaggggagcaagacccaggctcggttcatcaagcatgagcatcttcgggtgtgacataaggccgcgggcaacggcaagcatctgctgctcgccgcctgagagagtacccccgtgctggcggcggcgttctttaagacgcgggaaaagttcaaaacagcgctggcggtcctgttttattccctctttatcgttgcgtgcatacgcgcccagggaaagattttcgtcaacggtaagattgggaaaaatgcgccggccctcgggtatcatcaccaggccgccggaaacaatgtccctgggatcgccgcgtgttatatctttgccgttccatgtgatttttcccgactcgggtttcaccaggcctacaatcgaattaagcatagtactcttgcccgcgccgttagccccgattaaggtgatgattttaccgtcagggacttccatgtctataccgcgcagggcgtga

SEQ ID NO: 24356 - protein, 171 aa, Unknown
  Obtained from environmental sample
  DOMAIN (26)...(64): Protein of unknown function (DUF1602)
  misc_feature (1)..(171): Xaa is any amino acid
MVPLRFISRIISKIIFETRGARPRLGSSSMSIFGCDIRPRATASICCSPPERVPPCWRRRSLRRGKSSKQRWRSCFIPSLSLRAYAPRERFSSTVRLGKMRRPSGIITRPPETMSLGSPRVISLPFHVIFPDSGFTRPTIELSIVLLPAPLAPIKVMILPSGTSMSIPRRA

SEQ ID NO: 24357 - DNA, 360 bp, Unknown
  Obtained from environmental sample
  misc_feature (1)..(360): n is a, c, g, or t
atgctcggagaagtcggccttttgggaaactgcgatgacaacgccgtgtcactgccttatggcaaacagcgccgccttgagattgtccgcgcactggcgaccggcccaaaactccttctgcttgacgagcntgccgcggggatgaacccgcaggaatcttacgaacttatggacttcatcgtctcggttcgtgataaattcaaaatttccgtgctgcttatcgaacatcacatgcaggtggtaatgggtatctgcacacggctgtacgtgcttgattatggcattaccattgccgagggaacaccgcatgagattcgtaaaaatcaggatgttattgacgcctacctgggggttgagtag

SEQ ID NO: 24358 - protein, 119 aa, Unknown
  Obtained from environmental sample
  DOMAIN (1)...(94): ABC transporter
  misc_feature (1)..(119): Xaa is any amino acid
MLGEVGLLGNCDDNAVSLPYGKQRRLEIVRALATGPKLLLLDEXAAGMNPQESYELMDFIVSVRDKFKISVLLIEHHMQVVMGICTRLYVLDYGITIAEGTPHEIRKNQDVIDAYLGVE

SEQ ID NO: 24359 - DNA, 561 bp, Unknown
  Obtained from environmental sample
  misc_feature (1)..(561): n is a, c, g, or t
atggacgagggcctggccttggcggcgctggacgtcgcgggcgcgcccgcccaagccgctaggctggtgaagcctgggcaaagcgtcttgatcttgggcggcagcggaaaatctggaatgctggtggcgtacgaagccatgaagcgcgtgggcccgacgggcagggtggtggcccacatccactcgcccgcaaaagaggcggttctcaggtcgctgaaactttgccacgacgttatcgccgaaagcgcgggcaatccgatggcattgctcaacaaagcgcttgccgccaatggcggcaaagagtacgacttggtgttcaactgcgtgaacgtgcccaacaccgaaatggccacgatactgccgtgccgacaagatggcactgtatattttttcagcatggccaccgacttctgcaaggccgcgctcggcgcagagggcgtgggcaaagatgtccttatgatagtgggcaacggctactcaaaggatcatgccgaaataacgcttgccgaactgagggagcacgagggcctgcgaaagttttttgaagaaaagtttgtctga

SEQ ID NO: 24360 - protein, 186 aa, Unknown
  Obtained from environmental sample
  SIGNAL (1)...(19)
  misc_feature (1)..(186): Xaa is any amino acid
MDEGLALAALDVAGAPAQAARLVKPGQSVLILGGSGKSGMLVAYEAMKRVGPTGRVVAHIHSPAKEAVLRSLKLCHDVIAESAGNPMALLNKALAANGGKEYDLVFNCVNVPNTEMATILPCRQDGTVYFFSMATDFCKAALGAEGVGKDVLMIVGNGYSKDHAEITLAELREHEGLRKFFEEKFV

SEQ ID NO: 24361 - DNA, 585 bp, Unknown
  Obtained from environmental sample
  misc_feature (1)..(585): n is a, c, g, or t
ttgaatcgggtgtccaacttagtggagcggcgcgacggcaccacgggcgtccatatcgagagggtgcagcgctccatgggcatcttgatcagcggcatgaaaaaaatgggggtgtatgaaagggaatcctccatgtgggacgtggatcttctaatgcgctcgtcacagttgcacgacattggcaaaattgcgataaaggacagcatcctgcaaaaacctgacaagctgacgcccgaagaatttgaagaaatcaagaagcacgccagcataggcgcccaaatcatatcggaaatagaagaggcgacgccggaacaggactttctgaagtacgcaaaaatttttgcggcctcgcaccacgagaggtgggacgggcagggctacccaaacgggctgaagggcgagagcatcccactgctgggcaggatgctggccatcgtggacgtgtacgatgccttggtattcgagaggccctacaaagaagcttaccccaaagaaaaggcggttaagatgattttggatggcagcggcacacaattcgacccagacctgatcaatgtattcaaaaacgtgctggatgaactgtga

SEQ ID NO: 24362 - protein, 194 aa, Unknown
  Obtained from environmental sample
  DOMAIN (15)...(152): HD domain
  misc_feature (1)..(194): Xaa is any amino acid
MNRVSNLVERRDGTTGVHIERVQRSMGILISGMKKMGVYERESSMWDVDLLMRSSQLHDIGKIAIKDSILQKPDKLTPEEFEEIKKHASIGAQIISEIEEATPEQDFLKYAKIFAASHHERWDGQGYPNGLKGESIPLLGRMLAIVDVYDALVFERPYKEAYPKEKAVKMILDGSGTQFDPDLINVFKNVLDEL

SEQ ID NO: 24363 - DNA, 1068 bp, Unknown
  Obtained from environmental sample
  misc_feature (1)..(1068): n is a, c, g, or t
ttgacgggcgtgatgttgatacgcgcataccatattgcaagaggggcaaagcgcagcatcattttgataccagatagcgcacatgggacaaaccccgccacagccacgatggcgggctacaactgcgtggaagtgccaagccaagcggatggcacaatctcttttgaagacgtgatggacgcatccacgggaaaaaccaaaaaagggctattgagcctgatcaaagagtatggccgcgaaattgcggggattatgataaccaaccccaacacagtgggcatctttgaatatcggatagccgagatagccaaactgctgcacgatattggcgcactgctgtacatggacggtgccaacatgaatgccctcgtgggcgtagccagacctggggatttcggcatcgacgtgatgcacatgaatctgcacaagacttttggcaccccgcacggcggcggcggacctggcagcggacccgtggcctgcaccaaagaactggagccattcctgccccgccccgttgtgacaaaaacaccaaccggctttgatttgaactgggatcgcccaaagagcataggcaagatacatagcttctttggcaactttgcaatggaggcgcgggcactggctttttgcctcagccacggcttcgatgggctgcgcacggccacgctgagggctttagtaaatgcaaattacatccgcaaacaattggagggcctgtaccaccttcagtactccactcccacgctgcacgaggtggtctttgacgatgcaaatttagccaagcatggcatcactacgctggacatagccaagggcctgatagacagaggcttccacccgcccacaatctattttccccttgtcatccacggcgcgttgatgatagagccaacggagagcgagggcaaggcggaacttgatgcctttatagaagctatgaaagacatagcgagagaggccgaagacagcccagagaacctaaagcgatctccggccaaggcccccgtgggccgactggacgaaacaaccgctgccagaaagcctgtgctgaggtggacggtctga

SEQ ID NO: 24364 - protein, 355 aa, Unknown
  Obtained from environmental sample
  misc_feature (1)..(355): Xaa is any amino acid
MTGVMLIRAYHIARGAKRSIILIPDSAHGTNPATATMAGYNCVEVPSQADGTISFEDVMDASTGKTKKGLLSLIKEYGREIAGIMITNPNTVGIFEYRIAEIAKLLHDIGALLYMDGANMNALVGVARPGDFGIDVMHMNLHKTFGTPHGGGGPGSGPVACTKELEPFLPRPVVTKTPTGFDLNWDRPKSIGKIHSFFGNFAMEARALAFCLSHGFDGLRTATLRALVNANYIRKQLEGLYHLQYSTPTLHEVVFDDANLAKHGITTLDIAKGLIDRGFHPPTIYFPLVIHGALMIEPTESEGKAELDAFIEAMKDIAREAEDSPENLKRSPAKAPVGRLDETTAARKPVLRWTV

SEQ ID NO: 24365 - DNA, 795 bp, Unknown
  Obtained from environmental sample
  misc_feature (1)..(795): n is a, c, g, or t
ttgccccgcgctgcaagaagactaaaagtatatgtctggaaacatttcctgaagaaacaaaaaacggaagcggccgcgtctactgccattttcccgaaacaggagaatccattgaataattctccgttgctttcaataaacaatgtttcaaatacctatgtcagccgcagttatggtcttttcgggaataaggaaataaagccggttttaaaaaacataaaccttacattgcaggaaggtgaaatatccgggctgacgggtaaatcaggctgcggaaaaactacgcttgcccgttgtattctaggacttattgattatgaaggagaaattattattgacggtctgaggcaggacggtttcaaccaaatacacaaaatacagatgatcttccaggacacggcttcgtcgcttaaccccgtaaaaaaaataggctggcttctggaagagccgcttgtcattcaccggctcggcacgaaagaacatcggcagcagaaggttgacgagatgcttgcccgcgtcgggcttgacttatcatgcaagacgcgccgcgtccacgagctttcgggcggccagaaacagcgggtttgcatagggcgcgccctcatgcttcagccgaaaatcctcatcgccgacgaagccataagctcgctggacgtttccgccggtgcgcagataatgaacctcttccgcgatttgcgcgacagcctggggctgaccataatttttatttcgcacaacacaggggcggtggagtatttgtgcgacagagtgctgcaattaacaattaacaggtaa

SEQ ID NO: 24366 - protein, 264 aa, Unknown
  Obtained from environmental sample
  DOMAIN (80)...(263): ABC transporter
  misc_feature (1)..(264): Xaa is any amino acid
MPRAARRLKVYVWKHFLKKQKTEAAASTAIFPKQENPLNNSPLLSINNVSNTYVSRSYGLFGNKEIKPVLKNINLTLQEGEISGLTGKSGCGKTTLARCILGLIDYEGEIIIDGLRQDGFNQIHKIQMIFQDTASSLNPVKKIGWLLEEPLVIHRLGTKEHRQQKVDEMLARVGLDLSCKTRRVHELSGGQKQRVCIGRALMLQPKILIADEAISSLDVSAGAQIMNLFRDLRDSLGLTIIFISHNTGAVEYLCDRVLQLTINR

SEQ ID NO: 24367 - DNA, 621 bp, Unknown
  Obtained from environmental sample
  misc_feature (1)..(621): n is a, c, g, or t
ttgaacggcagcagggacaaagatgaaaacaggcaaaaggctctggaaatattaacattactcgggtttgaaaacactgagaaaatttttgaagcgtatccgcaccagctttcgggaggaatgtgccagcgtgtgatggcggcaattgccgcaataatccgtccgcgtcttctgctggcagacgaaccgtcaagttctcttgatattgaaagccaggaacgtatcctctcgcttcttgcacaaatgaacagtaattctaaaatgtcagttttaataatttcccacgatctttcgataataagaaaattttgtagccgttttcttatcatgtatgcgggaagaattgttgaagaagggctgtcaagagatttcttttcacccttacatccgtacacaaaagcgctgattaacgcaatacccgataaatcaaaaaggggaactaaacttgaaaatattcccggcaaggttccgtcaatagaagacagcttttgcggctgtccttttgccccgcgctgcaagaagactaaaagtatatgtctggaaacatttcctgaagaaacaaaaaacggaagcggccgcgtctactgccattttcccgaaacaggagaatccattgaataa

SEQ ID NO: 24368 - protein, 206 aa, Unknown
  Obtained from environmental sample
  DOMAIN (2)...(113): ABC transporter
  misc_feature (1)..(206): Xaa is any amino acid
MNGSRDKDENRQKALEILTLLGFENTEKIFEAYPHQLSGGMCQRVMAAIAAIIRPRLLLADEPSSSLDIESQERILSLLAQMNSNSKMSVLIISHDLSIIRKFCSRFLIMYAGRIVEEGLSRDFFSPLHPYTKALINAIPDKSKRGTKLENIPGKVPSIEDSFCGCPFAPRCKKTKSICLETFPEETKNGSGRVYCHFPETGESIE

SEQ ID NO: 24369 - DNA, 1161 bp, Unknown
  Obtained from environmental sample
  misc_feature (1)..(1161): n is a, c, g, or t
gtgaacaaacaatcattggcaaaacgtgttttacagaccgcgccgctcatgatactctccgtcttcgcggcgctggcgattttggaagtccttgtacgggtgatcgggatgggtcatcttcccgaaaggcgccccgacccgctcttgggggtgcggtcggtcccgaacgcggtatacgagaatgttaacgaggggtactcccgcgggcgcttcaacagcctaggtcttagggatcgcgaaattccgtacgagaaaccgaaggattccaagcgcgtgttgattctcggcgactcttttatggaggcccttcaggtttcgatggacagcggcttttcgggacagcttcaaacgtttataggcaaggcgctgccgtggcacgacatcaaggtaatcaacgcggggcgcggcggaatgggcacggcggaggagtacctttggtacgtgaccgagggggttaaatacactcctgacttggtgcttctggccttttacgtcgggaacgatttccgcgacaactcgaaaacgctgacggggcaagccgttttcaagccctacattacatttgacgcggataccttttgggtcgacgcctcgtttacagagagccgttcctacaagctgaagacgctcttttggccgctgttcagccgctccgttttggccgccgagaccgcgcggcgtattgatgtgttcaggcgcggcgcggcaaagaccggcggtacgcagtgtcccatggacctcggtgtcttcggcgcctttccggatagtgtttgggagagcgcctacgccgttaccggcaaactggtggccctgctttacgacgcggtcaagcgcaacgggtccgcgttctgcgtgatgataatccccgactcctaccaagtcgaggacacggaaagcgagtgcgtaaagggcgccgatttgcgtaaaccgaacagatttttgcaagaagtggcggaaacgcgcggcataccgctctttgatctgaccgatgcgtttgagcaagagcgttcgcgtaccggcgattatatgtacggattcggcaaaacactgggtacggggcactggaatgagaaaggccatcgcttagccgctcgaaccatagccgccgacacagcgtttcagaggctgtgttttcccggcgccggtaccgagcgcctatag

SEQ ID NO: 24370 - protein, 386 aa, Unknown
  Obtained from environmental sample
  SIGNAL (1)...(23)
  DOMAIN (92)...(367): GDSL-like Lipase/Acylhydrolase
  misc_feature (1)..(386): Xaa is any amino acid
MNKQSLAKRVLQTAPLMILSVFAALAILEVLVRVIGMGHLPERRPDPLLGVRSVPNAVYENVNEGYSRGRFNSLGLRDREIPYEKPKDSKRVLILGDSFMEALQVSMDSGFSGQLQTFIGKALPWHDIKVINAGRGGMGTAEEYLWYVTEGVKYTPDLVLLAFYVGNDFRDNSKTLTGQAVFKPYITFDADTFWVDASFTESRSYKLKTLFWPLFSRSVLAAETARRIDVFRRGAAKTGGTQCPMDLGVFGAFPDSVWESAYAVTGKLVALLYDAVKRNGSAFCVMIIPDSYQVEDTESECVKGADLRKPNRFLQEVAETRGIPLFDLTDAFEQERSRTGDYMYGFGKTLGTGHWNEKGHRLAARTIAADTAFQRLCFPGAGTERL

SEQ ID NO: 24371 - DNA, 1167 bp, Unknown
  Obtained from environmental sample
  misc_feature (1)..(1167): n is a, c, g, or t
atgagcagaaattattgnggagtagttcctgcagatgaagcattagcgcgttccctcaatgttcccgcggctcgttctctgcgtatttacggtgttgaaagattcgctcaatttcttcgttcattggggcttacaactctttttcgtcccggtagtgaatacggtcttccattaattctaggcggcgcggaagtcactctttttgaaataacaaaactttacgctaaccttggaaagacggccgcctctgattccacaactacgtcattaatttcttgtggcgcggcatggctcactttagaagcgttggtaaatgccgcgcgtccgggagaagaagccatttggcgtgaatacgccggggcgcgacacattgcgtggaagacgggaacaagttacggtttccgcgacgcgtgggcaattggcgtaacgcctgaatggacggtaggagtctggataggaaatgcgacaggggagggaaggccggaactgcgaagtgccgttacctccgcgcccgtactctttgaaattttttccgttcttaattcacttggcggaaaccgaaatgtgtggtttgccaaacctacgaccgaattacagcaagtggaagtatgcgcgtcttcaggttttccggcttccttaaattgcgctaacataaaatatgttgacatacccaaaaacgcccctgccgccaaaccatgccgcttttgtcagacggtaattttagacgatactcttacctatcgcatcgttcttaaacccggcatttctacagcggcggttgaacgaaagtggtttgttcttcctcccgcggaagaatggtatttccgccgctggaatcttgattataaacccctacctcaatattttaattcaagggatttgtcaaatcgcggagagggaatgttcgcgctttttaatcccgaacccgatagtcaggtatatgttccacgggaattggacaacagagagggcaaaatagttttctccgccgcccaccgcaatgaaacggaaataatttattggcatcttgacgatacattcctcggttacacgcaaacttttcatgaaatggaagcccgtcctttgcccggtcagcgcacgctaacccttgttgattcaaccgggaatacgatagttaggcgctttgtggtgttggatagtaagtga

SEQ ID NO: 24372 - protein, 388 aa, Unknown
  Obtained from environmental sample
  DOMAIN (291)...(382): Penicillin-Binding Protein C-terminus Family
  misc_feature (1)..(388): Xaa is any amino acid
MSRNYXGVVPADEALARSLNVPAARSLRIYGVERFAQFLRSLGLTTLFRPGSEYGLPLILGGAEVTLFEITKLYANLGKTAASDSTTTSLISCGAAWLTLEALVNAARPGEEAIWREYAGARHIAWKTGTSYGFRDAWAIGVTPEWTVGVWIGNATGEGRPELRSAVTSAPVLFEIFSVLNSLGGNRNVWFAKPTTELQQVEVCASSGFPASLNCANIKYVDIPKNAPAAKPCRFCQTVILDDTLTYRIVLKPGISTAAVERKWFVLPPAEEWYFRRWNLDYKPLPQYFNSRDLSNRGEGMFALFNPEPDSQVYVPRELDNREGKIVFSAAHRNETEIIYWHLDDTFLGYTQTFHEMEARPLPGQRTLTLVDSTGNTIVRRFVVLDSK

SEQ ID NO: 24373 - DNA, 1500 bp, Unknown
  Obtained from environmental sample
  misc_feature (1)..(1500): n is a, c, g, or t
gtgaacatttttacgaaattacgagataatctgtttcccagccgcagacaaaaaataaccttgtctttcaaggaatcgttttctcttataaaaatttacgcgttcagcaagataaagccgcagtttaaggcggtgtttatggtaagcgtctttctggcggctgttcagtactttgtgctggatacgccgataaaaaacgcgctttccatagccgtttgcgtggcggcggcgattttagggctgtcctttttccttgaagggctttttttggggattatgcccctaggcgagcaatgcgggatgagactgccatcaaaaatcggcgcggccggagttaccgttttctcaattattgtgggaataaccgcgacattggcagaacctgccgtcgccgtgcttcaacagcagggcagtgtaatcccggcgtggaacgcgccgcttttgtaccttcttctgaacaggggaacatcgtggctggtagccgccattgccgtcggggtgggaatttccgtggtgctgggcgtgtaccgatttatgttcggctgggcttttaagccgcctgtttttatcattattcccattatcgttgccgtaagctgtgtattcgacgaaaatccgattttgcgccctctggtaaatcttgcgtgggacgcgggaggggcggctacaggcgcggtaacagtcccgattatccttgcgcttggtttgggtgtggcgaaaaccggcgcgaaaaaatccaatagctccggccttgggttggtaacccttgcctcggccctgcctgttgcaagcgttctcctggttgcgcttctgctcagcccaaaagttccaatgccttctgacgcggcgtctttcttttccgctgaaccgggacagagaacaaaggcggtttatgtggccggctcggagaaagaactgatcgaaattgcggagaaggcggtttctatgggggatctttccgtagtggaatttgcccggtgttttcctgcagaaaccgtacatgaccaggacagtcagggcaagctgtcggtgtttgccccggaagcgtttctggacgacttcaagatcgcgttgatggctgttgtgcctctcgcgctggtgttgatcatttccattgccattattgccagggatcgaatccttaactctgatattatcattttgggattagtgttcactacctttggaatatttacattaaacctcgggttgagcggaggcattacggatattagctctcaggcggggcgtgccatcaggaccatctacagggaaaatatccttagggataagatcattgttttaaggggaatagatgagaaatcttttgtaaccgtaccgggtgaacaggaatctgaaacctatatctggatacccgataaaaacggccctgtacttgaaaaatttataccttcgcggctttcagatgactcgtatgcccatgcccagataaaaaaagacctgctttcacgtttaggccccgtgggaaactatatgtaa

SEQ ID NO: 24374 - protein, 499 aa, Unknown
  Obtained from environmental sample
  DOMAIN (44)...(273): Protein of unknown function (DUF1538)
  misc_feature (1)..(499): Xaa is any amino acid
MNIFTKLRDNLFPSRRQKITLSFKESFSLIKIYAFSKIKPQFKAVFMVSVFLAAVQYFVLDTPIKNALSIAVCVAAAILGLSFFLEGLFLGIMPLGEQCGMRLPSKIGAAGVTVFSIIVGITATLAEPAVAVLQQQGSVIPAWNAPLLYLLLNRGTSWLVAAIAVGVGISVVLGVYRFMFGWAFKPPVFIIIPIIVAVSCVFDENPILRPLVNLAWDAGGAATGAVTVPIILALGLGVAKTGAKKSNSSGLGLVTLASALPVASVLLVALLLSPKVPMPSDAASFFSAEPGQRTKAVYVAGSEKELIEIAEKAVSMGDLSVVEFARCFPAETVHDQDSQGKLSVFAPEAFLDDFKIALMAVVPLALVLIISIAIIARDRILNSDIIILGLVFTTFGIFTLNLGLSGGITDISSQAGRAIRTIYRENILRDKIIVLRGIDEKSFVTVPGEQESETYIWIPDKNGPVLEKFIPSRLSDDSYAHAQIKKDLLSRLGPVGNYM

SEQ ID NO: 24375 - DNA, 561 bp, Unknown
  Obtained from environmental sample
  misc_feature (1)..(561): n is a, c, g, or t
atgaaaaaactacttcttattctatttcttatagtagtcgctggggggctttcttttgcccagcagaaatacgctttggtaataggcaacgcggattacacgggtatcgcgaaactgcgcaattcggtgaatgacgccaatagcgtggcagccgcgctggaatccctgggctttaccgttgaaaaggtgttaaacggggaccttgataaaatggaaagcgcggctgaccggcttaaaaaccggctttccgcgtcgaaaaacacctacggctttttctttttcgcgggccacggggtgcaggcaggaagggacaattatttgataccggtggacgcggcgaatatccgcagcgaaaaccatcttcgccagagggcggtttccgttcagaccctgttggataatatgaacgacgccgggaacgatcttaacattatcgtcctggacgcctgccgggacaacccctttagctgggcgcgcgcgggaagccgggggctttcggaaatgcacacccccgcgggcagtattgttatgtacgccgccggcgcggggtttttcggctga

SEQ ID NO: 24376 - protein, 186 aa, Unknown
  Obtained from environmental sample
  SIGNAL (1)...(20)
  DOMAIN (23)...(185): Caspase domain
  misc_feature (1)..(186): Xaa is any amino acid
MKKLLLILFLIVVAGGLSFAQQKYALVIGNADYTGIAKLRNSVNDANSVAAALESLGFTVEKVLNGDLDKMESAADRLKNRLSASKNTYGFFFFAGHGVQAGRDNYLIPVDAANIRSENHLRQRAVSVQTLLDNMNDAGNDLNIIVLDACRDNPFSWARAGSRGLSEMHTPAGSIVMYAAGAGFFG

SEQ ID NO: 24377 - DNA, 798 bp, Unknown
  Obtained from environmental sample
  misc_feature (1)..(798): n is a, c, g, or t
ttgaattgctggaaggcagaaaacttcccggtattgaggtgtgccgtgggtagaccttattatattgccggcaactggaaaatgcacaagacgcgctctgaggcggctgaattggcgcaggctcttgttaatgaactgaaagacggaaaacatgagtaccttatagcgccgtctttttcatgccttgaaactgtctcggcgattgttgaaaacacaaatatccggcttggcgcgcagaattgcgcgtgcgaggaacagggtgcgcatacaggtgaagtttcagttctgcagcttaaagatttgggcgttcaatcaattattctcggtcacagtgaaagacgccactcttataaagaggacgacgctctaattaacaagaaagttaaacttgctttaaagcacaggtttgaggtgattctctgtattggcgaattacttgaagaacgtgaagccggcagggtagaagaagtatgtgagacacagattgtcaaagggcttgaaggtgtcggcgtgtctgatttgtccagcgttgttatcgcttatgagcctgtttgggctatcggtacaggaaagacagcgactcccgaagacgcggaagcggtacatgcctttgtacgcaaagtgatagcgaggctttacggagaagcggcggcggaaaaaatcatcatccaatacggcggctctgtaaaacctgacaatgcggcgcagcttatggcgatgaaaaacattgacggagctcttgtcggcggcgcatcgcttaagacagatactttcgtacccattgcgaaattttcctga

SEQ ID NO: 24378 - protein, 265 aa, Unknown
  Obtained from environmental sample
  DOMAIN (20)...(262): Triosephosphate isomerase
  misc_feature (1)..(265): Xaa is any amino acid
MNCWKAENFPVLRCAVGRPYYIAGNWKMHKTRSEAAELAQALVNELKDGKHEYLIAPSFSCLETVSAIVENTNIRLGAQNCACEEQGAHTGEVSVLQLKDLGVQSIILGHSERRHSYKEDDALINKKVKLALKHRFEVILCIGELLEEREAGRVEEVCETQIVKGLEGVGVSDLSSVVIAYEPVWAIGTGKTATPEDAEAVHAFVRKVIARLYGEAAAEKIIIQYGGSVKPDNAAQLMAMKNIDGALVGGASLKTDTFVPIAKFS

SEQ ID NO: 24379 - DNA, 399 bp, Unknown
  Obtained from environmental sample
  misc_feature (1)..(399): n is a, c, g, or t
atgaaccggtttcccatcgactacggctttcgccctcgccttaggggccgacttaccctgggaagattgcctttacccaggaaaccttgggcttccggcggagggggatcccacccctcttttcgtctacttatacctgcattctctcttccgctccctccagcaaaccttacaatttgccttcttcggtctgcggaatgctcccctaccatctcacgattgctcgtgaaatccgcggcttcggttgtatgcttagccccgttacattatctgcgcgccgtgactcgaccagtgagctgttacgcactctttcaaggaatggctgcttctaagccaacctcctggctgtcctcgccagggcacatcatttcacacttagcatactatccgggaccttag

SEQ ID NO: 24380 - protein, 132 aa, Unknown
  Obtained from environmental sample
  misc_feature (1)..(132): Xaa is any amino acid
MNRFPIDYGFRPRLRGRLTLGRLPLPRKPWASGGGGSHPSFRLLIPAFSLPLPPANLTICLLRSAECSPTISRLLVKSAASVVCLAPLHYLRAVTRPVSCYALFQGMAASKPTSWLSSPGHIISHLAYYPGP

SEQ ID NO: 24381 - DNA, 723 bp, Unknown
  Obtained from environmental sample
  misc_feature (1)..(723): n is a, c, g, or t
gtgaggccccctagtccatccagagctctacctgcgcaagcttttgacgaggctgtccctcaaggcatttcggggagagccagctatttccaagtttgtttagtctttcgctccgagccacgggtcatccctgccttttttaacagactagggttcggccctccacccggtttcacccgggcttcagcctgcctatggctagatcacttggcttcgggtctatggcatgcaactgcgcgaacttgcgttcgcgatttcgccctgttcagactcggtttccctccggctccgggactcccatcccttagcctcgctgcataccataactcgcaggctcattctacaaaaggcacgccgtcaccgcatcgctgcggctccgacatgttgcgggtccacggtttcaggttctatttcactcccctcgccggggttcttttcgcctttccctcacggtacttctgcgctatcggtcgctccctgtgtttagccttggatcgtggtcgacccggattcccgcggggtttctcgtgccccgcagtacttaggattccgctaccatttgctcaccgtttcgggtacggggctttcaccccctctggccggctttcccaaaaccgttcccctgcgatggacaaacagacatcgcggtcctgcaaccccgccctcgcgggcggtttaggctcctccgatttcgctcgccgctactttcggaatctctgttga

SEQ ID NO: 24382 - protein, 240 aa, Unknown
  Obtained from environmental sample
  misc_feature (1)..(240): Xaa is any amino acid
MRPPSPSRALPAQAFDEAVPQGISGRASYFQVCLVFRSEPRVIPAFFNRLGFGPPPGFTRASACLWLDHLASGLWHATARTCVRDFALFRLGFPPAPGLPSLSLAAYHNSQAHSTKGTPSPHRCGSDMLRVHGFRFYFTPLAGVLFAFPSRYFCAIGRSLCLALDRGRPGFPRGFSCPAVLRIPLPFAHRFGYGAFTPSGRLSQNRSPAMDKQTSRSCNPALAGGLGSSDFARRYFRNLC

SEQ ID NO: 24383 - DNA, 1545 bp, Unknown
  Obtained from environmental sample
  misc_feature (1)..(1545): n is a, c, g, or t
ttgaatttcgctctgccggcgcctatcgacattccgcaggttatgatgcaatcggcgcagggaagccactattttctcgcgtcggtcgcgccgaagatggaaacacgtaagaagttttgggataacaatttggcaatcatctgggacgtctctttaagcggctcgcagcgtgatttgaaacgtgaaatggatttgcttaataccatttttaccgataagaaaaacgccgatgtccatctttactttttgaacaatcggtttaaaaaaattgccaacaagggaactggcaacggcgaatataaagtgactaacgggaagtgggacgaactaaagagcgtcttggaaaaagcggttttcgacggcggcaccgatttttcacagatcaacgcggatgatattaccggaaatgaagttttattgttctcagatggaatatcaacgctcagcgacgccgactttttgagaaataccaaggcaagccctcctatacactgtgttgtttcttccgcgaaggccgattacagcgtgatgaaattgattacgggcaagacaaagggtaaattcgtgaatatcacagcgctatctccaaaaaagttgaaaggcgagttgctgaacgaaactctgctatttttgggagcggaacacggaaaatccgtacgcgaggtatatccgagcatcgcaacgcctgttcatggcaatttttccatagctggcatttccgaaacagatgatgaggaaatcactttgctctttggttttggaaataaaatagagaaaaaaataaaagtgaaattagatgcaaaacgagcgagcagcaagggaaatgtgtatagaatttgggcgcagaaaaaaattgcggaactggatttgaactacgaaaagaacagcaccgaacttatggaactcggtcagcaattcggtattgtcacgagaaatacatcgcttatagttcttgaaacacttagtgactatattagctatggcattgagccgcccgctaccgaaccagaaatgcgagcagaatatcagcgtagaacaaaaggaacaaaaggaacaaaagaaaaaatagtgcaatgggacggttctgaactaagagatacaagatctaggagatctaatttcagtgcctataacctcatgaaagataaaaactttgccaaagacatagacaaggttttgaaaaatgttgcaggtcttcaaaccagcggtaaaacagagcttggcggcaggcgtggttctgctacgggtggtacgggtggttttaacgacggctacgcagaaggcggttccggtggcattggtgatatgctcggcggcttgatgggtggcagcgcaggcggcggcacaaaagccagaggctctttaaaggcaccaagcgcaagagacattgatatgggtgccggtgatggttcccgttcccaaagcgaagatatggctgttgtcaatgcccgtatgccggggcttaggaatatatataataaatattttgaaattaaaacccgaatttggtggcaaaattactctcaaattcaccattgctcctag

SEQ ID NO: 24384 - protein, 514 aa, Unknown
  Obtained from environmental sample
  misc_feature (1)..(514): Xaa is any amino acid
MNFALPAPIDIPQVMMQSAQGSHYFLASVAPKMETRKKFWDNNLAIIWDVSLSGSQRDLKREMDLLNTIFTDKKNADVHLYFLNNRFKKIANKGTGNGEYKVTNGKWDELKSVLEKAVFDGGTDFSQINADDITGNEVLLFSDGISTLSDADFLRNTKASPPIHCVVSSAKADYSVMKLITGKTKGKFVNITALSPKKLKGELLNETLLFLGAEHGKSVREVYPSIATPVHGNFSIAGISETDDEEITLLFGFGNKIEKKIKVKLDAKRASSKGNVYRIWAQKKIAELDLNYEKNSTELMELGQQFGIVTRNTSLIVLETLSDYISYGIEPPATEPEMRAEYQRRTKGTKGTKEKIVQWDGSELRDTRSRRSNFSAYNLMKDKNFAKDIDKVLKNVAGLQTSGKTELGGRRGSATGGTGGFNDGYAEGGSGGIGDMLGGLMGGSAGGGTKARGSLKAPSARDIDMGAGDGSRSQSEDMAVVNARMPGLRNIYNKYFEIKTRIWWQNYSQIHHCS

SEQ ID NO: 24385 - DNA, 924 bp, Unknown
  Obtained from environmental sample
  misc_feature (1)..(924): n is a, c, g, or t
gtgaggaaaccatcagttaaaatggacgtcacatcgcacaacatcgcaaacgtgatacgtttcggatataagtcgcagagagtgacgcttaaagaaggatttacgcagatgcttcgcggagcgtcgcgtccggcaggaaacgccggcggagtaaatcccatgcaattgggtttgggaatgtcgataggttcgattgactcaattatggaacagggcaacttgcaaacgaccggaaaacttacggatttggctatcgaaggaaatgcgtttttcgcctttacaaacggaatgggcggaactttttacggaagaaacggtgcgctgatgttggatggcaatggaattttggtgtcgggcaacaacggtttccccttgcttggactttccgccgattccgaaggcaaaattccgcttggcgcggtcgccggtcctattcgcattccgttcggagacaaatcgcccgcccgcgctaccgaagaggtacaactgggttgtaatttggattccgactccgtaggattggcgacctggacgcatacggctacgtttcttacggaagccaaaggaaaagaccccctcagttccgatgacgattccacccctcttaccgcattgtttgacggcgacggcaacgcgcttaatattcagcataaagacaaattgagaatctcgtatatggacggaatcgaagagttcaagattgattttatcgtggataccgacgaaacacataacgtttatccgaccggaaatcctcctacggtaagaagccttaacgatttggctatcgcgataacccatgcccttagtttagcgcctagtttccccggcggtaccgcgagtataaccgcggacggcaaaattttaataggtcccgcagcgtcggtgagcaacactatcactaacctgtcgtcaaaaacatga

SEQ ID NO: 24386 - protein, 307 aa, Unknown
  Obtained from environmental sample
  misc_feature (1)..(307): Xaa is any amino acid
MRKPSVKMDVTSHNIANVIRFGYKSQRVTLKEGFTQMLRGASRPAGNAGGVNPMQLGLGMSIGSIDSIMEQGNLQTTGKLTDLAIEGNAFFAFTNGMGGTFYGRNGALMLDGNGILVSGNNGFPLLGLSADSEGKIPLGAVAGPIRIPFGDKSPARATEEVQLGCNLDSDSVGLATWTHTATFLTEAKGKDPLSSDDDSTPLTALFDGDGNALNIQHKDKLRISYMDGIEEFKIDFIVDTDETHNVYPTGNPPTVRSLNDLAIAITHALSLAPSFPGGTASITADGKILIGPAASVSNTITNLSSKT

SEQ ID NO: 24387 - DNA, 765 bp, Unknown
  Obtained from environmental sample
  misc_feature (1)..(765): n is a, c, g, or t
ttgactaatttcgcaaaaaaacactcgtcggcaatagtgataatcgggcatataacaaaagaaggttcgattgccggaccgcgccttttggaacatatcgtcgatgtaatcttgaccttcgagggcgaggactttaacagatttcgaatattgcgcggacaaaaaaaccgtttcggagcaagcggggaaatagccgtttttgacatgtcggcgcaagggctgtcggaaattcgcgacacggcgaaaatttttctcaacgaactttctcgcaaacgtcccggatgcgctacggttccgcttatagagggaagccgcgtaataatggtggaaattcaggcgctcgtcaacaaaagccatttcggaaattctcagcgcgtagcaaacggaataaatcccaaaagaatcgctttgatttcggcggttcttgaaaaatacacggggatttctttgggcgattacgatatttttgtaaatgtgacgggtggcttaaacgtaagcgagccggcggtcgatttggcgacggcggctgctctgttgtcgtcttatataaacaaagtgattcctatcgaatattcgtttatgggcgaactgggtttgggcggcgaaatacgtccggtagtcgatatggaaaaacgtataaaagaagttattgccatgggatttgaaaaagtcgtctgtccggcggtaccgaaaatttcaaaggacattcaactttctatggtcgtttgcagggatatttgccaattaggcgaaattttgcgatga

SEQ ID NO: 24388 - protein, 254 aa, Unknown
  Obtained from environmental sample
  misc_feature (1)..(254): Xaa is any amino acid
MTNFAKKHSSAIVIIGHITKEGSIAGPRLLEHIVDVILTFEGEDFNRFRILRGQKNRFGASGEIAVFDMSAQGLSEIRDTAKIFLNELSRKRPGCATVPLIEGSRVIMVEIQALVNKSHFGNSQRVANGINPKRIALISAVLEKYTGISLGDYDIFVNVTGGLNVSEPAVDLATAAALLSSYINKVIPIEYSFMGELGLGGEIRPVVDMEKRIKEVIAMGFEKVVCPAVPKISKDIQLSMVVCRDICQLGEILR

SEQ ID NO: 24389 - DNA, 1491 bp, Unknown
  Obtained from environmental sample
  misc_feature (1)..(1491): n is a, c, g, or t
gtgcgttaccgaattgaacaccaaagaagaaatcgacaatctcgcgaaaattttaagggaaggtcaaaaatgaaactgatctttgagaagggcaaaaaaggaaggggctgttcgatactgcctccctgcgatgtaagctaccacgagcttccggaaaaattccttagaaaagcaaaagctcgtcttccttccatggacgagaacgaaatatcccggcattacagcgccatggcgaaaagagccttcggtgttaacgacggtttttatccgctgggttcctgcacgatgaagtataatccgaaggtaaacgaggaaatagcttctctaccgaactttgcgaatatccatcccctgcaaccggtgcataccgtacagggatgccgtaaagtgctggacatagcctctgaatatctaaaggaaataaccggcatggacgctttcagcttccagcccgccgctggggctcacggcgaactaaccggcctgcttctttttaaagcgtaccacatgagcaggggcgataaaaaccgcacaaaaattatagttcccgacagcgcccacggaaccaatccggcgacagcgaacatggtgggctacgaagttatcaatatcgcttcaaacagctctggctgcgtagacctcgaatcccttaaagccgcccttggaacggatacggcgggccttatgctgaccaatcccaacacgcttggaattttcgacccgaacatcctggaaataacccggcttgtacacgaggctggcgggctaaactattacgacggggcaaacctaaacgcgatcatgggcattgtccgtccaggagacatgggcttgnacgcggttcacctcaacttgcataaatccttctctaccccgcatggcggcggcggccccggttccggcgccgtaggatgcaaaaaagaactcatcccttttatgcccattgattccatggaagacgaaagcggagaagccagaccccaaagcatcggaagggttaaagctttttacggcaatttccttgtagtggtaaaagccgccgcctacctgctcacgctcggcagagagaacatccccgaagccgccagaactgcggtcctaaacgcaaactacttaatgaaaagattaagcgagaaattccacatttctacagccagcccatgtatgcatgaatttgtaatttctcttgagaaactcaaggagagctgcggagtttccgccatggacatggccaaggccctgcaggacaagggtatgcaccccccaacaatgtatttccctcttatcgtgcatgaagccttaatggtagagcccacggaaactgaatcaaaggaaacgctggacgaagccgccgacgctttcatctccatttatgaaagggctaccaaggagcctggcgttttcagcgccgctcccttaacaacggctatcggaaggcccgatgatgtaaaggcggcgcggcaacctgtagtctgttattgcatggattaa

SEQ ID NO: 24390 - protein, 496 aa, Unknown
  Obtained from environmental sample
  misc_feature (1)..(496): Xaa is any amino acid
MRYRIEHQRRNRQSRENFKGRSKMKLIFEKGKKGRGCSILPPCDVSYHELPEKFLRKAKARLPSMDENEISRHYSAMAKRAFGVNDGFYPLGSCTMKYNPKVNEEIASLPNFANIHPLQPVHTVQGCRKVLDIASEYLKEITGMDAFSFQPAAGAHGELTGLLLFKAYHMSRGDKNRTKIIVPDSAHGTNPATANMVGYEVINIASNSSGCVDLESLKAALGTDTAGLMLTNPNTLGIFDPNILEITRLVHEAGGLNYYDGANLNAIMGIVRPGDMGLXAVHLNLHKSFSTPHGGGGPGSGAVGCKKELIPFMPIDSMEDESGEARPQSIGRVKAFYGNFLVVVKAAAYLLTLGRENIPEAARTAVLNANYLMKRLSEKFHISTASPCMHEFVISLEKLKESCGVSAMDMAKALQDKGMHPPTMYFPLIVHEALMVEPTETESKETLDEAADAFISIYERATKEPGVFSAAPLTTAIGRPDDVKAARQPVVCYCMD

SEQ ID NO: 24391 - DNA, 510 bp, Unknown
  Obtained from environmental sample
  misc_feature (1)..(510): n is a, c, g, or t
atgttaaaaccctatgatttatttgaaaatatactgcttgatattgaaaacggtatcaaaaacaaaataaacgcgtcggttctttccaaaaaatatagtttttcggaagttcatttacgcagactgttcacttttgcctttaaacaaaccatctccgcttatatacgttcccgcatattggcggcaagccttaacgatttacttaaaacggacacaaatattcttgatattgcgcttgaatacggctttgaatatgaacagtcgtatatcagggccttcaagcgtgaattcggaataactcccggcgatttacgaaaaaaagggcagattgtaaaaatcaaaccgccgcttcatcttttcaatgaaaacaagctggatgacggtgttctgttcggacccgatatagtgatagttccgcagtttcatatcataggcaaacgccacctgataccgtttgaggattctacggagatggctccgcgggtaggaaaacaattttgggggaaatga

SEQ ID NO: 24392 - protein, 169 aa, Unknown
  Obtained from environmental sample
  DOMAIN (62)...(106): Bacterial regulatory helix-turn-helix proteins, AraC family
  misc_feature (1)..(169): Xaa is any amino acid
MLKPYDLFENILLDIENGIKNKINASVLSKKYSFSEVHLRRLFTFAFKQTISAYIRSRILAASLNDLLKTDTNILDIALEYGFEYEQSYIRAFKREFGITPGDLRKKGQIVKIKPPLHLFNENKLDDGVLFGPDIVIVPQFHIIGKRHLIPFEDSTEMAPRVGKQFWGK

SEQ ID NO: 24393 - DNA, 444 bp, Unknown
  Obtained from environmental sample
  misc_feature (1)..(444): n is a, c, g, or t
ttgcaattgaggtcaaataggggattctgcatgaagctgacttatccagcatgtttctacaaggacgatgaaagcgggggcttcgccgtggaagtgcccgacctgcctggatgcgccagcgggggggaaactttggccgacgctatactcatgggcaccgacgctgcatccggctgggtgctgacttggctggaaaaaggccgcgccctgccccagcccagtccaatagaaaccatcaagcctgtggaagatgggggctttgtaaacgtcctggtcctcgatatggacgaatacgctaaaaaacatgggcaaaagccgataaagagaaacttcgacctagaaatccctgcctatctcctcactttcgctgaatcccgccgcatcgacatttcaaggatcgcccaagacgcgctttcggaactgtacttgaaacagcctctttga

SEQ ID NO: 24394 - protein, 147 aa, Unknown
  Obtained from environmental sample
  DOMAIN (14)...(62): Uncharacterised protein family (UPF0150)
  misc_feature (1)..(147): Xaa is any amino acid
MQLRSNRGFCMKLTYPACFYKDDESGGFAVEVPDLPGCASGGETLADAILMGTDAASGWVLTWLEKGRALPQPSPIETIKPVEDGGFVNVLVLDMDEYAKKHGQKPIKRNFDLEIPAYLLTFAESRRIDISRIAQDALSELYLKQPL

SEQ ID NO: 24395 - DNA, 753 bp, Unknown
  Obtained from environmental sample
  misc_feature (1)..(753): n is a, c, g, or t
atgagtagatcatactacatagcgggcaactggaagatgcacaaaacccgcgccgaggctgcggaacttgctaaggtgctggtcgcccagttaaaggacgggaagcacaaatatcttgtcgcgccgtcttttaccagtcttgagaccgtgggcgccattgtcaaaggcaccaatattaggcttggagcgcaggactgcgcgtgtgaggaacagggcgcccataccggcgaagtttctgttttgcagttaaaagaccttggcgtgcagaccattatcctgggccacagcgagaggcggcacgtctacaaggaagacgacgcgctgatcaacaaaaaggtgaagctggccctgaaacacggttttgaagtaattctctgcattggggaactgctggaagaacgcgaagccggcaaggttgaacaagtctgtgaatcccagaccgtgaaagggcttgagggcgtaagtgcctccgaactggcgaatatcgtcatcgcctacgagccggtctgggccattggtaccggaaagaccgccaccccggaagacgcggaggcggttcacgcctttgtgcgcaaagtgattgcgcgcctctacggacaagctgccgcggataaaatcatcatccaatacggcggctcggttaagccggacaacgccgcccagttgatggccaaagagaacattgacggcgccctggtaggcggcgcggctcttaaaccggatacctttgtacctatcgcgaaatttaattag

SEQ ID NO: 24396 - protein, 250 aa, Unknown
  Obtained from environmental sample
  DOMAIN (5)...(247): Triosephosphate isomerase
  misc_feature (1)..(250): Xaa is any amino acid
MSRSYYIAGNWKMHKTRAEAAELAKVLVAQLKDGKHKYLVAPSFTSLETVGAIVKGTNIRLGAQDCACEEQGAHTGEVSVLQLKDLGVQTIILGHSERRHVYKEDDALINKKVKLALKHGFEVILCIGELLEEREAGKVEQVCESQTVKGLEGVSASELANIVIAYEPVWAIGTGKTATPEDAEAVHAFVRKVIARLYGQAAADKIIIQYGGSVKPDNAAQLMAKENIDGALVGGAALKPDTFVPIAKFN

SEQ ID NO: 24397 - DNA, 516 bp, Unknown
  Obtained from environmental sample
  misc_feature (1)..(516): n is a, c, g, or t
atgtatttaattggtacaaaagatgaatatggtattgtaaatttctcacttaaaacatgggtatctttttgttggaataattcgcctcatatatcattttgtaacggaggagaaacaaagacaaaagataatataataaaaacaaaaaagttttctgcaaatttagtcagttgtgatatgttaaaattggctgactatttaggaaatgtcagtggaaatgatactataaaaaatgaaattgaatataaatatactaatggatataagcttgatgttccaataatggaaaatagtaaatgggtttttgaatgtgaattagctaaaaatatagaattaaatggtagtataatatttattggagaaataagaaacattcaaatagacaaatgccttgaagatatggatagggaaaatatagatttaaaaaaaatagatccagtaatatatgcaccatataattatttttcaataaaagaaaatatcgggaaatgtggtgattatggaataataaaatga

SEQ ID NO: 24398 - protein, 171 aa, Unknown
  Obtained from environmental sample
  misc_feature (1)..(171): Xaa is any amino acid
MYLIGTKDEYGIVNFSLKTWVSFCWNNSPHISFCNGGETKTKDNIIKTKKFSANLVSCDMLKLADYLGNVSGNDTIKNEIEYKYTNGYKLDVPIMENSKWVFECELAKNIELNGSIIFIGEIRNIQIDKCLEDMDRENIDLKKIDPVIYAPYNYFSIKENIGKCGDYGIIK

SEQ ID NO: 24399 - DNA, 495 bp, Unknown
  Obtained from environmental sample
  misc_feature (1)..(495): n is a, c, g, or t
atgatgaagctttcgatgggatacccggacagggacgcggaacttaccatactggatgagtgcccggccgaaaaagggctggcgaacctaaagccggctgttaagctggcggattttctggctgcgaaaaaggccgcttcggaagtcttctgccaccaggcgctgaaagaagccgtcgccgacattatccgtgacacccgtattcaccgggcctttaccctgggggcaagcccccgcgccggcctgcatcttctggacgcggcaaaggcgctggctttggtgcgcgggcgcaattatattattgatgaggatctgacggtactcgcttctccggtgcttgcccaccgggtcaggcttcgcgaccccagggcccaggcggataaatttatccgagagatctgccttgccagaataagcagtataaaaaccgacggcataaatgccggtggcatgaatgcaaacggcgttaacgccgccggaacaagggccgaatga

SEQ ID NO: 24400 - protein, 164 aa, Unknown
  Obtained from environmental sample
  misc_feature (1)..(164): Xaa is any amino acid
MMKLSMGYPDRDAELTILDECPAEKGLANLKPAVKLADFLAAKKAASEVFCHQALKEAVADIIRDTRIHRAFTLGASPRAGLHLLDAAKALALVRGRNYIIDEDLTVLASPVLAHRVRLRDPRAQADKFIREICLARISSIKTDGINAGGMNANGVNAAGTRAE

SEQ ID NO: 24401 - DNA, 786 bp, Unknown
  Obtained from environmental sample
  misc_feature (1)..(786): n is a, c, g, or t
ttggcagtggattcggtggtacagcttgcaatcgacaagcttgttcccaatccgggccaaccccgtaaaaattttgacgaaacggaacttcaggaactggcggattccattaaggagcatggcgtcataatgccggttatcgcggcggataccggagatggttcctataccattatcgccggggaaaggcgtacaagagccgcgaggcttgccggccttgaagaaatcccggtgatcatccgggattacacagaccaaaagcggcttgaggtttctctcattgagaatatccagcgcagcgatctgaaccccatcgaggaagcaaccgcttataaaaaccttatggacttttccagcctgtcccatgaggaacttgccgccagagtcggcaaaaaccgttccacggtgacaaacgctctgcgcttgttgaaactttccgccgaggtgcagaagggccttgaaaacggcgatctcagcccgggccatgcgcgggctctgctttcggtaacagacgataaactgcgggaaaaactgtttaaggaaattaccgcaaaagggctttccgtccgcgaaactgaaaagaaggccgcggcgctgaacaccgccggcgaagcanaacaagcggcaaaacgcccccctgagataagcgaaatggaagaaaagtttatagaaagacttgggacaaaagttactatcgacggcgggctggagaagggccgaatccaaattgaatattattcaatggaagaccttgaccggctgtacgaaattatcagcagcaaatga

SEQ ID NO: 24402 - protein, 261 aa, Unknown
  Obtained from environmental sample
  DOMAIN (7)...(97): ParB-like nuclease domain
  misc_feature (1)..(261): Xaa is any amino acid
MAVDSVVQLAIDKLVPNPGQPRKNFDETELQELADSIKEHGVIMPVIAADTGDGSYTIIAGERRTRAARLAGLEEIPVIIRDYTDQKRLEVSLIENIQRSDLNPIEEATAYKNLMDFSSLSHEELAARVGKNRSTVTNALRLLKLSAEVQKGLENGDLSPGHARALLSVTDDKLREKLFKEITAKGLSVRETEKKAAALNTAGEAXQAAKRPPEISEMEEKFIERLGTKVTIDGGLEKGRIQIEYYSMEDLDRLYEIISSK

SEQ ID NO: 24403 - DNA, 555 bp, Unknown
  Obtained from environmental sample
  misc_feature (1)..(555): n is a, c, g, or t
gtggcaaaatcaaggtttgttctttcccgagattccaatcccctaacaggacaggcttcagtagaaatactcgatccaaacaggacaatccgtcttgaccgtcttgaagaaggtatctggtactggactgtggaagcgcagactcctgaaggtatggacattacggcgcaaagcccgaatctgttacgtgttctgccaattccccgtttgccagcccctgcaaaccgccaaccttccgcaggacagcgtatcggcattgaagaattaaaaaaaggaagtattaatttttcttggtcaacggtatcaggggcaaacgcgtatatttttacgctttatcaggataatgacggcagacggcggcaaattacgcaaatagggccggaaaacagaacgtcatgggcgacggaagttaaaacgcttggaaggggaaattttatctggcaggtggaagctgtaaacttgggacggaacaatgttattgaacagcggggcaatacgggagaaaataattttattatagacattccccgcgctgggaccggtaaagataattga

SEQ ID NO: 24404 - protein, 184 aa, Unknown
  Obtained from environmental sample
  misc_feature (1)..(184): Xaa is any amino acid
MAKSRFVLSRDSNPLTGQASVEILDPNRTIRLDRLEEGIWYWTVEAQTPEGMDITAQSPNLLRVLPIPRLPAPANRQPSAGQRIGIEELKKGSINFSWSTVSGANAYIFTLYQDNDGRRRQITQIGPENRTSWATEVKTLGRGNFIWQVEAVNLGRNNVIEQRGNTGENNFIIDIPRAGTGKDN

SEQ ID NO: 24405 - DNA, 447 bp, Unknown
  Obtained from environmental sample
  misc_feature (1)..(447): n is a, c, g, or t
atgacagattggccgagtctctgcgcgattatccncaggaacgggcatagntactgggatttcccaaaaatatttaccctggtaatgatggttctggggggcgcggctgtttttaccggagttttcattctgggagccacagtgtgttttttcacgcttgagggacttgaggtgatcaacatattcaccgatggcggaagagaactcgcaagctacccgctgccggtttacggcaaatggatcacccgctttttcacttttgtcatcccatttggttgtatgaactaccttccgcttctttacctcacaggccgcacaacaacccagggcgtcttttttcccgcctgggtttatatgctcatacccctcctgggcttcgcattcatcctgccctgtatccttgtctggcgctttggggtaaggcattacagctctgcgggatcgtga

SEQ ID NO: 24406 - protein, 148 aa, Unknown
  Obtained from environmental sample
  misc_feature (1)..(148): Xaa is any amino acid
MTDWPSLCAIIXRNGHXYWDFPKIFTLVMMVLGGAAVFTGVFILGATVCFFTLEGLEVINIFTDGGRELASYPLPVYGKWITRFFTFVIPFGCMNYLPLLYLTGRTTTQGVFFPAWVYMLIPLLGFAFILPCILVWRFGVRHYSSAGS

SEQ ID NO: 24407 - DNA, 522 bp, Unknown
  Obtained from environmental sample
  misc_feature (1)..(522): n is a, c, g, or t
ttgttacaacaattcatggaggtgaaaacaatgataatcaacacagtacctaattcttcaaagtccaaagattatgtttcatggtctgactcatattctgttggaataaagctcatagatgaccaacacaaaggtcttctggaatttgtcaatgatttgttcaatcattctaccggaaatgaagccgatgagaaggcttattttaaagaagtaattcaacaagccgtgcaatatgtaaaaaatcattttcagacagaagaaaaattaatgattacgactaaatatcccggctatgcggagcataaaaagtcccatgatgaatttaccttggtggtggttaaaagcgtaaaggattttgaatcaggcaagcgtcttgttcttgagaaatttgcctattttctaaaagattggattttaactcatgtggccgtaatggataaacaatattcaatatttttaagaaaaattgccacccgcaaagcggatggcaagctgtctatcggaatggccgatatagtgtag

SEQ ID NO: 24408 - protein, 173 aa, Unknown
  Obtained from environmental sample
  DOMAIN (35)...(93): Hemerythrin HHE cation binding domain
  misc_feature (1)..(173): Xaa is any amino acid
MLQQFMEVKTMIINTVPNSSKSKDYVSWSDSYSVGIKLIDDQHKGLLEFVNDLFNHSTGNEADEKAYFKEVIQQAVQYVKNHFQTEEKLMITTKYPGYAEHKKSHDEFTLVVVKSVKDFESGKRLVLEKFAYFLKDWILTHVAVMDKQYSIFLRKIATRKADGKLSIGMADIV

SEQ ID NO: 24409 - DNA, 459 bp, Unknown
  Obtained from environmental sample
  misc_feature (1)..(459): n is a, c, g, or t
atggccgtaagcgagagcatgacctatatcttctcccgctacgaacccgcgtcgagcaacctaaaagactcggtgatggcccagataggcgccaacagcggtcagacggctttcgtctccatgggcgacatgcgagcggtagccctaaacgtgcacaacatagacatcagctccaagtggggcgcggccaccgccatagaaacggtgaacaacgctttacagcgcgtctctcaccagcgcgccctgctcggcgctatgcagaaccgtttggaacacacgataaagaacctcgacgcctccaccgagaacctgcaagccgccgaaagccgcatccgcgacgtcgacatggcaaaggagatcatggagtacacgaaggacagcatcctcatgcagtcggcgcaggcgatgctggcacaggcgaaccagataccggagagcgtgctacaactgctgcgttaa

SEQ ID NO: 24410 - protein, 152 aa, Unknown
  Obtained from environmental sample
  DOMAIN (59)...(130): Bacterial flagellin C-terminus
  misc_feature (1)..(152): Xaa is any amino acid
MAVSESMTYIFSRYEPASSNLKDSVMAQIGANSGQTAFVSMGDMRAVALNVHNIDISSKWGAATAIETVNNALQRVSHQRALLGAMQNRLEHTIKNLDASTENLQAAESRIRDVDMAKEIMEYTKDSILMQSAQAMLAQANQIPESVLQLLR

SEQ ID NO: 24411 - DNA, 435 bp, Unknown
  Obtained from environmental sample
  misc_feature (1)..(435): n is a, c, g, or t
ttgacccgaaaaaggctatcatctttgagggcgatacagggccgtatctgctatacagctacgcgagggcgtcgtcgaactgataaaactggacggttgggtgatgttggccataatggtaataataataacaagcgatggattgacagatcccaattgccggaaagttttgacgccgctgatatcatgttattaaagaagatagcgttcttcccagaagctgtcggctttgcttataatagattatcgccctcccttatcgcgaattacgcttttgatctggagcaactgttcaacgagttctatcattcaagtcaagtgataggaagcgggggagcggtccaggccttcagggtcaatctcgtgtcggcgtttcggtccgatattcgcgtatgtctcggacttttaggcgttgacgctatcgaggatatgtag

SEQ ID NO: 24412 - protein, 144 aa, Unknown
  Obtained from environmental sample
  DOMAIN (16)...(144): DALR anticodon binding domain
  misc_feature (1)..(144): Xaa is any amino acid
MTRKRLSSLRAIQGRICYTATRGRRRTDKTGRLGDVGHNGNNNNKRWIDRSQLPESFDAADIMLLKKIAFFPEAVGFAYNRLSPSLIANYAFDLEQLFNEFYHSSQVIGSGGAVQAFRVNLVSAFRSDIRVCLGLLGVDAIEDM

SEQ ID NO: 24413 - DNA, 1506 bp, Unknown
  Obtained from environmental sample
  misc_feature (1)..(1506): n is a, c, g, or t
atgagccatgaaatgcgtacgccgatgaacgccattatcggcatggttgcgataggaaaacccgctgccgatattgcgcgcaaggattactgtcttacaaaaattgaagaagcctcaaggcatcttttaggcgtaatcaacgacgttctggatatgtccaagattgaagccggaaaatttgatctgtcgcctgaagagtttgattttgagaggatggtcaggcgggttgtggatgttatcaacttccgcgtagacgaaaagaaacagaaactcagcgtgcagatagacgaaaatattccgcgaaccattatcgccgatgatcagcggcttgcgcaggttattacaaacttgcttggaaacgccgttaaattcacgcaggaaaaaggcactatccgccttaacgctaaatttttggaagaagaaaacgatctttgcaccctggaaatttcaataagcgacaatggaatcggtattgacgccaaacagcaggaacgcctgttcacttcatttcaacaggcggaggcgtctacgacgcgccgcttcggaggttcgggactggggcttgtcatttccaagagcattgtcgaaatgatgggcggaaaaatccggttaaaatccgagctgggaaaaggctctgtttttacatttacgataaaagcaaaaaaaggcgaacagtcaaggcaaaggcttcttgcggacggcgtaaaccgggaaaatntgcgtattctcgctatagatgatgatcccgatattttaatgtacttcaaaaaaatagcggaacagcttggcgtatcctgcgacacggcggaaaacggaaaagaagcgattaatatggtaaagaacggaggcagttacgacatttattttatagattggaaaatgccggatatagacggaatagcattgacaaaggaattaaaagcgcaaacatcaagttcgggaaattccgtagcgataatgatttccgcaggcgagtggagcattatcgaggataaagccagaaaagccggcgttgatcgttttctctccaagcccctcttcccgtccaccattgccgacataatagacaactgtcttggcgtggagcatgaaaagaaagaggaaaagcccgaggtactgggagttttttccggacggcgcatattgattgccgaggacgttgagataaaccgcgaaatagtgatgtccctgcttgagccgaccaaactggaaatagactgcgctgaaaacggcagggaagccgtccgcaaattcagcgaagctcccgataaatacgatttaattttcatggacgtgcagatgcctgaaatggacggctatgaggcgacacaacgtattcgcgcaattgaagcggaacgcaatggcgcgggctttatcgaaaataataataaaaacatggattttcctaataaaatgcaaaaaaacggcaatttagattccgctaaagattatattaataataaggagtctccaaaagaaaatcaagaagcagctcggccgatctga

SEQ ID NO: 24414 - protein, 501 aa, Unknown
  Obtained from environmental sample
  DOMAIN (1)...(58): His Kinase A (phosphoacceptor) domain
  misc_feature (1)..(501): Xaa is any amino acid
MSHEMRTPMNAIIGMVAIGKPAADIARKDYCLTKIEEASRHLLGVINDVLDMSKIEAGKFDLSPEEFDFERMVRRVVDVINFRVDEKKQKLSVQIDENIPRTIIADDQRLAQVITNLLGNAVKFTQEKGTIRLNAKFLEEENDLCTLEISISDNGIGIDAKQQERLFTSFQQAEASTTRRFGGSGLGLVISKSIVEMMGGKIRLKSELGKGSVFTFTIKAKKGEQSRQRLLADGVNRENXRILAIDDDPDILMYFKKIAEQLGVSCDTAENGKEAINMVKNGGSYDIYFIDWKMPDIDGIALTKELKAQTSSSGNSVAIMISAGEWSIIEDKARKAGVDRFLSKPLFPSTIADIIDNCLGVEHEKKEEKPEVLGVFSGRRILIAEDVEINREIVMSLLEPTKLEIDCAENGREAVRKFSEAPDKYDLIFMDVQMPEMDGYEATQRIRAIEAERNGAGFIENNNKNMDFPNKMQKNGNLDSAKDYINNKESPKENQEAARPI

SEQ ID NO: 24415 - DNA, 1131 bp, Unknown
  Obtained from environmental sample
  misc_feature (1)..(1131): n is a, c, g, or t
atgatcgccaagaatcgcgcgttcagccgccatctgcttttgccggaaatcggcgttgaggggcaaaaaaaattaaaggcggcgaaagttctcatcgtaggcacagggggactgggcgcgccgctcgccctctaccttgccgcggcgggcgtgggaacaatagggcttgttgactttgacgtggtggacgaatcaaaccttcagcggcagataattcacagcacacgcgacgtgggaagacccaaagtggcttcggcaaaagacagaatcaaggggataaacccgcttatcaacgtggtaacgcataacgcgatgctttcaagccaaaacgcgcttgagctttttgccgattacgacattatcgcggacgggaccgacaatttccaaacgcgctatcttgtaaacgacgcctgcgtattcttggggaaactgaacgtatacggctccgtgtttcagtttgacggacaggcgaccgtcttcggcgcgaaagacggcccctgttaccgctgcctctacccgtccccgccgcctccgggacttgtcccctcttgcgcggaaggcggagtcatgggcgtactgcccggcattatcggaaccattcaggcggcggagacaattaagctcatcgtcggcggagcgaaaccgcttgtaggccgtcttcttttatttgacgcgtggcgcatggcgttccgcgaattaaaacttgataaaaatcccgactgtcccgtttgcgggaaaaatccttccattcacgaacttatagactacgaacaattctgcggtttgaaaaaaaacaccgacagcaagcctatagatactataaccgctcttgatttaaaaaaacgacttgataacggagataaaattcaatttatagatatacgcgaaccccatgaacgcgccattgtaaaatttcccgatgcaaaagttattccgcttggtcagctcgagagacgcatggaagaattagacccgtccatagacgcggtatttctctgcaaaatcggacagcgcagtattttgggaatacgggctttgcaggatgccggttaccatggcaaattgctgaatttgcaagacggcctcaacgcctgggcaagatacgtagataaaaccatgcctatctattga

SEQ ID NO: 24416 - protein, 376 aa, Unknown
  Obtained from environmental sample
  DOMAIN (275)...(368): Rhodanese-like domain
  misc_feature (1)..(376): Xaa is any amino acid
MIAKNRAFSRHLLLPEIGVEGQKKLKAAKVLIVGTGGLGAPLALYLAAAGVGTIGLVDFDVVDESNLQRQIIHSTRDVGRPKVASAKDRIKGINPLINVVTHNAMLSSQNALELFADYDIIADGTDNFQTRYLVNDACVFLGKLNVYGSVFQFDGQATVFGAKDGPCYRCLYPSPPPPGLVPSCAEGGVMGVLPGIIGTIQAAETIKLIVGGAKPLVGRLLLFDAWRMAFRELKLDKNPDCPVCGKNPSIHELIDYEQFCGLKKNTDSKPIDTITALDLKKRLDNGDKIQFIDIREPHERAIVKFPDAKVIPLGQLERRMEELDPSIDAVFLCKIGQRSILGIRALQDAGYHGKLLNLQDGLNAWARYVDKTMPIY

SEQ ID NO: 24417 - DNA, 846 bp, Unknown
  Obtained from environmental sample
  misc_feature (1)..(846): n is a, c, g, or t
gtgattaaaaatgtttggatcaatgtgaacggcagacaggttgcggggaagagcgtttcacgtgatgtcgcgatgcccgtatcgggtttgaacgtaacgggaaaagacaagaaaatgtatttcaccgtccctcttgacgtggaagacggaaccaatctcgtggaagtgtttgcaactaacagttataacgcggagggcagggctgacatttcatttaacgcggaaattcgccaggctttgcccgatctgtggctgcttgcgataggggtaaacgactacagttcgtctaaggtgttgaatctgtcctacgccgtcaacgacgcaaaggagcttgttaaggtatttaaaaagcaggagggcaaatgttacggtaaagttaatacgcttgtcatcgccgacggcgaaaggcaaaaaccgacagccgctgtgatacgcgaaagttttgcgtggttcaaacaggcaaaggatcgcgacttgtgcatcctctttatcgcggggcacgcgataaatgacaaagacggtaattattattttttgccggcggacgcggcgtttgatgaatcaggcaatattattccaaagacggcaatttccaacaaggaaatttattcggtgttggatttagatatgacagggcgtaaattgttcatccttgatacctgccactcggcgggggcggggaactccgatactgtggacactaacagttttttaaagctggcgaaagaatataaccctgtaattttcagttcctgccaggacagcgaacagtcgctggaaaagcctgagtttaaacacggcctgtttacctacggcatcatcaagggcatggaagggaagcggtaa

SEQ ID NO: 24418 - protein, 281 aa, Unknown
  Obtained from environmental sample
  DOMAIN (83)...(281): Caspase domain
  misc_feature (1)..(281): Xaa is any amino acid
MIKNVWINVNGRQVAGKSVSRDVAMPVSGLNVTGKDKKMYFTVPLDVEDGTNLVEVFATNSYNAEGRADISFNAEIRQALPDLWLLAIGVNDYSSSKVLNLSYAVNDAKELVKVFKKQEGKCYGKVNTLVIADGERQKPTAAVIRESFAWFKQAKDRDLCILFIAGHAINDKDGNYYFLPADAAFDESGNIIPKTAISNKEIYSVLDLDMTGRKLFILDTCHSAGAGNSDTVDTNSFLKLAKEYNPVIFSSCQDSEQSLEKPEFKHGLFTYGIIKGMEGKR

SEQ ID NO: 24419 - DNA, 489 bp, Unknown
  Obtained from environmental sample
  misc_feature (1)..(489): n is a, c, g, or t
atggggcggttccagacgatgacggatttgggtattcaggaaaggcttgaaaaagagggatacaatctgctggacagggacaaagccgcctcccctgaggagcggctggatattatgcgccgcgctctgttatgcgacacctttctttccggcacgaacgcgataagcgaagacggctggcttgtaaacatagacggaaacggcaaccgcgtcgccgccatgatttacggccccaaacaggtaattatagcggcgggaatgaacaaagtcgctaaaacctacgaagacgcggttgtgcgcgccagaaccatagccgcgcctcttaacgcccagcgcttcccgtcgctaaagacgccctgcagcgaaacaggaacctgcgcaaactgcatgaacgcggacacaatctgctcaattttcgtttccaccagatacagcaagcccgccggcagaataaaaattatcctgatagggaaagatatgggattatga

SEQ ID NO: 24420 - protein, 162 aa, Unknown
  Obtained from environmental sample
  DOMAIN (1)...(162): Protein of unknown function (DUF1121)
  misc_feature (1)..(162): Xaa is any amino acid
MGRFQTMTDLGIQERLEKEGYNLLDRDKAASPEERLDIMRRALLCDTFLSGTNAISEDGWLVNIDGNGNRVAAMIYGPKQVIIAAGMNKVAKTYEDAVVRARTIAAPLNAQRFPSLKTPCSETGTCANCMNADTICSIFVSTRYSKPAGRIKIILIGKDMGL

SEQ ID NO: 24421 - DNA, 1014 bp, Unknown
  Obtained from environmental sample
  misc_feature (1)..(1014): n is a, c, g, or t
gtgggcattgaaccgcgcaccatttcgttctcctttagcgaatacggaactgtcggcgctcttgttcaggccctcggcgcggttgaaggcatggaagtcaagaacagtattcctgaaggaagcagtacacaatggctggtacgcagcgcgcaggggaatccgcagttggggagcatcccctatccggtgcattatttagacccacaaagccaggaaataaaaattgaaacagtgcgcgaagccctggccagtatggggcagggcatttcggttcagaatcttggacagccccgggatcgccattttatgatccgccttcaggataagggaatagagaaaggagattctaccgaaggcggaacggcagccgaagcccccggcgagaggatcaccaggattctggaaaactatttcggaaccggcgaggtagtggtactccgttcagattatgtcggctcgcgtttttccaaaaacctcaccgatcagtcggggattttgataggatttaccctgctgttggtattgatttacgcgtccatccggtttaagccgcaatacgccattggcgcggtactcggcattatccatgactgccttgttataatatcctttgtcgtttggacccgaatggaattcaacaccaccaccatcgccgccattctcacgatactcggttattcgatcaacaacaccattgttattttcgacaggatgagggaaaaccgccgcctttaccccgatgaggtttttgtaaccgttcttaaccgttccttgacggaaacgttaagcagaacaattataacaacattaacaacaatgctggcggtcgtttccctgttcatctttacaaccggttccatgaaggactttgccctggcactgcttgtcggccttgtctcaggcgtttatacgacgactttcattgccaccggctttgtgtatctctgggacaaagagaaggtgaaacgggcgaagaagaaagtgaccgtaccggctaagagtgcgcttgcataa

SEQ ID NO: 24422 - protein, 337 aa, Unknown
  Obtained from environmental sample
  DOMAIN (133)...(319): Protein export membrane protein
  misc_feature (1)..(337): Xaa is any amino acid
MGIEPRTISFSFSEYGTVGALVQALGAVEGMEVKNSIPEGSSTQWLVRSAQGNPQLGSIPYPVHYLDPQSQEIKIETVREALASMGQGISVQNLGQPRDRHFMIRLQDKGIEKGDSTEGGTAAEAPGERITRILENYFGTGEVVVLRSDYVGSRFSKNLTDQSGILIGFTLLLVLIYASIRFKPQYAIGAVLGIIHDCLVIISFVVWTRMEFNTTTIAAILTILGYSINNTIVIFDRMRENRRLYPDEVFVTVLNRSLTETLSRTIITTLTTMLAVVSLFIFTTGSMKDFALALLVGLVSGVYTTTFIATGFVYLWDKEKVKRAKKKVTVPAKSALA

SEQ ID NO: 24423 - DNA, 774 bp, Unknown
  Obtained from environmental sample
  misc_feature (1)..(774): n is a, c, g, or t
atgagtagaatagaaaatgcttttaaaaacggcaaagcttttatagtctttctaactggcggagacccaagccttgagaaaagcgaagagtttattttagaagcggaaaaagccggagcggatttaatagaaataggagttcctttttccgaccctatagcggaaggtgaggtgattcaagcggctaatataagagcgttgacaaacggtacaactatgcacgatttatttgaacttgcatggaaagttaggcaaaagagcgaaattcctttggtctttttaacttacctaaaccccgttcatcactatggctacggaaaatttttcgcaaaatgcaatgaggttggagttgatgggataataattccagatttgccctttgaagaacagagggaactaaaaaccgaagcggaacactacggcgtaaatttaatttcacttatagctccaacttccaaagagcggattgagaaaatagctaaagaaggcaaaggattcctctacattgtatcttctatgggtgttaccggagtgcgaagcgaaattgacacggatatatccgctattgtgaacgcggcaaaggctgttagcaaaacgccatgcgctgtgggctttggcatcaacacgccagagcaagccgccaagtttgcggaaattgcagacggagttattgtgggcagtgccattgtgaggattatagcagagcacggagaaaatgctggcaagcatatttacgaatatgttaaacagatgaaagaagcgatcactcgctaa

SEQ ID NO: 24424 - protein, 257 aa, Unknown
  Obtained from environmental sample
  DOMAIN (8)...(256): Tryptophan synthase alpha chain
  misc_feature (1)..(257): Xaa is any amino acid
MSRIENAFKNGKAFIVFLTGGDPSLEKSEEFILEAEKAGADLIEIGVPFSDPIAEGEVIQAANIRALTNGTTMHDLFELAWKVRQKSEIPLVFLTYLNPVHHYGYGKFFAKCNEVGVDGIIIPDLPFEEQRELKTEAEHYGVNLISLIAPTSKERIEKIAKEGKGFLYIVSSMGVTGVRSEIDTDISAIVNAAKAVSKTPCAVGFGINTPEQAAKFAEIADGVIVGSAIVRIIAEHGENAGKHIYEYVKQMKEAITR

SEQ ID NO: 24425 - DNA, 621 bp, Unknown
  Obtained from environmental sample
  misc_feature (1)..(621): n is a, c, g, or t
atgtatcggtgtggcccagtcatggaaggaacaatgcaaataatatttggaattttatcggcgcttttggggttatactctttgctgttatttatcaggattatccttacctggttttcaggcggacaattcggcgggccggtagagattttggcgcgtattacagacccgtatcttgactggtggcggcggagggtcaacctgagggcgggctacatggacctctcccctattgtcgccatagcggccctctctgtcgcgcagacaatctgctccctcatttcccaaacggggaggatcactatcgggcttatgcttgccgtatgtctttccgcgctgtggtcggcggtttcctttataatgggcttttgcctcgtcgtgcttatcctccgcctgattgcctatcttatcaacgccaatatgttcggcgtattctggcgggtcatagattccatatcaaacccgatccaataccgcctcagcagaatcatttttagaaaccgattggttcattttacaacaagtatcatcgtctcgattctcgttctgaccgctctttggattgccggaggcatcatcatacagatattttccggcattttattcaggctgcccctgtaa

SEQ ID NO: 24426 - protein, 206 aa, Unknown
  Obtained from environmental sample
  DOMAIN (12)...(94): YGGT family
  misc_feature (1)..(206): Xaa is any amino acid
MYRCGPVMEGTMQIIFGILSALLGLYSLLLFIRIILTWFSGGQFGGPVEILARITDPYLDWWRRRVNLRAGYMDLSPIVAIAALSVAQTICSLISQTGRITIGLMLAVCLSALWSAVSFIMGFCLVVLILRLIAYLINANMFGVFWRVIDSISNPIQYRLSRIIFRNRLVHFTTSIIVSILVLTALWIAGGIIIQIFSGILFRLPL

SEQ ID NO: 24427 - DNA, 1392 bp, Unknown
  Obtained from environmental sample
  misc_feature (1)..(1392): n is a, c, g, or t
atgccggtcggccttatcaacgcggcatggggcggcaccccggcggaagcatggatgagccgcggcgcccttgccgcttttcccgaaaaaataaccctgggcagacaattcgccgacagcgccttttgcgacgccattgccaataaaaacgccgccgtcatcaaagcatggaacgatgaattaaccgccgccgattccgggttaacacaaacctggcagcagccggaaaccgacatttccgcatgggacgaaatcaccctgcccggcaattttgcggaagccgggctggacggtttctgcggcgccctctggttgtgcaaagaatttgaagcaagcgaagcgtttgcccacggtgaatcccggctttggctgggcacgattgtagacgccgacaccgtttaccttaacggcgtggaagtaggaaataccacctaccgctatccgccgcgtaaataccccgttcccgtcggcctgcttcacgcggggaaaaaccgcatcgttatgcgggtagtgtgctgtaacggcgaaggcggcgttacccggagcaaggactttcgccttttttccgaaaacggccgtatagaatttaacggaacctggaaataccgcgtaggaataagcgttaatccccgccctgaagaattttttctccagcgccagcccacgggcctgttcaacgccatgatcgctcccattctggactatccctgcaagggaattctgtggtatcagggagaatcaaacgacagcaaccccggcgaatacgcggagttattcaaatcattgataaccgactggcgcgccaaataccaaggcgcctattcctcattcctcattgccccagtccccttcctcttcgtgcaactccccattttcggcaagcccgaagataacaacgaaaaggattcctgggcaatcatccgcgaagcgcagcgttcctgtctgtccctccccctgacagggatggctgttgcccttgagttcggcgagtggaacgatctgcaccctgttaataaaaaaggagtgggtttcaggcttgccctggccgcggaaaaactgatattcaaaaaacagaacacctcgcccgggcctttgttgcgcggaatacacattgacaaagggcggcttttgctgacctttgaaaactgcggcaaagggcttgccgccgacgaaacgccatacctcagcgtaattgccggcgggaatatttaccgcataccagcggttattgaaagccccgactgcctttcggccgatatctccagcatcaagaaccctgaaagagtgttgtacgcctgggcgggcaatccccgcgaccgtcagttgtacaactctgaaagcttgccggttgttcctttccgtgtaaacttacaaaagaaaagagaaaaatga

SEQ ID NO: 24428 - protein, 463 aa, Unknown
  Obtained from environmental sample
  DOMAIN (44)...(184): Glycosyl hydrolases family 2, sugar binding domain
  misc_feature (1)..(463): Xaa is any amino acid
MPVGLINAAWGGTPAEAWMSRGALAAFPEKITLGRQFADSAFCDAIANKNAAVIKAWNDELTAADSGLTQTWQQPETDISAWDEITLPGNFAEAGLDGFCGALWLCKEFEASEAFAHGESRLWLGTIVDADTVYLNGVEVGNTTYRYPPRKYPVPVGLLHAGKNRIVMRVVCCNGEGGVTRSKDFRLFSENGRIEFNGTWKYRVGISVNPRPEEFFLQRQPTGLFNAMIAPILDYPCKGILWYQGESNDSNPGEYAELFKSLITDWRAKYQGAYSSFLIAPVPFLFVQLPIFGKPEDNNEKDSWAIIREAQRSCLSLPLTGMAVALEFGEWNDLHPVNKKGVGFRLALAAEKLIFKKQNTSPGPLLRGIHIDKGRLLLTFENCGKGLAADETPYLSVIAGGNIYRIPAVIESPDCLSADISSIKNPERVLYAWAGNPRDRQLYNSESLPVVPFRVNLQKKREK

SEQ ID NO: 24429 - DNA, 657 bp, Unknown
  Obtained from environmental sample
  misc_feature (1)..(657): n is a, c, g, or t
ttgacaataatttctttggcaaagctggagcaaagcatgttgaactntgagacactcaccgtcgggcggctggagtgcaactgtgtcatcttgtgggatcaagaatccaaggtgggcgcagtggttgaccccggggacgaggccgaaaaaatttccaagtttgtggggcaactgggcattgtggttaaagccatcctgctgacgcacgcccactttgaccacgtcggcggcgcagcggaactgcaaacgctttgggggtgcccgctgtacctgcatccagatgataacccgctgctggggcagctagacgagcaaaccgatcactttcggttcccgcgcatccgaaagccaaacgtcacgccgctgggcggcgaactgcccttgaacctgaaaacgctgcacacaccagggcactcgcctggttcgtcggcgttcacgctggaatcatccaaaggcagcgtggccattgtgggggacacactattctgcaagggcgtgggccgcacagacctctttggtggtagttgggacgcgctggaaaacagcgtccgcacaaagctatacaccctcgactccgacacacttgtgatcccaggccacgggccgcacaccaccataggttccgagtgctcaaagaacccctttgtcagggggtga

SEQ ID NO: 24430 - protein, 218 aa, Unknown
  Obtained from environmental sample
  DOMAIN (25)...(200): Metallo-beta-lactamase superfamily
  misc_feature (1)..(218): Xaa is any amino acid
MTIISLAKLEQSMLNXETLTVGRLECNCVILWDQESKVGAVVDPGDEAEKISKFVGQLGIVVKAILLTHAHFDHVGGAAELQTLWGCPLYLHPDDNPLLGQLDEQTDHFRFPRIRKPNVTPLGGELPLNLKTLHTPGHSPGSSAFTLESSKGSVAIVGDTLFCKGVGRTDLFGGSWDALENSVRTKLYTLDSDTLVIPGHGPHTTIGSECSKNPFVRG

SEQ ID NO: 24431 - DNA, 1071 bp, Unknown
  Obtained from environmental sample
  misc_feature (1)..(1071): n is a, c, g, or t
gtggtgcggtttttccaggatgccgcatcagatcccgctgtagcggcgattaagacggcgctttacagaacctcaggcgattctcccattatcagggctttggagcaggcgagccttgctggcaagcatgttacggcggttgtggaactaaaagcgaggtttgacgaaggcagaaatatttcctgggccaacaggctggaaaaagcgggcgttatcgtggtttacggtttggcgcggctcaagatacacgcgaaaatagcgctggtaatgcgccgggaatacaaccggataaaacgttacgtgcatctttctacggggaattacaacgacaagaccgcaaagttctacgaggacatttctctttttaccgcaagagaagacatagcctttgacgccgggctttttttcaacatgataaccggctattcggcggcacaggccatgagcaggctggtaatagcccccattgccttaaagcggaaactcctggaacttataagccgcgagataagctgttccagcgcggaagcgccgggcaggattatggccaagatgaacgcattgtcggatcctgaaattgtcaaagccctttacgcggcctcccaggctggggtaaaggtgtatctcggagtaaggggaatttgtacgctcgttcccggcattaatggcttgtcggaaaatattcgtgttatcagcatcattgatcactatcttgaacattccaggatctattatttctacaacgggggagcggaagagttgtaccttgccagcgccgatctgatgactcgcaaccttgagcgcagagtggaactaatgttcccggtattgcaagaggatctgcgaaagacaataatcgaacggctttcttcttactttaaggataatacccaggcctggcttctggattcttccggcgcatggtcgcgccttgagccgggcgaaggtgaaaagcctttccgcatccagtcttattttcactccatggcgtcaaaggcccaagcggaggaattccccggctcctccagcgatgaattcattgtgcgccgcagcccgccgagtaaagattga

SEQ ID NO: 24432 - protein, 356 aa, Unknown
  Obtained from environmental sample
  DOMAIN (1)...(332): Polyphosphate kinase
  misc_feature (1)..(356): Xaa is any amino acid
MVRFFQDAASDPAVAAIKTALYRTSGDSPIIRALEQASLAGKHVTAVVELKARFDEGRNISWANRLEKAGVIVVYGLARLKIHAKIALVMRREYNRIKRYVHLSTGNYNDKTAKFYEDISLFTAREDIAFDAGLFFNMITGYSAAQAMSRLVIAPIALKRKLLELISREISCSSAEAPGRIMAKMNALSDPEIVKALYAASQAGVKVYLGVRGICTLVPGINGLSENIRVISIIDHYLEHSRIYYFYNGGAEELYLASADLMTRNLERRVELMFPVLQEDLRKTIIERLSSYFKDNTQAWLLDSSGAWSRLEPGEGEKPFRIQSYFHSMASKAQAEEFPGSSSDEFIVRRSPPSKD

SEQ ID NO: 24433 - DNA, 462 bp, Unknown
  Obtained from environmental sample
  misc_feature (1)..(462): n is a, c, g, or t
ttgttatatttattaaatggagagtttatgaaaaaagcattcttttttctgttattatttttttctttttacggcgtctgtttttctcaaactgataattccgtaaatgttattgtagaaattaacaatattgtcgctaacggcggaaaagtttatttggtcgttttttttaccgaagaaagttttaagaaagaaaaaccggatctggcggttgaaataccgtccgataaatcctcggcaattaaagaagggtcattgccgcgcggggaatgtgtaatatttgtatttcaggacgcaaataacaatgtaaaacttgattgcggacttttcgggattccaaaagaaaaattcggcatatccaattattttgggaaaggaattcccacaagaaattttgacaaacaaaaaataatgatcgatgaaaaaaccggaagaatagttcttggtttgtataaattttaa

SEQ ID NO: 24434 - protein, 153 aa, Unknown
  Obtained from environmental sample
  SIGNAL (1)...(29)
  misc_feature (1)..(153): Xaa is any amino acid
MLYLLNGEFMKKAFFFLLLFFSFYGVCFSQTDNSVNVIVEINNIVANGGKVYLVVFFTEESFKKEKPDLAVEIPSDKSSAIKEGSLPRGECVIFVFQDANNNVKLDCGLFGIPKEKFGISNYFGKGIPTRNFDKQKIMIDEKTGRIVLGLYKF

SEQ ID NO: 24435 - DNA, 411 bp, Unknown
  Obtained from environmental sample
  misc_feature (1)..(411): n is a, c, g, or t
ttggaaaacttgtgccaattccatgtaagcggccagttaaaagtcgcgccggaacatatctgcgaagatgtgcttgaagcaatgggcaaatgcccccactcaatttacgaagaattcaggaaagaatttgcggctataaacgagagacttgggctgaaacagtacctgctgccgtactatataacttcccaccccggcgccggcataaaagaagcggaagaacttgcgcggtatttgaaacaaacgcgctttgtgcctgaacaaacgcaggatttttatcccaccccgggaactttgtctacagtgatgtaccacacagggctcgatccaagaaccatgaagccggtatacgccgcgaagggagaaaaagaacggcgcaaacaaaaggaattactgcgagtaaaaaaataa

SEQ ID NO: 24436 - protein, 136 aa, Unknown
  Obtained from environmental sample
  misc_feature (1)..(136): Xaa is any amino acid
MENLCQFHVSGQLKVAPEHICEDVLEAMGKCPHSIYEEFRKEFAAINERLGLKQYLLPYYITSHPGAGIKEAEELARYLKQTRFVPEQTQDFYPTPGTLSTVMYHTGLDPRTMKPVYAAKGEKERRKQKELLRVKK

SEQ ID NO: 24437 - DNA, 1440 bp, Unknown
  Obtained from environmental sample
  misc_feature (1)..(1440): n is a, c, g, or t
atgcggtttataaaggggagtccgatgaccaggatgaaaacgaccgacaagcgaaagtatattggaaaagatattcaggatgtaatggatctgccggatcttattgaaattcaagtttcgtcctacgaacgctttttacagagagacaaggcaagaaagggagaaaaacccgcgttacagggactccaggaagtttttaaatcaacattccccatagaaagccccaacgtcgatatggtgcttgaatacgaatactacacctttgacgaagaaaacatgaaagtaaccgaacttgaatgcaagcagaaagggcttacctacgctattcctcttaaagcgcgcgttaatctggtttttcagcagacaggggaaatccggcagaaagacatttacctgggcgatataccgctcatgactgaacgcggcacatttatcataaatggcgcggagagggtagtggtttcccagatacaccgctcgccgggcgtaattttcagccacgaaaaaggagttttctcatcaagaattattccctaccgcggcagttggcttgaatttgaaattgatcaaaaacgcgaattaatttacgcgaagatagacagaaaaaaacgcatactcggaacaatcttccttcgcacattgggtttttccagcagggaagaaattatccgggctttctataaaacagatactcttaaaataaaagatgatcatgaaacaaaagaaaagatcttcggtaaaattctcgcaaaagctgttttaattaaaaatgaaaatcttgaaggacagaagaccggcggacaaaagtccgatggacaaaaatcagacggtacacgaaccgaaggttcgaaaaccctttaccgcgccggcgagaaacttcaagtgcacgatttagaaacgcttttatcaaacggagtaaagtccattgaatatattgattttgaagccgaaggttcccttaactcgcccatgcttcttaattgctttgagcgtgaagatataaaatttgtaaaagaaggatccggcggcgagccgaccaaagaagatgcgttaatggcggtatattccgtattgatgccgggtgaatccatgactgtcgatcaggcggcgaaagatttggagggaatgttctttacaagccgccgttacgatctcggcaaggtggggcgttataagctgaataaaaaattcaatcttcagccgcctctggacgattatacccttacaaaaacagacatcatcgaaaccatgaagttccttataaaagcttatgtcggcgatgaatattttgacgatatcgaccatcttggaaacaggcgcatacgctcggtcggcgagcttatggcaaatcatatgaaaaccgcctttagccgcatggagcgcattgccaaagaaaggatgagccagaaagagaccgacacgattaaccccaggaattga

SEQ ID NO: 24438 - protein, 479 aa, Unknown
  Obtained from environmental sample
  DOMAIN (159)...(442): RNA polymerase Rpb2, domain 2
  misc_feature (1)..(479): Xaa is any amino acid
MRFIKGSPMTRMKTTDKRKYIGKDIQDVMDLPDLIEIQVSSYERFLQRDKARKGEKPALQGLQEVFKSTFPIESPNVDMVLEYEYYTFDEENMKVTELECKQKGLTYAIPLKARVNLVFQQTGEIRQKDIYLGDIPLMTERGTFIINGAERVVVSQIHRSPGVIFSHEKGVFSSRIIPYRGSWLEFEIDQKRELIYAKIDRKKRILGTIFLRTLGFSSREEIIRAFYKTDTLKIKDDHETKEKIFGKILAKAVLIKNENLEGQKTGGQKSDGQKSDGTRTEGSKTLYRAGEKLQVHDLETLLSNGVKSIEYIDFEAEGSLNSPMLLNCFEREDIKFVKEGSGGEPTKEDALMAVYSVLMPGESMTVDQAAKDLEGMFFTSRRYDLGKVGRYKLNKKFNLQPPLDDYTLTKTDIIETMKFLIKAYVGDEYFDDIDHLGNRRIRSVGELMANHMKTAFSRMERIAKERMSQKETDTINPRN

SEQ ID NO: 24439 - DNA, 927 bp, Unknown
  Obtained from environmental sample
  misc_feature (1)..(927): n is a, c, g, or t
ttggatggtgaggctttttggtggttcgggcctgattattcgggcggaataccaaaagagatttacgtattagaccctagaaaaatgaggcatgaaggcgaattaaggggaggggttgattttgggttttggaatgcgccacgccgctggttttatcattctggcacagaactgatacctattttgtccgacgagcttattcacttcatggaatggaacccctggaaccctgtccgtggggttaatcctcttgtctctttggctcttgaattggagcaggattattttgcaaataaggcaaacagccagcttctgaaaaacaacgcaataccgcagggcatcttaaaaaccgaacagacattgaggccggaagaagccgaccagcttgaaaagcggtgggaaagcaagtatggggctgtcagggcagggcgcaagattgcggtgctggggaaggggacaaactttgagccgctttcttttacgccggaagttataaaactatttgagcttaaacgctggaacctctacacgatacttgcgaagtacggcataccgccaagagtagccaacattagcgataagtccactgccctttccggcaaggatacggcggagcagcactcggcattttggaaatataccttaatcccaattttaagacaatttgaacaaattcttgaaactcaattttttctccggcttggaattaaagagcgcggagtgtttgatttgtgggacgtgccggagcttcaggaaagcgaggacgcgcaaagtaaaagagacatagcggaaatcaacgccggattaaaaacaattaacgatgttttgaaagaacgtggcaaagagccgaaaccgtggggggacgtatggtatcgaccaaaatcttttattgcaactaacggcaacaaagatggcgggggtgcataa

SEQ ID NO: 24440 - protein, 308 aa, Unknown
  Obtained from environmental sample
  DOMAIN (8)...(277): Phage portal protein
  misc_feature (1)..(308): Xaa is any amino acid
MDGEAFWWFGPDYSGGIPKEIYVLDPRKMRHEGELRGGVDFGFWNAPRRWFYHSGTELIPILSDELIHFMEWNPWNPVRGVNPLVSLALELEQDYFANKANSQLLKNNAIPQGILKTEQTLRPEEADQLEKRWESKYGAVRAGRKIAVLGKGTNFEPLSFTPEVIKLFELKRWNLYTILAKYGIPPRVANISDKSTALSGKDTAEQHSAFWKYTLIPILRQFEQILETQFFLRLGIKERGVFDLWDVPELQESEDAQSKRDIAEINAGLKTINDVLKERGKEPKPWGDVWYRPKSFIATNGNKDGGGA

SEQ ID NO: 24441 - DNA, 1194 bp, Unknown
  Obtained from environmental sample
  misc_feature (1)..(1194): n is a, c, g, or t
ttgaggggtggaattatggacgaatcgctaaaggctattcaactgaaattggccaacatgaaaaaaattgacggtacggggttcaccgacccggcgaaggcggcggagtatctgcaagacaaggaaatacttcttgaggaaatggcgaagactttggagactgttacgtctaaccagtcttcgcaaattgcggcgttggaggggactatcaagagcttgcgggatgaattgaaaacgcaggcgaagtacccgaaggaacttacccgccgtgaactgctgtataaatctcggcaggggattgcggcggcgtggtcgggaaactataagacgcttgcggaactggcttttacgcctaactacaagtctgaaaactggacaaaccccaaagatgtttcatggggggaaaaaggttttacaatcaataaggcagccctcggtgaacctatggggaatatgtcgcctaacaatgaacaatttttgattaaccccatttatgaaacggagattatgtcggatgtcgcaaaaaaaagcgtgatgatgtctcttgtccggcatcgccctatgtcgggtccctctatcttccttcctaccagagacaggggcggcgttcagttgaattggctcaccgcatacggtcaaaaaatcgagggcagcaagccgaagggcgcggagcgcgtggaattgaaagcctacacattggcgggctatataccgtggtttgacgaatacgaagaggatgtttttgtcgatttgggcgcgatgtttgtcagtgaatttgtggaaacttacggtcaagaatttgaccgtcaatgcctgttggctgacaatgacccatttaccggggctatggcttgcgctgacgttaccgaagttacaattaaaggtaatacggctaatgatttaacgtggaaggattttagggacgcggtttataaagtaccagccgaagaaagaaaggattgcgcgtggtttcttaatgagacggtactcaatcacattgcgaacattgaggatacgacaggccgcccgatttggcggcggcctacggaggcaatgcctgggcggttggatttgtacccttatcatgaggtttctatccttcctcaaattgccgacattgaggctggtgaaatttttgctatctttatgaaccccaagagaattcagcatggcaacaggcggggcattgaatga

SEQ ID NO: 24442 - protein, 397 aa, Unknown
  Obtained from environmental sample
  misc_feature (1)..(397): Xaa is any amino acid
MRGGIMDESLKAIQLKLANMKKIDGTGFTDPAKAAEYLQDKEILLEEMAKTLETVTSNQSSQIAALEGTIKSLRDELKTQAKYPKELTRRELLYKSRQGIAAAWSGNYKTLAELAFTPNYKSENWTNPKDVSWGEKGFTINKAALGEPMGNMSPNNEQFLINPIYETEIMSDVAKKSVMMSLVRHRPMSGPSIFLPTRDRGGVQLNWLTAYGQKIEGSKPKGAERVELKAYTLAGYIPWFDEYEEDVFVDLGAMFVSEFVETYGQEFDRQCLLADNDPFTGAMACADVTEVTIKGNTANDLTWKDFRDAVYKVPAEERKDCAWFLNETVLNHIANIEDTTGRPIWRRPTEAMPGRLDLYPYHEVSILPQIADIEAGEIFAIFMNPKRIQHGNRRGIE

SEQ ID NO: 24443 - DNA, 489 bp, Unknown
  Obtained from environmental sample
  misc_feature (1)..(489): n is a, c, g, or t
ttgatcggcgagacttttgatcttgatagatacggggagcgcgtcgatccgcatgggtgggatttttctcagtatttgaaaaatccgattgtgcagtgggctcattgtttcgatattccggctattggccggattgaagggctggctgttgatgatgtggggcttcatggggttgtggtctttaatgataaagaatatgacgctttcgggtggggtatcggggaacgtgtcaaggccggcgttattcgcgcggggtcggtggggtttcgggttttggaaattgaaattccatctaaggaagacagtaaggacggaacgtctttgattttccgaaagcaggaacttttggaattttcgatttgtaatgtgccggctaatccgttcgctttaaccaaattaggaatgaggaatgaggaattaggaataaagaaggagcaaggctctaatgcttctctattttggggcggcttaataccaattaggaattag

SEQ ID NO: 24444 - protein, 162 aa, Unknown
  Obtained from environmental sample
  DOMAIN (4)...(145): Caudovirus prohead protease
  misc_feature (1)..(162): Xaa is any amino acid
MIGETFDLDRYGERVDPHGWDFSQYLKNPIVQWAHCFDIPAIGRIEGLAVDDVGLHGVVVFNDKEYDAFGWGIGERVKAGVIRAGSVGFRVLEIEIPSKEDSKDGTSLIFRKQELLEFSICNVPANPFALTKLGMRNEELGIKKEQGSNASLFWGGLIPIRN

SEQ ID NO: 24445 - DNA, 1785 bp, Unknown
  Obtained from environmental sample
  misc_feature (1)..(1785): n is a, c, g, or t
atgcactttgcgctcgcgaacaaggaaaaagtggtcatatccaccgccaccattactctgcaacagcagttatttgaaaaagacatcccgcttgtcgcttcaagcatgggggaggtaaaaattaagtccgtcattatgaagggaaggggtaattatctgtgcctgcgccgtcttgacgatacgttacgtgaaggtttgctttttgactttgataaagaagaaattgacaatattgtggaatggtcgcagaaaacaaaaacaggcgcaaaatcggaacttacatttatgcctggtgaaaccctatgggcgggcgtatgctctgaatccgatttatgtttgggaaaccactgcccctggagggaacattgttttattctgtccctgcgcagggaagcaaataacgcccacataatcgtcgtaaatcatcatctgctttttgccgatttagccgcgaggtaccagggcgcgggttatgaaagcgcggtggtcctgccgccatttaaccgccttataatagacgaggcccacacaattgaaaacgccgcaacttcatttttttcgcaggagtttgcaagaacgggaattttccgccagcttgcaaggctctataatacgcgcaaggcgaacatacacggcttattggtaagactgtgcgcaatgcagccttcaggcgaagacaagttagacgatatggccgatcttataaagaaaatacgctcatcagttgaaaatcttgatgactgcgccttggaactatgcggtatagagggaattttcaggctttctccgtccgtcgatgagtcatttttaaaaaaagcgttattcccaaatttcaagactttacgtaaggacatactcagccttacaaatatgattcgcgatattttagaaaaccttgatgacgagcaaacggccgatcctattgtttggaaaattaaaaccattgtaagacggctggaaaacgccgccgagatatgcaatgttttttgccattataaaaaacacgaaaaccatgttttatggattgaaaaattacgccttaaaaataacccgtgggccgtctttacaaaaacgcctcttgatttgactcccatactaaaagatagcgtattttcaccaaacaaaaccgtggtttgcgtatccgcgacattggcgattaacgatgatttcactttctgggctagccgctgcggcattagcggcatcaatacgcgtccgccgctctcaggctgttttccctctcccttcccctactcaagcgccgttctccttgcctctcctgcggatgctcccctccccgatgaagaagggtatcaggaatttattaataaagccgtggcggaccttgccgccgtcgcgggaggttcggcgcttatacttttcacttcctaccagtcgttaacagacagttacaacgccgctttagctaaacttacccagatgggcatccgctgtctgaaacagggggatgacgaccgtacccgcctgttacaggcgttcttgtcagatgaaagctcctgcctttttgccacagattcgttctgggaaggggtagacgcgcccggcaacaccttgcggcttgtcattatctgccgcctgcctttccgcacccccggcgatcccgtccatgaggcgcgcagggaagccgttgaaaaacgcggcggaaatccatttctggagctttccctgccccaggccgtgatgaaatttaaacagggatttggcaggcttatgcgccgaagcgccgacaagggcgtagtagcggttcttgacggacgaatttaa

SEQ ID NO: 24446 - protein, 594 aa, Unknown
  Obtained from environmental sample
  misc_feature (1)..(594): Xaa is any amino acid
MHFALANKEKVVISTATITLQQQLFEKDIPLVASSMGEVKIKSVIMKGRGNYLCLRRLDDTLREGLLFDFDKEEIDNIVEWSQKTKTGAKSELTFMPGETLWAGVCSESDLCLGNHCPWREHCFILSLRREANNAHIIVVNHHLLFADLAARYQGAGYESAVVLPPFNRLIIDEAHTIENAATSFFSQEFARTGIFRQLARLYNTRKANIHGLLVRLCAMQPSGEDKLDDMADLIKKIRSSVENLDDCALELCGIEGIFRLSPSVDESFLKKALFPNFKTLRKDILSLTNMIRDILENLDDEQTADPIVWKIKTIVRRLENAAEICNVFCHYKKHENHVLWIEKLRLKNNPWAVFTKTPLDLTPILKDSVFSPNKTVVCVSATLAINDDFTFWASRCGISGINTRPPLSGCFPSPFPYSSAVLLASPADAPLPDEEGYQEFINKAVADLAAVAGGSALILFTSYQSLTDSYNAALAKLTQMGIRCLKQGDDDRTRLLQAFLSDESSCLFATDSFWEGVDAPGNTLRLVIICRLPFRTPGDPVHEARREAVEKRGGNPFLELSLPQAVMKFKQGFGRLMRRSADKGVVAVLDGRI

SEQ ID NO: 24447 - DNA, 639 bp, Unknown
  Obtained from environmental sample
  misc_feature (1)..(639): n is a, c, g, or t
ttggcaaaagtgatagtagaaaacgatttatattgcatatcagatgaattttacgagcatttaatttacactaaggaaccttatgtttcaatagcaacactaccgggtatgcaagagagaaccataatagtaaacggattttcaaaagcctattgcatgacaggttggagaataggctaccttgccgcgccaaacaaggagctggcaaaaggaatagtgaaagtgcaagggcaaaccacacatcatccttccaacatttcgcaatatggcgcaatagcggctgtaaacggatccattgattctgttattgcaatgcggcaagaattttccgaaaggatgcacagaatgagcgagatattcagatccattccgggcattgattttttggaaccagaaggtgccttttatttatttgtggatgtcggttcgtactatggcaaaaaaacagaagaaggaactttgatttcaaactcaatagaattttgcaaagctttgctagacgaacaaggcctcgtcatagttccgggcatatcatttggcaacgactcttacgtcagattttcctttaccgcttcgcttccaactataagcgtggctgtgcccaagtttaaagaatttgttgaggggatgaagaggtga

SEQ ID NO: 24448 - protein, 212 aa, Unknown
  Obtained from environmental sample
  misc_feature (1)..(212): Xaa is any amino acid
MAKVIVENDLYCISDEFYEHLIYTKEPYVSIATLPGMQERTIIVNGFSKAYCMTGWRIGYLAAPNKELAKGIVKVQGQTTHHPSNISQYGAIAAVNGSIDSVIAMRQEFSERMHRMSEIFRSIPGIDFLEPEGAFYLFVDVGSYYGKKTEEGTLISNSIEFCKALLDEQGLVIVPGISFGNDSYVRFSFTASLPTISVAVPKFKEFVEGMKR

SEQ ID NO: 24449 - DNA, 453 bp, Unknown
  Obtained from environmental sample
  misc_feature (1)..(453): n is a, c, g, or t
ttggagggcgaaaatttgaattataatgcaaacgccagcaaatgctatgaaaatcaggaaagtaactgtaaaaaatatggcaggctttataattgggaagcagctaaatcagcttgccccaatggtgggcatttgcccagcgataaagaatggcaggttctagtgagtttggctggctctcgcggaactatgctcaagtcatccagaggttggagcgaaaatggcaatggcgtggatgctgttggcttttccgccctgccgagcggcggaggctatttcggcagttctggtggcggtttcgactatgtaggcatccgcggctcctggtggagttccactgagagcagtagcgatgacgattacatctgctggagcttggccaccgacgagatcatatacagtggcgacgccgttaagagcaacttgttcagtgtccgttgcgtgaaggattag

SEQ ID NO: 24450 - protein, 150 aa, Unknown
  Obtained from environmental sample
  misc_feature (1)..(150): Xaa is any amino acid
MEGENLNYNANASKCYENQESNCKKYGRLYNWEAAKSACPNGGHLPSDKEWQVLVSLAGSRGTMLKSSRGWSENGNGVDAVGFSALPSGGGYFGSSGGGFDYVGIRGSWWSSTESSSDDDYICWSLATDEIIYSGDAVKSNLFSVRCVKD

SEQ ID NO: 24451 - DNA, 903 bp, Unknown
  Obtained from environmental sample
  misc_feature (1)..(903): n is a, c, g, or t
atgggaagggacaaactaaggataagggagtatttttcagaagttgagacggaaaaagagcacaacggctatttctgcagtgttggggaggcgctgacaatagcgatattgggctcaatatgcggcttgcgaaacaccaatcaaattcatcaatgggcatcaagccaacgcgtcagcgagtttctgtcggggcactttctgataaataacattccctgctattactggcttttatgccttttaaagctgataaagcctgactcgcttaacagatgcttcatgaaatgggcgcaatcgctaaggcccggcggagacggaaccgaaacctacaccatttcattcgacgggaaaacagtccgttcaactgggaagatggatagttatgaaaatccgctgcatatactaagtgcgcacttggccgaacttggcataaccataggccaaaagacggttggggagaagagcaacgagattcctgcgatgagggagcttatagggcttttaaagatacagggctgcatgatagtcgccgacgcgcttaactgccagaaagaaacggcaaaagcggtaattgaaggcaagggagactatttattttcggttaaggacaaccagcagacattgaaggaagatatagaaggctatgttcaggacaagcatttgcagaaaacaatggacagggctgcaacggtcgaaaaaacgagtggcagagtcgaacggagaaccgcttatacaagctgcgacataggatggctttccggaaaggaggaatgggagggtctggcttgcattggggctgtgaacacccaagtttccagcaaaaagggacagacaaacgaatggcattattacatcacaagccgcggcctgacggcacaggaactgctcaggcacgcccgttga

SEQ ID NO: 24452 - protein, 300 aa, Unknown
  Obtained from environmental sample
  DOMAIN (111)...(269): Transposase DDE domain
  misc_feature (1)..(300): Xaa is any amino acid
MGRDKLRIREYFSEVETEKEHNGYFCSVGEALTIAILGSICGLRNTNQIHQWASSQRVSEFLSGHFLINNIPCYYWLLCLLKLIKPDSLNRCFMKWAQSLRPGGDGTETYTISFDGKTVRSTGKMDSYENPLHILSAHLAELGITIGQKTVGEKSNEIPAMRELIGLLKIQGCMIVADALNCQKETAKAVIEGKGDYLFSVKDNQQTLKEDIEGYVQDKHLQKTMDRAATVEKTSGRVERRTAYTSCDIGWLSGKEEWEGLACIGAVNTQVSSKKGQTNEWHYYITSRGLTAQELLRHAR

SEQ ID NO: 24453 - DNA, 429 bp, Unknown
  Obtained from environmental sample
  misc_feature (1)..(429): n is a, c, g, or t
ttgtgctctttttccgtctcaacttctgaaaaatactcccttatccttagtttgtcccttcccatcctttatttttatcatagtctcttatttttgaaaattgatttccgtgcacgcggaggctggaatactaagattcatgtgctgggtgtaaaagatacatacataaaaggctttatcttgtccggtggcgaggaaaatgacgcgcctacagggcgtcttttgcttgaaacggttggcaagcaggaaagcagcgttccagtgcttatggacagggcctatgcggatttcaagacgcgttttaccgcttgggacctgtgctttaaggctgttgttccgcctagatcaaacgcaacgtatcaatgggagtacgataaggaattatacaaaaaacgcaacgaaatagagcgtttcttctacgtagtgtga

SEQ ID NO: 24454 - protein, 142 aa, Unknown
  Obtained from environmental sample
  misc_feature (1)..(142): Xaa is any amino acid
MCSFSVSTSEKYSLILSLSLPILYFYHSLLFLKIDFRARGGWNTKIHVLGVKDTYIKGFILSGGEENDAPTGRLLLETVGKQESSVPVLMDRAYADFKTRFTAWDLCFKAVVPPRSNATYQWEYDKELYKKRNEIERFFYVV

SEQ ID NO: 24455 - DNA, 1245 bp, Unknown
  Obtained from environmental sample
  misc_feature (1)..(1245): n is a, c, g, or t
ttgggttgggcagcgattccctgcgggcggacggagcgtttggcattgtggcgacatccagtgtttttcccattatcgcaattctcgtgtccggaatcatcgacaaggcaaaatcagaaagggcaatacggagcggccatgaaaactgatttttcctgtattatttgtgtcgcggatataaatataaccaacgctttggatcaatgccttgccgaaacggagctgcccgaggtcttcatccagcgggccaaacagatgtcgctggaagacaagcatggatttctgggacggcagattaccaacctggaagaaagcagagccatgatctatcgtatatatatcccttcagaatacgaaacaggtctggtaaaccgcattgtagacgcgacggatttaaaaatgggcggacgaggatgtataattgttcagcatattgataattatcgttctcatcatcttttatataatacggaaaaactggataaactctgcgggaaatcagggagggcgacgcaaaaagaacacgcccttatttcctgcatagtccccagaggcgagggagacgcgcttgccgaggcgcttctggaattgggtatctgcgtaccaattattttttatggcaccggcgtggggcttcgggacaggcttggccttatgagaataaccgtcccaatagaaaaagaaattctctggtttatagttcccgcttccgacgcgatacttgcggaaaaaatcatcattccgcgagccgggctggacattcccggcaaaggttttttgtatacgatgtatattcacgcgccggttgtaaacctgcgggtaagacacggcaaaagggcccatgccgcgacaatggaacagatcatagccgcgctggatgaggttcggggatcaagcgattggcgccgtttcggttccagaaaacacgattcggcgggcaggaacagatcctccagtacccgcgctcttttctttatcggcgaagaagaagacatcgaaatttttcgtaaactggcgatagaaagcggggccagaggcgcgactctgaatgaacttgagctgcgttcctactccgccgaaacccagggcgaagcaaaggagtctcattcccgtctgctctgcgatatagtcaccacacgggccgtggaagaaaaaataatggaacagctcgctaaaaccaatctcctcgacggcaacaggcactgcggcctaaaaaccttcgatgggaaatctcggccgatctga

SEQ ID NO: 24456 - protein, 414 aa, Unknown
  Obtained from environmental sample
  misc_feature (1)..(414): Xaa is any amino acid
MGWAAIPCGRTERLALWRHPVFFPLSQFSCPESSTRQNQKGQYGAAMKTDFSCIICVADINITNALDQCLAETELPEVFIQRAKQMSLEDKHGFLGRQITNLEESRAMIYRIYIPSEYETGLVNRIVDATDLKMGGRGCIIVQHIDNYRSHHLLYNTEKLDKLCGKSGRATQKEHALISCIVPRGEGDALAEALLELGICVPIIFYGTGVGLRDRLGLMRITVPIEKEILWFIVPASDAILAEKIIIPRAGLDIPGKGFLYTMYIHAPVVNLRVRHGKRAHAATMEQIIAALDEVRGSSDWRRFGSRKHDSAGRNRSSSTRALFFIGEEEDIEIFRKLAIESGARGATLNELELRSYSAETQGEAKESHSRLLCDIVTTRAVEEKIMEQLAKTNLLDGNRHCGLKTFDGKSRPI

SEQ ID NO: 24457 - DNA, 1086 bp, Unknown
  Obtained from environmental sample
  misc_feature (1)..(1086): n is a, c, g, or t
atgaagtttaaaataaaaatgagctgtatgatgatcgccattgtggcgattgcggcgggtggcattgccgtaattgagctaatgcagacttccaatattagcctgagattaagcctccgtggactgaattatttggccagagagcaagcccagtactggcaaggcagggaagaaagctatataaagcagttaaccgcaattgcggaaataatgagcgaatttgaaaccctgcccgtacaggaccggcgggaccagtatgacaatatgctgaaggctatcctgaataacaatcccaatttcgcccgcatattttccatctggaaacccaatgccatggatggcatggacagcctttctataggccgtccgggttcaacgcccacggggcagtacgcaatgacctggggcagggataccggcccgattgaagtaaagcccaacctcgtccttaacgagattaacgcatggatgaacggccccaacgcgcacaagacccgtgttgaaaaccccacgccttttaagaataacggaaaagatacctttattatcagaatgggagttcccatatccagaagcaccagcagcgaggtagtcggacacttatgtgcccttatagacatcgccccaatacaggcggcggtagaacaaaccattaaaagtcacgaagaaatatcagcaatggttctttattcgggcaatggaatgataatggggcatttggttcctgaacgggtaggaaagatgctctctgatgtggatacgatatacggcgattatatgcaggaagcggatagagccgtgcgggaagggaaggaatttcagtgcagcagctattcactggttctgaaaacggatatgaaaataactatgattccctaccagataggcgattccggcatgtactggacagtaatgatagcgacatcagaaacgtacattatgagagaagttaacgcgattaccagatttactattatccttgcggcgatcgttattatagtggccgcggtaatcgtgtactttgtcttcaatagcacaaccagaccaatcgtcaatgtgacctttcagaaggcgaaggcggcctga

SEQ ID NO: 24458 - protein, 361 aa, Unknown
  Obtained from environmental sample
  SIGNAL (1)...(18)
  misc_feature (1)..(361): Xaa is any amino acid
MKFKIKMSCMMIAIVAIAAGGIAVIELMQTSNISLRLSLRGLNYLAREQAQYWQGREESYIKQLTAIAEIMSEFETLPVQDRRDQYDNMLKAILNNNPNFARIFSIWKPNAMDGMDSLSIGRPGSTPTGQYAMTWGRDTGPIEVKPNLVLNEINAWMNGPNAHKTRVENPTPFKNNGKDTFIIRMGVPISRSTSSEVVGHLCALIDIAPIQAAVEQTIKSHEEISAMVLYSGNGMIMGHLVPERVGKMLSDVDTIYGDYMQEADRAVREGKEFQCSSYSLVLKTDMKITMIPYQIGDSGMYWTVMIATSETYIMREVNAITRFTIILAAIVIIVAAVIVYFVFNSTTRPIVNVTFQKAKAA

SEQ ID NO: 24459 - DNA, 561 bp, Unknown
  Obtained from environmental sample
  misc_feature (1)..(561): n is a, c, g, or t
atgaataaacgacaggcaataaacctggacaatggcgacatttatttttggattgaacaactgtcgcctgatacctcgttagacggtttttcgtgtcttataactgaatacaacgattatttgtttgatgacgctctccgttctcaaaatgaccatatcgccctgacatggctgttaagggagaggactacaggtattattgccgcctatatgtcgcttattgctgacgcaattaaattatcagtatcagaaaaagaaatccacaatctcaattacccttttaagaccattcccgcaatgaaaatggcaaaactcgccgtttccaattcggcacagcaaanatataaaggaattggtacatacatgatcaacaacgctttagcctttgcccgtacttgtaaccgccagctttttgcctgccgctttctcaccgtagacgctgatatagaacacaaccaaagcgttatggaattctaccaaaaaaacggctttgctccaaatgccgaaataaaaagcnaaacgcacaaaacaatcagcatgagaaaagatatttacggctag

SEQ ID NO: 24460 - protein, 186 aa, Unknown
  Obtained from environmental sample
  misc_feature (1)..(186): Xaa is any amino acid
MNKRQAINLDNGDIYFWIEQLSPDTSLDGFSCLITEYNDYLFDDALRSQNDHIALTWLLRERTTGIIAAYMSLIADAIKLSVSEKEIHNLNYPFKTIPAMKMAKLAVSNSAQQXYKGIGTYMINNALAFARTCNRQLFACRFLTVDADIEHNQSVMEFYQKNGFAPNAEIKSXTHKTISMRKDIYG

SEQ ID NO: 24461 - DNA, 1158 bp, Unknown
  Obtained from environmental sample
  misc_feature (1)..(1158): n is a, c, g, or t
gtggcgttaagccatgagattgaagaaaaattaaaactagaatataccgcgcagaataaaaagaatctcgctgaaattgaaaaacttcagaaagaaaaagaggaaattgaggcaaatatatctaaagaaaaagaaaaggaatatacggaccgtttgcaaacggaaaaagagaagattcgaaaggagattgccaaggaatcagaagaagggcttagattgcttcaacagtcccttaaagaaaaatccgaacaggtaattgaactcaataagaccaaagccgagcttgagaaaatcaggcttgagaaaaacgaaattgagtacaagataacggccgtgaaagacgcagagcttgcagtaaaattaaacaatgaacgggaacggataaagaaagaagcgaccgaggaaaacgcgttaaaaattgaggaactgaaaaagaaattggaagctcagacctctctcgcggaagaaatgaaacgcaaggccgagcaaggttcaatgcaattgcagggcgaggtgcaggaattagcgattgaggacatactaaaagcggccttccgttttgatgttattgaacctgtacctaaagggattaacggcgcggatgtcatccaaaaagtatataataacacggggaatgaggttggcattatcgcttatgaaagcaaaagaaccaaagcgtttggaaaagaatggatcggcaaattgaaagaagacggcggacgcgtaaaagccgatatttgcgtgcttgttaccgaaacgcttcctgaggatatcgagcgcatcggccagaaagacggggtatggatttgtagttttcccgaattcaaaggcctcgcccttgtgttacgcgacagcctagtaagggtgagcgaagcttcgccctcacagacaaacaaaggcgagaaaatgcagatgttgtatgattatcttaccgaaaaggaattttcctcgcaattcatgacgatagtgaaagggttcagcgacttgcagaaaggttatattgaagagcgaaacaggatggaaaaaatatggaagacgcgggaaaaacagcttgagaaaatactgctgaatacaaacggctttcttggctcgattaaaggaatagccggcagttctcttcaggagataccgatgattgaagggagtggggagcaatga

SEQ ID NO: 24462 - protein, 385 aa, Unknown
  Obtained from environmental sample
  misc_feature (1)..(385): Xaa is any amino acid
MALSHEIEEKLKLEYTAQNKKNLAEIEKLQKEKEEIEANISKEKEKEYTDRLQTEKEKIRKEIAKESEEGLRLLQQSLKEKSEQVIELNKTKAELEKIRLEKNEIEYKITAVKDAELAVKLNNERERIKKEATEENALKIEELKKKLEAQTSLAEEMKRKAEQGSMQLQGEVQELAIEDILKAAFRFDVIEPVPKGINGADVIQKVYNNTGNEVGIIAYESKRTKAFGKEWIGKLKEDGGRVKADICVLVTETLPEDIERIGQKDGVWICSFPEFKGLALVLRDSLVRVSEASPSQTNKGEKMQMLYDYLTEKEFSSQFMTIVKGFSDLQKGYIEERNRMEKIWKTREKQLEKILLNTNGFLGSIKGIAGSSLQEIPMIEGSGEQ

SEQ ID NO: 24463 - DNA, 414 bp, Unknown
  Obtained from environmental sample
  misc_feature (1)..(414): n is a, c, g, or t
atgagcgcttcaggggaagtattacaggtaataatcgaaaatgccaattggggtgttttgcttgttgccgccacacaatccgtaaatgacagtttaaaagacgaattagggcgtagtttcccagaatatagaattattcaggcctttgactggttcgatataggcagaaaaatggccgaagaaaaacccgggttcattcttttggatgaagatctctccggagttgatatatccaggtttatcaatatcgttcgggaagatcctgttttcggaaaaccttatatttttcttttgaccaatggtcgatcttcttataatgcggatttactgctgacacatcccattgatttgagcaaacttgaagcggttttaagggacgttgaaagacagaatgacctcgcagtcaatgcttaa

SEQ ID NO: 24464 - protein, 137 aa, Unknown
  Obtained from environmental sample
  misc_feature (1)..(137): Xaa is any amino acid
MSASGEVLQVIIENANWGVLLVAATQSVNDSLKDELGRSFPEYRIIQAFDWFDIGRKMAEEKPGFILLDEDLSGVDISRFINIVREDPVFGKPYIFLLTNGRSSYNADLLLTHPIDLSKLEAVLRDVERQNDLAVNA

SEQ ID NO: 24465 - DNA, 843 bp, Unknown
  Obtained from environmental sample
  misc_feature (1)..(843): n is a, c, g, or t
atgatgaaaaagacaatcgcttgtataggcagtggaaatatgggacctgcgcttatgaagggggtttccaaggtagttgatcctgaatacatcggctttacggatttggatctatcaaaagcaagggtagccgccgattcaatgggaggcaatgtatacaactcaaatgcccaggcggtggaacaggcagattacctttttcttgctgtaaaaccccaggtttataaaagtgtgcttgaggaaattaagccggtagtgagggaaaggctttccaatgagaaaaacggcggcaagagccttactttgatttcaatggttgccggatgggcgattgcgaaaatcaggagctgcatcgatgtaaatgtgcctattgtcaggataatgcctaacacaccggttcttgtttcgcatgggctcattgccatgtcaacgtcccctgacttccctgcggaaaggatcccggaagtagagatattgctttccggaactggtctggttgatcgtcttgatgaagtctatatggactcggtaactggcctttccggttccgggccggcctttgtctatatctttattgaggctcttgcggacggaggcgttcgggcagggctgcccagggacaaggccctgcgttacgctgtccagacggtgcttggctccgctcacatggtacaggaaacgggaaaacacttaggcgaactaaaagacatggtaacttcgccgggaggaaccactattgcgggcattgccgcccttgagaacggcgctttcaggggcgctgtgatcaacgctgtggaagccgcctggcggcgttcatcggaacttttttccgcagaactttag

SEQ ID NO: 24466 - protein, 280 aa, Unknown
  Obtained from environmental sample
  SIGNAL (1)...(19)
  DOMAIN (5)...(260): NADP oxidoreductase coenzyme F420-dependent
  misc_feature (1)..(280): Xaa is any amino acid
MMKKTIACIGSGNMGPALMKGVSKVVDPEYIGFTDLDLSKARVAADSMGGNVYNSNAQAVEQADYLFLAVKPQVYKSVLEEIKPVVRERLSNEKNGGKSLTLISMVAGWAIAKIRSCIDVNVPIVRIMPNTPVLVSHGLIAMSTSPDFPAERIPEVEILLSGTGLVDRLDEVYMDSVTGLSGSGPAFVYIFIEALADGGVRAGLPRDKALRYAVQTVLGSAHMVQETGKHLGELKDMVTSPGGTTIAGIAALENGAFRGAVINAVEAAWRRSSELFSAEL

SEQ ID NO: 24467 - DNA, 366 bp, Unknown
  Obtained from environmental sample
  misc_feature (1)..(366): n is a, c, g, or t
ttgcagtaccaaaggagctggccatggaagtacgcggagttcgtgcgggggattttaaaagcgatgactgagcaagcgaaagaaacaatagacgagcgcatcctgatttgtcgctgcgaagatataaccctggcggaaatccgaaaaattatcgccgacggcttcagaacgattgacgaaatcaaaagggtgtccagggccgggatggggccctgccagggccgtacctgccgtctcttgatcgcccaggaaatttcccgccattacggcatccccatggaagaggtgcttatgcccactttccgcccgcccgtaaagccggttaagctgggcagttttgtaaaaagctcaggcggcgcgaagtga

SEQ ID NO: 24468 - protein, 121 aa, Unknown
  Obtained from environmental sample
  DOMAIN (34)...(89): BFD-like [2Fe-2S] binding domain
  misc_feature (1)..(121): Xaa is any amino acid
MQYQRSWPWKYAEFVRGILKAMTEQAKETIDERILICRCEDITLAEIRKIIADGFRTIDEIKRVSRAGMGPCQGRTCRLLIAQEISRHYGIPMEEVLMPTFRPPVKPVKLGSFVKSSGGAK

SEQ ID NO: 24469 - DNA, 513 bp, Unknown
  Obtained from environmental sample
  misc_feature (1)..(513): n is a, c, g, or t
gtgaaaaaagcctacgacgttgtgatcataggcggcggcatcacaggctgcgccctggcctttgagcttgcaaaaaggggccgcaatgaggttcttgtgatcgagaagcagtaccttacttccggttccacagggcgctgcggcgctggaatacgccagcaatggggcacggtgttgaacgccaccctggccagggattcaactcatctctttgaacacctggaagagtataccggttatgacggcgactgcggccttaaccagggcggctacctgatggttgcctataccgaaggcgaatgggcgcaattccaaaaaaacgttgaattgcagcagagccttaacatacccgttcaaaagctcgatccacagggtgcaaaggaagttgtcccgcacctcaataccgaaggggcttttgggcgctaccttttgccccaccgacgggtcatgccaatccgttccacagtacctttgcctatgccaaaggcgcaaaaaggatgggcgtcgaaatag

SEQ ID NO: 24470 - protein, 170 aa, Unknown
  Obtained from environmental sample
  DOMAIN (6)...(167): FAD dependent oxidoreductase
  misc_feature (1)..(170): Xaa is any amino acid
MKKAYDVVIIGGGITGCALAFELAKRGRNEVLVIEKQYLTSGSTGRCGAGIRQQWGTVLNATLARDSTHLFEHLEEYTGYDGDCGLNQGGYLMVAYTEGEWAQFQKNVELQQSLNIPVQKLDPQGAKEVVPHLNTEGAFGRYLLPHRRVMPIRSTVPLPMPKAQKGWASK

SEQ ID NO: 24471 - DNA, 654 bp, Unknown
  Obtained from environmental sample
  misc_feature (1)..(654): n is a, c, g, or t
atgggcgtcgaaatagccacatacaccgaagtaaccggcctccgcaaggcgggagacagaattgccggggtggaaaccagcgccggttatgtggaagccggcatcgttgtaaacgccgcgggctttaacgcctcgaagatcgcgcaaatggcaggggtggatgtgccggttctgcccgaacgccaccagatcctcattaccgagccggtaaaccacatacaaaacccgatggtaatttctttttaccaccacatctattgccagcaaacacctcacggcagtttcatcatgggtattggtgatccgtcggaaccggtgagctataacattcaatccagttggaaattcctggaagactgcgccacgcaggttaccaatgttttgccgattttaaaaaacatccgcatagtaaggcagtgggccggcctctacgacatgagcccagatcgcaatccgattattgacgagatgaaaggggtcagcggtttttatacggtggccggttttagcgggcatggttttatggtgggcccaaaaacagccataataattgcccagtacttaaccggcgaaaagccggatattgatataggccttttcagcgccaaccgttacgcgacaggccagttgcttctggaaccggcggtagtttaa

SEQ ID NO: 24472 - protein, 217 aa, Unknown
  Obtained from environmental sample
  DOMAIN (1)...(187): FAD dependent oxidoreductase
  misc_feature (1)..(217): Xaa is any amino acid
MGVEIATYTEVTGLRKAGDRIAGVETSAGYVEAGIVVNAAGFNASKIAQMAGVDVPVLPERHQILITEPVNHIQNPMVISFYHHIYCQQTPHGSFIMGIGDPSEPVSYNIQSSWKFLEDCATQVTNVLPILKNIRIVRQWAGLYDMSPDRNPIIDEMKGVSGFYTVAGFSGHGFMVGPKTAIIIAQYLTGEKPDIDIGLFSANRYATGQLLLEPAVV

SEQ ID NO: 24473 - DNA, 915 bp, Unknown
  Obtained from environmental sample
  misc_feature (1)..(915): n is a, c, g, or t
atgaaggacaatctctcggtttttatctcggcggctaaacagcgcgccgagagcctagatcatctttttttgattggcccgccgggattgggcaagaccacgctggcgcaggtggtggcaaacgagcttgaaacaggttttgtgcagacatccgcgcccgctatggacaagcctaaagaccttgtcggcctgcttaccaatttgaaaaaaggcgatgttttttttatcgatgaaatccacaggctcaaacccgccatcgaggaacttctgtatatcgctatggaagattacgaacttgactggattgtggggcaggggcctatggcaagaacgctgcgaatccccatccagccttttacgctggtcggggccactaccaaggcggggattgtctccggcccgcttatcagccgctttggcattacctgccgtttttcgttttatgagcaaccggatatggaagccatagtcaggcgttccgcagggttgctcaaaattaaaatcgacaatgacgccgccgcattacttgcaaaatcctcaaggggaactcccagagtggtaaaccggcttctaaggcgtatgagggattttgcccagtacacaggcagcgccaatattacgttaaccgttgtgaaagatgggttaacaaagctggaaattgacgtactggggcttgaaaagcaggatagggacatactgcgcatcataatcgaacgttatcagggcgggcccgttggcgcggagacccttgccatatccataggcgagtccgtggagactttggaggattattatgagccgtacctcatacaaagcggcctgttacagcgcactccccggggaaggattgtaacgtccctagcttacggccatttggggcttacgccgattaacgcggaggttatgctgttttag

SEQ ID NO: 24474 - protein, 304 aa, Unknown
  Obtained from environmental sample
  DOMAIN (21)...(147): ATPase family associated with various cellular activities (AAA)
  misc_feature (1)..(304): Xaa is any amino acid
MKDNLSVFISAAKQRAESLDHLFLIGPPGLGKTTLAQVVANELETGFVQTSAPAMDKPKDLVGLLTNLKKGDVFFIDEIHRLKPAIEELLYIAMEDYELDWIVGQGPMARTLRIPIQPFTLVGATTKAGIVSGPLISRFGITCRFSFYEQPDMEAIVRRSAGLLKIKIDNDAAALLAKSSRGTPRVVNRLLRRMRDFAQYTGSANITLTVVKDGLTKLEIDVLGLEKQDRDILRIIIERYQGGPVGAETLAISIGESVETLEDYYEPYLIQSGLLQRTPRGRIVTSLAYGHLGLTPINAEVMLF

SEQ ID NO: 24475 - DNA, 912 bp, Unknown
  Obtained from environmental sample
  misc_feature (1)..(912): n is a, c, g, or t
ttggccgagaaaatggggttaaaggttgtaaaaatacaaaaattcaatacatttaaggaattttgggatgctgtttcaccccttggtgaattcggcagaaagatgaaaggttttatttacagaggtgaatcatcaatcaattggaaattgcttccaaaagtccttagatgtgatgacaaaaacgaacctaaaagaatttatgtcgagataaaaaatatatctgaattttttcttgaagcaaactaccaaggattaaaaataccaaataataaaatgatacatcattcgccagatgaattaatgggaacggattttttttggatatcggatgaatttgaagaaaatgttgcgcttgctcaacattatggtttgccaacaagattgttagattggacaaaggatatttttgttgcattttatattgcttctacaggtgtgatggaaatagaaagaaaaaatgatggcacagaaccatctttagttatatatgcgttaaattatgaatttctaaaagaagaaataaaaaaatggaatcatacgctaacgaattgtatacgaaacccatttccaataaagtttttgaatccctattattctaacaatccaaacataatggcacaaagtggcgttctgtcgtattctgaagttaatattaaaagttattctgagaaaacatggaaaactgattacacgcccctagatataaaattacaaaaattagtggatgatgaagaacatgattatcatatttctaaaccagaaatattactgtacaaatttataatcccaccagcagaggcatctgcaatgtttaattttatctcccattttaactattcatattcacgcattttccctgggtacaacggaataatgaaaaccttagaagaaaagaaattacttatagtataa

SEQ ID NO: 24476 - protein, 303 aa, Unknown
  Obtained from environmental sample
  misc_feature (1)..(303): Xaa is any amino acid
MAEKMGLKVVKIQKFNTFKEFWDAVSPLGEFGRKMKGFIYRGESSINWKLLPKVLRCDDKNEPKRIYVEIKNISEFFLEANYQGLKIPNNKMIHHSPDELMGTDFFWISDEFEENVALAQHYGLPTRLLDWTKDIFVAFYIASTGVMEIERKNDGTEPSLVIYALNYEFLKEEIKKWNHTLTNCIRNPFPIKFLNPYYSNNPNIMAQSGVLSYSEVNIKSYSEKTWKTDYTPLDIKLQKLVDDEEHDYHISKPEILLYKFIIPPAEASAMFNFISHFNYSYSRIFPGYNGIMKTLEEKKLLIV

SEQ ID NO: 24477 - DNA, 900 bp, Unknown
  Obtained from environmental sample
  misc_feature (1)..(900): n is a, c, g, or t
atggtttgcgataacggtcttggcgttggctcgtctaaacgcgctgtgtttttggattttggagatgccattaaacgcattggcgaaaatgctgttagtgcaaaatatggaaatctctttcagatgtacgaaaaaatcacagacgagaatccatacaaaacgcctatgcgcatttatccggcaagccattacacaatgggtggtttgtgggtggactacaatttgcaaagcactattccgggcttgtttgttttgggagaggcaaacttctcagaccacggtgcaaatcgcttgggagcatctgctcttatgcaaggcctcgcagacggctattttgtgattccatacaccattggcggttattttgctggcaacaaattagacaaagtaaattctgctcaggcagaatttgtagatgcggcaaaaagttcaaaagcgctcatcgaccgcttgctctccataaaaggcaaaaaaactgtcacagaattccacagagaaatgggacacattatgtgggaaaatgtaggcatggggcgcaacaaagctggtcttgaaaaggcaatttccgctcttccgggtttacgcgatgaattctggaaaaacgtaaatgttcttggcgaaaacggctcctttaaccagaatttggaaaacgcaatgcgtgttgcagatttcttggaatttggcgaactgctcgcaaaagacgctctttatagggaagaatcttgcggcggtcatttccgtgaagagcatcaaaccccagataacgaggcaaaacgcgacgatgatgcattctgccacgttgcaacctgggaatggaaaggcgaaaacaagccccacgaactaacaaagagagttttgcaatttgagaacgtacaccttatgacaaggagctacaaatga

SEQ ID NO: 24478 - protein, 299 aa, Unknown
  Obtained from environmental sample
  DOMAIN (164)...(298): Fumarate reductase/succinate dehydrogenase flavoprotein C-terminal domain
  misc_feature (1)..(299): Xaa is any amino acid
MVCDNGLGVGSSKRAVFLDFGDAIKRIGENAVSAKYGNLFQMYEKITDENPYKTPMRIYPASHYTMGGLWVDYNLQSTIPGLFVLGEANFSDHGANRLGASALMQGLADGYFVIPYTIGGYFAGNKLDKVNSAQAEFVDAAKSSKALIDRLLSIKGKKTVTEFHREMGHIMWENVGMGRNKAGLEKAISALPGLRDEFWKNVNVLGENGSFNQNLENAMRVADFLEFGELLAKDALYREESCGGHFREEHQTPDNEAKRDDDAFCHVATWEWKGENKPHELTKRVLQFENVHLMTRSYK

SEQ ID NO: 24479 - DNA, 786 bp, Unknown
  Obtained from environmental sample
  misc_feature (1)..(786): n is a, c, g, or t
atgagcgaagaaaatatgaatctcactataaaggcttggagacaaaaaaatgcccaagcaagaggtaactttgaaaccgttaaattgtctaacatctctccagatatgtcttttttggaaatgctagacgttatgaacgaacatcttatgaaagaaggcaaagaagcttttgcctttgaccacgattgccgcgaaggcatttgcggtatgtgctcgcttgtgattaacggtatgcctcacggtccagacactctcgttacaacctgccagcttcatatgcgcaaatttagggacggcgataccatagtcatagaaccgtggcgttctgctgcgttccctgttataagggattgcgcggtgaacagaagcgcatttgaccgcattatacaagcaggcggttttgtgagcatcaacactggaaacgcgcctccggcaaacacgctcccagttccaaaagcagatgcagatcgtgcttttgacgcggcagcctgcataggctgtggagcctgcgttgcggcttgcaaaaatgcttctgcaatgctctttgtctctgcaaaggtgagccacctttcatatttgccccaaggcaagcccgaagctcaaaaaagagttctcgctatggtggagcaaatggacaaagaaggctttggaaactgcacaaatctctttgagtgcgaagcggcctgcccaaaaggcatttcggttgagttcatagcaaaaatgaaccgcgaatatatgtgcgccaccgcgctttatgaggagaaagtgtattctacggatgcttag

SEQ ID NO: 24480 - protein, 261 aa, Unknown
  Obtained from environmental sample
  DOMAIN (157)...(180): 4Fe-4S binding domain
  misc_feature (1)..(261): Xaa is any amino acid
MSEENMNLTIKAWRQKNAQARGNFETVKLSNISPDMSFLEMLDVMNEHLMKEGKEAFAFDHDCREGICGMCSLVINGMPHGPDTLVTTCQLHMRKFRDGDTIVIEPWRSAAFPVIRDCAVNRSAFDRIIQAGGFVSINTGNAPPANTLPVPKADADRAFDAAACIGCGACVAACKNASAMLFVSAKVSHLSYLPQGKPEAQKRVLAMVEQMDKEGFGNCTNLFECEAACPKGISVEFIAKMNREYMCATALYEEKVYSTDA

SEQ ID NO: 24481 - DNA, 723 bp, Unknown
  Obtained from environmental sample
  misc_feature (1)..(723): n is a, c, g, or t
atgatttatcctgaaaaatattcgcgtaataatattgcgggaactattaatattattaatgccgcaagcgaagcggaaattaaaagaattgttttttcttccagcgccgctgtttacggggaacctcagtatctccctattgatgaaaaacatcctgccgttccggaaaactattacggttttaccaaacttgaaattgaacgcattttatcatggtatgaaaaaattagaggcataaggtttggatgccttcgctattttaatgccgcaggttacgatgtaaagggacgcattaaagggcttgagcaaaatcccgcaaaccttattcccataatcatggaaaccgcctgcggtaaaaggaatgaactgcaaatcttcggggatgattatgataccccagacggaacttgcatcagggattatattcatgtaagcgatcttgcccttgggcatacaatgacatttgattatatctgtaaaaatgacaaaagccttattatcaatcttggaagcgaaaccggcagttctgtaaaagaggttcttgatacggcgcgtaagattactggaaaaccaatcccgtccaaaatcgtggggcgcagagccggagacccggcgaaacttacagcttccgccgttcttgcacgtgaattgattggctggcaggcgcgttattccgatatggaaacattgataaaaacaagctgggcagcttacgttagttga

SEQ ID NO: 24482 - protein, 240 aa, Unknown
  Obtained from environmental sample
  DOMAIN (3)...(170): NAD dependent epimerase/dehydratase family
  misc_feature (1)..(240): Xaa is any amino acid
MIYPEKYSRNNIAGTINIINAASEAEIKRIVFSSSAAVYGEPQYLPIDEKHPAVPENYYGFTKLEIERILSWYEKIRGIRFGCLRYFNAAGYDVKGRIKGLEQNPANLIPIIMETACGKRNELQIFGDDYDTPDGTCIRDYIHVSDLALGHTMTFDYICKNDKSLIINLGSETGSSVKEVLDTARKITGKPIPSKIVGRRAGDPAKLTASAVLARELIGWQARYSDMETLIKTSWAAYVS

SEQ ID NO: 24483 - DNA, 933 bp, Unknown
  Obtained from environmental sample
  misc_feature (1)..(933): n is a, c, g, or t
atgacagctttcttccgctctggactgattccaccggcttcattatttccaaagggcggcgccggaagcgaaaagagcgtagacgcgcaccgaagggcggtatacaggctgatcgcggagccggggcataattacgccgttgtgcggaaagtcgggcgcaccctggggatttcctgtataccgcttatccggcagtgcatcagtgaatggggaatgtgggagataattacagagaataaatcaaatcaaaccatgacttgtaaaattaacagaaaccagatcaaattcctggggattgacgacatcgagaaaataaaatccataacgtttgagaacggaccgttgacggacattctaatcgaggaagcgacagagatcacggaaaaagattttaaccagttgaatctcaggttaaggggcaaggcaagagtaccgtttcagattacgatgctgtttaatcctgtgtcggatcttcactggttaaagcggcggtttttcgacaaccccggagcgcataaagaaaaaataactatccatgaaagcacataccatgacaacagatttttagatgatgaatataaagacgagttggaagggctaaaatatcaagacaaggtttattatgacatttacacattgggaaaatggggaagcataggaaacttagtttttaggaatgtcgtttatgaggagtgtaaatataagccggaagattttgatcaaattatttccgggcaggactttggatttaatcactataacgccattgagttaatcgggcttaaagacggcaataaatactcatttaaagaattgtatgtccggcacatgacgaatgacgaagtaataacggaaaatgagaagttaagagtattggataaaaaacaacgttgcatagcggacagcgcgagccgaagtctcggccgattctga

SEQ ID NO: 24484 - protein, 310 aa, Unknown
  Obtained from environmental sample
  DOMAIN (47)...(309): Phage terminase large subunit
  misc_feature (1)..(310): Xaa is any amino acid
MTAFFRSGLIPPASLFPKGGAGSEKSVDAHRRAVYRLIAEPGHNYAVVRKVGRTLGISCIPLIRQCISEWGMWEIITENKSNQTMTCKINRNQIKFLGIDDIEKIKSITFENGPLTDILIEEATEITEKDFNQLNLRLRGKARVPFQITMLFNPVSDLHWLKRRFFDNPGAHKEKITIHESTYHDNRFLDDEYKDELEGLKYQDKVYYDIYTLGKWGSIGNLVFRNVVYEECKYKPEDFDQIISGQDFGFNHYNAIELIGLKDGNKYSFKELYVRHMTNDEVITENEKLRVLDKKQRCIADSASRSLGRF

SEQ ID NO: 24485 - DNA, 834 bp, Unknown
  Obtained from environmental sample
  misc_feature (1)..(834): n is a, c, g, or t
gtgatttattacctctttgccctttccggcatatccggtttaatctacgaaggtacgtgggcgcgttatctcaaattgtttttgggacattccagttacgggcaaattttaacgctttgcgtttatatgggcgggcttgcactggggagcttcattgctggcaaattaagtgctcgcataaaaaagccattgctagcttatggcataacagaagcattcatagggcttggcggaatgttttaccaccctctctatgtttttgcaaccaatttgttttacgactccacttggagcagaacacttggcacaagtggggcagaggctattaaaatcgcaatagccacattctcaacgcttcccgttgcaatcctcttgggaatgaccttcccattcatcgcggctggtctttccagacgagacggcgatagcggaaaaaccagcttgccacttctatatttcacaaatagcctcggtgcgtgttttggaattttattcgcaagctatattttaatcccaacgcttgggaatgcaaacacactccgcatagctggcatgataaatttcatactattcatatttttctggaaaatatctaagagcgacaatgcagttaaagaaacaccccaacccataaccacaaactcccaaaccataaatttgtggctcctattttccgccttaacaggtttaagttcattcatatacgaaattgtttggattcgcttgctctcgcttttgatgggttcaagttcgcatagttttgaccaaatgctctcggcttttattcttgggcttgctcttggcgggcttgcttgcaaaaaacttttgggctaa

SEQ ID NO: 24486 - protein, 277 aa, Unknown
  Obtained from environmental sample
  misc_feature (1)..(277): Xaa is any amino acid
MIYYLFALSGISGLIYEGTWARYLKLFLGHSSYGQILTLCVYMGGLALGSFIAGKLSARIKKPLLAYGITEAFIGLGGMFYHPLYVFATNLFYDSTWSRTLGTSGAEAIKIAIATFSTLPVAILLGMTFPFIAAGLSRRDGDSGKTSLPLLYFTNSLGACFGILFASYILIPTLGNANTLRIAGMINFILFIFFWKISKSDNAVKETPQPITTNSQTINLWLLFSALTGLSSFIYEIVWIRLLSLLMGSSSHSFDQMLSAFILGLALGGLACKKLLG

SEQ ID NO: 24487 - DNA, 924 bp, Unknown
  Obtained from environmental sample
  misc_feature (1)..(924): n is a, c, g, or t
ttgatcagatcggccgagatagaaaccggcgaggatatacgcgagtcggtgcagcccggcgaattcttcggggttaaatccgcgcttggccgttatccgcgcgaggaaaacgccatggccttatctgatacaaccgttatggtttttaccgtgcaggaatttgaagccgtagcgatggcaaacacaagaattatcatgaagatgcttaaagttttctccaaccagatgaggcgcgtgcacaaacaagtgtcaaaattgatggcgaaagcggaagagcagcctgccgacggtttgttcagcataggtgaattttacttaaagaacaaacggtttactcacgccaaatatattttcagccgttatctgatatattatccttccggaaagaacgcgcatcaggcgacaaaaaaccttgagattgcggaaaacgcgctttcccgctacggggacggcaaagggccgggcgttgcggtaagttccggcggcggctcatccgccccgtcaaacggttttgccgcaggcgtttccgccggttcctccgcggacgatcccgccaaaatttacaatgacgcgattatacttatttccaaggggaaatatcaggaagcgtttatgtcatttaaattgatagcggacgccggaacagacgcaagctggacggcaaaagcttcttatgaaatagggcgctgcatgttcctgatgaacaagtttgacgatagcctgaaatatttaacgaatatgcttaccaagtatcccaagcaccccaatctgttagacgccatgcttattatcggccagtgccacgaaaagatgggaagaaaggaacaggcggcggcattctttaaaaagattatttccatgggcggcagcagcgacggcgccgcggaaaaagcaaaaagggcgttaaccgccctgggagcgtaa

SEQ ID NO: 24488 - protein, 307 aa, Unknown
  Obtained from environmental sample
  misc_feature (1)..(307): Xaa is any amino acid
MIRSAEIETGEDIRESVQPGEFFGVKSALGRYPREENAMALSDTTVMVFTVQEFEAVAMANTRIIMKMLKVFSNQMRRVHKQVSKLMAKAEEQPADGLFSIGEFYLKNKRFTHAKYIFSRYLIYYPSGKNAHQATKNLEIAENALSRYGDGKGPGVAVSSGGGSSAPSNGFAAGVSAGSSADDPAKIYNDAIILISKGKYQEAFMSFKLIADAGTDASWTAKASYEIGRCMFLMNKFDDSLKYLTNMLTKYPKHPNLLDAMLIIGQCHEKMGRKEQAAAFFKKIISMGGSSDGAAEKAKRALTALGA

SEQ ID NO: 24489 - DNA, 483 bp, Unknown
  Obtained from environmental sample
  misc_feature (1)..(483): n is a, c, g, or t
atggctatggatttggccgcgttcggccgtttttcacggacgttccaggcgggcgacataattttctccgaatatgaacttggcgatactttttatttaattcaatcgggcagggtacagcttgtaaaacttgtcggcgacatagagcggacgcttgacgtccttcagccgtccgaaatgttcggcgagatggcgattttggaaaactccccccgttccgcgtcagcgatagcgctggatgaagttaaagtgctggaatttaactcccaaaactttgaaatccttctgcttggaaacccgcagattgcccttaagcttttaaaaatgttctgtaaacgcatttacgattcaaaacggcggtttatgatcctgacccttcccgacccgcagacaaaggtcgccgacgtattccttatgctggatgaaaccggccttgacatagacagaaccacagaacgccgtgaatttaaaaccaccagttga

SEQ ID NO: 24490 - protein, 160 aa, Unknown
  Obtained from environmental sample
  DOMAIN (12)...(101): Cyclic nucleotide-binding domain
  misc_feature (1)..(160): Xaa is any amino acid
MAMDLAAFGRFSRTFQAGDIIFSEYELGDTFYLIQSGRVQLVKLVGDIERTLDVLQPSEMFGEMAILENSPRSASAIALDEVKVLEFNSQNFEILLLGNPQIALKLLKMFCKRIYDSKRRFMILTLPDPQTKVADVFLMLDETGLDIDRTTERREFKTTS

SEQ ID NO: 24491 - DNA, 660 bp, Unknown
  Obtained from environmental sample
  misc_feature (1)..(660): n is a, c, g, or t
gtgggcggctccatagcgtcgacggtcgcggcgtttccgcccgcccgccttatgaatacgatctcggtcgccaagaacgttatctttgtcaagagccaggcgccggtgacggttatcgctcagatcatagagttcgcggagcaggcgcgccgcgagggtatcttggcgctggagtcgcgggcgttggagatcaccgacgagttcatgaagcagggtatcgggctggcggtggacggcacggagcctgacctcatcagggagattctcgaaacggagatagggcacatggagagccgccacgaagacggcgctaagatattcgactttctgggggcggcggcgccctcgttcggtatgataggaacgctggtcggcctcgtgctgatgttgggcaacatgagcgacgtggcatctatcggccccaacatggcggtggcgctcatcaccacgctgtacgggtcgattctggcgaacatcctttgtataccattcgcggagaagctgaaagcgtattccgccaaggaggttatggtgaaggagctgatgcttgaggggataatggcgctgcagtccggcgacaacccgcgtatcgtggcgcaaaagttgagcgtcttccttgagccggtgaatcgggcctcggtcttgaaggacaagaagtaa

SEQ ID NO: 24492 - protein, 219 aa, Unknown
  Obtained from environmental sample
  DOMAIN (51)...(184): MotA/TolQ/ExbB proton channel family
  misc_feature (1)..(219): Xaa is any amino acid
MGGSIASTVAAFPPARLMNTISVAKNVIFVKSQAPVTVIAQIIEFAEQARREGILALESRALEITDEFMKQGIGLAVDGTEPDLIREILETEIGHMESRHEDGAKIFDFLGAAAPSFGMIGTLVGLVLMLGNMSDVASIGPNMAVALITTLYGSILANILCIPFAEKLKAYSAKEVMVKELMLEGIMALQSGDNPRIVAQKLSVFLEPVNRASVLKDKK

SEQ ID NO: 24493 - DNA, 873 bp, Unknown
  Obtained from environmental sample
  misc_feature (1)..(873): n is a, c, g, or t
atggcattcgcgctcggcgggaaggacaataagtcaggtgggggaattaaagtcggcatcgtcaatctccatccgtcagaatccggctatcgcgaagccaacgtaaaagacatggacagggtttttaacgcggcaaacggatacatcgtaaaaaaagccaacgacaacacgctcgacgcgcagcttaacgcggcccggcagtttatcaccgaaggggtggactacctcctgatttccggcgccgacgcgaacggctgggacagcgttcttaaatcggccaaagacgccggcgttaaagtgttcctgtttgaccgtatgctcaatgttgatccaagcctttatgaggccgccgtcatttctgatatggtaaatcagggcaagaacgccgtcgcgtggctgaagtcattgaaccttcccgcttacaatatcgtccacattcagggccagatcggatccgacgcccagaaaggccgcacagggcctcttgatgacgcggtcaaagccaatcccggcacttggaagatagtacgccgcggtactggcggtgacacatggagtcccgatgaggcgaagaaaattgtagaagccgccattgccgcgaaagaagattttaacatcatctatgccgaaaacgacggcatggccgaaggcgcgatgaaagcgcttcaggcagccggcattacccatggtgtcaatggaaaagtcaagatcatgggctttgacgccaacaagtttgctcttaggtatgtccttaatggggactggaactttgacggtcaatgcagccccttccaggcggacgttatttcatggattttatcagaaacttcaggccggcggatctctggggctttactggcgacaaaaaagtaa

SEQ ID NO: 24494 - protein, 290 aa, Unknown
  Obtained from environmental sample
  misc_feature (1)..(290): Xaa is any amino acid
MAFALGGKDNKSGGGIKVGIVNLHPSESGYREANVKDMDRVFNAANGYIVKKANDNTLDAQLNAARQFITEGVDYLLISGADANGWDSVLKSAKDAGVKVFLFDRMLNVDPSLYEAAVISDMVNQGKNAVAWLKSLNLPAYNIVHIQGQIGSDAQKGRTGPLDDAVKANPGTWKIVRRGTGGDTWSPDEAKKIVEAAIAAKEDFNIIYAENDGMAEGAMKALQAAGITHGVNGKVKIMGFDANKFALRYVLNGDWNFDGQCSPFQADVISWILSETSGRRISGALLATKK

SEQ ID NO: 24495 - DNA, 309 bp, Unknown
  Obtained from environmental sample
  misc_feature (1)..(309): n is a, c, g, or t
ttgggcgggaaccagcaaaaggtcatctggcccgctgggctgctgacccacccggaataccttatactggacgaacccacgcgcggcatagatgtcggcacaaaggtggagatacaaaagcttgtattgaaactggccgaagagggtatgagcattacttttatctcgtcggagatcgaagaaatggtgcgtacttgttcgcggctcatcgtcatgcgggacaggaacattgtgggcgagctccgcggaggcgaagtcacgcaggataacattatgcacacgattgcgggggggagtggacgaaaatga

SEQ ID NO: 24496 - protein, 102 aa, Unknown
  Obtained from environmental sample
  misc_feature (1)..(102): Xaa is any amino acid
MGGNQQKVIWPAGLLTHPEYLILDEPTRGIDVGTKVEIQKLVLKLAEEGMSITFISSEIEEMVRTCSRLIVMRDRNIVGELRGGEVTQDNIMHTIAGGSGRK

SEQ ID NO: 24497 - DNA, 1047 bp, Unknown
  Obtained from environmental sample
  misc_feature (1)..(1047): n is a, c, g, or t
atgcgaaaaaggcgttatatgacaggtaacgtttggaccatagcggagcagcatgaaagaaaactgaaagcggtttcctttgaacttctttcacggggcaggagccttgcggacaagctgggcgtcaaattagtttccgtgcttatcggccccgctttggaagaagaaacattgaaagagctcatccgccgcggctgtgacgaggtcattgcggcggaagaagaggagttaaagttttttgattccgtttcttattcggcggttcttgaaacgctaataagggaatactcccctgaaattattctggccgcggcaacttcaatgggccgtaccctcatgccctataccgccgtaaaggttcacgcggggcttaccgcggactgtacgggtcttgacatagaagagggaaccggctgccttttgcaaaccaggccggctatagggggcaatatcatggctaccattaaaaccccgcagcacaaaccgcagatggcaacagtacgcccccgatcttccaggcctccggaaagggatataaaacgtaaagggcggataaaacgcctttcgttaggcgacacccttccctcgggactgcgttttcccgcgttaaacaacgagcggacaagggtaacggggtatcgcagggaagaatccggcttcgcgaaccttgaggaagcggaagtgattgtcgccgggggccggggccttaagaaaggagaaaatttccgtatcatcagggaaatcgctgagagcctgggcggggaagtaggagcaagcagggacgctgtagaccggggctggatcagttaccctcaccagattggtctttcgggcaaaaccgtgtctcccaaggtctatataggcgtcggtatttccggcgcgatccagcatcttgccggcatcaaaaccagcgataccattgtttcaattaatattgatcccgacgcaaacctccacaagctggcggatttggccattgtaggggacgcctttgaagtacttggagaattgcaaaaacggttaaagaaaatagggagtggggagtag

SEQ ID NO: 24498 - protein, 348 aa, Unknown
  Obtained from environmental sample
  DOMAIN (10)...(202): Electron transfer flavoprotein domain
  misc_feature (1)..(348): Xaa is any amino acid
MRKRRYMTGNVWTIAEQHERKLKAVSFELLSRGRSLADKLGVKLVSVLIGPALEEETLKELIRRGCDEVIAAEEEELKFFDSVSYSAVLETLIREYSPEIILAAATSMGRTLMPYTAVKVHAGLTADCTGLDIEEGTGCLLQTRPAIGGNIMATIKTPQHKPQMATVRPRSSRPPERDIKRKGRIKRLSLGDTLPSGLRFPALNNERTRVTGYRREESGFANLEEAEVIVAGGRGLKKGENFRIIREIAESLGGEVGASRDAVDRGWISYPHQIGLSGKTVSPKVYIGVGISGAIQHLAGIKTSDTIVSINIDPDANLHKLADLAIVGDAFEVLGELQKRLKKIGSGE

SEQ ID NO: 24499 - DNA, 651 bp, Unknown
  Obtained from environmental sample
  misc_feature (1)..(651): n is a, c, g, or t
atgtggaaaaacacactggtagatgttctaatgggtcttttggaacctactgggggatcaatcaatgtggacggtctgccggtgattgttccgtcggagggtaaagacaacagggtagccattaccccctggcagcgtaattttggttatgtaccccagcagatatatttaagcgataacacggtagcggctaacatcgcctttggtatccctgaaaatttacgagatacttcggcagtagaacatgcggcaaaagttgccaatctgcatgagtttatcattcatgaattgcccgaaggctacaacacaatggtaggtgaacggggtatccgcctttcaggaggacaacgtcagcgtgtcggtattgccagagctttgtatcataaccccaatattctggtgatggacgaggctaccagcgcccttgattcggtaaccgaagacgcggtgatggaagcaatacataacctgatgcacactaagactattatcatcatagcgcaccgtatttctacaattaaagaatgtgatgtaatttacctgatggaacaagggtgtattacagctaacggaacctatgacgaactgctacaaaacaacgcgcagttcagggctttggcgaaggccggggatagtaaggcagcggcgtaa

SEQ ID NO: 24500 - protein, 216 aa, Unknown
  Obtained from environmental sample
  DOMAIN (3)...(185): ABC transporter
  misc_feature (1)..(216): Xaa is any amino acid
MWKNTLVDVLMGLLEPTGGSINVDGLPVIVPSEGKDNRVAITPWQRNFGYVPQQIYLSDNTVAANIAFGIPENLRDTSAVEHAAKVANLHEFIIHELPEGYNTMVGERGIRLSGGQRQRVGIARALYHNPNILVMDEATSALDSVTEDAVMEAIHNLMHTKTIIIIAHRISTIKECDVIYLMEQGCITANGTYDELLQNNAQFRALAKAGDSKAAA

SEQ ID NO: 24501 - DNA, 1023 bp, Unknown
  Obtained from environmental sample
  misc_feature (1)..(1023): n is a, c, g, or t
atgacgaactgctacaaaacaacgcgcagttcagggctttggcgaaggccggggatagtaaggcagcggcgtaattatgcggagttttctatgctgacaacacccaccaaacgcccggttcgtttttttaacacaaccggtccgtgtttcccgtgggatcactatatgctgcctcctgcggatcgcttaatcgacgcgcaattagaccgctacataagtgataaactctattgggtactccacgccccgcggcagacgggaaaaactacctttttgcaaaattgggcgcgggaaattaacttaggagacgaggctgtcgcttgttatgtgactattgaacgttgtcaaagattacctgaacctgaacgttgtatgcctaatatatgtaatgcgattcaagatcatgcaaaattctcagagttggcggctccggtacttgaaacgaatgaacctaacagtatggtacataatattcttgttaactgggcgaagctggtatcaccaaaacctcttataatactgtttgatgaagtagacgctttggaaggtgatgcgatgattagtttcttacgtcagttacgcagtggttttatggatcgtggtattggaaagtttccggtgtctattgcgcttgtcggtatgagggatttaaaggactatgtaaccgccgccaaagacggagttcaaccgagtccgctttctccttttaatataaaaacagattcaattttattgggaaattttaagcatgatgatgtaaaaaaattatttgcccagcgtactgaagaaacaggtcaacaaattacagatgaagctttagaatatatatgggaacaatcgcaaggacaaccttggataataaattctttgtttgaacgcgctactatgcgtatattaaagagggatgattacagtaccataacattggaacaaataaaacaagcccgtgagcaaatgatacttgcaagagaaacacatcttgactctcttgcagtccgacttcgggaacggctatccgtgtaa

SEQ ID NO: 24502 - protein, 340 aa, Unknown
  Obtained from environmental sample
  misc_feature (1)..(340): Xaa is any amino acid
MTNCYKTTRSSGLWRRPGIVRQRRNYAEFSMLTTPTKRPVRFFNTTGPCFPWDHYMLPPADRLIDAQLDRYISDKLYWVLHAPRQTGKTTFLQNWAREINLGDEAVACYVTIERCQRLPEPERCMPNICNAIQDHAKFSELAAPVLETNEPNSMVHNILVNWAKLVSPKPLIILFDEVDALEGDAMISFLRQLRSGFMDRGIGKFPVSIALVGMRDLKDYVTAAKDGVQPSPLSPFNIKTDSILLGNFKHDDVKKLFAQRTEETGQQITDEALEYIWEQSQGQPWIINSLFERATMRILKRDDYSTITLEQIKQAREQMILARETHLDSLAVRLRERLSV

SEQ ID NO: 24503 - DNA, 1182 bp, Unknown
  Obtained from environmental sample
  misc_feature (1)..(1182): n is a, c, g, or t
gtgcagcctcattgcggagcggacgctaacttactcgcctattgggcgattcttcaaaccagagtcgagaaacccctgatagaaaaatttaacgcggaaagcggtattcaaaattataacctgtataaactttcagacagccaatggaaggaactcaagacagcctttggaagccagcggatgctggggctggactactattccggcgggcatttgacacacggttaccgttacaacctttcaggaaaactgtttgatatgtatagctattcggtgtccagggaaaccgggcttcttgattacgatcaacttgaaaaacaggcgctggaagtacggcctttgattctgctggctggttattcggcctacccccgcaagatcaattttaagcggatgagggagattgccgacaaggccggcgcggtttttatggtagacatggcgcactttgccggcctggtggctggcaaggtttttaccggggagtacgatcctgttccctgggcgcatattgtcacttccacgacgcataagaccctgcgcggcccacgcgccggcatggttctctcgaaagctgaatttgccgaagcgctggatcacggctgccctctgacaatgggcggccctttgccccatgttatcgccgccaagacggtctccttccgcgaggcctctactccggaattcaagcattacgcgcagcgcatcgtcgaaaactgccgcgatctggccgccgcctgtatgaagaccggccttacggtgcttaccgggggcacagacaatcatttactgctgatcaatgtgcatgaggacgggcttaccggcagacaggccgaaagcgccctgcatgaatgtaacataacactcaaccggaacagcctgccctttgaccctaacggcccctggtacaccgccggtctgcgggtgggaactgccgccgtcaccaccttgggtatgggcactgccgagatggaagaaattggttcgattatcgcgctggtactcaagggaaccagccaggctccgggcgagaaaaatccggcggtaaagagcaaggcaaaatatctgatagaacccgcggtaaaggcggaagcgctggaccgcgttaaaaaagtgctggaccgcttccctgtgtatcctgaactggatctgcccctgctgaaagaggcttttgtcaactga

SEQ ID NO: 24504 - protein, 393 aa, Unknown
  Obtained from environmental sample
  DOMAIN (11)...(331): Serine hydroxymethyltransferase
  misc_feature (1)..(393): Xaa is any amino acid
MQPHCGADANLLAYWAILQTRVEKPLIEKFNAESGIQNYNLYKLSDSQWKELKTAFGSQRMLGLDYYSGGHLTHGYRYNLSGKLFDMYSYSVSRETGLLDYDQLEKQALEVRPLILLAGYSAYPRKINFKRMREIADKAGAVFMVDMAHFAGLVAGKVFTGEYDPVPWAHIVTSTTHKTLRGPRAGMVLSKAEFAEALDHGCPLTMGGPLPHVIAAKTVSFREASTPEFKHYAQRIVENCRDLAAACMKTGLTVLTGGTDNHLLLINVHEDGLTGRQAESALHECNITLNRNSLPFDPNGPWYTAGLRVGTAAVTTLGMGTAEMEEIGSIIALVLKGTSQAPGEKNPAVKSKAKYLIEPAVKAEALDRVKKVLDRFPVYPELDLPLLKEAFVN

SEQ ID NO: 24505 - DNA, 546 bp, Unknown
  Obtained from environmental sample
  misc_feature (1)..(546): n is a, c, g, or t
atgattgtctgtgcccccggtaagcaccgtaaggccggtcttcatacaggcggcggccagatcgcggcagttttcgacgatgcgctgcgcgtaatgcttgaattccggagtagaggcctcgcggaaggagaccgtcttggcggcgataacatggggcaaagggccgcccattgtcagagggcagccgtgatccagcgcttcggcaaattcagctttcgagagaaccatgccggcgcgtgggccgcgcagggtcttatgcgtcgtggaagtgacaatatgcgcccagggaacaggatcgtactccccggtaaaaaccttgccagccaccaggccggcaaagtgcgccatgtctaccataaaaaccgcgccggccttgtcggcaatctccctcatccgcttaaaattgatcttgcgggggtaggccgaataaccagccagcagaatcaaaggccgtacttccagcgcctgtttttcaagttgatcgtaatcaagaagcccggtttccctggacaccgaatagctatacatatcaaacagttttcctga

SEQ ID NO: 24506 - protein, 181 aa, Unknown
  Obtained from environmental sample
  misc_feature (1)..(181): Xaa is any amino acid
MIVCAPGKHRKAGLHTGGGQIAAVFDDALRVMLEFRSRGLAEGDRLGGDNMGQRAAHCQRAAVIQRFGKFSFRENHAGAWAAQGLMRRGSDNMRPGNRIVLPGKNLASHQAGKVRHVYHKNRAGLVGNLPHPLKIDLAGVGRITSQQNQRPYFQRLFFKLIVIKKPGFPGHRIAIHIKQFS

SEQ ID NO: 24507 - DNA, 570 bp, Unknown
  Obtained from environmental sample
  misc_feature (1)..(570): n is a, c, g, or t
gtgctcgaaactgttgaggcctatctctttcgcgcggcgcatggccgcttcggcgttttggagaatctgcactttcccgtcgccgtccgggggaaagatgcttatgccgatgcatatcgtggcgtatatttcgcgtccgttgatcctgagcggctccgcgcaggttttgagtatgcgccgcgccaccttggcggcgtcctccgggcgggtgatctcctccagaatgatggcgaactcgtcgtcgcccgacctgaagacgacgtcgacgtcccttatgcaggtgacgaggcggtcggcggtggcccgcagcaaagcgtcgccggcctcgtagccgaaagtgtcgtttatcagattgaagcggtcaatgtctatgagcaggagcgccatcagctccttgttgcgccgggcgtggtttatcatgaactcaagccggtcttgcagaagcaggcggtttggaagtttggtcagcgagtcgtagtagtgcctgctgtacgaatgcgacatttggtttgcggcgtccacgaaggtgcccacgtagagggcgacggcgccgttagcgtttttatatga

SEQ ID NO: 24508 - protein, 189 aa, Unknown
  Obtained from environmental sample
  misc_feature (1)..(189): Xaa is any amino acid
MLETVEAYLFRAAHGRFGVLENLHFPVAVRGKDAYADAYRGVYFASVDPERLRAGFEYAPRHLGGVLRAGDLLQNDGELVVARPEDDVDVPYAGDEAVGGGPQQSVAGLVAESVVYQIEAVNVYEQERHQLLVAPGVVYHELKPVLQKQAVWKFGQRVVVVPAVRMRHLVCGVHEGAHVEGDGAVSVFI

SEQ ID NO: 24509 - DNA, 792 bp, Unknown
  Obtained from environmental sample
  misc_feature (1)..(792): n is a, c, g, or t
atggaaaaagcggacatttggtcggaaaactgcacgatacgatttggcgctattgataaatcggatttaatgactttggatgcggcgcttgatttttttcaggaagcggcaataagccacgcggaaaatctgggggttggtcgtgaagcaatggcgcggacaaatcaactatggatactttcgcggatgtcggtacaggttaaccggcggcctcaatacggcgaaaccatcacggtgcgtacctggccgcggggcggtgaaaaactttttgcactgcgtgattttgatatccgcgatgcgacggataatcccgcgatccaggcccgaagctgctggttgattatagacatggaaaaacgccgccccttgcgtccgcagtctataatggacaccatgccccaaaatgaaggccaggacgcgctgcctgccggcagccttgcgggcggcaggcttgctatcggccttgaagaacgtccctccctgcacaaagcggcggaacggcgggcgctgtacagtgatgtggattataacggtcatgtaaacaatgtcagttatatacgctggatcgaagataccattgatcccgccctgctggaacaggcgcggcagatcaggctggacatcaattatgtgaatgaagttatacccggtgaagtcaccggtatttggttgtcggaaattgatgcggcgggagaaacgcctcttccctcttatgcttttgcgtttgaaggaaaaaaagagcagacacaggaaaatcaggcggcatttcgggcggaacttcgcctgtggtga

SEQ ID NO: 24510 - protein, 263 aa, Unknown
  Obtained from environmental sample
  DOMAIN (4)...(262): Acyl-ACP thioesterase
  misc_feature (1)..(263): Xaa is any amino acid
MEKADIWSENCTIRFGAIDKSDLMTLDAALDFFQEAAISHAENLGVGREAMARTNQLWILSRMSVQVNRRPQYGETITVRTWPRGGEKLFALRDFDIRDATDNPAIQARSCWLIIDMEKRRPLRPQSIMDTMPQNEGQDALPAGSLAGGRLAIGLEERPSLHKAAERRALYSDVDYNGHVNNVSYIRWIEDTIDPALLEQARQIRLDINYVNEVIPGEVTGIWLSEIDAAGETPLPSYAFAFEGKKEQTQENQAAFRAELRLW

SEQ ID NO: 24511 - DNA, 408 bp, Unknown
  Obtained from environmental sample
  misc_feature (1)..(408): n is a, c, g, or t
atgcacattttattaatgataatctgcggcattgttctcctctggttcggttataatttgttttttggaaaactttccccgttttatccaagtcttccatggagtaaaaaaagaaaatttaaaggaacccccggtgatgccaaggtttgtcctgtttgttccatgcttatgttaaagggagatttgttaaaaaccgtcgtttttccgccggcaaatgaaaagagtatagaccgtattatgtatattaaaggctgttttagttgtcttaataacaaagtgcctcggcggtgcccgatatgtaaaacaaaactatccgtcgaggactttcttgtggcgcgtatgtttgaacgcccgttcacaaagaaccatgttcatgtgctgggttgtaaccgctgcagaaaagtataa

SEQ ID NO: 24512 - protein, 135 aa, Unknown
  Obtained from environmental sample
  misc_feature (1)..(135): Xaa is any amino acid
MHILLMIICGIVLLWFGYNLFFGKLSPFYPSLPWSKKRKFKGTPGDAKVCPVCSMLMLKGDLLKTVVFPPANEKSIDRIMYIKGCFSCLNNKVPRRCPICKTKLSVEDFLVARMFERPFTKNHVHVLGCNRCRKV

SEQ ID NO: 24513 - DNA, 1308 bp, Unknown
  Obtained from environmental sample
  misc_feature (1)..(1308): n is a, c, g, or t
ttggaagcgaaaaaattgggaataggcatggtgcatcagcattttatgctttttcccgaatatacagtcgctgaaaatatcgcgatgggagcggaaccgaaaaagtttaaaatatttcttgatgaaaaaaaaatacggcaaaacgcggagaaaataattaatacgcataattttgcggttaatagcgcccaaaaggtaaatgaattaagccaggggcagatgcaacaggttgaaatttgccgcgtgcttgcgaataacgcgcaaataattattttggacgaacctaccgccatacttacggaacaggaaacgctttcgttatttaagactttaaaagaccttgtatcaaaaggcttatctttaatccttataacgcataaattgcgcgaaataaaacaaatttgcgacagagttgcggtattaagaaagggtgagcttgtaggtgttcgcggctcggaggatattgatgaatacnatatcgcgcgaatgatgatgggaaatgattatgcagcaacggaatataaaaaaccggaaaaagcaggcgcaaaaagcgagaatgttattgtttttgataatgttaccgtaaaaaggagagggcagaagcgtcccttactggacaaagtatcgtttcangcgggaaaaggtgaaattctggggtttgcgggcgtcggcgggaacgggcttggtgtaattgaagccgctttaggcggtttccttcatcctgcacagggaagaattcttcacaatggaaaggatatttccgctcttggaataagagccctgcgcaaacaggggcttgcctatgttcccgccgacagaatgcgggtaggaagcgctagggacgccttaatcgaggaaaatttaattattaataaccgtgatgaattttcaaagggaatgataataaataaaaacgccgtcagggaattttcaaaaaggcttgcgcaaagttatggtattgaaggcgcgaaggtaaatgaaaaagcggcttttctttcaggcggaaatttacaaaaattaatactggcgcgggaaataaaccggttaagggattatattgttttttcagaaccttcatgggggctggatatcgcttccggcaatttcataatgaaagaaatacgggcgttacgtgataaagaagcggctgtaattttaatttcgacaaatcttgatgaaataatttctctttctgaccgtgtaatagttatgtacaggggaaaaatagccggcgtttttgaaaatacaggcgtgtcaataaaagaagaggttagcaattctatgcaggggattggaataaaggaatga

SEQ ID NO: 24514 - protein, 435 aa, Unknown
  Obtained from environmental sample
  DOMAIN (215)...(407): ABC transporter
  misc_feature (1)..(435): Xaa is any amino acid
MEAKKLGIGMVHQHFMLFPEYTVAENIAMGAEPKKFKIFLDEKKIRQNAEKIINTHNFAVNSAQKVNELSQGQMQQVEICRVLANNAQIIILDEPTAILTEQETLSLFKTLKDLVSKGLSLILITHKLREIKQICDRVAVLRKGELVGVRGSEDIDEYXIARMMMGNDYAATEYKKPEKAGAKSENVIVFDNVTVKRRGQKRPLLDKVSFXAGKGEILGFAGVGGNGLGVIEAALGGFLHPAQGRILHNGKDISALGIRALRKQGLAYVPADRMRVGSARDALIEENLIINNRDEFSKGMIINKNAVREFSKRLAQSYGIEGAKVNEKAAFLSGGNLQKLILAREINRLRDYIVFSEPSWGLDIASGNFIMKEIRALRDKEAAVILISTNLDEIISLSDRVIVMYRGKIAGVFENTGVSIKEEVSNSMQGIGIKE

SEQ ID NO: 24515 - DNA, 699 bp, Unknown
  Obtained from environmental sample
  misc_feature (1)..(699): n is a, c, g, or t
ttgccgatcagcaagggttgttttggagcggagccgtggagcgaaaatatgcgcgtggaaattgaggagcgattcaacatgaaagcttacgacatctacggtcttacggaaattatcggaccgggtgtcgcctttgaatgcgaggcgcaagaaggtctccatgtgaacgaagattttttctaccctgaaattatcgatccaaacacgggaaaggttttgcccgccggagaaaagggcgagcttgtttttaccacgataacaagggaaggcactccgctcctgcgctaccgcacaagagacatcacatttatcatggaacaaccctgctcatgcggacgtacgacaaggcgcatacaccgcctcttcggacgcaccgacgatatgctgatcattcgcggcgtaaacgtattcccaagccagattgaacaggcgcttatcgaaattgaaggaacagagcctcagtaccttatcatcgtaaaccgaggcgaaagccatttggacgaagttgagctgcaagttgaagtaaaaaaagactttttcagcgatgaaacgcgcggccttgaggaacttcgcagtaaaattgaacatataatgaaaagcaagttacagatcagcttgaaagtaaaactggttgaaccgaaaaccattgaacgttccattggaaaggcaaaaagggttatcgacaatcgtaaaatttaa

SEQ ID NO: 24516 - protein, 232 aa, Unknown
  Obtained from environmental sample
  misc_feature (1)..(232): Xaa is any amino acid
MPISKGCFGAEPWSENMRVEIEERFNMKAYDIYGLTEIIGPGVAFECEAQEGLHVNEDFFYPEIIDPNTGKVLPAGEKGELVFTTITREGTPLLRYRTRDITFIMEQPCSCGRTTRRIHRLFGRTDDMLIIRGVNVFPSQIEQALIEIEGTEPQYLIIVNRGESHLDEVELQVEVKKDFFSDETRGLEELRSKIEHIMKSKLQISLKVKLVEPKTIERSIGKAKRVIDNRKI

SEQ ID NO: 24517 - DNA, 417 bp, Unknown
  Obtained from environmental sample
  misc_feature (1)..(417): n is a, c, g, or t
atgggtattaaacaaatatcaatttttttggaaaacacaacgggcagattaagcgaggttacaaaaaccctcgccgacggcggagtaaaccttagggcgatcagcattgccgacactgcggacttcggaatcttacgcataatcgccgacaagaccgacaaggcgattgaagttctcactcaagcgggatttaccacacggcagaccgacgtggttgcggttgagattgaggacacaccgggaagcctcgctaaattgatggcgttgtttcaggaatcgcaggtaaacatcgagtacctttacgcatcgcttgaaggacaggtgggaaaagcagttgtcatttttaaattgaaagatcatgaaaagggacagcaaatactcggctcaaagggcttcaaaacggcggatagcttctga

SEQ ID NO: 24518 - protein, 138 aa, Unknown
  Obtained from environmental sample
  DOMAIN (4)...(71): ACT domain
  misc_feature (1)..(138): Xaa is any amino acid
MGIKQISIFLENTTGRLSEVTKTLADGGVNLRAISIADTADFGILRIIADKTDKAIEVLTQAGFTTRQTDVVAVEIEDTPGSLAKLMALFQESQVNIEYLYASLEGQVGKAVVIFKLKDHEKGQQILGSKGFKTADSF

SEQ ID NO: 24519 - DNA, 501 bp, Unknown
  Obtained from environmental sample
  misc_feature (1)..(501): n is a, c, g, or t
atgaaaatattgatggtttccagcgaagctgttccatgggcaaaaaccggcggtcttgccgacatggtgtcagctctttcgataaatcttgcaaaactcggacacgaagtaaaaattgttatacctcgttattattcgattgaccgcagcagcttaaaacttctccccggcgcaatgggaacgccgatgggcggcggcatagaggaatggagcgcggtttattgcaccgatatgccgggaacagacaaaaaaaatcccgtaaaagtttattttattgatcatgaaatctttttcggcagagacggcatttacggaaaccaaacagagaccgattttattgacaacccgcgccgtttttcttttttttgcagagcggctttttcactttgccgtaaaattgaatggtatccggacgtgcttcacgcccacgattggcctgcggcaatcgctccagtttacctgaattcgctgagagaactccaaaaggcgacaagactttaa

SEQ ID NO: 24520 - protein, 166 aa, Unknown
  Obtained from environmental sample
  DOMAIN (2)...(164): Starch synthase catalytic domain
  misc_feature (1)..(166): Xaa is any amino acid
MKILMVSSEAVPWAKTGGLADMVSALSINLAKLGHEVKIVIPRYYSIDRSSLKLLPGAMGTPMGGGIEEWSAVYCTDMPGTDKKNPVKVYFIDHEIFFGRDGIYGNQTETDFIDNPRRFSFFCRAAFSLCRKIEWYPDVLHAHDWPAAIAPVYLNSLRELQKATRL

SEQ ID NO: 24521 - DNA, 330 bp, Unknown
  Obtained from environmental sample
  misc_feature (1)..(330): n is a, c, g, or t
atggtaaggagagggaaaatggcaaagaaaaacaatgaaaggcggtcttatacgaaggaattcaagaccgaagctgtagcgctggcggaaaagaaagagaagccgataagccaagtcgctaaggatttaggtttaaatgaaaacgtgctaaggcggtggatcaatcagacaaagaatgctgaaggaaccaacatcagagtgtttcccggacacggaaacgcaagagacgcggagcttatccgcctgaggaaagaaaacaaagcgcttcgtaacgcgaatgaaatcctaaaaaaagcggcggtcatcttcgcacaagaagacccccagtga

SEQ ID NO: 24522 - protein, 109 aa, Unknown
  Obtained from environmental sample
  DOMAIN (14)...(96): Transposase
  misc_feature (1)..(109): Xaa is any amino acid
MVRRGKMAKKNNERRSYTKEFKTEAVALAEKKEKPISQVAKDLGLNENVLRRWINQTKNAEGTNIRVFPGHGNARDAELIRLRKENKALRNANEILKKAAVIFAQEDPQ

SEQ ID NO: 24523 - DNA, 639 bp, Unknown
  Obtained from environmental sample
  misc_feature (1)..(639): n is a, c, g, or t
gtggttgttctgggcgggcatttaggcgcgggcaatccgccccttttcgccatggaagacgccgtaaaaactccattcggctatatgcccatagatgccgccttacgctccgcaatgataaaagaaataggcggcgcggaagatcaataccgtgataacactgtagaagttattttacccatggcgcaatattttcttccaaaagcgaatttattgtggctgcgccttcccgccgacataaaatcttttgaaaggggaaaactcctatcgcaaattgcggcgaaattaaacaaaaaaatagttgtgtgcggttccacagacctaacccactacggacgaaactacggcttttcgccgcagggttacggagaacgagctttgtgctggatgagggaagtaaacgacgccgcttttataaaagcagtagaatccggcgacagcgcagaagttctgcgccgcgccgaagaggatagttcctcatgctccgcaggcgcagtccttggagcgatgggtttcgccgaagcggaaggattgcaaaaagcaaggcttttaacgtatgccacaagcgccgatgtgaatgaagacggcgatgcgcccgattcgtttgtggggtatgcggcgtttgcgtttgaggaatga

SEQ ID NO: 24524 - protein, 212 aa, Unknown
  Obtained from environmental sample
  DOMAIN (2)...(209): Protein of unknown function DUF52
  misc_feature (1)..(212): Xaa is any amino acid
MVVLGGHLGAGNPPLFAMEDAVKTPFGYMPIDAALRSAMIKEIGGAEDQYRDNTVEVILPMAQYFLPKANLLWLRLPADIKSFERGKLLSQIAAKLNKKIVVCGSTDLTHYGRNYGFSPQGYGERALCWMREVNDAAFIKAVESGDSAEVLRRAEEDSSSCSAGAVLGAMGFAEAEGLQKARLLTYATSADVNEDGDAPDSFVGYAAFAFEE

SEQ ID NO: 24525 - DNA, 375 bp, Unknown
  Obtained from environmental sample
  misc_feature (1)..(375): n is a, c, g, or t
ttgtcgcgagaacttatatcagacgacttatgggaaaaaatagagccattgttgccgaaaaaaccgccagaagctatacataaaggaggtcgccccaagcttttatctgacaaagcggttttgactgggattgtttttgttctgaaaacaggaattccttgggaatctcttcctcgagaaatgggctgtggtagcggtatgacgtgttggagacgcttaagagatttgcatacagccggagtgtggaaaaaactcttgaaaattctgcaacaggagctttacgaagctggaaaaatagatttatcgcgagccagtatagatgccagccatgtaccggcaaaaaaaggggcgaatcgacaggcccaagccctgtag

SEQ ID NO: 24526 - protein, 124 aa, Unknown
  Obtained from environmental sample
  misc_feature (1)..(124): Xaa is any amino acid
MSRELISDDLWEKIEPLLPKKPPEAIHKGGRPKLLSDKAVLTGIVFVLKTGIPWESLPREMGCGSGMTCWRRLRDLHTAGVWKKLLKILQQELYEAGKIDLSRASIDASHVPAKKGANRQAQAL

SEQ ID NO: 24527 - DNA, 369 bp, Unknown
  Obtained from environmental sample
  misc_feature (1)..(369): n is a, c, g, or t
ttgctgaaaactttggcggcggacaatcggatatgctttaaggacggcgaagccaaggcgcagtacgacgggttcgcgggcatgttctatatcgccgcgagcaacaagatcaagccgtcgattttcgacgttgacaaaacggagcttgcggagtcgtcgggcaaaccctacgccggctgctacgtggatgccgttatcgaaatctgggcgcaggacaaccagttcggcaagcggataaacgcgcagctgaaaggcgtccgcttcgtagaggacggcgacgcgttcaccggcaccggcgtggcgaacgcggacgacttcgacgacatcgccgtcggcgggaacgggaacagcgtggcggattatctgtag

SEQ ID NO: 24528 - protein, 122 aa, Unknown
  Obtained from environmental sample
  misc_feature (1)..(122): Xaa is any amino acid
MLKTLAADNRICFKDGEAKAQYDGFAGMFYIAASNKIKPSIFDVDKTELAESSGKPYAGCYVDAVIEIWAQDNQFGKRINAQLKGVRFVEDGDAFTGTGVANADDFDDIAVGGNGNSVADYL

SEQ ID NO: 24529 - DNA, 690 bp, Unknown
  Obtained from environmental sample
  misc_feature (1)..(690): n is a, c, g, or t
atgggcgatacaacaggtaaagaacgaaaaaaaacatcaaataaaatattggatatttttgttgttttgttttgtctttcaggagccgtcgcaagtttgtattacttttatcttgatatatacgctacttttcgttcattaaacgttgttcccgccggaacagtaacggtaaagtacaacaccgttcaacgccgtttggcggacagggcggtctgggacaggctttttgaacaatcgactgtttacagcggcgatttagttcgtattgcgcggctttccggcgcaacgttgaatatcgatgaaaacagcattgagttaggcgagaatacgcttatcaggattcagaaagacgaaggtcctctgcaaatagaattttcctacggtaatatcagcgtcacttccggaaaagataggggggcgattctcctgtcaataggggatcaggtcgtgcaagtgatgccgggagcggaaataaacgccttttcaggagacgaaggtcttgtgttgcgcgtaacggaaggagcggcgcagtttatcagggacggacaggttacggatgtgccgtcgggaggaataattgtccgtgatacggaaaggcacgaagtacgccagcctctggcagccgttattcatcccaagcctaacgcggtacttttaaaacagaagccggtcccgtacagtggaatttaa

SEQ ID NO: 24530 - protein, 229 aa, Unknown
  Obtained from environmental sample
  misc_feature (1)..(229): Xaa is any amino acid
MGDTTGKERKKTSNKILDIFVVLFCLSGAVASLYYFYLDIYATFRSLNVVPAGTVTVKYNTVQRRLADRAVWDRLFEQSTVYSGDLVRIARLSGATLNIDENSIELGENTLIRIQKDEGPLQIEFSYGNISVTSGKDRGAILLSIGDQVVQVMPGAEINAFSGDEGLVLRVTEGAAQFIRDGQVTDVPSGGIIVRDTERHEVRQPLAAVIHPKPNAVLLKQKPVPYSGI

SEQ ID NO: 24531 - DNA, 651 bp, Unknown
  Obtained from environmental sample
  misc_feature (1)..(651): n is a, c, g, or t
gtggttatcgccgggcttacggctattagacagccgacggttttccgctggactaccgatgaagatgtggagttttcaagatttgttctttcacgtcgttccaatcctctttccggcagaccggaggtagacatacaaaatcccgggcgcgccgtttcaattcccgctctgcctgaaggtgtatggtattggacggtcgaagcccgctccaaagatggttatccgattaccgccgtttctccgcggcaaattcgcattcaaccgattccgcttttacccgcgccgggaaacaggcttcccgaatcaggatttttaataggtcctgaggaattgcgtaaaagggaaggcattgttttctcatggtcaaaagtggatggagccaattcctatattttgtcgattttaagagacgggttcccaagaagacatcagattttacagaccgacccgataagggagttaacatatacatttgacgattacagtgtgtttgatgacagtgggacatttttctggcagatagaagcggttttctacagagacggaattttagaacagcacgggacaccgggagaaaataagtttatactcgatgttccgcgtcccgggcgcgtaaaaacaaaaaaaacagggattttgtatggaaaataa

SEQ ID NO: 24532 - protein, 216 aa, Unknown
  Obtained from environmental sample
  misc_feature (1)..(216): Xaa is any amino acid
MVIAGLTAIRQPTVFRWTTDEDVEFSRFVLSRRSNPLSGRPEVDIQNPGRAVSIPALPEGVWYWTVEARSKDGYPITAVSPRQIRIQPIPLLPAPGNRLPESGFLIGPEELRKREGIVFSWSKVDGANSYILSILRDGFPRRHQILQTDPIRELTYTFDDYSVFDDSGTFFWQIEAVFYRDGILEQHGTPGENKFILDVPRPGRVKTKKTGILYGK

SEQ ID NO: 24533 - DNA, 486 bp, Unknown
  Obtained from environmental sample
  misc_feature (1)..(486): n is a, c, g, or t
atggcaatgagaattgataaagccgccggactaagcttggtccaccaaattagcgaaaggcaaaaaagccttttcaaaacgcacgaaaaaatgggcaccggcaaggagatcaatcgggctcaagataatgcgtctgggcttgctgttgcaaaacttctggaatccatgtccagaggctacaaagcagaccgcataaacattggcgatgcccaaagcgccatgaatataggcgagggtgcaacgcaaggcatttccgatatgctgggtcgcatgcgcgaactgagtattcaagcctcaaacgacactttaaccgacaacgagcgcggtgcccttaatttggaattccagcaattaaagcaagaaatagacaggcatacaaaaagcacccaattcaacactcaagatttgctctccggtcaaagccccttgagcgatggcactggcaaatttcaggttgggcctaatgctgggggtccaaccaaatag

SEQ ID NO: 24534 - protein, 161 aa, Unknown
  Obtained from environmental sample
  DOMAIN (28)...(161): Bacterial flagellin N-terminus
  misc_feature (1)..(161): Xaa is any amino acid
MAMRIDKAAGLSLVHQISERQKSLFKTHEKMGTGKEINRAQDNASGLAVAKLLESMSRGYKADRINIGDAQSAMNIGEGATQGISDMLGRMRELSIQASNDTLTDNERGALNLEFQQLKQEIDRHTKSTQFNTQDLLSGQSPLSDGTGKFQVGPNAGGPTK

SEQ ID NO: 24535 - DNA, 498 bp, Unknown
  Obtained from environmental sample
  misc_feature (1)..(498): n is a, c, g, or t
atgcagcgcaaatttattgttttttcttctattttatttctgcttatattcattcttggaagcgtgatattcatctttttaatgaataaaattcagtctaataaaatcggtgatgaactaatacagacaattaaaatagagagactcaaattggaagcctccttgaacagtcaaattacccttgctctaaaaatggcaaattctcccttgatacaacgttattttttaaaccccacagacactgaattacaaaaaatcgcctttgaggagttagctgaataccgcaaaacttttgcaagcaactcaattttttgggtaaatgacattgataaaaaattctactccgatgaatcttacgcatataatgttgatacagcagatacaaataattattggtatatgatgacttttaatggaaaggaaaaatacaatttcaatatcaattacaaccctgaccttaatgtgacaaatctttggataaacgcggcgggtctttga

SEQ ID NO: 24536 - protein, 165 aa, Unknown
  Obtained from environmental sample
  SIGNAL (1)...(28)
  misc_feature (1)..(165): Xaa is any amino acid
MQRKFIVFSSILFLLIFILGSVIFIFLMNKIQSNKIGDELIQTIKIERLKLEASLNSQITLALKMANSPLIQRYFLNPTDTELQKIAFEELAEYRKTFASNSIFWVNDIDKKFYSDESYAYNVDTADTNNYWYMMTFNGKEKYNFNINYNPDLNVTNLWINAAGL

SEQ ID NO: 24537 - DNA, 1731 bp, Unknown
  Obtained from environmental sample
  misc_feature (1)..(1731): n is a, c, g, or t
ttgcaaataatgatagacggacctctcggtgcggcggcatttaacaatgaatttggcagaccaaatatctgcggttattttagaacttatgagcaagaagtgaacggagaaattcgcggctatcacaagcccataatgctcgcaggtgggataggcaacataagagctagccacgttcaaaaaggctccctcaaagaaggtgatttgctaattgtgctgggtggtcctgctatgctcattgggctggggggaggggcggcaagttcaatggcaactggaagcggtggagaagatttggattttgcaagcgttcagcgcggcaatcccgaaatgcagcggcgatgccaagaggttatagaccgttgctgggcattggaagaaaaaaatccaatagcttttattcacgatgtgggagctggcggtctttcaaatgctctccccgaattggtgaaagacgctggctttggcggcaaattccgtttacgcgacattccaagcgaagaaaaaggaatgagccctttggaaatatggtgcaacgaagctcaggagcgttatgtgcttgcaatttccaaagaaagcctacccatattcaaagacttatgcgaaagagaacgctgcccctttgccatcgcaggagaggcaatcgcagaacagaatttaattttaagtgacgagcatttcaaaaacaaccccatagatattccaattgaattgttgctgggcaacccgccaaagatgctccgtaaagataaaaaaacacttgaaaacaactttccactctccactctccactctccactaaaagaaatcgcagagcgtgtcctctcccacccagcagtagcagacaaaggttttctaatcacaataggcgaccgctccgttacaggtatgattgtgcgggagcaaatggtagggaagtggcaggttcccgttgcggactgcgctgtaacaacaagcactttggattccataaccggcgaggctttttccattggcgaacgcaccccgcttgcgcttttgaactctggagcagccgctagaatggcagttgcagaagccataacaaacattgccgcagcaaaaatcagcgacatctcaaaaatacgcctctctgcaaactggatggcaaaccccgcaacaaaaggcgaaggcgcagccctatacgaagctgtgaaagcggttggcatggacttttgccccaagctgggaattgcaattcccgttggcaaagattctatgagcatgagcgcaagttgggaaagtgaaggcaaaaagaaaaccgtgacctctcctgtttctttggtagtcagtgcatttgccccttgcgaagatgtttgcaagagcttaacgcccgaacttcaaaatgttgaaaacacaattttagttctagcggatttgggcgaaggcaaaaacagaatgggcggttctatagcgggcgaggtatataaccaatttggcggagaacctccagatgcggctcccgaactgttaaagcaatttttcaaagcggttcanaccctaaacgcccaagacaagatattggcataccacgaccgctcggatggcggattattcgcaaccgttgcggagatggcttttgccgggcacgtcggggtaaaattggaaagtgaagagcnaatcccattccttttcaacgaagaattaggtgcggtttttgcaatcaaggaaaagattttgagatgcctgcaattattccccttcaaaaaatag

SEQ ID NO: 24538 - protein, 576 aa, Unknown
  Obtained from environmental sample
  DOMAIN (455)...(576): AIR synthase related protein, C-terminal domain
  misc_feature (1)..(576): Xaa is any amino acid
MQIMIDGPLGAAAFNNEFGRPNICGYFRTYEQEVNGEIRGYHKPIMLAGGIGNIRASHVQKGSLKEGDLLIVLGGPAMLIGLGGGAASSMATGSGGEDLDFASVQRGNPEMQRRCQEVIDRCWALEEKNPIAFIHDVGAGGLSNALPELVKDAGFGGKFRLRDIPSEEKGMSPLEIWCNEAQERYVLAISKESLPIFKDLCERERCPFAIAGEAIAEQNLILSDEHFKNNPIDIPIELLLGNPPKMLRKDKKTLENNFPLSTLHSPLKEIAERVLSHPAVADKGFLITIGDRSVTGMIVREQMVGKWQVPVADCAVTTSTLDSITGEAFSIGERTPLALLNSGAAARMAVAEAITNIAAAKISDISKIRLSANWMANPATKGEGAALYEAVKAVGMDFCPKLGIAIPVGKDSMSMSASWESEGKKKTVTSPVSLVVSAFAPCEDVCKSLTPELQNVENTILVLADLGEGKNRMGGSIAGEVYNQFGGEPPDAAPELLKQFFKAVXTLNAQDKILAYHDRSDGGLFATVAEMAFAGHVGVKLESEEXIPFLFNEELGAVFAIKEKILRCLQLFPFKK

SEQ ID NO: 24539 - DNA, 789 bp, Unknown
  Obtained from environmental sample
  misc_feature (1)..(789): n is a, c, g, or t
ttgcaaacatcttcgcaaggggcaaatgcactgactaccaaagaaacaggagaggtcacggttttctttttgccttcactttcccaacttgcgctcatgctcatagaatctttgccaacgggaattgcaattcccagcttggggcaaaagtccatgccaaccgctttcacagcttcgtatagggctgcgccttcgccttttgttgcggggtttgccatccagtttgcagagaggcgtatttttgagatgtcgctgatttttgctgcggcaatgtttgttatggcttctgcaactgccattctagcggctgctccagagttcaaaagcgcaagcggggtgcgttcgccaatggaaaaagcctcgccggttatggaatccaaagtgcttgttgttacagcgcagtccgcaacgggaacctgccacttccctaccatttgctcccgcacaatcatacctgtaacggagcggtcgcctattgtgattagaaaacctttgtctgctactgctgggtgggagaggacacgctctgcgatttcttttagtggagagtggagagtggagagtggaaagttgttttcaagtgtttttttatctttacggagcatctttggcgggttgcccagcaacaattcaattggaatatctatggggttgtttttgaaatgctcgtcacttaaaattaaattctgttctgcgattgcctctcctgcgatggcaaaggggcagcgttctctttcgcataagtctttgaatatgggtaggctttctttggaaattgcaagcacataa

SEQ ID NO: 24540 - protein, 262 aa, Unknown
  Obtained from environmental sample
  misc_feature (1)..(262): Xaa is any amino acid
MQTSSQGANALTTKETGEVTVFFLPSLSQLALMLIESLPTGIAIPSLGQKSMPTAFTASYRAAPSPFVAGFAIQFAERRIFEMSLIFAAAMFVMASATAILAAAPEFKSASGVRSPMEKASPVMESKVLVVTAQSATGTCHFPTICSRTIIPVTERSPIVIRKPLSATAGWERTRSAISFSGEWRVESGKLFSSVFLSLRSIFGGLPSNNSIGISMGLFLKCSSLKIKFCSAIASPAMAKGQRSLSHKSLNMGRLSLEIAST

SEQ ID NO: 24541 - DNA, 366 bp, Unknown
  Obtained from environmental sample
  misc_feature (1)..(366): n is a, c, g, or t
atggaaaaatattctgacggtttggctcatgtaacagttaataataaacatggttatatagacgaaaccggcaaagaaataattccccttatatatgacatggcttgtgattttctaaagggcatggcgcgcgtaaacaagaacggcaaatggggatttattgataaaaccggcaatgtaataattccgttaatatatgattatgtagaagattttagtgaagaaatagccgtcgcgcaaatagataataaatacggattaataaataaggaaggaaagaagatagttccttttgaatatgaggacgcgaataacttttctgaaggtttagccggaatgaagttaaacgggaaatggggcttttaa

SEQ ID NO: 24542 - protein, 121 aa, Unknown
  Obtained from environmental sample
  DOMAIN (84)...(100): KWG Leptospira
  misc_feature (1)..(121): Xaa is any amino acid
MEKYSDGLAHVTVNNKHGYIDETGKEIIPLIYDMACDFLKGMARVNKNGKWGFIDKTGNVIIPLIYDYVEDFSEEIAVAQIDNKYGLINKEGKKIVPFEYEDANNFSEGLAGMKLNGKWGF

SEQ ID NO: 24543 - DNA, 369 bp, Unknown
  Obtained from environmental sample
  misc_feature (1)..(369): n is a, c, g, or t
atgacgggcgcccacacgccggaaagcctcgctcttgcaatagaaaccttctgccaactctacggcgaaggcggagtcctcattttcggctgcgccgccgacaaagacgctgcggcaatggcaaaaacagcgcactcccatttcgcgaaaatatttatcaccactcccggaacttttaaggcgagcaacccgccgcaggtttacgaagccttcgcgtcgcaaggcggacaagagaagacgcggttaatcgcggacacgcggaaggctgtggaggaagcgagggaattcgcggcgaagaatggattgccgattttggggactgggtctttttacttggtctcagaaataagaaaaattattataccttga

SEQ ID NO: 24544 - protein, 122 aa, Unknown
  Obtained from environmental sample
  misc_feature (1)..(122): Xaa is any amino acid
MTGAHTPESLALAIETFCQLYGEGGVLIFGCAADKDAAAMAKTAHSHFAKIFITTPGTFKASNPPQVYEAFASQGGQEKTRLIADTRKAVEEAREFAAKNGLPILGTGSFYLVSEIRKIIIP

SEQ ID NO: 24545 - DNA, 726 bp, Unknown
  Obtained from environmental sample
  misc_feature (1)..(726): n is a, c, g, or t
ttgtcacgcttggggcgggaaacaactggcccctcggcgttaaactttttaattattttaaatcaaagaacgaggaaaaacatggttagcatgacaggttacgcgtaccgcgaaaaatcagggcaggaattatcggtctctgtggaaattaaaggctgtaacagccgctatctggaaatatccgtaaatcttccgccgtggctttcaatgctggaaatgaaaatccgcgaaaaaatttcatcggactgcggcagggggaaagtcgatatctttgtccgtgtaagggagcataacgcgcctgtcaatatcagcgtaaataaaaacgcggcaaaggcttattacaacgcgattaatgaaatggcgaaagaactcggcgtaaaagaaaaacccgccctgtctgcaattttgggaatggaaaatgttttagagatagaaaaaaaccgcgatgaagaacgctactggcgggaaattgaaccgctgttgaatgaggctgttaaaaatttttgcgaggagcgggaaagagagggcaagcatacgcaggacgatattatttctcatcttggagcgatagaatcatcgttaaaaacagtttcctcgtttgctcccgtgattgagcaaactttaaaagagaatattaaagcgcggtttgccgaattgcttgggaatcaaattgagaaaacaggatacttgccgaaaccgcgtcttcagctttactcggccatctga

SEQ ID NO: 24546 - protein, 241 aa, Unknown
  Obtained from environmental sample
  DOMAIN (28)...(182): YicC-like family, N-terminal region
  misc_feature (1)..(241): Xaa is any amino acid
MSRLGRETTGPSALNFLIILNQRTRKNMVSMTGYAYREKSGQELSVSVEIKGCNSRYLEISVNLPPWLSMLEMKIREKISSDCGRGKVDIFVRVREHNAPVNISVNKNAAKAYYNAINEMAKELGVKEKPALSAILGMENVLEIEKNRDEERYWREIEPLLNEAVKNFCEEREREGKHTQDDIISHLGAIESSLKTVSSFAPVIEQTLKENIKARFAELLGNQIEKTGYLPKPRLQLYSAI

SEQ ID NO: 24547 - DNA, 744 bp, Unknown
  Obtained from environmental sample
  misc_feature (1)..(744): n is a, c, g, or t
ttggccgagcgcggtattgattttggaggcaggtcaacaatcagtcttggagacaaatattttatcgcggaaacttgcgagtaccgcaagcactttttatcatttcacccgaggcgaataattttaacggctgtagaaagcgatcatcaggattttttccccacttacgaatcaatccgcgacgcttttgttgaatactgccgcctgcttcccgaaggcggacagttgatttattgcgccgatgatagcggcgcaagcgaagtcgcgggtattataaaaaatgataatcgcggaatagatattgttcagtacggatttgccgcggagggcgattttaaaattaattcgtataaagttgaaaatgagaaaggtgttttttccatcgtgggatttcccgatgaatttaaaattcgcattcccggcagacatcaggctttaaatgttgcggcagggttggctcttgcctcctcgctggcaaaaaatgacggcgcggtaaatggaaccggcttaaatcaaaatcaactggagtccgttaaaaacgctcttatcaattttaaaagcaccaaacgccgaagcgagatagtaggcgaaaccggcggaataatttttatggatgattacggacatcacccaactgcgatagacaccacgcttacacgaattaaaagtttttatcctaatcggcggctgattgtgagttttatgtctcacacatacacccgtacatccgccctgctcgactaa

SEQ ID NO: 24548 - protein, 247 aa, Unknown
  Obtained from environmental sample
  DOMAIN (1)...(155): Mur ligase middle domain
  misc_feature (1)..(247): Xaa is any amino acid
MAERGIDFGGRSTISLGDKYFIAETCEYRKHFLSFHPRRIILTAVESDHQDFFPTYESIRDAFVEYCRLLPEGGQLIYCADDSGASEVAGIIKNDNRGIDIVQYGFAAEGDFKINSYKVENEKGVFSIVGFPDEFKIRIPGRHQALNVAAGLALASSLAKNDGAVNGTGLNQNQLESVKNALINFKSTKRRSEIVGETGGIIFMDDYGHHPTAIDTTLTRIKSFYPNRRLIVSFMSHTYTRTSALLD

SEQ ID NO: 24549 - DNA, 648 bp, Unknown
  Obtained from environmental sample
  misc_feature (1)..(648): n is a, c, g, or t
gtggagttcaaacttgccgcgagtgtcaagaaatttaacaagaaatcggctgttttagaaaacggggagtcaatagaattcgacgttcttgttcttgccgtaggcgtgcgtccaaacaccgcccttcttgacggaatagcgaaaatcgagcgcggcattgtcatcaatgaaaaatcagagactacagcgcctgacatttacgccgcgggcgactgtacgcagtcgcttgacgtgtccagcgggcagagcaaaattatggctctcctgccgaacgcttatatgcagggcgaatgcgctggaatcaatatgaccggagataatgcgtctgactgcgcgcgctttgacaaagcgatccccatgaacgcgattggatttttcggcctgcacattatcacggcgggcaattatacgggagacgtatataccgataacaaagacggcaattttaaacggctgttttacagcgaaaataaattaaacgggtatatccttataggcaatgttgaaaaagcgggaatttatacaagccttatccgcgagcgcattcctcttgatactattgacttcgcgctcgtttgcgagaaacccgggcttatggtgtttacgaaggaagatcgaaaggtaaaactaggaggcgcgtcatcatga

SEQ ID NO: 24550 - protein, 215 aa, Unknown
  Obtained from environmental sample
  misc_feature (1)..(215): Xaa is any amino acid
MEFKLAASVKKFNKKSAVLENGESIEFDVLVLAVGVRPNTALLDGIAKIERGIVINEKSETTAPDIYAAGDCTQSLDVSSGQSKIMALLPNAYMQGECAGINMTGDNASDCARFDKAIPMNAIGFFGLHIITAGNYTGDVYTDNKDGNFKRLFYSENKLNGYILIGNVEKAGIYTSLIRERIPLDTIDFALVCEKPGLMVFTKEDRKVKLGGASS

SEQ ID NO: 24551 - DNA, 786 bp, Unknown
  Obtained from environmental sample
  misc_feature (1)..(786): n is a, c, g, or t
ttgcgagaaacccgggcttatggtgtttacgaaggaagatcgaaaggtaaaactaggaggcgcgtcatcatgatatcagcgcagaattttgattttagggaattaaacagacggataaagacagccaaggaaacaatttattatatagaagattgttacggacaaaggtatataggctgcggcatgaacggcaagcacataacaataaagggaacgcccggaaacgcgcttggagcgtatcttgacggccgaatcatcgaggttcacggtaacgcgcaggacgcggtaggcgacacgatgaatgacggcaaaattatcatccacggcaacgccggagacgcgctcggttacgccatgcgcggcggctgtatttttgtcaaaggcgacgccggataccggactggtatccacatgaaagaatataaagaaaaaaaaccggtaattgtaatcggcggaaaagccggaagttttttaggcgaatatcttgcaggcggattgattatcgtgcttggcattgactgtaaagaaattccggtgtggtattttaccggaacaggaatgcacggcggaaaaatcttcgtcaggacagatcgtgaactttcagggttgccggcgcaggttacggaaaaagttgcagataacgatgatctgaaagagattactccttatgttactgaatttgccggaaattttggcatggacgcgcagaagcttttaaaagatcgtttttatgtgctaaagcctaacgctaaaaatccgtataaacagctatacacggcaaattaa

SEQ ID NO: 24552 - protein, 261 aa, Unknown
  Obtained from environmental sample
  DOMAIN (35)...(231): GXGXG motif
  misc_feature (1)..(261): Xaa is any amino acid
MRETRAYGVYEGRSKGKTRRRVIMISAQNFDFRELNRRIKTAKETIYYIEDCYGQRYIGCGMNGKHITIKGTPGNALGAYLDGRIIEVHGNAQDAVGDTMNDGKIIIHGNAGDALGYAMRGGCIFVKGDAGYRTGIHMKEYKEKKPVIVIGGKAGSFLGEYLAGGLIIVLGIDCKEIPVWYFTGTGMHGGKIFVRTDRELSGLPAQVTEKVADNDDLKEITPYVTEFAGNFGMDAQKLLKDRFYVLKPNAKNPYKQLYTAN

SEQ ID NO: 24553 - DNA, 924 bp, Unknown
  Obtained from environmental sample
  misc_feature (1)..(924): n is a, c, g, or t
gtggatgtgaaaatttttccggcgcagttgaacggcgctgttaacgctattccctccaagtcgcaggcgcacagggcgcttatatgcgcggcccttgcggataaaccgacacgcgtcgaatgtaacggcgagtctgaagatattttggcaacagcggcctgcctgtccgcccttggcgcgggaattgaacgtgaatcagggacttatgttgtgcgtcctttaaatcgggggcgggaagggaacggcgacattgcaacgctgccctgcggggaaagcggcagtacgttccgcttcatgctgccaatcgtttgtgcgttgggacggaaagtctgcttcacccggaaaggacggttaccggaacgcccactatctccgttgtacgaagagcttgtcagccacggagccgaattgtcgccgcaaggctccgttccgttttatgccgacgggcggcttacgccaggccgctattcgctggatgcgggcgtatcttcgcaatttatcagcggcctgttgttcgcactgcctttactcgacggcgacagcgagctctctctgaccggaaacatggaatcattcccttatatagagctgactatggcgatgctgaaggagtttggcgtaaaagcggattttagcggcggagctttttccataccgggtgggcaaacataccgttcttccggcgtcatgcacgtagatggcgattggtcgaacgccgcgttctggctgggcgcgggggctatcggctcatgcggcgtcacctgtgccgctttgaacttgcaatcccggcagggcgacagggcgattctggacctcctggcgaggttcggcgctaatgtaaaaacgaatgattctgccgtaaccgtatccggcggaaaactgcggggcatgaaatcgacgcgaaggaatctcggccgattctga

SEQ ID NO: 24554 - protein, 307 aa, Unknown
  Obtained from environmental sample
  DOMAIN (5)...(307): EPSP synthase (3-phosphoshikimate 1-carboxyvinyltransferase)
  misc_feature (1)..(307): Xaa is any amino acid
MDVKIFPAQLNGAVNAIPSKSQAHRALICAALADKPTRVECNGESEDILATAACLSALGAGIERESGTYVVRPLNRGREGNGDIATLPCGESGSTFRFMLPIVCALGRKVCFTRKGRLPERPLSPLYEELVSHGAELSPQGSVPFYADGRLTPGRYSLDAGVSSQFISGLLFALPLLDGDSELSLTGNMESFPYIELTMAMLKEFGVKADFSGGAFSIPGGQTYRSSGVMHVDGDWSNAAFWLGAGAIGSCGVTCAALNLQSRQGDRAILDLLARFGANVKTNDSAVTVSGGKLRGMKSTRRNLGRF

SEQ ID NO: 24555 - DNA, 462 bp, Unknown
  Obtained from environmental sample
  misc_feature (1)..(462): n is a, c, g, or t
ttgctgaaaaagccgatccagtcccaaatggaagatataatagcgcgtaacgtcacgatcaagcgggacattgttgtcgcagatgaaagagataccggcattcgccagatattgaacttcggtcacactattggtcacggcatcgagaaacactcaaactacggcgttacgcacgggaaagccgtcgcaatcggcatggtgatcgccagccggggggctgcacgcatgggcttgtgcagagaggactgccacacggaaatcgtcgatgccgttaggcgctaccagttgccgattgagaccgatataacgccggaaagtttgatcgaggccgctttttttgacaagaagcgaagcggtcagcgcattacgctgatcctgcctgagagaatcggcaaatgcgtagctaaaagtttcagcatggacgagcttgcaaatttcatccgtctcggcatgagcaaatga

SEQ ID NO: 24556 - protein, 153 aa, Unknown
  Obtained from environmental sample
  DOMAIN (1)...(118): 3-dehydroquinate synthase
  misc_feature (1)..(153): Xaa is any amino acid
MLKKPIQSQMEDIIARNVTIKRDIVVADERDTGIRQILNFGHTIGHGIEKHSNYGVTHGKAVAIGMVIASRGAARMGLCREDCHTEIVDAVRRYQLPIETDITPESLIEAAFFDKKRSGQRITLILPERIGKCVAKSFSMDELANFIRLGMSK

SEQ ID NO: 24557 - DNA, 510 bp, Unknown
  Obtained from environmental sample
  misc_feature (1)..(510): n is a, c, g, or t
atgtcaaaggcgaccccggtaggcgctatcgccaagttcgccaacgccggaaaggaaattaccaaaaaagacctgggcgcgatagcgatgagctacggttatgtgtatgtcgccaaggtatcgttgggcgcggacatgaaccagacgatcaaagccttccgcgaagccgaatcctacaacggcccctcgcttatcatcgcctactcgcactgtatcaaccacggcatcgacatgagcaaggggcttgagcacggcaaggcggtagtaaccagcggcctgtggcccctgttccgctacgaccccaggctcaaagaccagggcaagaaccccttccagcttgactccaaggaaccctccaccaatattgaagatttcatgtacagcgaagtccgcttcaagagcctcaaggctgccgaccccaaccgcgccgacagactgcttaaaatagcaaaggacaaagccgagcgcacctggaaagagtacaagtacctggcggacagacccttctaa

SEQ ID NO: 24558 - protein, 169 aa, Unknown
  Obtained from environmental sample
  misc_feature (1)..(169): Xaa is any amino acid
MSKATPVGAIAKFANAGKEITKKDLGAIAMSYGYVYVAKVSLGADMNQTIKAFREAESYNGPSLIIAYSHCINHGIDMSKGLEHGKAVVTSGLWPLFRYDPRLKDQGKNPFQLDSKEPSTNIEDFMYSEVRFKSLKAADPNRADRLLKIAKDKAERTWKEYKYLADRPF

SEQ ID NO: 24559 - DNA, 1323 bp, Unknown
  Obtained from environmental sample
  misc_feature (1)..(1323): n is a, c, g, or t
atgcgggcaacgaccctcgaaaagctattgctcattatttttgactgcgcggcaagcggcatctgctttgccatatttttgcaaaagtacattgaattcatatcccttgccatattgctttggtttttgatatttttatgcgctggagcatatcgcaggtggctcttggaatctcgcacggctcatgttctgtatatgctaaaaattgtcggagccgtatattgtttaaccatagccgccttgtttggcagaaacgcactgaacataaatgaatttcttagagatgttgatcttgcttcaaattactttctatcggtttggctttctgttagctttttcaggcttttgatttgcaaaattttacggcatttcttgagtagaggctggggcgcagattgcattattttgctcggttgcacaaacgaggcacgggaatattcgcaactgtttaaaaataacccacagctagggaaaaaaataataggcatcgtggaagaaaatcatggacctataaaaacttttgatggcttgcaaattttgggaacttatgctgatttgccaaacttaatcaaaaagaacaacgtgcaagcaattatcatagctcaccgcagcaattccgagaaaaaaatcaatgagattttatattgggttgcctacttacctgtgaaagtctatttagtaccgagcttgtgggaatgcgcaaagaatttcaaaacctccagccagccaatgcttgtgcgctccaaagaactgcaagagctttttgtgatgaatttgctcccctggcaagccaccataaaaagaattatggatatcgcaatagccttgtgtttgctagtgctaactcttcccctgctcttgataaccgccattgcaattaaactggattccaaaggtcctgttttttacaagcagcaaagagtgggcttgtattcaagaacatttaccatctacaaatttcgctccatgcgcttagacgccgaaaaagacggtcctcagtgggcaagaaaaaacgacagccgcataacaagagttgggaaaataatccgcagattccgcatagacgaaattccgcaattgatttgtgttttgaaaggcgatatgagcatggtaggaccgcgtccggaacgttccgtatttatagaaaagctccgcaaaaccattccattttacgtaagccgtttaaagatgaaaccaggtttaaccggctgggctcaagttcgccaccattatgataacgatattgaggatgtgaagataaaattaggttatgatatttactatttatccaacgcttctattttgctcgatatacagatttga

SEQ ID NO: 24560 - protein, 440 aa, Unknown
  Obtained from environmental sample
  DOMAIN (267)...(440): Bacterial sugar transferase
  misc_feature (1)..(440): Xaa is any amino acid
MRATTLEKLLLIIFDCAASGICFAIFLQKYIEFISLAILLWFLIFLCAGAYRRWLLESRTAHVLYMLKIVGAVYCLTIAALFGRNALNINEFLRDVDLASNYFLSVWLSVSFFRLLICKILRHFLSRGWGADCIILLGCTNEAREYSQLFKNNPQLGKKIIGIVEENHGPIKTFDGLQILGTYADLPNLIKKNNVQAIIIAHRSNSEKKINEILYWVAYLPVKVYLVPSLWECAKNFKTSSQPMLVRSKELQELFVMNLLPWQATIKRIMDIAIALCLLVLTLPLLLITAIAIKLDSKGPVFYKQQRVGLYSRTFTIYKFRSMRLDAEKDGPQWARKNDSRITRVGKIIRRFRIDEIPQLICVLKGDMSMVGPRPERSVFIEKLRKTIPFYVSRLKMKPGLTGWAQVRHHYDNDIEDVKIKLGYDIYYLSNASILLDIQI

SEQ ID NO: 24561 - DNA, 306 bp, Unknown
  Obtained from environmental sample
  misc_feature (1)..(306): n is a, c, g, or t
atgctgttttttgttatgtacgcggttttcggcgttttaggctacagggcggcgttaagggcgcagactgttttcgggcggcttcttgccgccggcatgactactatgattataacacagaccctgtcaaacgtagcagtagtttccggggcgcttcccgcgacgggaattccgcttccgttcttttctgccggcggttcgtccatcgcgaccactcttatttgcgcgggaatgatagcgaatttttttagaaaaggcgtaagcgttccttcttccgatttaacggaggcattaaatgacagctaa

SEQ ID NO: 24562 - protein, 101 aa, Unknown
  Obtained from environmental sample
  misc_feature (1)..(101): Xaa is any amino acid
MLFFVMYAVFGVLGYRAALRAQTVFGRLLAAGMTTMIITQTLSNVAVVSGALPATGIPLPFFSAGGSSIATTLICAGMIANFFRKGVSVPSSDLTEALNDS

SEQ ID NO: 24563 - DNA, 570 bp, Unknown
  Obtained from environmental sample
  misc_feature (1)..(570): n is a, c, g, or t
atgtcaactaacgtaaaagaagtccagaaaaaactttcaaacattatacttgtggaatccgtaaaagtttcaaaacgtttcccggataaactgacaatttcgcttataccccgcaaagccgtttctgtaacgcttgcttcaataaacggcagacaaacgccgctttttattgacaggcagggcgtgttttttaaaatgggggatctgccttcaggtgacgcggcaggattgccgattctttccgggcttgataatccgcaagtgtacatgcagcttcccgcgagccttgtgccgcttacggaaaaaatttccgtaataacggccgcttctccggaactgctttcggcaatttcggaaattcgcattgaacaaaagtcgtgggaagggtacgaacttgttctctatccggttcacagttcaataaaagtaaggatagaaaatgatttaacggaagaaattctgcgttatatgcttcttatgcttaacgtttttgaaagcagttacaataaaccgcaggagatagattttagatccggcattggctcatataagataaaggagaattcctga

SEQ ID NO: 24564 - protein, 189 aa, Unknown
  Obtained from environmental sample
  misc_feature (1)..(189): Xaa is any amino acid
MSTNVKEVQKKLSNIILVESVKVSKRFPDKLTISLIPRKAVSVTLASINGRQTPLFIDRQGVFFKMGDLPSGDAAGLPILSGLDNPQVYMQLPASLVPLTEKISVITAASPELLSAISEIRIEQKSWEGYELVLYPVHSSIKVRIENDLTEEILRYMLLMLNVFESSYNKPQEIDFRSGIGSYKIKENS

SEQ ID NO: 24565 - DNA, 897 bp, Unknown
  Obtained from environmental sample
  misc_feature (1)..(897): n is a, c, g, or t
ttggccgagaagggagcttatatacaccagagcatggatgggggcaactcgcccgcccttatcgcgattcgtgaaaacggagagtttcttgcggcaattttgacttcggattcattggacagcttcgattcaacaggtaaaaccatattgcacctggcatctcaaaccggaaacgttgcggcagtaaacaccattataaaagccggagccaacgtcgctttaagggataaaaacgaaaaaaccgccctggattacgcgctggacaggaaagaatcaaaaaatcacgctgaaaccgccgtacagctgatactcgcgggagcggtatccaataatcccctttatacatatttcgcgcccgccgcgaaaagctccaactacaatatcagaagcgcggacggtatgacccctcttcattacatagcacgggaagggtacatagggtacctggcctttgtactggaaaaaggggcggacgttaatttaaaaaacgcgtccggcgcttccccgctgcacgaagcggcccgttccggggacatcagaatgatgcaaaccctgcttaattacggcgcggacataaaagcccaggacgccaacggcaattcagtccttcatgtcgcggttccgcccgagtcgcatcttgacgcaattaagctttttctttcaaaaggcgccaatataaatctgcgggatgaacatggggattctccccttcatatcgccattttactgaacagaaatgaagaaatcatccgaaccctgctttcaaacggagcggatgtaaccatccgcgacattgacggcaaaacaccgctttacctggccatcngaaaagggcggaacaattgtgtccccattttgcttcaatacagggcgaatatttttgccatgaacaaatga

SEQ ID NO: 24566 - protein, 298 aa, Unknown
  Obtained from environmental sample
  DOMAIN (198)...(231): Ankyrin repeat
  misc_feature (1)..(298): Xaa is any amino acid
MAEKGAYIHQSMDGGNSPALIAIRENGEFLAAILTSDSLDSFDSTGKTILHLASQTGNVAAVNTIIKAGANVALRDKNEKTALDYALDRKESKNHAETAVQLILAGAVSNNPLYTYFAPAAKSSNYNIRSADGMTPLHYIAREGYIGYLAFVLEKGADVNLKNASGASPLHEAARSGDIRMMQTLLNYGADIKAQDANGNSVLHVAVPPESHLDAIKLFLSKGANINLRDEHGDSPLHIAILLNRNEEIIRTLLSNGADVTIRDIDGKTPLYLAIXKGRNNCVPILLQYRANIFAMNK

SEQ ID NO: 24567 - DNA, 903 bp, Unknown
  Obtained from environmental sample
  misc_feature (1)..(903): n is a, c, g, or t
ttgagcaagaaacctgattacaaaaacgatccttcgtggttggatgaaaaaagccgccctgagtttatcaagatcaataaactgcgttttctcaggcgctatcaagtacgggcaatcagagcgatccagcgggcggtaagagaagggcgggatcgctttctgtttgaaatggcaaccggaaccggcaagaccctgatttctgccgcagtgatcaagttatttaaacgaacaggtaacgcccgacgaattctttttctggtagaccggctggaactggagaggcaggcgcagaaaaattttgaggactatctgaaaggcgattgtatttctgtaatctacaaagagaatcgtgatgattggcgcaaggctgatattgtggtgtctactattcaaacttttttgtccaataaccgttacaaacgccttttcgcacctgatgattttgaccttgttatatccgatgaagcccaccggagcatcagcggaaacagccgggcagttttcgaatatttcatcgggtacaaattggggttgaccgctacgcccaaagattatcttaaacacattgacaccattggtttaagtgccaatgatccaagagaacttgagcggcgtactttgctggacacctacaaaacatttggctgtgaaaccggtgaaccgacgttccgctattcgttattggacggggtaggtgacgacttcctggtgaacccggttgtagctgacgcaagaacagaaataaccgcgcagttactttctgagcatggttacgcggtaatcgttcagaatgaagaaggcggcgaagcggaagaagtttttgttcatcaagactttgaaaaaaagtttttctcggaaacacaaaccgcgctttttgtaaggttttttctgaaaacgccctga

SEQ ID NO: 24568 - protein, 300 aa, Unknown
  Obtained from environmental sample
  DOMAIN (32)...(189): DEAD/DEAH box helicase
  misc_feature (1)..(300): Xaa is any amino acid
MSKKPDYKNDPSWLDEKSRPEFIKINKLRFLRRYQVRAIRAIQRAVREGRDRFLFEMATGTGKTLISAAVIKLFKRTGNARRILFLVDRLELERQAQKNFEDYLKGDCISVIYKENRDDWRKADIVVSTIQTFLSNNRYKRLFAPDDFDLVISDEAHRSISGNSRAVFEYFIGYKLGLTATPKDYLKHIDTIGLSANDPRELERRTLLDTYKTFGCETGEPTFRYSLLDGVGDDFLVNPVVADARTEITAQLLSEHGYAVIVQNEEGGEAEEVFVHQDFEKKFFSETQTALFVRFFLKTP

SEQ ID NO: 24569 - DNA, 516 bp, Unknown
  Obtained from environmental sample
  misc_feature (1)..(516): n is a, c, g, or t
atgaaaatcgacaggatgtattttgaccgttttgaagagactatccttaaaaatcctcgcatagatgaaattaaagaacaggcacaggaagggaaatgggacgatctccaaaactttgtcattcacaatatttttgacaaacccgaagactacttcaatatggaaaaattaaggactgccctgaatgctgaccgccgaattccgctcaaagaaatgctggaaaagattcttggtctcattccacgcttcaaaaccaaagaagaattgttagatgatgaatttgacaaatttgacagtcggtatatgccgggcgaaaactatttttccagtgctaaagcggtctttaaggcgtatattgaagatgccgagttccgtaatattatagaccaaggaaatttcgctcaattgaacgttactccctggatacaagcgtatcgccaattaagcggcgaactccgtaaaacgattacggaatatatcaaggactatgtgccactcaataattttatggattaa

SEQ ID NO: 24570 - protein, 171 aa, Unknown
  Obtained from environmental sample
  misc_feature (1)..(171): Xaa is any amino acid
MKIDRMYFDRFEETILKNPRIDEIKEQAQEGKWDDLQNFVIHNIFDKPEDYFNMEKLRTALNADRRIPLKEMLEKILGLIPRFKTKEELLDDEFDKFDSRYMPGENYFSSAKAVFKAYIEDAEFRNIIDQGNFAQLNVTPWIQAYRQLSGELRKTITEYIKDYVPLNNFMD

SEQ ID NO: 24571 - DNA, 756 bp, Unknown
  Obtained from environmental sample
  misc_feature (1)..(756): n is a, c, g, or t
ttgttgatcaataatccgtccaaatacgcctgccgccagtgcgaggggacggaagacgaagacaagccaacagtccgcatagcgcccgtggaaccggcgattatttccaggagcatagcaagcgccagcttattaggcacaatcttcacgcaaaagtttgagatgcacctgccgtactataggcaggagaagcaatttgaacagataggggtggtaataagccggcaggacatggcgaactggcagcagcaggcgtatgaaaagttggaaccgttattcgccatactcaaaaagacggttaaagacggtcccgtggtacagatggatgagacggaagtgcaggtaataggggaagaaaaccgcagcgacattcagaaaagccgcatgtggcttgcccggggcggcccccctgccaagaaagtaatatggtatgagtaccatccgacgagggctgcgtacaacgcgaaagcgtttctggaagggtattcgggttatctgcaaacggacggatatgaaggctatgacagcgcggtgaaagacatgcccggtattattcacgtggggtgcatggcgcacgcgagaaggaagttttttgaggcatccaggataaacaagaaaccgcagtccgccgaggaagggataaagcatatacgcaggctgtaccagcttgaagacgcgctgaggggcaaatggaaagaccaccttgaaagattcaatgaagagagaaagaaagaagcggcctccctgttagattga

SEQ ID NO: 24572 - protein, 251 aa, Unknown
  Obtained from environmental sample
  DOMAIN (8)...(183): Transposase IS66 family
  misc_feature (1)..(251): Xaa is any amino acid
MLINNPSKYACRQCEGTEDEDKPTVRIAPVEPAIISRSIASASLLGTIFTQKFEMHLPYYRQEKQFEQIGVVISRQDMANWQQQAYEKLEPLFAILKKTVKDGPVVQMDETEVQVIGEENRSDIQKSRMWLARGGPPAKKVIWYEYHPTRAAYNAKAFLEGYSGYLQTDGYEGYDSAVKDMPGIIHVGCMAHARRKFFEASRINKKPQSAEEGIKHIRRLYQLEDALRGKWKDHLERFNEERKKEAASLLD

SEQ ID NO: 24573 - DNA, 609 bp, Unknown
  Obtained from environmental sample
  misc_feature (1)..(609): n is a, c, g, or t
ttgtcgcattgggaaacgccgtccgagattgtagagagcgcggccagccagtaccggcgcgatttatgggaagggcaggatcgctattgcgaggtatgggtagaaaaggacgctttaattgacatagtagaacaggccgcaagccgcctggactgcccatgcttttcttgccggggctatgcttcgcaatcggaaatgtggggcgcggccatgcggtttattgacaaagcggataatggccgggaatgcgttttgatccacctgggcgatcacgacccttccggaatcgacatgacaagggacattagggaacgcctggccatgtttggggcaagcgttgacgttaagcggatcgccctgaatatgccgcaaattgaagaatacaacccgccgcctaatcccgccaaagaaacggacacacgcgccgccgggtacattgcggaatatggaaattcatcatgggaactggacgcccttattacagcaaccataaaaagcaacctagaccaagaaaaatacagccgcgcaatcgaaaaacaggaagctgaaaggaaaagcatagccgctttgttgccagtgcttaacaaggagctaccagataacccatga

SEQ ID NO: 24574 - protein, 202 aa, Unknown
  Obtained from environmental sample
  misc_feature (1)..(202): Xaa is any amino acid
MSHWETPSEIVESAASQYRRDLWEGQDRYCEVWVEKDALIDIVEQAASRLDCPCFSCRGYASQSEMWGAAMRFIDKADNGRECVLIHLGDHDPSGIDMTRDIRERLAMFGASVDVKRIALNMPQIEEYNPPPNPAKETDTRAAGYIAEYGNSSWELDALITATIKSNLDQEKYSRAIEKQEAERKSIAALLPVLNKELPDNP

SEQ ID NO: 24575 - DNA, 801 bp, Unknown
  Obtained from environmental sample
  misc_feature (1)..(801): n is a, c, g, or t
atgagtacggaacaattacgcttaagggtacaggacctctccattgattttggggggctgaaagccgtcagcgaattttcctgcgagctgttccacggggagctggtcgggcttatcggcccgaacggggcgggcaagacgacggttttcaatatgctttccggcatatacaccccgaccggaggagggattgaattccgcgaccgtaaaggcggcctttgtcatgtaaaaaacatgaacccctcaaagttgaaccggattggccttgccaggacttttcagaacatacgcctgttttccaatctttctgtcgaggacaatatccgcatagcgttacattccggcaggacaagcggccctatagacgcgctgttccgcctgaagagttttcggattgacgaggcccggatgaaaacccaggcacaggagctgctttcactttttaaaattgaaaagaagaaagacgaactggcgcgcaatcttccgtacggcgaacaacgtaagctggagattgcccgagccatagcttccaacccgtgccttctcctgctggatgaaccagccgccggaatgaacccccaggaaaccgaagatttaatgaagataataaaatttatcaggaatgaatttcaccttacgattcttttaatcgagcacgatatgcggctggtaatggggatatgcgagcggctgatagtgctggattacgggcggacaatcgccgccggctcgccggaagagattaggcgtaatccggcggtgatcaaggcttaccttggaacggaggccgccaatggctga

SEQ ID NO: 24576 - protein, 266 aa, Unknown
  Obtained from environmental sample
  DOMAIN (33)...(237): ABC transporter
  misc_feature (1)..(266): Xaa is any amino acid
MSTEQLRLRVQDLSIDFGGLKAVSEFSCELFHGELVGLIGPNGAGKTTVFNMLSGIYTPTGGGIEFRDRKGGLCHVKNMNPSKLNRIGLARTFQNIRLFSNLSVEDNIRIALHSGRTSGPIDALFRLKSFRIDEARMKTQAQELLSLFKIEKKKDELARNLPYGEQRKLEIARAIASNPCLLLLDEPAAGMNPQETEDLMKIIKFIRNEFHLTILLIEHDMRLVMGICERLIVLDYGRTIAAGSPEEIRRNPAVIKAYLGTEAANG

SEQ ID NO: 24577 - DNA, 825 bp, Unknown
  Obtained from environmental sample
  misc_feature (1)..(825): n is a, c, g, or t
ttgtcggcattacagggcagctttcactggggcaggctgggttttcttgcaatcggggcctattcctgcatttttttcaatctcgatatgggcctgcctattccgcttgcggtcttttgcgctgttattgttaccaccttcgccggttttctcatcggctttccggtgctgaagctgaccggggattacctggcaattgttaccctgggttttggcgagattatccgcgtggtatttatcaaccttaaagccctgacaggcgggccaaacggaaggtcgtttacaacaaacatggtgctaaacggccaattggccttcatattcacaacggcaacgctggtcgtcattcttgcgctgttgcagaattttctccgttcaacctatggccgagcaatcaaggcgtgcagagaagatgaaattgcggctaacgcaaacgggattaacattttccgctacaagatgatcggttttgtcattgccgcttttatcgccggcataggcggctgtgtttatgtgctggttgtcggctttgtcagaccggatatagcacagttcctcagatcaatagacttccttatttatgtcgtgctgggcggcatgggttccatgaccggctcgattctttctgcttacgtccttacctatttgcaggaatttctgcgtttcctgcaagattaccgcctcttgatatatccgataatactgatatttgtcatgctgttccgtccaaagggccttatgggaatgaaggaattttccattgtgggttttgttgataaaatttccggcagattcctcaagcgggcaaagaaggggaaggcatga

SEQ ID NO: 24578 - protein, 274 aa, Unknown
  Obtained from environmental sample
  DOMAIN (1)...(239): Branched-chain amino acid transport system / permease component
  misc_feature (1)..(274): Xaa is any amino acid
MSALQGSFHWGRLGFLAIGAYSCIFFNLDMGLPIPLAVFCAVIVTTFAGFLIGFPVLKLTGDYLAIVTLGFGEIIRVVFINLKALTGGPNGRSFTTNMVLNGQLAFIFTTATLVVILALLQNFLRSTYGRAIKACREDEIAANANGINIFRYKMIGFVIAAFIAGIGGCVYVLVVGFVRPDIAQFLRSIDFLIYVVLGGMGSMTGSILSAYVLTYLQEFLRFLQDYRLLIYPIILIFVMLFRPKGLMGMKEFSIVGFVDKISGRFLKRAKKGKA

SEQ ID NO: 24579 - DNA, 354 bp, Unknown
  Obtained from environmental sample
  misc_feature (1)..(354): n is a, c, g, or t
gtggattatttctttatcggggatcccgaactggtgacggccttccgctttatcggcattgaaggccgcgccgtgaaggatccctcggaggcggcggccgttttcaggcgcatcaccgaagggtgggtcgaggacgccgacactgttctgcccgacgccgtaaagggcgcggaaggctgccgggtgctgatcctcaccgaagagaccgccggttggatcgaggaactcctcgtcaactggcagctttccggccgttatcccctgatagtggagatccccggcataatgggcaggatgcccggcaagaaaactctcgtggattcaatccgcgaggcgattgggatacatgtataa

SEQ ID NO: 24580 - protein, 117 aa, Unknown
  Obtained from environmental sample
  misc_feature (1)..(117): Xaa is any amino acid
MDYFFIGDPELVTAFRFIGIEGRAVKDPSEAAAVFRRITEGWVEDADTVLPDAVKGAEGCRVLILTEETAGWIEELLVNWQLSGRYPLIVEIPGIMGRMPGKKTLVDSIREAIGIHV

SEQ ID NO: 24581 - DNA, 633 bp, Unknown
  Obtained from environmental sample
  misc_feature (1)..(633): n is a, c, g, or t
atgaacaccaacctgcatgtactggaagcttatacaaacctctcccgtaccagcggggatgaacgtgtgcataaggcgcttgaagcgctgttacacataatgattgataaaattgtcaataataattggcattttgaattattctttgacatgagctggaattcgctgaccgaagatatttcttatggtcatgatattgaaggaagctggctattatatgaagcggcgctggccgtcggcgatgaaagccttatctccagagtgaaacaaacggcattagcgatagcggaagttatctatactacagccattgacagtaaaaacggcggattgatcagcggctgtgacgaacagggacacaatcatgccaaaaaggaatggtggccccaggcggaagccgtcgtaggtttctacaatgcgtatgagttatccggcgatcagaaatactttacagccgctaacgttatatggaattacatccaaaagtattttctggatcatacctgcggcgaatggcacaacgaattgaaccctgacaatacgccggataccagtatgcccaaagccggtttctggaaatgcccgtaccacaacgcgcgggcctgcttagaggtgataaggcggatgaggtga

SEQ ID NO: 24582 - protein, 210 aa, Unknown
  Obtained from environmental sample
  misc_feature (1)..(210): Xaa is any amino acid
MNTNLHVLEAYTNLSRTSGDERVHKALEALLHIMIDKIVNNNWHFELFFDMSWNSLTEDISYGHDIEGSWLLYEAALAVGDESLISRVKQTALAIAEVIYTTAIDSKNGGLISGCDEQGHNHAKKEWWPQAEAVVGFYNAYELSGDQKYFTAANVIWNYIQKYFLDHTCGEWHNELNPDNTPDTSMPKAGFWKCPYHNARACLEVIRRMR

SEQ ID NO: 24583 - DNA, 816 bp, Unknown
  Obtained from environmental sample
  misc_feature (1)..(816): n is a, c, g, or t
ttgtgcggaaacgcggaggctcaggaaggtgaatcgcttccttccataagcagacttgatacccgggacgctgtctttaagcagtatctgacagatgtagaagcggcccggcggcgtttgtatggccaggatccggggaagaatgagttgggcggcttagtgcgactctattcctatacgcccaagaacgatgaggaccttttccggctttccgcccgctgcaatgtgccgtacgccgctctggctaccctgaaccggataagccaccctgacttacttaacggccctgtactgctgcccaccatgccggggctctttattcccgaaacgccaggcaacgatctggaacggctgatttcaggatcgagggaaatggaagggggaacgatcatcatcgtccatgtgggggacagttccgggcagtttctgttttttcccggcgcggattttagtcccacagaacggagtttttttcttaaccggggttttcggtttcccctgcgtacttaccggatcaccagccctttcgggatacggcccagcccctttaccggaaagctccaaaaacataacggcgtggatctggccgcccccaccggaacggaagtatacgccgccaggggggggaaggtagccgaagtaggaaccgatccggtatacggcaactatatcatcatcgcccacgacgataactgggcaagcctctacggccatctttcttcgttttcaaccaaacttcacagcaccgttacggtaaacagtgtcatcggcagggtcggatcgaccggccatccacagggccccactttcctttga

SEQ ID NO: 24584 - protein, 271 aa, Unknown
  Obtained from environmental sample
  DOMAIN (188)...(268): Peptidase family M23
  misc_feature (1)..(271): Xaa is any amino acid
MCGNAEAQEGESLPSISRLDTRDAVFKQYLTDVEAARRRLYGQDPGKNELGGLVRLYSYTPKNDEDLFRLSARCNVPYAALATLNRISHPDLLNGPVLLPTMPGLFIPETPGNDLERLISGSREMEGGTIIIVHVGDSSGQFLFFPGADFSPTERSFFLNRGFRFPLRTYRITSPFGIRPSPFTGKLQKHNGVDLAAPTGTEVYAARGGKVAEVGTDPVYGNYIIIAHDDNWASLYGHLSSFSTKLHSTVTVNSVIGRVGSTGHPQGPTFL

SEQ ID NO: 24585 - DNA, 321 bp, Unknown
  Obtained from environmental sample
  misc_feature (1)..(321): n is a, c, g, or t
ttgcagcaattagcgaaccagagcggccttgaaatccatatatcacatttcccacctggaacaagcaaatggaataaagtagaacacaggatgttctgctacattaccagccattggaagggtcaaccattaataagtgttgagacggttatacagttgattggcagcacaacaacaacgactgggttgaaaatcatttgtgtgaaagatgatactgtttataagattggcataaaagtcagtgatgaggatttcgcgacaataaatataaaaaatgtgaaaacactacccacttggaactatatcatctcccctttataa

SEQ ID NO: 24586 - protein, 106 aa, Unknown
  Obtained from environmental sample
  misc_feature (1)..(106): Xaa is any amino acid
MQQLANQSGLEIHISHFPPGTSKWNKVEHRMFCYITSHWKGQPLISVETVIQLIGSTTTTTGLKIICVKDDTVYKIGIKVSDEDFATINIKNVKTLPTWNYIISPL

SEQ ID NO: 24587 - DNA, 378 bp, Unknown
  Obtained from environmental sample
  misc_feature (1)..(378): n is a, c, g, or t
ttgtctcccaattgggcctttacatgcgccgctctggtgggtgaaagatggccgaaaagatttgcgcttggcgcggccaccgcaccggtagaaagccgtataagtttntgcgccactaggtgcgaaggaaaacgtattgccgcggtgctaagtcctgacgttgccagttcgggaacttcgctgcgttttggcagaatcagcgtgagcgggccgggccagagccgttccgcaagaacagaaagcctttcaaccgtggctttattaagggaagatttatccgcgattctccaaagagtttgcggatcggcaatgtggataatcagaggatcaaagcggggcctgcccttcgcttcgaatattcttgccagcgcggattga

SEQ ID NO: 24588 - protein, 125 aa, Unknown
  Obtained from environmental sample
  misc_feature (1)..(125): Xaa is any amino acid
MSPNWAFTCAALVGERWPKRFALGAATAPVESRISXCATRCEGKRIAAVLSPDVASSGTSLRFGRISVSGPGQSRSARTESLSTVALLREDLSAILQRVCGSAMWIIRGSKRGLPFASNILASAD

SEQ ID NO: 24589 - DNA, 429 bp, Unknown
  Obtained from environmental sample
  misc_feature (1)..(429): n is a, c, g, or t
atggttactttgaatgaaaccatttttgaaaaaagaaatactcaaataacctctatttccgctattgcaaaaagattagaacaatacaaaaattttacaattattccttttttaggaaagatcccttttattttggattttattcttggcaatgaatataaacaatacattcaaaaaatatatctttttggctcttacgcttatggagaaccaaatgaagacagtgatatagatttatgtgtaattatagatgatgataaaccatggcttgaagtaaccaactgtataacanaaaaattatggaatgaaaagattgttccttgcgatgtattggtttttaatgccagtttgtttaatgatcgtattaagatgcanagcattgaaagagttataaaaaaatacggaatattaattaatgaacgaaagtag

SEQ ID NO: 24590 - protein, 142 aa, Unknown
  Obtained from environmental sample
  DOMAIN (34)...(138): Nucleotidyltransferase domain
  misc_feature (1)..(142): Xaa is any amino acid
MVTLNETIFEKRNTQITSISAIAKRLEQYKNFTIIPFLGKIPFILDFILGNEYKQYIQKIYLFGSYAYGEPNEDSDIDLCVIIDDDKPWLEVTNCITXKLWNEKIVPCDVLVFNASLFNDRIKMXSIERVIKKYGILINERK

SEQ ID NO: 24591 - DNA, 957 bp, Unknown
  Obtained from environmental sample
  misc_feature (1)..(957): n is a, c, g, or t
atgcatcagcacaaagaactgcttacagatctgttaaaagaggaaatgggttttaagggctttgttgtttccgactggtcggcaattaatcaactaacaggcggcacttacaagaggcagattgcaaacgcgatcaacgccggagtggatatgaacatggcggcttccagccgagaaagctggatgtcttttatcagtaatcttattaagctggttgaagaaggaactgttccgatgtcgcgcattgacgatgctgttattcgcattctgcgcttcaaacaaagtataggcctatttgaaaatccgctgacggcgcaggcgggtgaaatcggtacggccgaaaacagggccgccgcgcgttctcttgtttcggattcgcttgttcttttgcgtaacgaaaataacgctatcaaaaaactttccgagagtaaaaagattttagtcgcaggccagggcgctaacaatataggaatgcaatgcggcggatggacaataacatggcagggctcgctcggtaaaattacaaagggaacatcaatactggaaggaatacagtcggcaacaaaagggaaaacaacagttgcttatgccgaagacggaagagcggacggtcctttcgatgcggtaatcgccgtaatcggggagaacccttacgcggaaaccgaaggcgaccataccggcaatatcagtatccgtgacaaagatttggaaactctccggaaagtctatgaatatcgctgcccggtaatcgttatcatgctgtcangccgcccaatgaatatcggcgacgagtataagaaatgggacgctttcatcgccgcgtggctgccgggcactgaaggcggcggaattgcggatgttcttttcggaggcaaaagttttacagggcgcactccgtacacatggcggaaaactttaaatggagaggttttatatccgtttggggcggggctttag

SEQ ID NO: 24592 - protein, 318 aa, Unknown
  Obtained from environmental sample
  DOMAIN (127)...(318): Glycosyl hydrolase family 3 C terminal domain
  misc_feature (1)..(318): Xaa is any amino acid
MHQHKELLTDLLKEEMGFKGFVVSDWSAINQLTGGTYKRQIANAINAGVDMNMAASSRESWMSFISNLIKLVEEGTVPMSRIDDAVIRILRFKQSIGLFENPLTAQAGEIGTAENRAAARSLVSDSLVLLRNENNAIKKLSESKKILVAGQGANNIGMQCGGWTITWQGSLGKITKGTSILEGIQSATKGKTTVAYAEDGRADGPFDAVIAVIGENPYAETEGDHTGNISIRDKDLETLRKVYEYRCPVIVIMLSXRPMNIGDEYKKWDAFIAAWLPGTEGGGIADVLFGGKSFTGRTPYTWRKTLNGEVLYPFGAGL

SEQ ID NO: 24593 - DNA, 624 bp, Unknown
  Obtained from environmental sample
  misc_feature (1)..(624): n is a, c, g, or t
ttggacgttgtgcgcaaagtagccgccgaagtttttatccccctgtgcgtaggcggcggcatacgcgtaattgacgatatgcgagatgcgatgaacgccggcgcggacaaagtttcagtctgcacttccgcccttagccgccccgaattgttacgcgaaatggcaaacgcttacggcagtcagtgtgtcgtgctctcaatagacgcaaaacgcgttgagggcggcggagacttacgctggcacgcctattcccacggcggcagaaccgacacaggaattgacgccattgaatgggcaatccgcgccgtagaactcggcgcaggcgagatacttctcaactcaattgacgctgacggaacaggcggcggctacgatttggaactgaaccgccgaatactgaacgccgttccagtacctgtaatcgcctcaggcggcgcggggacgctggatcaaatagcggaggttttgctcagtaccgcgtcggtggaaatgccgcagggacttgcgccggaagaagcgccgggagcggacgccgcgctgatagcgtcgcttttgcactttgggaagacgacaattcaagagattaagaaacacgctgaggcgaagggcgtttgcgttagatga

SEQ ID NO: 24594 - protein, 207 aa, Unknown
  Obtained from environmental sample
  DOMAIN (1)...(191): Histidine biosynthesis protein
  misc_feature (1)..(207): Xaa is any amino acid
MDVVRKVAAEVFIPLCVGGGIRVIDDMRDAMNAGADKVSVCTSALSRPELLREMANAYGSQCVVLSIDAKRVEGGGDLRWHAYSHGGRTDTGIDAIEWAIRAVELGAGEILLNSIDADGTGGGYDLELNRRILNAVPVPVIASGGAGTLDQIAEVLLSTASVEMPQGLAPEEAPGADAALIASLLHFGKTTIQEIKKHAEAKGVCVR

SEQ ID NO: 24595 - DNA, 663 bp, Unknown
  Obtained from environmental sample
  misc_feature (1)..(663): n is a, c, g, or t
ttggaattataccgcggtttatcaaaagtaggatttcacgcaaaattattcgataaagaacgttttgcggatatgctgttggatttatctctttatgtagccccgcgattaacaattatggacgcagttcttgccatggagggcgaaggacccggcgcttcgggaactccaaggcacgtcggtcttttgctggcgtctacaagcgatcttgctcttgacgttgtagcgggcgaaatcatgggacttccctgcgaacacaaccccgtattaatggcggcaaagagacgcgacgcgtctccgtacaaaattgaagatgtaaatgtaataggcgaagacctttcaagtataaaaataaccgattataaattcccgtcaaccgtaaaaggttttagtaaaactgtcgagaaaaataccgttgtaagaaatcttttaaaatcgactttaactaaatttccggtagtggcaaaagaaagatgtataggctgcggtatgtgcgcgaccgcctgtccgcaaaaaatgattacaataattccgcacaaaaaaaagaaagtagccgttataagcctaaaagactgcattcgctgttattgctgccacgagttatgtccgcataaggcgattgatatcaagagtaagttaattacgaaggtattgaaggtttag

SEQ ID NO: 24596 - protein, 220 aa, Unknown
  Obtained from environmental sample
  DOMAIN (185)...(208): 4Fe-4S binding domain
  misc_feature (1)..(220): Xaa is any amino acid
MELYRGLSKVGFHAKLFDKERFADMLLDLSLYVAPRLTIMDAVLAMEGEGPGASGTPRHVGLLLASTSDLALDVVAGEIMGLPCEHNPVLMAAKRRDASPYKIEDVNVIGEDLSSIKITDYKFPSTVKGFSKTVEKNTVVRNLLKSTLTKFPVVAKERCIGCGMCATACPQKMITIIPHKKKKVAVISLKDCIRCYCCHELCPHKAIDIKSKLITKVLKV

SEQ ID NO: 24597 - DNA, 732 bp, Unknown
  Obtained from environmental sample
  misc_feature (1)..(732): n is a, c, g, or t
gtgttaatagcgttgccgctgatagtttttttaattctgacttttattaaaagttatccaataaatatggggttatcacttaataatataattagaacattggatttaggcgcagataagttccttattaattctattataattgcgattttgacttctttattgggagtaattttatcatggattactgcatattttaccgcccgtactaaaagcagatcatcaagaatactgcatcttttttctataacatctcttgctattcccggaattgttttaggaatttcttatgttcttttttttaagggatcatttttatatggaaccttagctatgcttattcttgttaatacgatccattttattgctccgccatatttaatagcttataactcattgggaaagctgaatagtaatcttgagaatgttggccgtacattaggcataaatcgtttacatattatttttgatgttctgattcctcaaacaaaattatcaatattggaaatgttttcttatttctttgttaattcgatgattactatttcagctgtttcatttttaagctcgtcattaaaaaagcctgtttcactgatgataactcaatttgaagcctatctgtttcttgaaggcgctgcatttgtttctattcttattcttagtattaatttaatagttaaatttatattgaatattataggtaaaagaataaaacaagttgaattaatttaa

SEQ ID NO: 24598 - protein, 243 aa, Unknown
  Obtained from environmental sample
  DOMAIN (42)...(239): Binding-protein-dependent transport system inner membrane component
  misc_feature (1)..(243): Xaa is any amino acid
MLIALPLIVFLILTFIKSYPINMGLSLNNIIRTLDLGADKFLINSIIIAILTSLLGVILSWITAYFTARTKSRSSRILHLFSITSLAIPGIVLGISYVLFFKGSFLYGTLAMLILVNTIHFIAPPYLIAYNSLGKLNSNLENVGRTLGINRLHIIFDVLIPQTKLSILEMFSYFFVNSMITISAVSFLSSSLKKPVSLMITQFEAYLFLEGAAFVSILILSINLIVKFILNIIGKRIKQVELI

SEQ ID NO: 24599 - DNA, 459 bp, Unknown
  Obtained from environmental sample
  misc_feature (1)..(459): n is a, c, g, or t
atggaccaagctccatggaaagtgggcaatgtcagctttggttatgctgcgattaatatgggtgattgcggcgactgttaccaattggattttcccaatggtcatgttatggttgttatgaagagcaacatcggaaacttaaacgaaggtgctgcttttgacattatgattccgggcggcggcgcgggcgattttgatgctttgacaaagcaagttcaaaatagtggcataagcaatccagatatgggtagtcgctatggtggatttagactagcctgcaacaattctgtaagttgcgtaaagcaaaagtgcgatgcaactttcaaaaatcttccagatttgagagctggttgcaactggtatgcagataatttgggcactagcaatgctagctttgacaacccaactgtcaaatatcagaaggtaacttgcccatcagcattaacaagtaagtactag

SEQ ID NO: 24600 - protein, 152 aa, Unknown
  Obtained from environmental sample
  DOMAIN (2)...(152): Glycosyl hydrolase family 45
  misc_feature (1)..(152): Xaa is any amino acid
MDQAPWKVGNVSFGYAAINMGDCGDCYQLDFPNGHVMVVMKSNIGNLNEGAAFDIMIPGGGAGDFDALTKQVQNSGISNPDMGSRYGGFRLACNNSVSCVKQKCDATFKNLPDLRAGCNWYADNLGTSNASFDNPTVKYQKVTCPSALTSKY

SEQ ID NO: 24601 - DNA, 819 bp, Unknown
  Obtained from environmental sample
  misc_feature (1)..(819): n is a, c, g, or t
ttgcgaaacgatgacggaaccggcgtacttgtcggacttacaagagtcggggacgtgcgcggttatattgtagaagaggaagaaaaagtcccaactccaggcaaactctactacaggggaattgacattgaggacattgccaacgaagcggcaaagcagaaccgtttttgttttgaagagacaatatatctccttctttttggcaaactgccaaaccaaaagcaacttgaaagttttaacaaattgttaggtgaaacccgcatactgccaaaaaactttgtagaagatgtaataatgaaagtcccgtcccgcgacataatgaacaagcttgcctcttcgatacttgccctgtatccctatgatgaagacccggagaatcaatctcctgaaaacgttctgcgccagtgcatagaattaatagcgcgtttcccggcaattgccgcatattcttatatgtcaaaaaaacaccactttgaccgcgaaagtttaataattcacccatctaatccgttattatcaagcgcggaaaccgttctttcgcttataagaccggataaaaaatacaccccatacgaagctatgttattagacctcgccttagtgcttcatgcggaacacggcggcggaaacaactctacatttactgtgcatgttgtttcatcttcggaaacagacacctactccgcgattgccgccggtatcgtttcgctaaaaggctacaaacacggcggagcaaacgcgaaagtaatcggcatgatggatgaaatcatgaagaatgttaaaaattgggaaagcgaagaagaagtatccgctacctaa

SEQ ID NO: 24602 - protein, 272 aa, Unknown
  Obtained from environmental sample
  DOMAIN (19)...(272): Citrate synthase
  misc_feature (1)..(272): Xaa is any amino acid
MRNDDGTGVLVGLTRVGDVRGYIVEEEEKVPTPGKLYYRGIDIEDIANEAAKQNRFCFEETIYLLLFGKLPNQKQLESFNKLLGETRILPKNFVEDVIMKVPSRDIMNKLASSILALYPYDEDPENQSPENVLRQCIELIARFPAIAAYSYMSKKHHFDRESLIIHPSNPLLSSAETVLSLIRPDKKYTPYEAMLLDLALVLHAEHGGGNNSTFTVHVVSSSETDTYSAIAAGIVSLKGYKHGGANAKVIGMMDEIMKNVKNWESEEEVSAT

SEQ ID NO: 24603 - DNA, 714 bp, Unknown
  Obtained from environmental sample
  misc_feature (1)..(714): n is a, c, g, or t
atgggacaagatagcgtcggatgnatgaaagaagcggcaggtaaagccgccgtagacgaaatggtaaaaagcggcatgaaactcggtcttggaaccggttctaccgccattcacgcggttcgcagggttggagagcttttggcacagggagcgttacgggacatttacgcgtttgccacaagttttcaaacggaaattgaatgtgaaaaactgcggattccttttttttcgttaaattcgcgcgaactttcatcaggattggatttaacgattgacggcgctgatgaagtagacccgcaaaaccgcctcattaaaggaggtggcggcgctcatttaattgaaaaaattgccgcttatgcctccgcgcagtacgctattaccgtggacgaatcaaaaataacggagcgcctgggaggcggttttcccgtacctgtggaagttgttcccgaggcgagagcgcaggcggcaaaggcgcttgaaaaattaggcgctaatgttattattagggaagcagtacgaaaagcgggacccgtaatcacagaacacggaaacctgattttagacattcgctttaattcaccgatagacccatcattaatggaaacggaaataaacaacatcccgggcgttgtagagaatggattttttacccgaaagacgcctgtagtatacattgcccgttcaaacggaacggtagaaaaaagaggaagatga

SEQ ID NO: 24604 - protein, 237 aa, Unknown
  Obtained from environmental sample
  DOMAIN (55)...(232): Ribose 5-phosphate isomerase A (phosphoriboisomerase A)
  misc_feature (1)..(237): Xaa is any amino acid
MGQDSVGXMKEAAGKAAVDEMVKSGMKLGLGTGSTAIHAVRRVGELLAQGALRDIYAFATSFQTEIECEKLRIPFFSLNSRELSSGLDLTIDGADEVDPQNRLIKGGGGAHLIEKIAAYASAQYAITVDESKITERLGGGFPVPVEVVPEARAQAAKALEKLGANVIIREAVRKAGPVITEHGNLILDIRFNSPIDPSLMETEINNIPGVVENGFFTRKTPVVYIARSNGTVEKRGR

SEQ ID NO: 24605 - DNA, 363 bp, Unknown
  Obtained from environmental sample
  misc_feature (1)..(363): n is a, c, g, or t
ttgatcacgaactatccgcgcttttcgaccttgcgcacggcgcggggcttgcgattatttttccgggcatggctaaggtacaacatcaaggagaacactccccgccttgcgcgttttgccgcgaaagtttggggcgtagacggcgcgttttatgattacgagcaagccgctttggaaggcgtaatcagaatggaaaactttttcagttctatagggatgccgataaggttttcagacgcgaacataaatcccgcctacataccggaaatggcaaaacgcgctgtccatttcggccctataggcaactaccgcaagctggatgaaaaagacgccgaagcaatttacaggctggcggcgctgtag

SEQ ID NO: 24606 - protein, 120 aa, Unknown
  Obtained from environmental sample
  misc_feature (1)..(120): Xaa is any amino acid
MITNYPRFSTLRTARGLRLFFRAWLRYNIKENTPRLARFAAKVWGVDGAFYDYEQAALEGVIRMENFFSSIGMPIRFSDANINPAYIPEMAKRAVHFGPIGNYRKLDEKDAEAIYRLAAL

SEQ ID NO: 24607 - DNA, 732 bp, Unknown
  Obtained from environmental sample
  misc_feature (1)..(732): n is a, c, g, or t
atggttgttgaccgcctccatgatttccttggccgtgctcaagacccggccctgggcatcggtgcgcagggtgacgcagatgttccagggattgggccccaccgcgaccgtggtggccgaattgggatgggtggtcggatcgggcatttggtattccacccgcaggtcgttgccccaggtgccctggtagcgggcggtgaagaccaggtcgttgccctggccgatgaaattggtggtcagggaggcgtggcccaggaaggcgttgtggaacatgtcgccgacctggtattcactggccccgaaggtctggggcgggccccaggtctggcccccgtcctgggagacccggaacagggccggctggtcgtagccgtcggccaggtaggtccggggatgggcgaagttcaggcggccgtccccggaattgccgtcggccagggagacctcgaagagggaacttatgcattgctgggccgcggccccggatttcaaaacaacggcggaggtgacggcggagccctcattattacggatgaccgaatattcagcggcaaaggcggccgtgccgttgaccatggcctggacatccttggccgtggtggtgacggcggcggcgatggccttttcgtgggccgtttggtggctgccggtttcgtaaaaaaccttggcgtaggtgttgttatagatgttcacgtccccggccgcgtaaaccgtgaccaggcccgtggctga

SEQ ID NO: 24608 - protein, 243 aa, Unknown
  Obtained from environmental sample
  misc_feature (1)..(243): Xaa is any amino acid
MVVDRLHDFLGRAQDPALGIGAQGDADVPGIGPHRDRGGRIGMGGRIGHLVFHPQVVAPGALVAGGEDQVVALADEIGGQGGVAQEGVVEHVADLVFTGPEGLGRAPGLAPVLGDPEQGRLVVAVGQVGPGMGEVQAAVPGIAVGQGDLEEGTYALLGRGPGFQNNGGGDGGALIITDDRIFSGKGGRAVDHGLDILGRGGDGGGDGLFVGRLVAAGFVKNLGVGVVIDVHVPGRVNRDQARG

SEQ ID NO: 24609 - DNA, 1002 bp, Unknown
  Obtained from environmental sample
  misc_feature (1)..(1002): n is a, c, g, or t
ttgcttgagcggctctttgtcgaaatgctgaagcaaaaaaacgaagagggcgtgtatacttcgctgcgcgatattgttgtcgtcactttcaccgataaggcggcggcggagatgcgcgatcgcatccggctgcatctgcgggacgttatcaaattgtcatcggatgatgccgatcttcgcgatcacctggaagtctctctgcgttcctttgaggaagcgcggatatccaccatccatgctttttgcagggaaatgctcagcgagaacgcgattgattgcaaagtgcctgtggattttacagtcgaaaatgatgacgaattatatacgcgcgcgatggatcggcttttgcgttcctggcgcgggcaggaacatgggcgcgcgcggcttgtgcagagcggcgcgtatcaggaaggcgcggaatggcgcaagagtgtactcgcgcttgcgggtaagcgtgcatatcctgccggggaggattcggctgtcaaactggaggctgccgatcgggaggcgcgcgcggcatatacacaagcaatggatcttctccgcccgcgtatcggcgaatgcctcgcgtatctgcaggcggaagattatgcgcatcaccaggggagaaaaaagaaactctcagctttttatgcggaatgtttcagccaaatacaaatgcgattgaaaaattccaagcaagccgatgggcaagtcataatgtggattgatcagcttctggaaaaaatagatccatctgatccgtctgttccattcgcgcggcttatagaagcgccgaataagggaaaggaaggatgtcgaacctggaaggaagtttttccggagctcacggtttttacggatcatcttcgcagtgccgtattacagcgcaaagaggcgcgcgtctctgcttttgatgccgccgttgctgctctccgtaagatggtacgcgaaatgaagagtaaacagcgcgttttgagttttatgaccttattcatacgttgcgactctcgtccataa

SEQ ID NO: 24610 - protein, 333 aa, Unknown
  Obtained from environmental sample
  misc_feature (1)..(333): Xaa is any amino acid
MLERLFVEMLKQKNEEGVYTSLRDIVVVTFTDKAAAEMRDRIRLHLRDVIKLSSDDADLRDHLEVSLRSFEEARISTIHAFCREMLSENAIDCKVPVDFTVENDDELYTRAMDRLLRSWRGQEHGRARLVQSGAYQEGAEWRKSVLALAGKRAYPAGEDSAVKLEAADREARAAYTQAMDLLRPRIGECLAYLQAEDYAHHQGRKKKLSAFYAECFSQIQMRLKNSKQADGQVIMWIDQLLEKIDPSDPSVPFARLIEAPNKGKEGCRTWKEVFPELTVFTDHLRSAVLQRKEARVSAFDAAVAALRKMVREMKSKQRVLSFMTLFIRCDSRP

SEQ ID NO: 24611 - DNA, 885 bp, Unknown
  Obtained from environmental sample
  misc_feature (1)..(885): n is a, c, g, or t
atgaaagggataaaagccctgggccacgaaagggactacataagcgtggaatacgcaggggaagaaacggtctttgtaccaattgagcaggtaaacctggtccagcgttacatcggcaacgagggcagccctccccggctggacatactcggctcgaaaagctgggaaaaccgcaaaggccgcgttaaaaaatccgtggaggacatagcggaaaaactcctggccctatattcaaagcgccgccagtcgcagggcttcgcctttccgaaagacactgaatggcagaccatgttcgaagctgccttcccgtttgaggaaactgaagaccagctccgctgcgtggaggagatcaaggccgacatggaaagcccgcatcccatggacaggttaatctgcggagatgtgggtttcggaaaaaccgaagtggctgtacgtgcctgctttaaggcgataatgggcggcaaacaagtagcgtttcttgcgcccactacgatccttgcggaacagcattatgagaatttccaggaaagattcagccagtttccggtgaagatcgcaatgctctcgcgctttgtcgacaaaaaaagcgtccgcaaaattcttgaggaactaaaaaatggggaaatagatttgttggttggcacccacaggatcattcaaaaagacgtggcttttaaaaatctgggctttttggttatagatgaagagcagcgcttcggagtaaaagacaaagagcggctaaaggaactaaagcataacgttgactgccttaccctttccgcgacccctatcccccgaaccctgcacatgagccttcttaaaatacgcgacatgagccttcttgcgacgccaccccagaaccgccatccgatgagaccacgatga

SEQ ID NO: 24612 - protein, 294 aa, Unknown
  Obtained from environmental sample
  DOMAIN (103)...(265): Type III restriction enzyme, res subunit
  misc_feature (1)..(294): Xaa is any amino acid
MKGIKALGHERDYISVEYAGEETVFVPIEQVNLVQRYIGNEGSPPRLDILGSKSWENRKGRVKKSVEDIAEKLLALYSKRRQSQGFAFPKDTEWQTMFEAAFPFEETEDQLRCVEEIKADMESPHPMDRLICGDVGFGKTEVAVRACFKAIMGGKQVAFLAPTTILAEQHYENFQERFSQFPVKIAMLSRFVDKKSVRKILEELKNGEIDLLVGTHRIIQKDVAFKNLGFLVIDEEQRFGVKDKERLKELKHNVDCLTLSATPIPRTLHMSLLKIRDMSLLATPPQNRHPMRPR

SEQ ID NO: 24613 - DNA, 774 bp, Unknown
  Obtained from environmental sample
  misc_feature (1)..(774): n is a, c, g, or t
atggaaaaaagaagcgagcttgttattcaccctttcaaagagctggtctggacagaagatcgcgttgaggcgttaaaaacgaaccttgaaagctttgaagaatntccgtcaaaaggtaaagagatactggaagaactaaagacccggcgcgctattagcggcgaagaataccttttccccctggcctttgaaaaaccagccacactcgcggattattttttaagttctgtcggagaaagcaaagggaagggcgaagccttaggcggcgccatcgttatctaccttgagcgggaacggcttgagaacgcgcaggaaagccttgagaaagagtaccagagcctgtattccaaagcgcgcagaagcaaggaaatccctctcccaaataggatacttctcaacttcaaagaactttcctcctccattccccgctgtatttcttttacttcattaaggggaagcgtggataaaaataccttctgcattaacgccgcctgcgatccgcccagaagtttttttggaaacgtgaattatctaaaagaagaattcgcctccctaaaaaagcagggctgggctctggcggtggccgccgaatccgatgtccaggcgggacggatcgctgaactcttaaaagatgaagacgtttctgtcggcgcattgcctttctcgtccggctttgctttgcccgacatcaagttcatgctcatccaggaaaacgaaatctttggccgccgccgccgtccgcccaaatccctaaaaccgcgcgtagcgccgtaa

SEQ ID NO: 24614 - protein, 257 aa, Unknown
  Obtained from environmental sample
  misc_feature (1)..(257): Xaa is any amino acid
MEKRSELVIHPFKELVWTEDRVEALKTNLESFEEXPSKGKEILEELKTRRAISGEEYLFPLAFEKPATLADYFLSSVGESKGKGEALGGAIVIYLERERLENAQESLEKEYQSLYSKARRSKEIPLPNRILLNFKELSSSIPRCISFTSLRGSVDKNTFCINAACDPPRSFFGNVNYLKEEFASLKKQGWALAVAAESDVQAGRIAELLKDEDVSVGALPFSSGFALPDIKFMLIQENEIFGRRRRPPKSLKPRVAP

SEQ ID NO: 24615 - DNA, 675 bp, Unknown
  Obtained from environmental sample
  misc_feature (1)..(675): n is a, c, g, or t
ttgcttaccacgttccaagatttcctgagtttgaaccgcgtaaaagccttcccggaggtgctggtcacgcccgactacaacacggggataaaccacttcctgcaggcgaactccataggccccataaagcccaacttggccatcttcggctgggcgagcgacccgacgcgggccgcgccgttcatggagagcataaaaatcgccgcgcaactcaacatgagcgtagggctgatccacgggcgcgaactgcccgacccgaacccgagaaaccgccgaaaccgccgcatagacatctggtggcgcggcatgcgcaacggctcgctgatggttattctggcccacctgatgtccctgaactcggagtggaccggcgcgaagataagaatcctgcgcgtagcctacacgccggaggaacaggccaaagcgagggaagaactggaacgattgatcgaggccgcgagaatggacatagagatagagcccataatctccgacgacaccttcccgaacctgctgcggcgctactccggcctgtcaacggtagtattcctgggcttcagcgccgacgcggacacagacccgctgaagttccaagaggcgtattcggggctgctgcaaggaatgccgactacaataatgattcagtcaacgggggatgcggatttgttgtcgtga

SEQ ID NO: 24616 - protein, 224 aa, Unknown
  Obtained from environmental sample
  misc_feature (1)..(224): Xaa is any amino acid
MLTTFQDFLSLNRVKAFPEVLVTPDYNTGINHFLQANSIGPIKPNLAIFGWASDPTRAAPFMESIKIAAQLNMSVGLIHGRELPDPNPRNRRNRRIDIWWRGMRNGSLMVILAHLMSLNSEWTGAKIRILRVAYTPEEQAKAREELERLIEAARMDIEIEPIISDDTFPNLLRRYSGLSTVVFLGFSADADTDPLKFQEAYSGLLQGMPTTIMIQSTGDADLLS

SEQ ID NO: 24617 - DNA, 333 bp, Unknown
  Obtained from environmental sample
  misc_feature (1)..(333): n is a, c, g, or t
atggcgggttatcgtagctgccacatgccagattgcctggaaatgccctaccgcccaatggttttgaacagcgacatgatatggattaagccatacacttacaggctcgccggaaactcctgcctcgccggagatgttgccggagattactcttttgacaaaccgttgaaagtaggttccaaaattgttttcttagatatgattcattacacgatggtgaaaacaactttcttcaatggcgtgaagcacccatctataggaatttggaagaataataagtttaacttggtgagaaaattttcttacgaagcttttagggataagctgtcgtga

SEQ ID NO: 24618 - protein, 110 aa, Unknown
  Obtained from environmental sample
  DOMAIN (1)...(89): Pyridoxal-dependent decarboxylase, C-terminal sheet domain
  misc_feature (1)..(110): Xaa is any amino acid
MAGYRSCHMPDCLEMPYRPMVLNSDMIWIKPYTYRLAGNSCLAGDVAGDYSFDKPLKVGSKIVFLDMIHYTMVKTTFFNGVKHPSIGIWKNNKFNLVRKFSYEAFRDKLS

SEQ ID NO: 24619 - DNA, 828 bp, Unknown
  Obtained from environmental sample
  misc_feature (1)..(828): n is a, c, g, or t
gtgcatagaagaattgaccgcgctcggaaagtggattgcaaaatgcctgtaaaaatttcactgggcatttccccttgcccaaacgataccttcatttatcaaaacctcattgagggcaagcttgagaccccatgccccatttcagttgaatatgccgatgttcaaaccttgaatgaaaaagttttgaaaggcgaattggatatggcaaaagtgagttgtgccgtatatccattggttaaagacaattacagaattttagacagcggaggtgcaatgggctatggctgcggacctttattgctatcctctatcagcgaaaaatttgaccccgaattaccagtctatttacccggcaagcaaacaaccgcagcagccttattcaacttttggattcaaaaaaccaaaccccataccccataccccataccccatattctaaaattcgacgaactctaccgcaagctctgcgaaaaaaaaataaaacagggagtggttatacacgagcatcgctttacttggcagagagatggtttgcatttaatagcagacctcggcgcatactgggaacaggaaatgcaagctccaattccgctgggttgcacggttataaaaaaagatttgggcgaagaacttgccaaagagatggatttgtgcgttcaaaaaagtttaaaactcgcttgggaacgaaaagaacccattaccgatttcatacgaaaactagcccagattgatgatgatgcggttattttgcagcatataaagatgttcgttaatgagtattcgctgaatagggggcatctggattcagacaaaatcttcaacctctga

SEQ ID NO: 24620 - protein, 275 aa, Unknown
  Obtained from environmental sample
  DOMAIN (18)...(275): Uncharacterized ACR, COG2107
  misc_feature (1)..(275): Xaa is any amino acid
MHRRIDRARKVDCKMPVKISLGISPCPNDTFIYQNLIEGKLETPCPISVEYADVQTLNEKVLKGELDMAKVSCAVYPLVKDNYRILDSGGAMGYGCGPLLLSSISEKFDPELPVYLPGKQTTAAALFNFWIQKTKPHTPYPIPHILKFDELYRKLCEKKIKQGVVIHEHRFTWQRDGLHLIADLGAYWEQEMQAPIPLGCTVIKKDLGEELAKEMDLCVQKSLKLAWERKEPITDFIRKLAQIDDDAVILQHIKMFVNEYSLNRGHLDSDKIFNL

SEQ ID NO: 24621 - DNA, 594 bp, Unknown
  Obtained from environmental sample
  misc_feature (1)..(594): n is a, c, g, or t
atgcacgggcttggcgcagatggccacgactttgcagacattgccccagaacttggactacccgaaaacttagctataagatttatttttccacacgcacccataatgcctgtcactataaatggcggctataaaatgcgtgcttggtacgatatttcagatatggatttggggcaggatccagatattgagggtattgaaaaaaattccaaatttgttgcggaattcgtggatgcagaaattgaaaagggcataagttcggaaaaaattttgctcataggatttagccaaggcggagttatggctttgcacacggctactcgctacccaaaaaagctggcaggtgtcgcaagcctctcttcttactttcccacaacaagcacaatgccgagtgacggagtgaactcaaaaattcccgtattttttggctacggaaactacgacaatgttgtatcgccctctctcagccaaaaagcctatgatttcttgaaatcaaatgggaatcctatagagaagcattcttacgatatgcagcattcggtgtgcatagaagaattgaccgcgctcggaaagtggattgcaaaatgcctgtaa

SEQ ID NO: 24622 - protein, 197 aa, Unknown
  Obtained from environmental sample
  DOMAIN (1)...(197): Phospholipase/Carboxylesterase
  misc_feature (1)..(197): Xaa is any amino acid
MHGLGADGHDFADIAPELGLPENLAIRFIFPHAPIMPVTINGGYKMRAWYDISDMDLGQDPDIEGIEKNSKFVAEFVDAEIEKGISSEKILLIGFSQGGVMALHTATRYPKKLAGVASLSSYFPTTSTMPSDGVNSKIPVFFGYGNYDNVVSPSLSQKAYDFLKSNGNPIEKHSYDMQHSVCIEELTALGKWIAKCL

SEQ ID NO: 24623 - DNA, 471 bp, Unknown
  Obtained from environmental sample
  misc_feature (1)..(471): n is a, c, g, or t
gtgcgtaatggagtggctaatctctttatgatgttcgaacctcttgccggacagcgtgaagttatggtaactgaacggcgcactcaaaaagatttcgcccattgtctgcggtatttggctgaggagcggtatccggatgctgaaaaaatagttgtggtaatggacaatcttaacacccactcgctcgcttcattatacgccgcttttgaaccagggctggcgttgcgtcttgcacaacggttcgaaatccatcatacccccaaacacggctcatggctgaacatggctgagttagaaatagggataataagccgacagtgtcttggacggagaataccgagtattgaagagatggcaagcgaagtacaaacatgggtaaccgaacggaacaaccataaaaccaccgttcattggcagttcactgccgcagatgcccgcattaaactcaggcatctgtatccatgtttttag

SEQ ID NO: 24624 - protein, 156 aa, Unknown
  Obtained from environmental sample
  misc_feature (1)..(156): Xaa is any amino acid
MRNGVANLFMMFEPLAGQREVMVTERRTQKDFAHCLRYLAEERYPDAEKIVVVMDNLNTHSLASLYAAFEPGLALRLAQRFEIHHTPKHGSWLNMAELEIGIISRQCLGRRIPSIEEMASEVQTWVTERNNHKTTVHWQFTAADARIKLRHLYPCF

SEQ ID NO: 24625 - DNA, 546 bp, Unknown
  Obtained from environmental sample
  misc_feature (1)..(546): n is a, c, g, or t
atgctcaaaccaaatatcaagtatcgggtaatattggctgaggaagaacggaaagcattggagaatctggttcgcactggaaatacagcgggctaccggatacgccatgcgcagatattgcttgcactggatgaaataccagcgaatgaatcatggaccgacgaaaagataagcaaagcgtatgggtcacacatacgcacaataggaaacataaggaaacggtttgtggaggaaggcatgcaagccgcgctggaaagaaaagcaagcgagcacccgccgttctcaaaaatagacggggaagccgaagcgaaaataatcgcccttacttgcagctggccgcctgaaggatactgccgatggaccctgaaattaatagcaaacaaggtggtagaactgggaatactggagagcatctcagatcatgggataggagacctgttaaaaaaaacgacattaaaccatggctacagaaggaatgggtgtatagcgacccccatcccgccgaatatgtttcagcggatggaaagatgtattagaggtctataa

SEQ ID NO: 24626 - protein, 181 aa, Unknown
  Obtained from environmental sample
  misc_feature (1)..(181): Xaa is any amino acid
MLKPNIKYRVILAEEERKALENLVRTGNTAGYRIRHAQILLALDEIPANESWTDEKISKAYGSHIRTIGNIRKRFVEEGMQAALERKASEHPPFSKIDGEAEAKIIALTCSWPPEGYCRWTLKLIANKVVELGILESISDHGIGDLLKKTTLNHGYRRNGCIATPIPPNMFQRMERCIRGL

SEQ ID NO: 24627 - DNA, 336 bp, Unknown
  Obtained from environmental sample
  misc_feature (1)..(336): n is a, c, g, or t
atggaagaaactattaagaggaaattccatatattgagcagcacattaaatgaaaggcagcgccggctctgggctgcaacggaaacactcgacctgggatatggtgctgtttcaatagtttctcgggcaaccgggatttcccgtgtgacaatcatgcgtgggattagggaattggatgaaaaaccttgcctttcacctgagcggtccagacgttccggcggcgggcggaaaaaaggatgcgattggcagcctgatttgaaatcgtcccttgaggccatagtcgaaccgggcgccaaaggcgatccaaatgtcacccctacggtggacaacccatag

SEQ ID NO: 24628 - protein, 111 aa, Unknown
  Obtained from environmental sample
  misc_feature (1)..(111): Xaa is any amino acid
MEETIKRKFHILSSTLNERQRRLWAATETLDLGYGAVSIVSRATGISRVTIMRGIRELDEKPCLSPERSRRSGGGRKKGCDWQPDLKSSLEAIVEPGAKGDPNVTPTVDNP

SEQ ID NO: 24629 - DNA, 897 bp, Unknown
  Obtained from environmental sample
  misc_feature (1)..(897): n is a, c, g, or t
atgtcacccctacggtggacaacccatagtagtcggcgactaacagaattattgcggcagcaagggttcaacatttccaaatcacaggtttgtcggttattgcacgagatggaatatcagcttgcagcgaaccgaaagtcgatagaaggcggaaaaagtccggatcggaatgcccagtttgaattcataaataaacagtccgcgaagtttttgaaacgcggttgccctgttatttccgttgacaccaaaaagaaggaacttatcggtaatttcaaacaaaacggcagcgtttggcggcctaaaggcgaaccggaattagtgaacgtatatgattttatcgataaagaactcggtaaagcgacgccttacggcatctacgatttgaaacgaaatgtcggctgggtaaatgtcggcattgaccatgacacggcggagtttgccgtagaatcgatccgccgttggtggaaacatttagggcggaaactgtatgcgaaagcgaaacatctttttattaccgcggatgcaggggggagcaacgggagccgcaaccgtttgtggaggtattgcttacaggagttttcagatgagagcggcttacagatccatgtcagtcatttcccgcccggaacgagcaaatggaataagatagaacaccggctgtttaatcacatttcaatgaactggaaggggcagccgcttgtaagcatggaggcaattatcaatttgatagggcataccaccagccaaacgggtttaaaagtgtatgctatggaagaccggaacatatatcctacaaagcgtaaaatctccgatgaagaaatggaagccttgagtatttctcagtgtgagattcttggaaaatggaactatacaatattttcaaggaaattatcataa

SEQ ID NO: 24630 - protein, 298 aa, Unknown
  Obtained from environmental sample
  DOMAIN (1)...(295): Rhodopirellula transposase
  misc_feature (1)..(298): Xaa is any amino acid
MSPLRWTTHSSRRLTELLRQQGFNISKSQVCRLLHEMEYQLAANRKSIEGGKSPDRNAQFEFINKQSAKFLKRGCPVISVDTKKKELIGNFKQNGSVWRPKGEPELVNVYDFIDKELGKATPYGIYDLKRNVGWVNVGIDHDTAEFAVESIRRWWKHLGRKLYAKAKHLFITADAGGSNGSRNRLWRYCLQEFSDESGLQIHVSHFPPGTSKWNKIEHRLFNHISMNWKGQPLVSMEAIINLIGHTTSQTGLKVYAMEDRNIYPTKRKISDEEMEALSISQCEILGKWNYTIFSRKLS

SEQ ID NO: 24631 - DNA, 1326 bp, Unknown
  Obtained from environmental sample
  misc_feature (1)..(1326): n is a, c, g, or t
atggcattggacatggaccgaatcgaagcaggggagaaccttaccactgaattcaaacgggaatataccgaagaaattaaaaagacaatcgtggcttttgccaataccgcaggggggatactgtacatcggcatcaatgacgataaaacaataacaggcgtggctaatcctgacaataccctgcttcagataaccaatgcggtacgttccgctataaagcctgatattaccctgtttatggattataaaacggaaaaaattgggaaagctgctgttattgctgtaacggttcaaaagggaaccgcctgtccgtattatcttgagggtaagggcatccgtcctgaaggggtctatgtccgccagggagcgtcgtccgttccggcttccgaaacagctatccttaacatgctcaaagagaccgatggagaaaagtatgaggaaatgcggtcgcttaaccaggagctaacctttgctgctacagaacagttctttaaaacgagaaatatctcttttggcctgaaccagcaaaaaacactccgcttgcaaaccactgacggcgtatacaccaatttggggtttttgctatccgaccagtccgtacacacaattaaactggctgtatttgaaggaactgagaaagaagtgttcaaagatcggcgggaattctccggctccctgcttaagcaactggaagaggtctatacctttctggatatgtataaccacaaccatgggcaggttaaaggcctttacagggaggataaccgtgactacccggaagaagccctgcgggaggctttgctaaacgcgctggttcatcgggattatgccttttcaagcaatactttaatcagtatttttgaagaccgtattgagtttgtttctgtcggcggccttttaaaaggcatttctcttgacgacataatgctgggtctttcggcaccccgaaacataaatcttgccaacgtgttctaccggcttcacttaatagaagcctatggcacgggcatccaaagaatttttcggagctatgccaagtgcgcaaaaatgccggaattgcagaccagcggaaacgcgtttaagattaccctgccaaacagaaacaccagcaactattatgcacatatcaatagtccttccttaactgtgaacgaagaaaaagtaatttacctatttgataaacaggaagaaatagtcagaaaggatgttgagactgccctcgccgtctctcangctatggcggtaaggatcttgcgtagtttatctgacaaacagactatccgggccataggagggggaaagaaaaccagatatgtaaaattatga

SEQ ID NO: 24632 - protein, 441 aa, Unknown
  Obtained from environmental sample
  DOMAIN (33)...(131): Divergent AAA domain
  misc_feature (1)..(441): Xaa is any amino acid
MALDMDRIEAGENLTTEFKREYTEEIKKTIVAFANTAGGILYIGINDDKTITGVANPDNTLLQITNAVRSAIKPDITLFMDYKTEKIGKAAVIAVTVQKGTACPYYLEGKGIRPEGVYVRQGASSVPASETAILNMLKETDGEKYEEMRSLNQELTFAATEQFFKTRNISFGLNQQKTLRLQTTDGVYTNLGFLLSDQSVHTIKLAVFEGTEKEVFKDRREFSGSLLKQLEEVYTFLDMYNHNHGQVKGLYREDNRDYPEEALREALLNALVHRDYAFSSNTLISIFEDRIEFVSVGGLLKGISLDDIMLGLSAPRNINLANVFYRLHLIEAYGTGIQRIFRSYAKCAKMPELQTSGNAFKITLPNRNTSNYYAHINSPSLTVNEEKVIYLFDKQEEIVRKDVETALAVSXAMAVRILRSLSDKQTIRAIGGGKKTRYVKL

SEQ ID NO: 24633 - DNA, 819 bp, Unknown
  Obtained from environmental sample
  misc_feature (1)..(819): n is a, c, g, or t
atggcgcatgtattgattatgccacggcaggggaacacggtagaatcctgcatcattacggactggaaagtcaaagaaggcgatcttgtgactgcggaaacgatagtctgcgaagttgaaaccaacaaggcttcgtttgaaataccggcaggagctgcgggaacggttctgaaactcctgtttgctgcgggagatgatattccggtattaaaacctatcgcggtaatcggtgtagctggcgatgactggaaagcggtagttggttcgcaagaaagctcacacaaagaacacaaaggcacggagactcgaagggaagatgaaggtggttctatctgttcttctctttattcctccgtgtctttgtgttctctgtgtgaagaaaattccgaaatacatatttctccccgtgctcggaaccttgcggaaaaagaagccttgccacttgacgctgttcttggtaccgggcctggcgccaggatcatcgaaagggacgtggcggcggcgctgcaaaacaggccatccttgactgtcgcggcaaagtcggcattagcggttccgaaggtaggttccggcattggaggacgtgttaccactgcggacatagcctccccattccccaatgaagaaggcgcaatcaccgaaattcccatcaaaggtatacgcaaagttatttctgacaggatgcttaagtccctgtcggaaagcgcccagtttacaattagcgcttctgcgccggccgcgaagcttcaggaattccgtatgggggtaaaatcccagggcagctttgccgaagaacttggcgtttcgaaattacaataa

SEQ ID NO: 24634 - protein, 272 aa, Unknown
  Obtained from environmental sample
  DOMAIN (133)...(169): e3 binding domain
  misc_feature (1)..(272): Xaa is any amino acid
MAHVLIMPRQGNTVESCIITDWKVKEGDLVTAETIVCEVETNKASFEIPAGAAGTVLKLLFAAGDDIPVLKPIAVIGVAGDDWKAVVGSQESSHKEHKGTETRREDEGGSICSSLYSSVSLCSLCEENSEIHISPRARNLAEKEALPLDAVLGTGPGARIIERDVAAALQNRPSLTVAAKSALAVPKVGSGIGGRVTTADIASPFPNEEGAITEIPIKGIRKVISDRMLKSLSESAQFTISASAPAAKLQEFRMGVKSQGSFAEELGVSKLQ

SEQ ID NO: 24635 - DNA, 303 bp, Unknown
  Obtained from environmental sample
  misc_feature (1)..(303): n is a, c, g, or t
atgggcataatgcgtacggtggacaagattcagggcgggctctccatatccgaaccgcttgccgagaccggcgttttcccgccgatggttatccacatgatatccgtgggcgaaaagacgggcgacctctccggtatgctcaagaaggtctccgagttttaccaagaggaggttgacgcggcggtggaagcgctgacttcggtgatagagccgataatgatctgcgtactggcggtgatcataggcggtatgttgatagccatgtatctgccgatgttcgacatggtcggcatggtgggttaa

SEQ ID NO: 24636 - protein, 100 aa, Unknown
  Obtained from environmental sample
  misc_feature (1)..(100): Xaa is any amino acid
MGIMRTVDKIQGGLSISEPLAETGVFPPMVIHMISVGEKTGDLSGMLKKVSEFYQEEVDAAVEALTSVIEPIMICVLAVIIGGMLIAMYLPMFDMVGMVG

SEQ ID NO: 24637 - DNA, 897 bp, Unknown
  Obtained from environmental sample
  misc_feature (1)..(897): n is a, c, g, or t
atgaccgattccatcatcaacctgctgacgaccgccatagcggaggatttgggtgaggacggcgacatcaccacctccgccatattcgacgcggacgacgtcggagaggcgttgatccgttgcaagcagaagggcgtgctatcgggcgtcacgcttgcggcgccgctcttcgggcttgtagacaaataccttgcatcgcatatatcgtccgccgcggctaccgcgccggttactacggtcgagacatattgctgcgacggcgaccctatggatatcggcaaggcggtctgccgcataagaggctcggtaaggtcgatcctcgccggagagcgcaccatcctaaacctgatccagcggctgtcgggcatcgcgacgctcacatccgcgatggtgaaggaactttcggacagcggcgctaagacgcggttgctcgacacccgcaaaaccaccccgggaatgcgcgctcttgagaaagcggccgtgcggcacggcggcggggtcaaccaccgctccgggctttacgacatgatgctgatcaaggacacccacgtaagacgcgccggcggcgtgacggcggcgctcgcaaaggcgctcgcgtggcgcggcggcaacgccgtcccgcacatcgaggttgaggtgcagtcgatagaagagttcgtccaagccctgcggctgaaacccgataggataatgctagacaacatgagccctaaggagatagaaatttgcgtggacgaacgcgacgtctccggcctcaaaatcgagcttgaagccagcggaaacataacgctcggcatcctctccgccatcgccgcgacaaacgtggactacatatcctgcggggcgataacccacagtgcgccggcgctggactttcacttggcgatgctgtcatga

SEQ ID NO: 24638 - protein, 298 aa, Unknown
  Obtained from environmental sample
  DOMAIN (18)...(121): Quinolinate phosphoribosyl transferase, N-terminal domain
  misc_feature (1)..(298): Xaa is any amino acid
MTDSIINLLTTAIAEDLGEDGDITTSAIFDADDVGEALIRCKQKGVLSGVTLAAPLFGLVDKYLASHISSAAATAPVTTVETYCCDGDPMDIGKAVCRIRGSVRSILAGERTILNLIQRLSGIATLTSAMVKELSDSGAKTRLLDTRKTTPGMRALEKAAVRHGGGVNHRSGLYDMMLIKDTHVRRAGGVTAALAKALAWRGGNAVPHIEVEVQSIEEFVQALRLKPDRIMLDNMSPKEIEICVDERDVSGLKIELEASGNITLGILSAIAATNVDYISCGAITHSAPALDFHLAMLS

SEQ ID NO: 24639 - DNA, 603 bp, Unknown
  Obtained from environmental sample
  misc_feature (1)..(603): n is a, c, g, or t
ttggacgccggggtttcgtttgccaccatagcgccccggttctgcggcgaattccagaagggcatagactacaagggagatattgcccattttgacagggaaataaaagcccacgcagtaattgcccggcatttgggatacaaactgagcatccattccggctccgacaaattcagcgtgtttccgagcattggccgggaaaccagggggattttccacgtcaagaccgcggggaccaactggctggaagccatgcgggtagtcgcaatggcggacccttccctgtaccgggaggttcacgcctgcgcgcttacggcgtttgccgaagcacaaaaatactatcacgtaacaacagacctttcaaaaataccagccgtttcaactgttaaagacaccgaactgcccaaactttttgaaaacaatgacagccggcagcttattcacataacttacgggcttatactgagccggaagaaaagcgatggttcttttgcttatagggatcgcctctataaaatttggcgaaatcatggggatgaataccggaacgctctggcgaagcacattggtaaacacctggaacttttgggtgttacctgttag

SEQ ID NO: 24640 - protein, 200 aa, Unknown
  Obtained from environmental sample
  misc_feature (1)..(200): Xaa is any amino acid
MDAGVSFATIAPRFCGEFQKGIDYKGDIAHFDREIKAHAVIARHLGYKLSIHSGSDKFSVFPSIGRETRGIFHVKTAGTNWLEAMRVVAMADPSLYREVHACALTAFAEAQKYYHVTTDLSKIPAVSTVKDTELPKLFENNDSRQLIHITYGLILSRKKSDGSFAYRDRLYKIWRNHGDEYRNALAKHIGKHLELLGVTC

SEQ ID NO: 24641 - DNA, 672 bp, Unknown
  Obtained from environmental sample
  misc_feature (1)..(672): n is a, c, g, or t
atggcgagatggttcgcggcgttgaccgctctggctctgattgtggcttaccttgatgaaatcgaaatttatatccccacgatcaaaccggattttaaattggatctcacactgaccaatcctccggtattgataggattgtttgtcggcgtcatgctccccttcctgttctcatccatgaccatgagcgcggtaggccgggcggcgcagaatattgtcaaagaagttcgccgccagtttaaggaaatcaaagggttgatggaaggaacggcggacgcggactattctacctgtgtggatatttgtacccgcggcgcgcaaaaagaaatggtactccccgccctgaccggcattatttcaccgatcatcgtgggcatggccctgggagtgaacggcgtggcgggtatgcttgccggcgcgacagcttccggttttgtcctggcggttatgatggccaattccggcggagcatgggataacgccaagaaacatattgaaggcggaaagtacggcggcaagggatcagatcctcacaaggcggccgttgtcggagacacggtaggcgatccctttaaggatacttccggcccctccatcaatattttgataaaattgctttctatggtctcaattgtttttggggcatttattcttaaattttctttgttttaa

SEQ ID NO: 24642 - protein, 223 aa, Unknown
  Obtained from environmental sample
  SIGNAL (1)...(18)
  DOMAIN (2)...(214): Inorganic H+ pyrophosphatase
  misc_feature (1)..(223): Xaa is any amino acid
MARWFAALTALALIVAYLDEIEIYIPTIKPDFKLDLTLTNPPVLIGLFVGVMLPFLFSSMTMSAVGRAAQNIVKEVRRQFKEIKGLMEGTADADYSTCVDICTRGAQKEMVLPALTGIISPIIVGMALGVNGVAGMLAGATASGFVLAVMMANSGGAWDNAKKHIEGGKYGGKGSDPHKAAVVGDTVGDPFKDTSGPSINILIKLLSMVSIVFGAFILKFSLF

SEQ ID NO: 24643 - DNA, 828 bp, Unknown
  Obtained from environmental sample
  misc_feature (1)..(828): n is a, c, g, or t
ttgtcgtactcccgcctgatagacagcgttgaatgggggtacaaccgggacggagaaaaactgccccagatcaacatatgcctgcttatgggacatgcgtcccggtaccccatttaccagtgtgcgtacgggggaagcctaaaggatgtgacgacactgcggactactatacgcacgttacggacattggccggcgaaaagcccataatcgcagttatggacaaggggtttttcagcagaaagaacatagacacgatgcttggtgaaaagaagcatatcggctttgtcatagcccttcctttcaccagcaagtttgccaaaggcttggtaaaaagcgaaaagaaagacattgatacattgagtaacacaatcgtaaacggcaaagagtcgctgcgtgcggttacgaaaacatgtggttggaacgacgaacacaatgtctatgcccacgtttattacaacgcgcgcaaagcgatggggatacgggaggatttatacgcccatgtggccacgttgagggaacaggcggtgaatcagccggaaaagtgtgtgggcaacagggattaccagaaataccttgacatcaggcagtctgaagaagcggacggaggatacacggtaaagctgcgggaagaggtcgtggaggcggaattagagaccgccggatggatggtggctgtaagcaattgtgtcaaggatgcgaaagaagctataaaggcgtaccgtgaaaaggacgttgtagagaaaggatttctgcggttgaagaacagccttgacttagggaggctgcgggtgcatagcgaaaccgggatgcaaaacaagtgtttgtag

SEQ ID NO: 24644 - protein, 275 aa, Unknown
  Obtained from environmental sample
  misc_feature (1)..(275): Xaa is any amino acid
MSYSRLIDSVEWGYNRDGEKLPQINICLLMGHASRYPIYQCAYGGSLKDVTTLRTTIRTLRTLAGEKPIIAVMDKGFFSRKNIDTMLGEKKHIGFVIALPFTSKFAKGLVKSEKKDIDTLSNTIVNGKESLRAVTKTCGWNDEHNVYAHVYYNARKAMGIREDLYAHVATLREQAVNQPEKCVGNRDYQKYLDIRQSEEADGGYTVKLREEVVEAELETAGWMVAVSNCVKDAKEAIKAYREKDVVEKGFLRLKNSLDLGRLRVHSETGMQNKCL

SEQ ID NO: 24645 - DNA, 501 bp, Unknown
  Obtained from environmental sample
  misc_feature (1)..(501): n is a, c, g, or t
gtgggcgggcacccaatggcaggcacagagcagtccggttttaagcacagcaaggcaaatatgttcaagggtgcgcccatgatcattgtgccgcccgtgtatgacgacatcctgtttctggagaagattaagcgtttgcttgcgcccgcggaattcggcaggctgaccgttaccacggcggaaaagcacgacgcaatgattgcgtttacctcgcaaatggcgcatctggtttccaacgcgtttattaaaagcccgaccgtatttgaacacaagggattttccgccggaagctacaaagacttgacgcgcgtagcgtggctgaacgagcgcttgtgggccgagttattcatagaaaaccaggatcatctgctgtatgagcttgatttattcattgcttctcttacgcagtacagggacgcgctcaagaatgaagactttgattatctaaagacccttctctacgatggcaggtgtttgaaagaaaaggttgaccgccaatga

SEQ ID NO: 24646 - protein, 166 aa, Unknown
  Obtained from environmental sample
  DOMAIN (1)...(160): Prephenate dehydrogenase
  misc_feature (1)..(166): Xaa is any amino acid
MGGHPMAGTEQSGFKHSKANMFKGAPMIIVPPVYDDILFLEKIKRLLAPAEFGRLTVTTAEKHDAMIAFTSQMAHLVSNAFIKSPTVFEHKGFSAGSYKDLTRVAWLNERLWAELFIENQDHLLYELDLFIASLTQYRDALKNEDFDYLKTLLYDGRCLKEKVDRQ

SEQ ID NO: 24647 - DNA, 516 bp, Unknown
  Obtained from environmental sample
  misc_feature (1)..(516): n is a, c, g, or t
atggcaaaaaaaggaacggtaacacagcatatagtttcggctcttgttgaaaacagagccggaactttaagcagagtgtcggggcttttcagccgccgaggttttaacattgacagccttaccgtaggcgagaccgataattcttcaatttccagaatgacaatcgcggtaaccggcgaagagcgggtgcttgaacaaatcgttaaacaactggaaaaactggttgatgtaatcgccgtgcgggaactggaaagctcttcctgtctgcgccgtgaaatcatgcttgtaaaagtcggagttgatgaaaaaaaccgccccgccatacttgaaatagccggtatcttccgagcccgtattgtcgatgtttcccagacgagtatcacagttgaggcgacaggcaatatggaaaaactaaacggcttgcttcttctcctgcgcccctacggcattcttgaacttgcccgcacaggtcttgtagctctcgaacgcggagcaaatgtgctttccgtaaaataa

SEQ ID NO: 24648 - protein, 171 aa, Unknown
  Obtained from environmental sample
  DOMAIN (10)...(83): ACT domain
  misc_feature (1)..(171): Xaa is any amino acid
MAKKGTVTQHIVSALVENRAGTLSRVSGLFSRRGFNIDSLTVGETDNSSISRMTIAVTGEERVLEQIVKQLEKLVDVIAVRELESSSCLRREIMLVKVGVDEKNRPAILEIAGIFRARIVDVSQTSITVEATGNMEKLNGLLLLLRPYGILELARTGLVALERGANVLSVK

SEQ ID NO: 24649 - DNA, 360 bp, Unknown
  Obtained from environmental sample
  misc_feature (1)..(360): n is a, c, g, or t
atgttagattataaatttatcgcggaaaatttgcatgcggttacggcaaacatttccgaccgttttatgaaagccgacgcagaggcggtagcgcgcctgtataacaaaagaactgaacttgctaccaaattgcaatcgtttcagcagaagcgtaacgcaaacgccgatgccatgaagggcaagatcgctcaggaagaacgcaatgttcttattgaagaagggaaaaaattaaaagaacaaataacggcggcggaaaacgaattagccgctgcggaaaaggactttttacggagcgagaaaattccccatatggcgcaccctgacgctcctgtcggcaaagaagataaagacnacccttga

SEQ ID NO: 24650 - protein, 119 aa, Unknown
  Obtained from environmental sample
  DOMAIN (1)...(105): Seryl-tRNA synthetase N-terminal domain
  misc_feature (1)..(119): Xaa is any amino acid
MLDYKFIAENLHAVTANISDRFMKADAEAVARLYNKRTELATKLQSFQQKRNANADAMKGKIAQEERNVLIEEGKKLKEQITAAENELAAAEKDFLRSEKIPHMAHPDAPVGKEDKDXP

SEQ ID NO: 24651 - DNA, 897 bp, Unknown
  Obtained from environmental sample
  misc_feature (1)..(897): n is a, c, g, or t
ttgaagattcaggacggttgcgataactgttgtacgtatgccgggacgcgctttgcccgcggcctcagcgtcagcctgcccgcgaaaaccgcgcttgcccaactgcgttcactggaatccaaaggctgtgccgaactgatgatcaccggcgtgaacatcacccagtaccggcatcccggttttgaccttgcggggcttttgcggtttctgctggagggcagttcaaccattgccctgcggctttcgtctctggagcctgaatgtattaacgaaaaacttgcctccgtgctggcccaccctcgaatacgcccccactttcatcttgccgtacagtcaggcagtgacgcgatactgcgtacaatgggcaggggctataattcgcaaacggtagaacgaagcgcggcgctgctgcggtcggtaaaagacaacccctttctggcctgtgacatcatcaccggcttccccggtgaaggcgacggcgaatttgcccaaacccttgacctctgcgaaaaaatcggctttgcgtggatacatacgtttccctattcaaaaaggccgggaacggccgcttttttctttgacaaccccgtctgcgagcgggatgccgccgggcgggtaaaagttttgacagaactgtccctgcggggcaggcggaattacgcgcaaacatggctcggccgggaattgaccgccattacggaaaaaggtaaacccaaccatgccggacagtgcagagccgtttctgaaaattaccttaaacttattattgatgttcagggaaaattggtatccgatgagcttgtgccgccgggaacttcactgcgctgtactcccgtatcgttgtgcgacggggcggacggcgaaacccccgatgccgttgcggttctgtctacgtaa

SEQ ID NO: 24652 - protein, 298 aa, Unknown
  Obtained from environmental sample
  DOMAIN (1)...(169): Radical SAM superfamily
  misc_feature (1)..(298): Xaa is any amino acid
MKIQDGCDNCCTYAGTRFARGLSVSLPAKTALAQLRSLESKGCAELMITGVNITQYRHPGFDLAGLLRFLLEGSSTIALRLSSLEPECINEKLASVLAHPRIRPHFHLAVQSGSDAILRTMGRGYNSQTVERSAALLRSVKDNPFLACDIITGFPGEGDGEFAQTLDLCEKIGFAWIHTFPYSKRPGTAAFFFDNPVCERDAAGRVKVLTELSLRGRRNYAQTWLGRELTAITEKGKPNHAGQCRAVSENYLKLIIDVQGKLVSDELVPPGTSLRCTPVSLCDGADGETPDAVAVLST

SEQ ID NO: 24653 - DNA, 663 bp, Unknown
  Obtained from environmental sample
  misc_feature (1)..(663): n is a, c, g, or t
ttgcaccatggccgggaaaagcgccgctttatgaagtatcctcgcctcgccgcttttgccctgtttgcgctggcggcagtgtctcttgctttttcgcagacaaaaccggatgcccttgccgaataccggaagggaaattatgatcgggcaattcaaatttgccaggaggaaattgccgacgacgccgacagtctggagtcttatgtggttgcctgctggacttttttgcgcctgcgccgctatgaagacgccatgcgttatgcccgtaccgcgcggagaatcagccgctatgacgcgagggtagccgagatattgggtgagatttattactaccagggtaataacaacgaagccctgcaatattttcaggagtatatcaacctcgcgccgggagggcagcggatagaatccgtgtattattatatcggggagatttatatacggatggggaagtaccgccatgcggatattgccctttctacggcagtccactggatgccgggaaatgccgcgtggtggacgcggcttgcctttgcccgtgaaagcgccggagaacttaccgaggctatcgccgcctacgagaaagccctctcgctcgattcccagtttcccgacgcgcggcgtggtttggaacgcgcccggcaggcccttggcagtagataa

SEQ ID NO: 24654 - protein, 220 aa, Unknown
  Obtained from environmental sample
  SIGNAL (1)...(30)
  DOMAIN (170)...(203): Tetratricopeptide repeat
  misc_feature (1)..(220): Xaa is any amino acid
MHHGREKRRFMKYPRLAAFALFALAAVSLAFSQTKPDALAEYRKGNYDRAIQICQEEIADDADSLESYVVACWTFLRLRRYEDAMRYARTARRISRYDARVAEILGEIYYYQGNNNEALQYFQEYINLAPGGQRIESVYYYIGEIYIRMGKYRHADIALSTAVHWMPGNAAWWTRLAFARESAGELTEAIAAYEKALSLDSQFPDARRGLERARQALGSR

SEQ ID NO: 24655 - DNA, 759 bp, Unknown
  Obtained from environmental sample
  misc_feature (1)..(759): n is a, c, g, or t
atgcacttcaacgtccccgaaggatcctattcaagcgatccgaaaaatccatacgcgaggattattgagttcaaggcgatggtacaggccctgcatgacgccggaatcagggtgataatggacgtggtcttcaaccatacctaccggacagggggttggccctttgacgcccttgtgccgggttattattaccgccttaccgataccggttcatacgccaacggctccggctgcgggaatgagatcgcgtccgagcggcccatggtgcggaaattcattattgattcctgccgctattgggcgggtgaatacaatatagacggcttccgcttcgaccttatgggccttatcgacaccccgacgatgaaactgttaactgaagaactgcgccgcgacattgaccctgcgctgatcatatacggcgagccctggcaggccggcggttccgttttgcccccgaaatcgcaaacaatcacaggcgtgcagaaggggctggggtttgccgttttcaacgaccgtatcagaaccgcgataaaaggcggcagcgacgatgactcgcggggcttcgctacgggcgggccgtcaagggaagaggctatcgtacggggcgttatgggttcaattcacgattttacgtcagaggcaaacgagagcgttaattatgtaacagcccatgataacctgaacctctgggacaaaatctgcttctcgttaggcgaaaaaaatctcgccgtatcccctatcaatgctcggcgataa

SEQ ID NO: 24656 - protein, 252 aa, Unknown
  Obtained from environmental sample
  DOMAIN (3)...(252): Alpha amylase, catalytic domain
  misc_feature (1)..(252): Xaa is any amino acid
MHFNVPEGSYSSDPKNPYARIIEFKAMVQALHDAGIRVIMDVVFNHTYRTGGWPFDALVPGYYYRLTDTGSYANGSGCGNEIASERPMVRKFIIDSCRYWAGEYNIDGFRFDLMGLIDTPTMKLLTEELRRDIDPALIIYGEPWQAGGSVLPPKSQTITGVQKGLGFAVFNDRIRTAIKGGSDDDSRGFATGGPSREEAIVRGVMGSIHDFTSEANESVNYVTAHDNLNLWDKICFSLGEKNLAVSPINARR

SEQ ID NO: 24657 - DNA, 573 bp, Unknown
  Obtained from environmental sample
  misc_feature (1)..(573): n is a, c, g, or t
atgcacttcctgcccgacgtttacgtcaaatgcgaaacgtgcggcgggaaacgctacaacagagaaaccctcgaagtcctctacaagggaaaatccatcgcggacgtattggagatgactgtggacgaggcgctggtctttttcgacaacctgtcggcgatacgtcaaaaactgcaagtactgtcgcaagtaggcctgggctacatcaaactcggccaatccgccacaacgctctccggcggcgaggcgcaacggatgaaattagcctccgaactgtcaaagagagccacgggaaaaactctgtacattctagacgaaccgaccacgggattgcactttgaggatatcaggatgctgatgtccgtcatacaagagctggttgacaaagacaactcggttatcgtcatagaacacaatctggacgtgataaaatgcgccgaccacatagtggacttaggccccgacggcggagacaaaggcggcacgatagtggctacgggaacgccggaagaggtggcgaagaatccggcgtcggttacgggaaaatttcttaaggggtatctcagacggtaa

SEQ ID NO: 24658 - protein, 190 aa, Unknown
  Obtained from environmental sample
  DOMAIN (16)...(156): ABC transporter
  misc_feature (1)..(190): Xaa is any amino acid
MHFLPDVYVKCETCGGKRYNRETLEVLYKGKSIADVLEMTVDEALVFFDNLSAIRQKLQVLSQVGLGYIKLGQSATTLSGGEAQRMKLASELSKRATGKTLYILDEPTTGLHFEDIRMLMSVIQELVDKDNSVIVIEHNLDVIKCADHIVDLGPDGGDKGGTIVATGTPEEVAKNPASVTGKFLKGYLRR

SEQ ID NO: 24659 - DNA, 312 bp, Unknown
  Obtained from environmental sample
  misc_feature (1)..(312): n is a, c, g, or t
atgcgaaacgtgcggcgggaaacgctacaacagagaaaccctcgaagtcctctacaagggaaaatccatcgcggacgtattggagatgactgtggacgaggcgctggtctttttcgacaacctgtcggcgatacgtcaaaaactgcaagtactgtcgcaagtaggcctgggctacatcaaactcggccaatccgccacaacgctctccggcggcgaggcgcaacggatgaaattagcctccgaactgtcaaagagagccacgggaaaaactctgtacattctagacgaaccgaccacgggattgcactttga

SEQ ID NO: 24660 - protein, 103 aa, Unknown
  Obtained from environmental sample
  misc_feature (1)..(103): Xaa is any amino acid
MRNVRRETLQQRNPRSPLQGKIHRGRIGDDCGRGAGLFRQPVGDTSKTASTVASRPGLHQTRPIRHNALRRRGATDEISLRTVKESHGKNSVHSRRTDHGIAL

SEQ ID NO: 24661 - DNA, 846 bp, Unknown
  Obtained from environmental sample
  misc_feature (1)..(846): n is a, c, g, or t
atgggacttggagtccaaaaaggttatgctaaacaagtcaatacaactggaaaaactccttggggaacaatagcagctatactatatgttgacataaaagataatccagaaacgatattcataaaattaaaactaaaaccaactaagttttatctaaaaacactttctcaaaattatgacttatctaagttagaaaaagaacaagaaaataacactattaataagacctcaacatatagtgaacgggatttacataaatttatctcttattatgtttataattaccatcaaatatatacaaaaacaattttccatgagtcatcatcaaagaaacaatactctcaatggactcaccctgacattgtaggagtatattttcctttagaacaatgggagccagaaatacttgatatttctaaggacgttggtaatctagcaataaaacttttttcctatgaattaaagaagtatttaaatttttctaatttaagagaatcattctttcaggcagtttcaaattcatcttgggcaaatgaaggctatttagttacagcagaaatctgccgtgatgaagaattcatggacgaaattaaaagactatcaaattcttttggaatcgggttacttaaaatagacattaattcaccagtggattctgaaataatatatcctgctagacccaaagaaataattgacatagaaacaatgaataaaatatcacagataaatcctgactttaaagaatttttgaaaagaattaaaatagatttaaattcaaaagaaattagaaaagaaaaatatgacaaaatatttaaagtagaagagttaattaaaagtatgaaataa

SEQ ID NO: 24662 - protein, 281 aa, Unknown
  Obtained from environmental sample
  DOMAIN (1)...(275): Protein of unknown function (DUF511)
  misc_feature (1)..(281): Xaa is any amino acid
MGLGVQKGYAKQVNTTGKTPWGTIAAILYVDIKDNPETIFIKLKLKPTKFYLKTLSQNYDLSKLEKEQENNTINKTSTYSERDLHKFISYYVYNYHQIYTKTIFHESSSKKQYSQWTHPDIVGVYFPLEQWEPEILDISKDVGNLAIKLFSYELKKYLNFSNLRESFFQAVSNSSWANEGYLVTAEICRDEEFMDEIKRLSNSFGIGLLKIDINSPVDSEIIYPARPKEIIDIETMNKISQINPDFKEFLKRIKIDLNSKEIRKEKYDKIFKVEELIKSMK

SEQ ID NO: 24663 - DNA, 714 bp, Unknown
  Obtained from environmental sample
  misc_feature (1)..(714): n is a, c, g, or t
ttgggcggtttcggcaagacgctctgcgagatgcacagcaaggcggaggggatactcgaatactcgtcgctcctcttcatcccggcgcaaccggctttcgaccttttctcatccattgaacgcaaacacggcgtgaagctctacgtgaggcgcgtcttcatcatggacaactgcaaggagctgctgccggagtacctgcgtttcgtccgaggcgtggtggattccgaagacctgccgctgaacgtctcccgcgagatgctgcagaaaaacgcggtgatcgagcggatgtcgaaggcgctcgtatctaagattttagggaaattgacggagatggcggagagcgatcctgctgtgtataaagatttctggaagagtttcggagtagtattgaaagagggtctgtacaacgattacgagaaccgcgagaaacttttggagctggcgcgttttcaatcgtctatgggcgagagcgacgatttcgtatcgctgaaacaatatgtcggcagaatgcgggaggatcagaaggacatctactacatcacggcggagaaccgcgccgtggcggagaaaagtccgcacttggagatattcagggctaagagcatagaggtgctctaccttgtagatcccgttgacgagtggatagtcggcatgggcggcataagcgaatacgacggaaagcagctaaaatccataacanagggcgacctttga

SEQ ID NO: 24664 - protein, 237 aa, Unknown
  Obtained from environmental sample
  DOMAIN (2)...(236): Hsp90 protein
  misc_feature (1)..(237): Xaa is any amino acid
MGGFGKTLCEMHSKAEGILEYSSLLFIPAQPAFDLFSSIERKHGVKLYVRRVFIMDNCKELLPEYLRFVRGVVDSEDLPLNVSREMLQKNAVIERMSKALVSKILGKLTEMAESDPAVYKDFWKSFGVVLKEGLYNDYENREKLLELARFQSSMGESDDFVSLKQYVGRMREDQKDIYYITAENRAVAEKSPHLEIFRAKSIEVLYLVDPVDEWIVGMGGISEYDGKQLKSITXGDL

SEQ ID NO: 24665 - DNA, 483 bp, Unknown
  Obtained from environmental sample
  misc_feature (1)..(483): n is a, c, g, or t
ttggcgtggcttgacgtatcaaagaatatcgcgcttaagaagttgaaatgccataaaaaccacctgaaagcgcttgacttgtcgagaaataccgcgcttacgtcgctggagtgcaaagtcaacaaattgacggtgcttgacgtgtccaagaataccgcgctgaccgggttatcctgcgaagtcaaccaattgaccgctcttgacgtctccaaaaataccgcgctgacggggctgtattgttcaagtaacaatttgaccgcgctcgatgtgtctaagaataccgcgcttacgcggctgtcttgttccggcaaccaattgaccgcgctcaacgtgtctaagaataccgcgcttaaagagctgtatgtatatgataattatttcacaggcgagaacgaaatcatcggcgcgaacaagttgaagctcgctgtttttaaatttatcccgcaaagagagaaacctgtagtctcgtcagcggagaaataa

SEQ ID NO: 24666 - protein, 160 aa, Unknown
  Obtained from environmental sample
  misc_feature (1)..(160): Xaa is any amino acid
MAWLDVSKNIALKKLKCHKNHLKALDLSRNTALTSLECKVNKLTVLDVSKNTALTGLSCEVNQLTALDVSKNTALTGLYCSSNNLTALDVSKNTALTRLSCSGNQLTALNVSKNTALKELYVYDNYFTGENEIIGANKLKLAVFKFIPQREKPVVSSAEK

SEQ ID NO: 24667 - DNA, 357 bp, Unknown
  Obtained from environmental sample
  misc_feature (1)..(357): n is a, c, g, or t
atggagttcgagagctgcggcgaggagacaaaggagtatgtaacgctccactggccggaaccgaacctaggcaaaggcaccgccgaagccgccgtgatatacatagaccgcttcggcaacgcaataacgtctataagcccaagagaggtggtcttcgcatgcggagattcgccggagtgcatattggagaacgaccgccgcgtaccgctgggcaaccactacagcgacgtccccttgtggagcgccgtagcctatcccggatcggcgggtttgatggagataggcgtcaacggcggcaacgccgccgaaatactggagttggacgtagggagcaacgtctgtttcacggcgcattaa

SEQ ID NO: 24668 - protein, 118 aa, Unknown
  Obtained from environmental sample
  misc_feature (1)..(118): Xaa is any amino acid
MEFESCGEETKEYVTLHWPEPNLGKGTAEAAVIYIDRFGNAITSISPREVVFACGDSPECILENDRRVPLGNHYSDVPLWSAVAYPGSAGLMEIGVNGGNAAEILELDVGSNVCFTAH

SEQ ID NO: 24669 - DNA, 1419 bp, Unknown
  Obtained from environmental sample
  misc_feature (1)..(1419): n is a, c, g, or t
ttgccttcaagcatgggcatagacgcagtatggcgcatccccattgaagacgagccttacggattgtctgccaaggctattgaagactttgcttcaaagaacggaaaacttatcgttacggttgactgcggaataacaagccatgccgaaatagagtatgccatgacgctcggccttgacgtggttgttaccgaccaccacacgcccaaagaagttttgccaaatgctttggctatagttaaccctaaactttccaattcgccttatccgtttcccgatatttctggatgtacggttgcgtataagctggtctgcgccttgcaaacgttatcgggcattcccgattttgagaggaagcatcaaggctatatccagttggcttgtttgggcgctgtaggcgatattgtgcctctcaggaacgagaaccggcttattgtacagagggggttaaaggcaatcatggaaaatcccaggtacggcctttccgagcttttgataggtttgggcttggcagggaagcgtattgcggcaaaggaactgtcatggattgtctgccctactatcaacgccgcagggcgcatgggaagccccgataaagttgtcagcctgcttctggaaaaagaccccttgaggcgcatccgccttgcaggagaaatcaaaagcctgaatgggaaacggcaaaggctggggttaaaaacatggcctgtaatagaaaggcttgcgtctgacagcgtcggtcaatttgaaggaaaactggtagtggccgcagatgaaaatataagcaggggcataacgggcgttatggctaaccgccttgtcgattgctaccgcattcccgcaatggtggcgcaccttgggaaagaaatcgctataggctctatcaggtctccaggcaattacgacatccggcttttgttggagccgatgggcgatatactactgaactacggcggccatgcaaacgccctggggttcagcatgctaaggcaattgtgggatcagtttgttgacaggcttgaaattgaagtagggtttatccgttccgatgatatgcctgatgaagttattgcaatagacgcagagcttccccatgagtacattgccccggacatcctcgctatcgttgacctatttgagccttacggcacgggcaatgagccgcttgtctttttgtcgcatggtctaaaggttattgatacttcgtttgtgggtaagaaagagccgaaacacctgaaagcaatgctaggcgcagggaaatataaatggccggctatcttatggaatacgggggaaagccctatggaagaaatcaaagcgggggatacggttggcttggtctatagcgttagccgcaacctttaccggggcattgaaacgccccagttggtaattaaggaaaataataagatggcatcgtag

SEQ ID NO: 24670 - protein, 472 aa, Unknown
  Obtained from environmental sample
  DOMAIN (277)...(341): DHHA1 domain
  misc_feature (1)..(472): Xaa is any amino acid
MPSSMGIDAVWRIPIEDEPYGLSAKAIEDFASKNGKLIVTVDCGITSHAEIEYAMTLGLDVVVTDHHTPKEVLPNALAIVNPKLSNSPYPFPDISGCTVAYKLVCALQTLSGIPDFERKHQGYIQLACLGAVGDIVPLRNENRLIVQRGLKAIMENPRYGLSELLIGLGLAGKRIAAKELSWIVCPTINAAGRMGSPDKVVSLLLEKDPLRRIRLAGEIKSLNGKRQRLGLKTWPVIERLASDSVGQFEGKLVVAADENISRGITGVMANRLVDCYRIPAMVAHLGKEIAIGSIRSPGNYDIRLLLEPMGDILLNYGGHANALGFSMLRQLWDQFVDRLEIEVGFIRSDDMPDEVIAIDAELPHEYIAPDILAIVDLFEPYGTGNEPLVFLSHGLKVIDTSFVGKKEPKHLKAMLGAGKYKWPAILWNTGESPMEEIKAGDTVGLVYSVSRNLYRGIETPQLVIKENNKMAS

SEQ ID NO: 24671 - DNA, 390 bp, Unknown
  Obtained from environmental sample
  misc_feature (1)..(390): n is a, c, g, or t
atggcaaagttgacattggcggatcttaagaagctccgcgatgacaagaagagagaggtggagaagcgcgatgttgagggtaagaccacgcggatcattatcggcatgggcacctgcggtatcgcggccggcgccaaggaggcgttcgacgcctttttggatgagattgacgcgttgaagctgtccgacgtcgcggtcacgcagacgggctgtatgggcctgtgccacgtggagccgacggcggaggtgatcgtgccgggtatgccggagatcatctacgggcatgtcaaggcggatatcgccaagcgtatcgtgaacgagcatatcgtagggcacaagctcgtggacgggtacgtattcgacaaacctgcggcagacatccttaagtga

SEQ ID NO: 24672 - protein, 129 aa, Unknown
  Obtained from environmental sample
  misc_feature (1)..(129): Xaa is any amino acid
MAKLTLADLKKLRDDKKREVEKRDVEGKTTRIIIGMGTCGIAAGAKEAFDAFLDEIDALKLSDVAVTQTGCMGLCHVEPTAEVIVPGMPEIIYGHVKADIAKRIVNEHIVGHKLVDGYVFDKPAADILK

SEQ ID NO: 24673 - DNA, 1278 bp, Unknown
  Obtained from environmental sample
  misc_feature (1)..(1278): n is a, c, g, or t
atgcccgccgccgatctcgtagataatctcgcgcaacgttatgcccataggcacttctatcaggccggagttctttattttacccgtgagggcgaacacctttgtgcccttggatttctccgtcccgatcttggcgaaccacgcgccgcccttcattatgataacgaggatattcgcccacgtctccacgttgttgatgacggtgggcttgccccacagccccttgaccgccggaaagggcgggcgtggaacgggcataccgcgcttgccctctatggaggccaagagcgccgtctcctcgccgcagacaaaagcgcccgcgccgagccttatctctatgtcgaaattgaaaccgcttccgaggatgtcgtcgcccaaaagaccgttctccttggcctgcttgatggcgatctcaaggcggtggatggccagcgggtactcggcgcgtatgtagatgaacccctgattcgcgcccaccgtatgaccggctatggtcatagcctcaagcaccgagtgcgggtcgccctccagcgtgctgcggtccatgtaggcaccggggtcgccctcgtcggcgttgcagacgatgaacttctggtcgctcggaacgcccttggagaacaaccacttgcggaacgtcgggaagcccgccccgccgcgtccgcgcaatccggagatttcaagctccttgattacatcgtcgggcttcatctcgaagagcgccttctccagagccacgtacccgtcgcgggcgatgtactcgtttatgttctcagggtctatgaaaccgcagttgcgcagcaccacgcgcacctgcttctggtagaagtcgatgtcctcgatcttcgtgcgtatcttctcgtcgctcttcttgtagagcaacctctgaacctgacgccccttgataatgtgctcggcgacgatatcctttgcgtcctcggctttcacgtgaacgtagaaactgtcgtccggcagtatcttgactataggccccttctcgcagaagccgaagcaaccggtcttgataacctgcgcctcgccgtcgacgttttggtccttgagttccttcattatgctgcggtatatatcgtcggccttgctcgactcgcaccccgtcccgccgcacaccaatatgtagtttttgagtttcatctattctcccccgatcacttaaggatgtctgccgcaggtttgtcgaatacgtacccgtccacgagcttgtgccctacgatatgctcgttcacgatacgcttggcgatatccgccttgacatgcccgtag

SEQ ID NO: 24674 - protein, 425 aa, Unknown
  Obtained from environmental sample
  misc_feature (1)..(425): Xaa is any amino acid
MPAADLVDNLAQRYAHRHFYQAGVLYFTREGEHLCALGFLRPDLGEPRAALHYDNEDIRPRLHVVDDGGLAPQPLDRRKGRAWNGHTALALYGGQERRLLAADKSARAEPYLYVEIETASEDVVAQKTVLLGLLDGDLKAVDGQRVLGAYVDEPLIRAHRMTGYGHSLKHRVRVALQRAAVHVGTGVALVGVADDELLVARNALGEQPLAERREARPAASAQSGDFKLLDYIVGLHLEERLLQSHVPVAGDVLVYVLRVYETAVAQHHAHLLLVEVDVLDLRAYLLVALLVEQPLNLTPLDNVLGDDILCVLGFHVNVETVVRQYLDYRPLLAEAEATGLDNLRLAVDVLVLEFLHYAAVYIVGLARLAPRPAAHQYVVFEFHLFSPDHLRMSAAGLSNTYPSTSLCPTICSFTIRLAISALTCP

SEQ ID NO: 24675 - DNA, 807 bp, Unknown
  Obtained from environmental sample
  misc_feature (1)..(807): n is a, c, g, or t
atgacgcttgaagaagtattagagcataatccaaaagacgcaatcaccggaaaaccaatcacaacattggatgaattaaaaaaatattatgaaagtacggattatgaatcagacttgttaatgcccgaccgtatttataaaatgagtaaagatttatttgattcattggaaaaaaaaggaactgtggaacaaaaaacaataatattctgtgttcgtgatattcattctgaaagagtcgcggatgaattaaataatttatataacgattggtgcaagaaaaacgacaggaaaaaatgcgaacattttgcttttaagtgtacttccaaaagcagcggctctcaatatatcgccgacatgaaaggatcaaaaaccgattactttattgcgacaacagttgatttattgtcaacaggggtagacattcccgaagtaagaaacatagtttttttccgttatgtaaaatctcccattgcttttcatcaaatggtagggcgagggacaagattagccgaaaacaagttaatgtttacgatttacgattataccgacgctacacggttattcggcaataaattaatttcaccaccgcccggaggcggcggcggaagcggaggcggcgaagacggtccgaaaattgtacaaattgaaggaatagacgtggaagtttccgatgaaggacgttttttagttaccgaagtagacggtaatataaaacgtgtaaccgttgatgaatataaacaaagacttgccgatagattattaactgatatttcttctttagatgacttccgtaaaaggtggggttaa

SEQ ID NO: 24676 - protein, 268 aa, Unknown
  Obtained from environmental sample
  DOMAIN (96)...(170): Helicase conserved C-terminal domain
  misc_feature (1)..(268): Xaa is any amino acid
MTLEEVLEHNPKDAITGKPITTLDELKKYYESTDYESDLLMPDRIYKMSKDLFDSLEKKGTVEQKTIIFCVRDIHSERVADELNNLYNDWCKKNDRKKCEHFAFKCTSKSSGSQYIADMKGSKTDYFIATTVDLLSTGVDIPEVRNIVFFRYVKSPIAFHQMVGRGTRLAENKLMFTIYDYTDATRLFGNKLISPPPGGGGGSGGGEDGPKIVQIEGIDVEVSDEGRFLVTEVDGNIKRVTVDEYKQRLADRLLTDISSLDDFRKRWG

SEQ ID NO: 24677 - DNA, 708 bp, Unknown
  Obtained from environmental sample
  misc_feature (1)..(708): n is a, c, g, or t
atgattttgcacgatattgaactccccgccatttggcatggcaatacccttacaggaaatgaaatattcggcggcttatttaacgacacatcatcaaaatacgatgtaatattgaccaatcccccattcggcggcaaagaaggaaaagaagctcaaaccaaatttgcatacagaacaagcgcaactcaagttttatttttgcaacacgttatagacagtttgaaagaaaaaggacgctgtggaatagtcatagatgaaggagttttatttcgttcaaatgaaaacgcctttgttcaaacaaaaagaaaattactggacgaatgtgatgtatattgcatagtgtccctgccttccggcgttttctccgccgcaggcgcaggagtaaaggccaacatcatcttttttaataaaggcaaacgcacagaaaaaatctggtattacgatttatccgacataaaagtaggcaaacgtatcccctttacgattgacaggttcgatgactttttcaaattattaccggaaagagcagacagcgaaagaagctggacagttacccgggaaacgatagaaaagaataattttgacatgaaagctgtaaatcctaaccgtaagattgaggaagatacccgtacacctgaggagttgatagctttgattgaggcgaaacagattgagattaatgaggcgttgagggagttgaaggggtag

SEQ ID NO: 24678 - protein, 235 aa, Unknown
  Obtained from environmental sample
  DOMAIN (1)...(208): N-6 DNA Methylase
  misc_feature (1)..(235): Xaa is any amino acid
MILHDIELPAIWHGNTLTGNEIFGGLFNDTSSKYDVILTNPPFGGKEGKEAQTKFAYRTSATQVLFLQHVIDSLKEKGRCGIVIDEGVLFRSNENAFVQTKRKLLDECDVYCIVSLPSGVFSAAGAGVKANIIFFNKGKRTEKIWYYDLSDIKVGKRIPFTIDRFDDFFKLLPERADSERSWTVTRETIEKNNFDMKAVNPNRKIEEDTRTPEELIALIEAKQIEINEALRELKG

SEQ ID NO: 24679 - DNA, 351 bp, Unknown
  Obtained from environmental sample
  misc_feature (1)..(351): n is a, c, g, or t
atgaggcgggggaaaaaactcgcttacctgttcagcgaacccgccttgccagccgttgaggaatttattcccaaaaagtcagaccttgccgcggcggtacagcttttgcgcctgggccggactttggtacagcccctcgccgaagcgccggacgatgagaccgccgaagcctttattaaagaacaggcggaaaaaaacgccgttaaactcggcgatttaatgatgcccctgcgggtcgccattaccggcgcgcgggtcagtccccccctgttcggctcggtgcggctgctcggcgcggaacgctcactgcggcgggtggataacgccttacaactgctggaaaacacataa

SEQ ID NO: 24680 - protein, 116 aa, Unknown
  Obtained from environmental sample
  misc_feature (1)..(116): Xaa is any amino acid
MRRGKKLAYLFSEPALPAVEEFIPKKSDLAAAVQLLRLGRTLVQPLAEAPDDETAEAFIKEQAEKNAVKLGDLMMPLRVAITGARVSPPLFGSVRLLGAERSLRRVDNALQLLENT

SEQ ID NO: 24681 - DNA, 558 bp, Unknown
  Obtained from environmental sample
  misc_feature (1)..(558): n is a, c, g, or t
gtgaataaaggagagttgagtatccgtgaccgttatgccccttcaccaaccggcttgcagcatgtaggcggcatcagaaccgcgctgtttaattacctgttcgcccgttcgcgagggggagcttttgttctgcggttggaagacaccgaccgcagccgctttgaccagagttatgtgcaaaacctctatgacacatttgattggctgggcatccattgggacgaggggccggacaagggcgggccttttgcgccgtacatacaatccgagcggaccgaattatataaaaaatacgccgcagagctgataaaccgggggcaggcgtattactgcttttgttcggctgagcggatagacaaaatacggcaggaacgcgaggcggcccattcttcggaaaccggctacgaccgccattgccgttccgttccgccggaagaggcggcgcggcgcgcggcggcgggcgaggcatgcaccatacggctgaaaataccattaggtgaaacgacaaaatttcatgattacctggtaggcgatgttgaatggaaaatgacgatgtaa

SEQ ID NO: 24682 - protein, 185 aa, Unknown
  Obtained from environmental sample
  DOMAIN (7)...(185): tRNA synthetases class I (E and Q), catalytic domain
  misc_feature (1)..(185): Xaa is any amino acid
MNKGELSIRDRYAPSPTGLQHVGGIRTALFNYLFARSRGGAFVLRLEDTDRSRFDQSYVQNLYDTFDWLGIHWDEGPDKGGPFAPYIQSERTELYKKYAAELINRGQAYYCFCSAERIDKIRQEREAAHSSETGYDRHCRSVPPEEAARRAAAGEACTIRLKIPLGETTKFHDYLVGDVEWKMTM

SEQ ID NO: 24683 - DNA, 1410 bp, Unknown
  Obtained from environmental sample
  misc_feature (1)..(1410): n is a, c, g, or t
gtgcgtaatttttatccccaggcgagggtcgcggttgagttgggcggacaggacgcgaagatcgtcttcttttaccatgacagcgtcactaaccagcttgcggtaggcgatatgcgcatgaacgggagctgcgccggaggcaccggcgcgtttattgacgaaatagccgcgcttctccgtacccctgttgaaaaatttgattccctcgccgccgggggcacgcaggtttatgacatttctggacgctgcggggtttttgctaaaaccgatattcagccgcttttgaatcagggggcgattatcgaggatatagccctttccacatttcacgctatagcgaaacaaactataggcggactggcgcaggggctggagatacggccgcctgttgtttttgagggcgggcccatgacatttaaccctaccctgatccgcgttttcgcgcagcggctcggcctgaaagacaccgatattatcgtgccccagaaagcggagctgtttatcgcctacggtacggcgcttgccataaacgaaaattttctggagcaggaaagcggacatgaccgtaatttcagtccggaggcggcgcttacgtcgctggcgatgtacagagaaattgttttgggcaattccacattgcagaatattaattacttctcaaatgaggccgaaaaagaagatttctatgcccgccacagaacgcaggccataaaccatgacgtttcctccaaaggcatacaagcgggcgaaaccctgagggtataccttggcgttgacgccggatcgacgacaaccaagtttgttttgattgacgaagatgaaaatgttattgacagtttttacaacccgaacaagggagagccgctgaaggtaatcaagcaggccctgctggatatgcacgaaaaatatcaggcggcaggcgttaatctggaaatcatcgcccttggaaccacgggttacggggagcttttgttcgataaagccctgggagccgattatcataccgtggaaaccgtagcccacgcggcggcggcccagaaatacattcccggcgcgagcttcatacttgacatcggcggccaggacatgaaggctatcggcatttcaaacggcattgtgacgaatataatcgtaaacgaggcctgttcctccggctgcggttccttcctggaaacattcgcggaaacgctgcatatccccgttaataaaatcgctgaaacggcgtttaacgcgaaaagtccggcgaagcttggcagccgctgtaccgtttttatgaacagcacgattatcacggagcagaagaacggaaaacaggcggacgacattatggccggcctttgccgcgcgattgtggaaaatgtttttacaaaagttcgtgcgcatagccaaccccgcccgtcttggcgataa

SEQ ID NO: 24684 - protein, 469 aa, Unknown
  Obtained from environmental sample
  DOMAIN (256)...(467): BadF/BadG/BcrA/BcrD ATPase family
  misc_feature (1)..(469): Xaa is any amino acid
MRNFYPQARVAVELGGQDAKIVFFYHDSVTNQLAVGDMRMNGSCAGGTGAFIDEIAALLRTPVEKFDSLAAGGTQVYDISGRCGVFAKTDIQPLLNQGAIIEDIALSTFHAIAKQTIGGLAQGLEIRPPVVFEGGPMTFNPTLIRVFAQRLGLKDTDIIVPQKAELFIAYGTALAINENFLEQESGHDRNFSPEAALTSLAMYREIVLGNSTLQNINYFSNEAEKEDFYARHRTQAINHDVSSKGIQAGETLRVYLGVDAGSTTTKFVLIDEDENVIDSFYNPNKGEPLKVIKQALLDMHEKYQAAGVNLEIIALGTTGYGELLFDKALGADYHTVETVAHAAAAQKYIPGASFILDIGGQDMKAIGISNGIVTNIIVNEACSSGCGSFLETFAETLHIPVNKIAETAFNAKSPAKLGSRCTVFMNSTIITEQKNGKQADDIMAGLCRAIVENVFTKVRAHSQPRPSWR

SEQ ID NO: 24685 - DNA, 468 bp, Unknown
  Obtained from environmental sample
  misc_feature (1)..(468): n is a, c, g, or t
ttgaataagatagttatgatgggcatagacccgggcagttatgcaacgggttttgcttttttgagtttagaagggaacaaggtctcggttttggactatggagttattcgccctaaaaaagatgcggaacttatttttaggattgggcatatagttgaagagctggaaaatctaatagcaaaacacaagcccgctgcgttttgcatggaaaaagctttttttgcaaagaatgcaaatagcgcgctcattttggggcatatccgcggagcggtgatggctcttggctataagcacgatttggtattttccgaaaaaagcccgcgctcggtgaaacaagctgtgactgggaacggtgcggccagcaaggaacaggttgcaaacatgatgaacaggcttttgggcattcaggcgaactgcgctttggatgcgagcgatgccttggctattgcgtggacaggaatgatgtga

SEQ ID NO: 24686 - protein, 155 aa, Unknown
  Obtained from environmental sample
  DOMAIN (6)...(153): Crossover junction endodeoxyribonuclease RuvC
  misc_feature (1)..(155): Xaa is any amino acid
MNKIVMMGIDPGSYATGFAFLSLEGNKVSVLDYGVIRPKKDAELIFRIGHIVEELENLIAKHKPAAFCMEKAFFAKNANSALILGHIRGAVMALGYKHDLVFSEKSPRSVKQAVTGNGAASKEQVANMMNRLLGIQANCALDASDALAIAWTGMM

SEQ ID NO: 24687 - DNA, 813 bp, Unknown
  Obtained from environmental sample
  misc_feature (1)..(813): n is a, c, g, or t
ttgcccacgcttcctagcgtattttttaccgtaaacaagatgttgtcggaccctcgtacatcggctattgatattggcaatgccatatcattagaccaggttatggcatctaaggttttaaaattggcaaatagttcgttttacggctttaccagcagggttaataccattcctcatgctgtggcggttttaggatttagctcaacaaaaaacgttgtgcttaccaccagcgtcatatcaactttgaatttaaaaactagaataaaaggttttagcctagctgatttttggaaacattcggcggcggttggaaccatagcaaaactcatagcaaatgaaggctatcctcaaaagcgggaagaggcctttgtagccgggcttttgcacgacataggcaaactaattttggctatttgcgctcccgaactctttgcagaaacaataaaactggccatcagcaaaaattgcttatttttagatgtggaaaaagacgtggtgggaatcagccacccagagatagtagcccatataagcaataaatggaatttacccgaagaaatttccgaagtaatagtaaatcatcataaaagcattgattatgaaaatgcgcatattatgttgacagctatagtgcagcttgccgatgttttggcaagagggttgcaatttggccacccttgcgattactccatgccggttataggagacgatgtgctggatttgataaaaataactccaaaaaaactggataaaattttagatgatagctacgaatcgctacaaaattcaatggtctttgtaaacccggattga

SEQ ID NO: 24688 - protein, 270 aa, Unknown
  Obtained from environmental sample
  DOMAIN (96)...(220): HD domain
  misc_feature (1)..(270): Xaa is any amino acid
MPTLPSVFFTVNKMLSDPRTSAIDIGNAISLDQVMASKVLKLANSSFYGFTSRVNTIPHAVAVLGFSSTKNVVLTTSVISTLNLKTRIKGFSLADFWKHSAAVGTIAKLIANEGYPQKREEAFVAGLLHDIGKLILAICAPELFAETIKLAISKNCLFLDVEKDVVGISHPEIVAHISNKWNLPEEISEVIVNHHKSIDYENAHIMLTAIVQLADVLARGLQFGHPCDYSMPVIGDDVLDLIKITPKKLDKILDDSYESLQNSMVFVNPD

SEQ ID NO: 24689 - DNA, 801 bp, Unknown
  Obtained from environmental sample
  misc_feature (1)..(801): n is a, c, g, or t
atggaatttgaggagcgtgtatttaccataaccgcccacccggctgatctgcgggaaaaacttgcggcggcgcgtacacaaatgaaagaccttggctcggtgaacctgatggccccggaggaatttgccgaaaccaaagaacgctacgattttttaagcagccagatggcggatctcctcaaagcccgaaaagaccttgaggatcttaccacggagatacgcacggaatcctctgaattatttatcaaaacatacaaccgcgtcagaaagaattttcacaatatgttccgccgtcttttcggagggggaagggcggaactccagctttccgacaacaaccatgtgcttgaatcgggcatagaaattttcgcccagccacccggcaaaaaactggagcacatctccctgctttcaggcggcgagcgttccatgaccgccgtggccctgctttttgccacatacatggttaaacccagccccttctgcctgttagacgaaattgacgccgccctggacgaggccaacgtaggccgctttgtccagcttttacgggagttctccaataccagccagttcatcgtcattacccacaacaagaaaacagtggccggcgcgggcaccctcctcggcgtaacaatggaagaatccggcgttacgaagctcatctccgtgcggctcgaanacgaggacattgccatcgccgaagagatccctccccaacagggcctgtgggacagcgacggcaatttgaaagaagaggatgtgaaaacgaagaaggccggcagcttcccatcggtgtag

SEQ ID NO: 24690 - protein, 266 aa, Unknown
  Obtained from environmental sample
  DOMAIN (42)...(220): RecF/RecN/SMC N terminal domain
  misc_feature (1)..(266): Xaa is any amino acid
MEFEERVFTITAHPADLREKLAAARTQMKDLGSVNLMAPEEFAETKERYDFLSSQMADLLKARKDLEDLTTEIRTESSELFIKTYNRVRKNFHNMFRRLFGGGRAELQLSDNNHVLESGIEIFAQPPGKKLEHISLLSGGERSMTAVALLFATYMVKPSPFCLLDEIDAALDEANVGRFVQLLREFSNTSQFIVITHNKKTVAGAGTLLGVTMEESGVTKLISVRLEXEDIAIAEEIPPQQGLWDSDGNLKEEDVKTKKAGSFPSV

SEQ ID NO: 24691 - DNA, 585 bp, Unknown
  Obtained from environmental sample
  misc_feature (1)..(585): n is a, c, g, or t
atgagttttggtaattttgaaataaatgtcggcaaagcgatacccatgggcgctacagtctccaatgacggagttaattttgccattttctcacgtcacgccacactggtaacccttatcctttttgaaactccggcggaggatagcccgcatatagaaattcccctgaacagggtaggaagcaaaacaggggatgtttggcattgttttgttaagggggctaaggcaggtatatgctacctataccgggtagacggtccttaccagccagaacggggactgcgtttcaatcatcataaggctattattgatccatacgccaaagccctcaccagccttgaaaaatgggagttaaaagattgcctgggttttgatccgtcctctccacaagccgatctctctttttccggcgaagacaacatgcataaccatccccgctgcatcgtagttgacgataatgattttgattggcagggagacgcccctcttaactacccgttacgcttcagtgtgctgtacgaaacgcatgttaagnggattaactgcccacccgaattcgggcgtnaacatctcgtgccgatctga

SEQ ID NO: 24692 - protein, 194 aa, Unknown
  Obtained from environmental sample
  DOMAIN (15)...(107): Isoamylase N-terminal domain
  misc_feature (1)..(194): Xaa is any amino acid
MSFGNFEINVGKAIPMGATVSNDGVNFAIFSRHATLVTLILFETPAEDSPHIEIPLNRVGSKTGDVWHCFVKGAKAGICYLYRVDGPYQPERGLRFNHHKAIIDPYAKALTSLEKWELKDCLGFDPSSPQADLSFSGEDNMHNHPRCIVVDDNDFDWQGDAPLNYPLRFSVLYETHVKXINCPPEFGRXHLVPI

SEQ ID NO: 24693 - DNA, 1302 bp, Unknown
  Obtained from environmental sample
  misc_feature (1)..(1302): n is a, c, g, or t
gtggagttcgtaccggacgcggaaattttcggcgaatacaaattcaatttcgagtacatcgaacagcgtttgtggaactacgcctatctaaattccggtttgaaactgtttttgggcaagcagaagtttgaatccaagaacgggcttttggacttgttgcaaagcgacgtgggcgagtcggcggtttacagcatcgcctactgccgcggaaagcagttggagttcgccttcacgcacacgcaggcctacggggaggcctaccgctcgttcgtcaacggccagttcacctccgacggcggtacgcacttaagcgcctttcgggagggcatcctaaaaggcgtcaacgagttctataagaagaattactccggcgtagacgtacgcgacggcatcgcgggcgccgtggccataaagctaaaaagccccgtcttcgagtcgcagacaaagaacaagctggggaacacggagatacgcggctggatagtctcggaggtcaagtcaggcgtagtcgatttcctgcacaaaaacgcggacgcggcgcgcagcctagagagcaaaatcgtgcaaaatgagaaattgcgcaccgagcttaacaaggtgaaaaaagaggccaaagaggccgcgaagcgcgtagagataaagataccgaacctaaaggactgtaagtatcacgccggtgaaaacgacggcggcaagtccaccatcttcctaacggaaggccaatccgccggaggctctatcatctccgcgcgcgacgtatacacgcaggcgatattcacaatgaggggcaaaccgcaaaacgtcttcggtaagacgagggcggcaatctaccaaaacgaagagctttatgacatgatgatggcgctgggcattgaagaggacgtggagaaactgcgttacaatagaatagtcttagccaccgacgccgatgtggacggtttccacatcagaaatttattgcttacattcttcctcacgtattttgaggagttggtgcaagccggccacgtctacatactagagacgccgctctttcgcgtccgcaacaagaaggagacgctctactgctacagcgaaaaagaacgcgacgctgccgtagccaaaatccgcgacccggaagtgacgcgctttaagggtctgggagaaatatccccaagcgaattcggccagttcataggcggcgatatgcggctcgtggaggtcaatgtaaaatcagcgaagaatatcgcggagacattggagttttatatggggaaaaatacgcctgagcggagagattttattatggaaaatttgatatag

SEQ ID NO: 24694 - protein, 433 aa, Unknown
  Obtained from environmental sample
  DOMAIN (48)...(203): DNA gyrase B
  misc_feature (1)..(433): Xaa is any amino acid
MEFVPDAEIFGEYKFNFEYIEQRLWNYAYLNSGLKLFLGKQKFESKNGLLDLLQSDVGESAVYSIAYCRGKQLEFAFTHTQAYGEAYRSFVNGQFTSDGGTHLSAFREGILKGVNEFYKKNYSGVDVRDGIAGAVAIKLKSPVFESQTKNKLGNTEIRGWIVSEVKSGVVDFLHKNADAARSLESKIVQNEKLRTELNKVKKEAKEAAKRVEIKIPNLKDCKYHAGENDGGKSTIFLTEGQSAGGSIISARDVYTQAIFTMRGKPQNVFGKTRAAIYQNEELYDMMMALGIEEDVEKLRYNRIVLATDADVDGFHIRNLLLTFFLTYFEELVQAGHVYILETPLFRVRNKKETLYCYSEKERDAAVAKIRDPEVTRFKGLGEISPSEFGQFIGGDMRLVEVNVKSAKNIAETLEFYMGKNTPERRDFIMENLI

SEQ ID NO: 24695 - DNA, 621 bp, Unknown
  Obtained from environmental sample
  misc_feature (1)..(621): n is a, c, g, or t
atgaaaaaagtcttacgaataggcattgccggctacatgggcgcaggtaagagcacctgcgcccgctccttggcatccgaaaacgccctgataatagacgccgacgccgaggccaagcggatcatggcgaccaaccacgatatccaagagacgctacgggcggccttcggggaggcggcggtcgacagggacggccgcatacactccgacgtactcgggcaaatagccttcgagtcggtagacgcgctcctgacgctcaacggcatcacgcacaaaccgctggttgaatatctaggccccgccatctccggctgccccaaaccgctgtgcgtcctagacgccgccctcatcccccttttgggaattgagtcctggttcgatctgtgcgtctgggtagacgcccccttcgaaacgcgcttggcacggctcgtggccaagagaccggacgtgggcgaggctaagctggtcaaacggatgcgattgcaagaagccatcatgtccgcgccggtgggcggagactgggtgacggtccgagacgaggagtgccgagagtacattgtcaacctgatcgatgaactaagaaaaagagtgggcgccgacgatccaaccgttcacgattga

SEQ ID NO: 24696 - protein, 206 aa, Unknown
  Obtained from environmental sample
  SIGNAL (1)...(25)
  DOMAIN (5)...(184): Dephospho-CoA kinase
  misc_feature (1)..(206): Xaa is any amino acid
MKKVLRIGIAGYMGAGKSTCARSLASENALIIDADAEAKRIMATNHDIQETLRAAFGEAAVDRDGRIHSDVLGQIAFESVDALLTLNGITHKPLVEYLGPAISGCPKPLCVLDAALIPLLGIESWFDLCVWVDAPFETRLARLVAKRPDVGEAKLVKRMRLQEAIMSAPVGGDWVTVRDEECREYIVNLIDELRKRVGADDPTVHD

SEQ ID NO: 24697 - DNA, 312 bp, Unknown
  Obtained from environmental sample
  misc_feature (1)..(312): n is a, c, g, or t
atgtgggggatacccatgaataacgtacaaacggtaaataaatacgttcccgactatttaattactccgggcgcggttcttgaggactaccttgaggacgcagggatcacacatgccgcgcttgcggataggaccggtttgtcaaaaaaaacgatagccgaaatattaacagcaaaatctgccattaccgctgaaatcgcgttaatttttgaacggacactcggccgcccagtgcatttttggagtaaccttgacggcagtatcggggagataaggcgcggctgccaaattttgattgtctcattaacataa

SEQ ID NO: 24698 - protein, 103 aa, Unknown
  Obtained from environmental sample
  DOMAIN (27)...(81): Helix-turn-helix
  misc_feature (1)..(103): Xaa is any amino acid
MWGIPMNNVQTVNKYVPDYLITPGAVLEDYLEDAGITHAALADRTGLSKKTIAEILTAKSAITAEIALIFERTLGRPVHFWSNLDGSIGEIRRGCQILIVSLT

SEQ ID NO: 24699 - DNA, 867 bp, Unknown
  Obtained from environmental sample
  misc_feature (1)..(867): n is a, c, g, or t
atggaaaacagttataaattcaagtgtgaaacttgcagaaacctaatggtgaaggccggtaaaaattctaccggcaaacggcgatataaatgcctgttctgcaaagcaaggcaagtgattagaaagacaaaatcggttaggaaaaacgagctgaaattattcgtaaaatggataactgacagcacgaaagcattcgacaaaataaaatggtctagaatgacattttacagaaaaataaagtggtgctggaatattgtcccgcaaatactgcctgccacaaacgcatcaaaatatatttttgcagatgcgacatatatcaacagaaatttatgccttttgattgttcgggatgctcaatatgtattaaatttcaaatgggcagaaagcgaaaatttctgcgattattatgaattgctaagaacgataaaagaacctgagtttgtcatttgcgatggaaactttgggataataaaagcagccaagcgattgtggaaaaatgcgagaatacagcggtgtttagtccatatcaccagagattcggaacggaaattaggtaaacgcagtccgctggaaataaatcatatttttcgccggcacattaaaaagctgcattgcgttgatacaatcagaaaaacagaaatttggcttgataaatttgatgaactgtataataggcataaagaatttattgaggaattgacattgaaaattgatgaatcaactggagaggcaaatcgccaagacagaacccataaaaatctattttcggcgtgttatatggtgcgtaatgcgataaagaaaatatgctattcttgcatattgaaaataaaatcccaaacaactcaaattgtctggaggggggcataa

SEQ ID NO: 24700 - protein, 288 aa, Unknown
  Obtained from environmental sample
  misc_feature (1)..(288): Xaa is any amino acid
MENSYKFKCETCRNLMVKAGKNSTGKRRYKCLFCKARQVIRKTKSVRKNELKLFVKWITDSTKAFDKIKWSRMTFYRKIKWCWNIVPQILPATNASKYIFADATYINRNLCLLIVRDAQYVLNFKWAESENFCDYYELLRTIKEPEFVICDGNFGIIKAAKRLWKNARIQRCLVHITRDSERKLGKRSPLEINHIFRRHIKKLHCVDTIRKTEIWLDKFDELYNRHKEFIEELTLKIDESTGEANRQDRTHKNLFSACYMVRNAIKKICYSCILKIKSQTTQIVWRGA

SEQ ID NO: 24701 - DNA, 843 bp, Unknown
  Obtained from environmental sample
  misc_feature (1)..(843): n is a, c, g, or t
ttgatttccgacggggcttgggggacgtttttgcataaaaagggattaaaaccgggggaatgtcctgaatcgtggtgtattaaccggccagccgatgttctggacgtagcgaaaaactacatcgatgccggagcggacatgatagagacggacagcttcggcgggagcagctttaagctggagcattacggaatggcggacaaggcggcggagataaacgaggcagcggcaaagatttcccgcgaggccgccggtgaggaacactgggtaatagcgtccatcggtccgacgggcaagatgctggtcacggaagaagttacggaagaggagctttacgaagcgttcaagacccaggccgtcgcatttgaaaaaggcggggccgacgccgcctgcatcgaaacaatgagcgatatcgcggaggcttgccaggctgtaaaggcagtcaaggaaaacactcatctggaagttatctgcacttttacctttgaaaagaccgcacagggcgattataaaaccatgatgggagtagacccgatttccgccataaaagccgccatcgaggcaggcgcggatatcgtgggagccaactgcggcaacgggatcgagcgtatgattgacatcgtcaaggagatgcgctcagttaataaagaaataccgatcctcgtccacgccaacgcgggccttccaaagaacgtagacggcaaggatgtcttcccggaaaccccggaggacatggcagctatcgcaccaaaactcgtcgccgccggagccaacatcataggcggctgctgcggaaccacgccggcgcatatcaaggcgttaaaagaagcgctgaataaatag

SEQ ID NO: 24702 - protein, 280 aa, Unknown
  Obtained from environmental sample
  DOMAIN (1)...(280): Homocysteine S-methyltransferase
  misc_feature (1)..(280): Xaa is any amino acid
MISDGAWGTFLHKKGLKPGECPESWCINRPADVLDVAKNYIDAGADMIETDSFGGSSFKLEHYGMADKAAEINEAAAKISREAAGEEHWVIASIGPTGKMLVTEEVTEEELYEAFKTQAVAFEKGGADAACIETMSDIAEACQAVKAVKENTHLEVICTFTFEKTAQGDYKTMMGVDPISAIKAAIEAGADIVGANCGNGIERMIDIVKEMRSVNKEIPILVHANAGLPKNVDGKDVFPETPEDMAAIAPKLVAAGANIIGGCCGTTPAHIKALKEALNK

SEQ ID NO: 24703 - DNA, 891 bp, Unknown
  Obtained from environmental sample
  misc_feature (1)..(891): n is a, c, g, or t
atgaaataccgcagcggaactttttattctgataataaatgcaccttgcttgcaaataccgttgtaacggaaattgatgcggcggcaaagaaggtagttttatctgacggcaaaaaggtggcttatgacaaactgcttgtcggagcgggttcctcgccatttgtacctccctttgaagggcttgatactgtaaaggaaaaatttacttttatgagctttgacgatgcgcggaaacttgatgcgtctcttgatcaaaacaagcgtgtattaatcatcggcgcaggtcttatcggtttgaaatgcgccgagggcattcatgaccgtgtaaagcacataacagtagttgatcttgccccgcgtattttatccagcattcttgatgatgaaggtgcaagactcgtccaaaaccatatagagagcaaaggcgtagagtttaaactttccgccgccgtaaagaaatttgagaaaaaaacggcgatttttgaaaacggagaaaccgcagatttcgatattcttgtcctcgccgtcggtgtgcgcccgaacaccgctcttctgaacggaatagcgaagattgagcgcggcatcgtagtagatgacaagtccgagacaactgcacaaaacatttacgctgcgggcgactgtacgcaaacgtctgatgtatcaagcggacagagcaaaataatggcgcttttacctaacgcttatatgcagggcgagtgcgccggagtcaatatggcgggcggcagtatgagtttcaacaaggcaatccccatgaacgcaatcggatttttcggtctgcacatcatcacggcgggcaattacaccggagatgtctattcccagcaggtaatggcaattacaaacgcctgttttacagcgataacaacttaa

SEQ ID NO: 24704 - protein, 296 aa, Unknown
  Obtained from environmental sample
  DOMAIN (1)...(219): Pyridine nucleotide-disulphide oxidoreductase
  misc_feature (1)..(296): Xaa is any amino acid
MKYRSGTFYSDNKCTLLANTVVTEIDAAAKKVVLSDGKKVAYDKLLVGAGSSPFVPPFEGLDTVKEKFTFMSFDDARKLDASLDQNKRVLIIGAGLIGLKCAEGIHDRVKHITVVDLAPRILSSILDDEGARLVQNHIESKGVEFKLSAAVKKFEKKTAIFENGETADFDILVLAVGVRPNTALLNGIAKIERGIVVDDKSETTAQNIYAAGDCTQTSDVSSGQSKIMALLPNAYMQGECAGVNMAGGSMSFNKAIPMNAIGFFGLHIITAGNYTGDVYSQQVMAITNACFTAITT

SEQ ID NO: 24705 - DNA, 717 bp, Unknown
  Obtained from environmental sample
  misc_feature (1)..(717): n is a, c, g, or t
atgatattagcgcagaattttgatttcagggaattaaacagacggataaaaaacgcaaaggaaaccgtttgttacatagacgattgtttcggtcaaaggtatattggcagcggcatgagcggcaagcacctgactataaagggaacgccgggtaacgctctgggcgcttatctggacggcggagtcatcgaggtacacggcaacgctcaggacgctgtcggagatacaatgaacgacggcaaaatcattattcacggcaatgccggcgatgcgcttggctatgccatgcgcggcggctgtatttttgtccggggcgacgcagggtacagaaccggtattcacatgaaggaatacaaagaaaaaaaaccggtaatcgtcataggcggcaaagccggtagttttcttggcgagtatcttgccggaggtttgattatagtgcttggtattggttcagaggatgttccggtttggtattttacgggaaccggtatgcacggcggaaaaatctttataagaacggacaaagaacttacttcgcttccggcgcaggttattgaggatattgcaacaggcgatgatttgaaggaaattgcgccgtatgtcggcgagtttgccgaacatttcaacatggacgccaagcggcttttgaaggacagattctatgttctaaggcccaatgccagaaatccgtacaaacagttgtatactgagaattag

SEQ ID NO: 24706 - protein, 238 aa, Unknown
  Obtained from environmental sample
  DOMAIN (12)...(215): GXGXG motif
  misc_feature (1)..(238): Xaa is any amino acid
MILAQNFDFRELNRRIKNAKETVCYIDDCFGQRYIGSGMSGKHLTIKGTPGNALGAYLDGGVIEVHGNAQDAVGDTMNDGKIIIHGNAGDALGYAMRGGCIFVRGDAGYRTGIHMKEYKEKKPVIVIGGKAGSFLGEYLAGGLIIVLGIGSEDVPVWYFTGTGMHGGKIFIRTDKELTSLPAQVIEDIATGDDLKEIAPYVGEFAEHFNMDAKRLLKDRFYVLRPNARNPYKQLYTEN

SEQ ID NO: 24707 - DNA, 549 bp, Unknown
  Obtained from environmental sample
  misc_feature (1)..(549): n is a, c, g, or t
atgcaggcggcaaactatttacaacaggctgaaatgggtgcggtcaaaaccgccgccgcggtagccccggctgccccggtagcctctcagatttctccagccacgccagccgccccggtggcgccgcccgcgtctgagcctcgcgctgattcgggcgcaaatcttaccgatgccgcgaaagcctactatgacgcggtaagccttgtttcccagcaaaaataccagcaggcatacctgtcatttaaaaagatcgcggacgcgaacgaggatccggagtacgtagccaaaagcatctttgagattgggcgctgcctcttccttttaaataaatttgacgattgtatccgttattatacaatgatgataaccaaataccccaggcaccccgatctggcggacgcccttttctacatgggccaatcgtacgagaaaaacaaccggaaagatcaggcggcgactttttacaaaaaaatccttacaatgcctggggatgaagaagacgggactcatataaaagccaggcgggcacttaaggcattggaggcgtaa

SEQ ID NO: 24708 - protein, 182 aa, Unknown
  Obtained from environmental sample
  misc_feature (1)..(182): Xaa is any amino acid
MQAANYLQQAEMGAVKTAAAVAPAAPVASQISPATPAAPVAPPASEPRADSGANLTDAAKAYYDAVSLVSQQKYQQAYLSFKKIADANEDPEYVAKSIFEIGRCLFLLNKFDDCIRYYTMMITKYPRHPDLADALFYMGQSYEKNNRKDQAATFYKKILTMPGDEEDGTHIKARRALKALEA

SEQ ID NO: 24709 - DNA, 645 bp, Unknown
  Obtained from environmental sample
  misc_feature (1)..(645): n is a, c, g, or t
atggcgggaatggatatggcggcctttggccgttttgccaaaacctttcaggccggagaaatgattttttccgaatttgagcccggagataacttttatcttattcaatcaggtcgcgtccagctggtaaaattaataggggatatagaaaaaaccctggatattctgcagcccatcgaaaatgtcggcgagatggcaattctggaaaattcctccagatcagcgacagccatagccctggatacggttaaagttctcgaaattaacagccagaattttgaaatccttatgctgggaaatccgcaaatagcccttaaactgctcagaatgttttccaagcgcatttacgattcaaaacgccggtttatgattctgacgctggaggaacctcaggcaaaaatagccgatgtttttcttatgttggatgaaagccagtccgacatagataaaacctctgaaaggcgtgaatttaagaccacagtggatgatgtcgcacattgggcgggcatgacagtagccgatacccgtgatattcttggtcattttgccacgcagcaccgtatagagatatatcctgacagaatagcggtaaaaaatatcaatgatttttcgcgctttgttaattcgcgaagaagaaaaacataa

SEQ ID NO: 24710 - protein, 214 aa, Unknown
  Obtained from environmental sample
  DOMAIN (13)...(102): Cyclic nucleotide-binding domain
  misc_feature (1)..(214): Xaa is any amino acid
MAGMDMAAFGRFAKTFQAGEMIFSEFEPGDNFYLIQSGRVQLVKLIGDIEKTLDILQPIENVGEMAILENSSRSATAIALDTVKVLEINSQNFEILMLGNPQIALKLLRMFSKRIYDSKRRFMILTLEEPQAKIADVFLMLDESQSDIDKTSERREFKTTVDDVAHWAGMTVADTRDILGHFATQHRIEIYPDRIAVKNINDFSRFVNSRRRKT

SEQ ID NO: 24711 - DNA, 369 bp, Unknown
  Obtained from environmental sample
  misc_feature (1)..(369): n is a, c, g, or t
ttgccgggcattatccttgaaatggacatcacttccattaagagaaagaagaagactctggatgccatggccaacgtgctcaacgagttcctgcacggtgtttccaagggcttctcggatgcggctttcgcttccttcagccggcggcgttcaaccgtcagggaagacatcaatcagtcctttggcggccccggcagcgaaccggccaaggcggcaccaaagcctgaaagtaatgccggttcagcatacctggacctgattaatacaagccccagtgaaattgaagctcctccaaaaaccagaggcaggggtgccaaagccgatgcgggcctggcaaaacggcggggcagaaccgcaaaaaagaagtaa

SEQ ID NO: 24712 - protein, 122 aa, Unknown
  Obtained from environmental sample
  misc_feature (1)..(122): Xaa is any amino acid
MPGIILEMDITSIKRKKKTLDAMANVLNEFLHGVSKGFSDAAFASFSRRRSTVREDINQSFGGPGSEPAKAAPKPESNAGSAYLDLINTSPSEIEAPPKTRGRGAKADAGLAKRRGRTAKKK

SEQ ID NO: 24713 - DNA, 750 bp, Unknown
  Obtained from environmental sample
  misc_feature (1)..(750): n is a, c, g, or t
gtggaaaatctttgggtggacatgcccggcgaaaccgtgcgtgacgtttcattttcggtaaagaaaggggaaattttcggcatcgggggccttgcgggccaggggaaactgggcatccccaacggcatcatgggcctttttgcggccggtggcaaggcatgtatagacggcgagaacctggaactgggctcccccaggaggatacttgacgccggcgtagcctttgtttccgaagaccgccgcggcgtgggccttttaatggacgaaagccttgagtggaacatagcttttgggatcatgcagatcaaaggcaaaaatttgaaaaagtttttcggcgggcttttcagcctgcgtgatgaaaaagccatgcgccatcttgccgaggaatatatcaaaaaactggaaataaaatgcaccggatcaaagcaggccgccaaagaactttcgggcggaaaccagcagaaggtatgcctttccaaggcctttgccctggaaccaaaactcctctttgtttccgaacccactcgcggcatagacgtgggggcaaaaaaaatcgtgctggataccctgcgcttctacaatcagaacatgggaacgacaatcgtgatgatctcaagcgagcttgaggagcttcgctcgatctgtgacagaatcgccattgtagacgaaggaaaaatcgctggtattctgccccccgagtcgccggcggctgaattcgggttgttaatgtcaggtgaaaaagtagcatga

SEQ ID NO: 24714 - protein, 249 aa, Unknown
  Obtained from environmental sample
  DOMAIN (23)...(224): ABC transporter
  misc_feature (1)..(249): Xaa is any amino acid
MENLWVDMPGETVRDVSFSVKKGEIFGIGGLAGQGKLGIPNGIMGLFAAGGKACIDGENLELGSPRRILDAGVAFVSEDRRGVGLLMDESLEWNIAFGIMQIKGKNLKKFFGGLFSLRDEKAMRHLAEEYIKKLEIKCTGSKQAAKELSGGNQQKVCLSKAFALEPKLLFVSEPTRGIDVGAKKIVLDTLRFYNQNMGTTIVMISSELEELRSICDRIAIVDEGKIAGILPPESPAAEFGLLMSGEKVA

SEQ ID NO: 24715 - DNA, 618 bp, Unknown
  Obtained from environmental sample
  misc_feature (1)..(618): n is a, c, g, or t
ttgcaggaagtaagggacttcaaacaggaaatacaacaatctcttagccacgcatggaacgaggatcgcgaacttgcggagaaaagattcattacgttaaataaacttgtcgagcgcctttcaagccaggaaagcgagcataaacgctggcgcgattctgtgcttgatgtccgccagcatgtcgaattcatcggtcgtgaaagagatgagaatgatgttgagattgaaatttatcgcagtggtgccggcaaatcaggcggacagcgccaaaaacttgcaaccacatgccttgccgcggcattacggtatcagcttggcggcaatgatcttggcgtccccaagtatgctccggttgttcttgacgaagcgtttgacaaagcggataacgagttcactacactggtaatgaatattttcaaaaatttcgggttccaaatgatagtggcaacaccgctgaagtccgtaatgacactcgaaccgtttatcggaggcgcatgttttgtagacatcaatgacaggtgtatatcaagtgtcctgattattaagtatgacagcgagcaacagcgattgaatcttacgaatcataccagcagggaggctgacattgaagtttcctga

SEQ ID NO: 24716 - protein, 205 aa, Unknown
  Obtained from environmental sample
  misc_feature (1)..(205): Xaa is any amino acid
MQEVRDFKQEIQQSLSHAWNEDRELAEKRFITLNKLVERLSSQESEHKRWRDSVLDVRQHVEFIGRERDENDVEIEIYRSGAGKSGGQRQKLATTCLAAALRYQLGGNDLGVPKYAPVVLDEAFDKADNEFTTLVMNIFKNFGFQMIVATPLKSVMTLEPFIGGACFVDINDRCISSVLIIKYDSEQQRLNLTNHTSREADIEVS

SEQ ID NO: 24717 - DNA, 591 bp, Unknown
  Obtained from environmental sample
  misc_feature (1)..(591): n is a, c, g, or t
ttgattgatgttttacccaaatactatcgtgttcttgctgattatgacgacgcgaattttcatcgcataacagggatgttatcgtggatactcgccaatccaaactccggcttatatccccggcaaatccctgtcgccggcgttgacagcaaatggctggaatcccataaagggcttgtctgcgaacttgtttcggcgattcagaaaaccaatgaacgcgatttttttaaggtctgcggtttaaaacctccgccacagttaattcatatgcgcatcctggacccggagataagaaaccgattcggcggtcttggcgacatctgcgccccctgggaagatacagctaatcttgatattaagcctgctcatgtttttattgttgaaaatcttcaaacagggctcgcctttgaagatttagccggctccgttgtgatcatggccctgggttataaccttgatgttttagggcgcattccatggcttcatcacgcgcgatgcgtttactggggagacattgacacccatggctttgccatacttaaccgcgccagaacatacctgccttatctggaatcaagcgctgatggataa

SEQ ID NO: 24718 - protein, 196 aa, Unknown
  Obtained from environmental sample
  misc_feature (1)..(196): Xaa is any amino acid
MIDVLPKYYRVLADYDDANFHRITGMLSWILANPNSGLYPRQIPVAGVDSKWLESHKGLVCELVSAIQKTNERDFFKVCGLKPPPQLIHMRILDPEIRNRFGGLGDICAPWEDTANLDIKPAHVFIVENLQTGLAFEDLAGSVVIMALGYNLDVLGRIPWLHHARCVYWGDIDTHGFAILNRARTYLPYLESSADG

SEQ ID NO: 24719 - DNA, 933 bp, Unknown
  Obtained from environmental sample
  misc_feature (1)..(933): n is a, c, g, or t
gtgcggcgccgccggcatcgaggtgataccgaccggttccatctattggacgaagctttgggaataggcgggtacccgcggggcaggatcattgaaattttcggcccggaatcgtctgggaaaacgactttggcccttcatgcggtcgcggaagcgcaaaaactggggggcattgccgcgtttgttgacgccgagcacgctttggacccgatttatgccaaaaacctgggggtcaacatcgacaatttgtgggtttcccagccggattcaggcgaacaggcgcttgaaattgccgaaagtctggtacgttcaggcgccgtagacgtgatcgtcgtggactccgtggcggctttaaccccccaggccgaaattgacggcgacatgggggatgcccagatgggcttgcaggcccgcctgatgagtcaggccatgcggaagctcaccgccatcatcggcaaatccaggactatcatcatctttatcaaccagatccgcatgaagatcggcgttatgtttggaaaccctgaaacaacaaccggcggcaacgccctaaagttttactcctccttgcgccttgaagtccgtaaaaccgagactatcgaggctggaaaggataccgacgctatcggaaaccgcgtgaaggtgaaggttgtcaagaacaaagtagcgccgcccttcaggcgcgccgagctggaaatcctctttggaaagggaatttccgccgagggaagtcttcttgacgctgcggtaaagcacgggattatcgacaaaaagggagcgtggtattcttacggcgaagagaaaatagggcagggcagggacagcgccagggactacgtagcgcaaaattccgcttttgccgcggaaatcgaaccaaagctgcgaaaaatcatgttcccccggccggggaattcctgccgctcccgccgctaa

SEQ ID NO: 24720 - protein, 310 aa, Unknown
  Obtained from environmental sample
  DOMAIN (1)...(300): recA bacterial DNA recombination protein
  misc_feature (1)..(310): Xaa is any amino acid
MRRRRHRGDTDRFHLLDEALGIGGYPRGRIIEIFGPESSGKTTLALHAVAEAQKLGGIAAFVDAEHALDPIYAKNLGVNIDNLWVSQPDSGEQALEIAESLVRSGAVDVIVVDSVAALTPQAEIDGDMGDAQMGLQARLMSQAMRKLTAIIGKSRTIIIFINQIRMKIGVMFGNPETTTGGNALKFYSSLRLEVRKTETIEAGKDTDAIGNRVKVKVVKNKVAPPFRRAELEILFGKGISAEGSLLDAAVKHGIIDKKGAWYSYGEEKIGQGRDSARDYVAQNSAFAAEIEPKLRKIMFPRPGNSCRSRR

SEQ ID NO: 24721 - DNA, 639 bp, Unknown
  Obtained from environmental sample
  misc_feature (1)..(639): n is a, c, g, or t
gtgtttgccggactactaggacaaaatccaaaaatacgctattctataaatatgaaagtatggattaaattcttaatcggttctattttgggcatgataatcggtttccttctgccggacaacgcaaatgtgtttgcggctctttcctggcttgaaaaatttgccgttggcatagggcgttatactgtcattcccgttttggttttttcttttacaatcgcggtttatgaactgcgcatggacgggcaattttggtcgatgttttttaaaaatatcttctttatcatagcggcgtccgtttttgtaatctttacgggcattgtagtaacaatgatttttacgcccggcagagttccaatagaaacagttgaacaactggaaacgttggatttaaatgtctgggacaacttagttgatattttcccgtctaatatgttcagcgtgcttgcaaaagacggtatttatctttttccaatatgtatatttgcgttctttatcggcatgggcttaaattacgaccgtaactattcaaaaccggtcatatcgctcgtggattcgctttcgcgtattttctatcatatcgcttcttttttctctgagattttaggctttgtattaatcgtacttgccgcgttttga

SEQ ID NO: 24722 - protein, 212 aa, Unknown
  Obtained from environmental sample
  misc_feature (1)..(212): Xaa is any amino acid
MFAGLLGQNPKIRYSINMKVWIKFLIGSILGMIIGFLLPDNANVFAALSWLEKFAVGIGRYTVIPVLVFSFTIAVYELRMDGQFWSMFFKNIFFIIAASVFVIFTGIVVTMIFTPGRVPIETVEQLETLDLNVWDNLVDIFPSNMFSVLAKDGIYLFPICIFAFFIGMGLNYDRNYSKPVISLVDSLSRIFYHIASFFSEILGFVLIVLAAF

SEQ ID NO: 24723 - DNA, 552 bp, Unknown
  Obtained from environmental sample
  misc_feature (1)..(552): n is a, c, g, or t
atgccgctctttttatacttattaaaaccaaaaacaaacccttggcacattttatacggttttttgggaccggcaatcgcggcgtttttctcgggagacgtaaatttttcaattccggtgcttatacgccacacaaaagaaaatttcggcataagacgccgttcaagctccatatccctggcgttatttgcaactttttgcagatgcggaagcgccatggtagcggcggcggcgtttattgtcattattaaatcctactcgtatttaagaatcggcacaatcgatttattcactatcggcttatacgcctttttattttcttttattcttgcgcgccaccccggcgacggagcgttcatcgcgttagccgctctttgtcttacctacggcggcggagcatacagcgccggttacttgattctaaagccaatggctttttaccttgcggcaataggcgcttttatcgatgtaatgcttaactctttttgcacctatgttctggcgcggacaaacggctttattgaggaaaaaaatctggtgcattttatttaa

SEQ ID NO: 24724 - protein, 183 aa, Unknown
  Obtained from environmental sample
  misc_feature (1)..(183): Xaa is any amino acid
MPLFLYLLKPKTNPWHILYGFLGPAIAAFFSGDVNFSIPVLIRHTKENFGIRRRSSSISLALFATFCRCGSAMVAAAAFIVIIKSYSYLRIGTIDLFTIGLYAFLFSFILARHPGDGAFIALAALCLTYGGGAYSAGYLILKPMAFYLAAIGAFIDVMLNSFCTYVLARTNGFIEEKNLVHFI

SEQ ID NO: 24725 - DNA, 405 bp, Unknown
  Obtained from environmental sample
  misc_feature (1)..(405): n is a, c, g, or t
atgacaacgcttcagaaattcaacatccgtacgggcggacaaacagactggattaacattacgggcgaagtgcagaaaaaagttgccgcttccggcgtgaaagagggaatttgcgtagtttttgtccctcacaccaccgcggcggtaacgataaatgaaaacgccgaccccgatgtccctcacgacgtaaatctcgcgttaaactcaatttcccccgaccgcggcgaattccggcacagcgaaggcaactccgccgcccacaccaaatcaagcctcgtgggcccctcgctcaccgtgattgttaccggaggcaggctgctgttgggcacatggcagggaatctggttcaacgaatacgacggcccgcgaacacggaaagttcaggttagagttatcggagagtga

SEQ ID NO: 24726 - protein, 134 aa, Unknown
  Obtained from environmental sample
  DOMAIN (17)...(132): Uncharacterised protein family UPF0047
  misc_feature (1)..(134): Xaa is any amino acid
MTTLQKFNIRTGGQTDWINITGEVQKKVAASGVKEGICVVFVPHTTAAVTINENADPDVPHDVNLALNSISPDRGEFRHSEGNSAAHTKSSLVGPSLTVIVTGGRLLLGTWQGIWFNEYDGPRTRKVQVRVIGE

SEQ ID NO: 24727 - DNA, 381 bp, Unknown
  Obtained from environmental sample
  misc_feature (1)..(381): n is a, c, g, or t
gtgagcaaggggaacggaccagaggcccctgtattaaatggctgcctacggtatctggaaatccggggcatctaccactggcgcaacaacaccggcgcggtgcaagtgcgccccggagagtttatgcgtttcggcaaaaaaggaagcagcgacattcttggcatactcccaggcggccgcttgctatgcgtggaatgtaaatccaaagaagggagattgtcgcccgagcagaaacaattccttgacgatgccctggaactgggagccttggccttggtagtccggagctggcaggaacttgacgaggcattacgcgaggcggggtacatttccaatgggccgttgtttgaagtgaacgcacaacagggagttttcagatag

SEQ ID NO: 24728 - protein, 126 aa, Unknown
  Obtained from environmental sample
  DOMAIN (25)...(106): Protein of unknown function (DUF994)
  misc_feature (1)..(126): Xaa is any amino acid
MSKGNGPEAPVLNGCLRYLEIRGIYHWRNNTGAVQVRPGEFMRFGKKGSSDILGILPGGRLLCVECKSKEGRLSPEQKQFLDDALELGALALVVRSWQELDEALREAGYISNGPLFEVNAQQGVFR

SEQ ID NO: 24729 - DNA, 306 bp, Unknown
  Obtained from environmental sample
  misc_feature (1)..(306): n is a, c, g, or t
ttggggaccggttttcccgttcctgtggaagtgatccctgaggcgaggaccagcgcgggcatggcgcttgaggctttgggcgcgacggtcaccctgcgcgaggctctgcgcaaagccggccctgttattactgagcatgggaatctgatactggatattcgctttgtaaaacccgtcgatcccgtggtgatggagcgtgagataaattttattcccggcgtcgtggagaatggttttttcacgcgcaatcgtccggctgtctatatcgcgcgtatggacggaaatattgaggtaagagggaaataa

SEQ ID NO: 24730 - protein, 101 aa, Unknown
  Obtained from environmental sample
  DOMAIN (2)...(96): Ribose 5-phosphate isomerase A (phosphoriboisomerase A)
  misc_feature (1)..(101): Xaa is any amino acid
MGTGFPVPVEVIPEARTSAGMALEALGATVTLREALRKAGPVITEHGNLILDIRFVKPVDPVVMEREINFIPGVVENGFFTRNRPAVYIARMDGNIEVRGK

SEQ ID NO: 24731 - DNA, 873 bp, Unknown
  Obtained from environmental sample
  misc_feature (1)..(873): n is a, c, g, or t
atgagagtctttcttatttgtctggaagaagaaaaagaaaatgcctttctgctttctgctttccttgaaaaaacaggtatttacacggaaaagctccttattaaaaccagggatgaagggttgaaactcattacagattacacccacgttgtaattctttcggcgcttgggccgggatggatagattttcttgcggggtttttctgcggttcgcatcttcctattcttgtattaggggaaaaagctatcgaaagcattccggctgtatttgccttttgctttaaattttttgacactgaagaaaaattacatgactatttcaccgaggaattaaaaattttcaaaaaaaatgaagccgtgtgggagacaaatcatattaagcaagccttgcttgacaagggcattcccacgacaattgaggctcttgcccagtgtgttgccgaaaataaagttgacgaagtttctctctttatagccgcgggtttcttgcccgacgcaaaagacaaaaaaggaattcccctgctttgtatttccgccagaaacgggcatgtaagtacccttgagttactgctccgttccggagctcaagtggatattattgccgaggacaggaaatctaccgctcttattgacagcgctatgggaagatataaagatgtgatcaaaacccttattgaagccggagcggacgtgaatgcaaagaatggggacggacagaccgcgctgattatcgttgtgggagccggggatgtggaaattactgaaatgttggttaaggccggggctgaccctgacattgaggatgcttttggcgttagcgcaagaatgtatgctaacatctttaaaaacgataaaataaaagcccttttttaa

SEQ ID NO: 24732 - protein, 290 aa, Unknown
  Obtained from environmental sample
  DOMAIN (204)...(236): Ankyrin repeat
  misc_feature (1)..(290): Xaa is any amino acid
MRVFLICLEEEKENAFLLSAFLEKTGIYTEKLLIKTRDEGLKLITDYTHVVILSALGPGWIDFLAGFFCGSHLPILVLGEKAIESIPAVFAFCFKFFDTEEKLHDYFTEELKIFKKNEAVWETNHIKQALLDKGIPTTIEALAQCVAENKVDEVSLFIAAGFLPDAKDKKGIPLLCISARNGHVSTLELLLRSGAQVDIIAEDRKSTALIDSAMGRYKDVIKTLIEAGADVNAKNGDGQTALIIVVGAGDVEITEMLVKAGADPDIEDAFGVSARMYANIFKNDKIKALF

SEQ ID NO: 24733 - DNA, 351 bp, Unknown
  Obtained from environmental sample
  misc_feature (1)..(351): n is a, c, g, or t
gtgtataaaaacttcccgctcagtttccacacttccgcacctgccgccgctgccgctgcaattgcagctcataaacagggcaaattctgggaataccgctgggcacttgcgcctaatttccaaagcctaaatgattctacctttatagaaactgccaaaaaagtaggattgaatattgagcaattcaaaaaagatatggttttggattccgacaagcaagccataatagatcgtgatatgaagctgggcatggaagtaggggttcaaggaacgccaaacttttatgtaaatggcaaacgccaagaaaacttcggtcccgatttaatagaaaagatgctgaaagaactatag

SEQ ID NO: 24734 - protein, 116 aa, Unknown
  Obtained from environmental sample
  SIGNAL (1)...(25)
  misc_feature (1)..(116): Xaa is any amino acid
MYKNFPLSFHTSAPAAAAAAIAAHKQGKFWEYRWALAPNFQSLNDSTFIETAKKVGLNIEQFKKDMVLDSDKQAIIDRDMKLGMEVGVQGTPNFYVNGKRQENFGPDLIEKMLKEL

SEQ ID NO: 24735 - DNA, 747 bp, Unknown
  Obtained from environmental sample
  misc_feature (1)..(747): n is a, c, g, or t
gtgggatcagatcggccgaggatagctggttggcggcgcggtaaggcagcttcaaggggctttgaaagagtggccggctcgttgggcaatattgtccccggcatgaacgcgatagtgaatatcggtaaaatgtttatcggcatcgcgcttggttatatagacgaatgttgtttgggatataccttcttaaaaaaggagcagggcgcgtttaagagcgcgacggacggcgttgtgatttacgcgcagaactggaaaaaacttttgaaggacgcggcgaaaaccacggcgatagttgttatccttttgatagtcattacgctggtttcattcgtgctgttttttcttgtgtccaagtttctttttaccggtaaggactttaagcccatagcggactttgtggcgttcctgattgcgtgctgcgtggcggcggcaataaaattcgcttttatcgacagctatatgcttgtgaaaatgatggtttcctatatgcaggaagcgccgactacgcaaatcacatttgacttgtacggcaaactgtgcggcctgtcctcgaaatttaaggaactgtttaacaagggccagcaggaagctccggttccgcagcccgccgctgtcacaggcccggcggaaacggcgcagctacaggctccggtcagcggggacaaacccaaattctgcggcgagtgcggcgcgaaaaacacgccgggcacgaaattctgcgccgagtgcggcaagcctatggcgtaa

SEQ ID NO: 24736 - protein, 248 aa, Unknown
  Obtained from environmental sample
  misc_feature (1)..(248): Xaa is any amino acid
MGSDRPRIAGWRRGKAASRGFERVAGSLGNIVPGMNAIVNIGKMFIGIALGYIDECCLGYTFLKKEQGAFKSATDGVVIYAQNWKKLLKDAAKTTAIVVILLIVITLVSFVLFFLVSKFLFTGKDFKPIADFVAFLIACCVAAAIKFAFIDSYMLVKMMVSYMQEAPTTQITFDLYGKLCGLSSKFKELFNKGQQEAPVPQPAAVTGPAETAQLQAPVSGDKPKFCGECGAKNTPGTKFCAECGKPMA

SEQ ID NO: 24737 - DNA, 714 bp, Unknown
  Obtained from environmental sample
  misc_feature (1)..(714): n is a, c, g, or t
ttgaagaacattaagaaagtttttgcagttatcgccgttacgataattgtagtaacaggaatggccgttatcgggtgtgataacggcccgacaaatgaagacgataatggtataaacataaccctggtttgtttgggggacagccttacggccggttttggcgctgttacgccttctaaagaagataaatcaaaatcgtatcccgcttatttacaaaaaaaaaccggcattaataccgttattaacgccggggtaagcggagatacgaccgcagaggctttatcccgcgtggattctgatgttcttccttatgaacctgatatagtaattatattattgggagctaatgatttttttcgtttaatttccgtttcgacaacacaagataatcttcaggctattattgaaaaagttgataacgggaaaagaaaaatctatctggcaaaattttatacggatgaggtggcggcgtcatttaatgacattttccctattcctatcccatccgttattattgatcaatatgttaatctatataataatatgtttaagatttttgaagagtccaataatatagaattaattgaggatatctgggccggagtatggagaaaacatatgtcagactatatccatccggacgccaaaggatatgaaataatggcggacaatatttataaagcggtgcggccatatttgcaaacattaaaataa

SEQ ID NO: 24738 - protein, 237 aa, Unknown
  Obtained from environmental sample
  SIGNAL (1)...(25)
  DOMAIN (42)...(225): GDSL-like Lipase/Acylhydrolase
  misc_feature (1)..(237): Xaa is any amino acid
MKNIKKVFAVIAVTIIVVTGMAVIGCDNGPTNEDDNGINITLVCLGDSLTAGFGAVTPSKEDKSKSYPAYLQKKTGINTVINAGVSGDTTAEALSRVDSDVLPYEPDIVIILLGANDFFRLISVSTTQDNLQAIIEKVDNGKRKIYLAKFYTDEVAASFNDIFPIPIPSVIIDQYVNLYNNMFKIFEESNNIELIEDIWAGVWRKHMSDYIHPDAKGYEIMADNIYKAVRPYLQTLK

SEQ ID NO: 24739 - DNA, 1182 bp, Unknown
  Obtained from environmental sample
  misc_feature (1)..(1182): n is a, c, g, or t
atggccgcggattaccatttttctgatattgtcccgttaaatgaagatcaaaaacctgttgacgccgtgcaggccattaccatgagcagggaagcttttaacgaaaggcgctattatgacgcccattggctcgcgaaccttggaacgcggcttgccgtaagaggaagcgtagaagccgccaatgccgcacggcttgcaagcgaagcatggaacatgattgcttctcttgcgcctaacgcaaaggaagaacggctttttgaattgtacaaattaaaactttcaggctatcaggcgatggcatccggcgaatggataagcgcgttttacatttttcaggaactgttaaaatatactcccgatgatcccgacgctaaaaattttatcgccgtaagtgagaaaaacgcanaagcaatcgctttttttattgaagagatggaattttcccttggtgaaaatttaaacggcgctgtattttccattcccggtacggatggcagggcggtgatgcgttttaacagtcttacgacaacggatgatgtcgcttatggcgttggatttgagtatatggaatttgacgcgaatatgactccaaagacaagcgttgtttcgcagtacgcaaaacttacgccttttaaattgaagggaaagccgcaggtgtatgttttaactcacgccctggatcgttttgacaagaataatgattttaagggcgaatggcttatcggcagccctgttgcgggcgggatatttttaaatatcagttttgatgatttattgattattactgatgtcagaagaggccttacaaatctgcgtattaatgaactttttaccgctgcaaaaaaacttgataattacggatatataagccagatttttcaggctgaaattttaaaccggcttggctgtgttttatactttctgccaatggcaatttttgtaattgttattgcctggcggtatcgcacaaaaaagaaaccgcgttatctgtttgttcttttgcttcccgttctgccggttgtttttcatggttttgttttcctgtaccgctctgcaattaatacattgggaatttggcttgttataagttttggttttaccgccgccttgattgtttttattgcggctcttgccgtgatattatttgtctctcttgttacgcttgccgcgcagcatagttag

SEQ ID NO: 24740 - protein, 393 aa, Unknown
  Obtained from environmental sample
  misc_feature (1)..(393): Xaa is any amino acid
MAADYHFSDIVPLNEDQKPVDAVQAITMSREAFNERRYYDAHWLANLGTRLAVRGSVEAANAARLASEAWNMIASLAPNAKEERLFELYKLKLSGYQAMASGEWISAFYIFQELLKYTPDDPDAKNFIAVSEKNAXAIAFFIEEMEFSLGENLNGAVFSIPGTDGRAVMRFNSLTTTDDVAYGVGFEYMEFDANMTPKTSVVSQYAKLTPFKLKGKPQVYVLTHALDRFDKNNDFKGEWLIGSPVAGGIFLNISFDDLLIITDVRRGLTNLRINELFTAAKKLDNYGYISQIFQAEILNRLGCVLYFLPMAIFVIVIAWRYRTKKKPRYLFVLLLPVLPVVFHGFVFLYRSAINTLGIWLVISFGFTAALIVFIAALAVILFVSLVTLAAQHS

SEQ ID NO: 24741 - DNA, 873 bp, Unknown
  Obtained from environmental sample
  misc_feature (1)..(873): n is a, c, g, or t
gtgccggagtactgcggcaacggaagtagcgcgtttgacacaaaaaatcagttttgcttcgacaacacggcatacttgaagtgcggcggcaaaacgtatgatcctataaattatcaatgcaacgacaagggtcagatagtgtcaaaaacgcccgtcacgccgcccgtaacgacgcccgcgacctatgcggtaacggtttcaagcgcgggtacgggagcggccggcgacggcagttacgcggcaggggttacggtaaccataaaggctggtacggcgccgggccagaagttcaaaaactggacgacgacgagcagcggcgtgacgcttgccaacgcggacagcgcgtcgaccacgtttaagatgccggcgaacgcggtgacggtgacggcggtgtttgagcaggtgctatacgcggtggcggttttaggcggtactggcgcggtcggtagcggcgattacgcgatgggcgcgacggtcagtatatcggcggggacgccgccgaccggccaatggtttaagaattggatgacggcgagcgtcggcgtaagttttgccaacgcggccggcgggactacgacgtttacgatgcccgcaaacgaggtgagggtaatggcgaactttgaggcgtcgccgcccaatgtcagttacggtacgtttaccgacagcagggacaatcaagaatacaagacggtggtgataggcggtaagacatggatggcgaagaacctgaattatcagacaaaaaccagcgagggtaattcgtggtgttatggtgacaataatactttctgcgaaacatacggtagattgtatgattggggtacggcgacaacggttttgcccgtcggggtggcatttgccgtcacgttatga

SEQ ID NO: 24742 - protein, 290 aa, Unknown
  Obtained from environmental sample
  misc_feature (1)..(290): Xaa is any amino acid
MPEYCGNGSSAFDTKNQFCFDNTAYLKCGGKTYDPINYQCNDKGQIVSKTPVTPPVTTPATYAVTVSSAGTGAAGDGSYAAGVTVTIKAGTAPGQKFKNWTTTSSGVTLANADSASTTFKMPANAVTVTAVFEQVLYAVAVLGGTGAVGSGDYAMGATVSISAGTPPTGQWFKNWMTASVGVSFANAAGGTTTFTMPANEVRVMANFEASPPNVSYGTFTDSRDNQEYKTVVIGGKTWMAKNLNYQTKTSEGNSWCYGDNNTFCETYGRLYDWGTATTVLPVGVAFAVTL

SEQ ID NO: 24743 - DNA, 783 bp, Unknown
  Obtained from environmental sample
  misc_feature (1)..(783): n is a, c, g, or t
ttgattatgaatgttggtgcgaaaattaccggcaataccgttaaaggttacattggtgaaaatggtaaaaatggggcatcaacctatgacggtgcgggcggcggcggccactatggcggcggcgggtatggtggcggagtatatgtggcaaatagtggaactttcaccatgaatggtggggaaatatcgaacaattccgcatccggtaataaaggcggtaatggcggtagcggcaggggcaacatcatgtatggcggttatggcggcttcggcggcgatggcggcaacgggtacggcggaggagtatatgtagcaaatggtggaactttcacaatgaatggtgggaaaatatcggacaattcagcatccggtggtaatggcggtggcggtggtagttgtagtgctactgccgctatcaaagaaggtggaatgggcggcaacggcggcaacgggtacggcggcggggtatatgtggcaaatggtgggactttcataattaatgatggaaatatatcaaacaataccgtttcttatggctctggcggctctggtggctttggtggctctggcacccctaccggtacaagagctagcaacggtaataatggcaaaagcggcggcagcggggtgtatgtggttaatggtggtactttcaccaggaatggcggagtaacatcgaataattctgtcagtgtaaacgagatagagaatatatatttaaaaagcgtaaccgccaacggttcttcaatggtacccatcacgggagttaactctgacatttga

SEQ ID NO: 24744 - protein, 260 aa, Unknown
  Obtained from environmental sample
  misc_feature (1)..(260): Xaa is any amino acid
MIMNVGAKITGNTVKGYIGENGKNGASTYDGAGGGGHYGGGGYGGGVYVANSGTFTMNGGEISNNSASGNKGGNGGSGRGNIMYGGYGGFGGDGGNGYGGGVYVANGGTFTMNGGKISDNSASGGNGGGGGSCSATAAIKEGGMGGNGGNGYGGGVYVANGGTFIINDGNISNNTVSYGSGGSGGFGGSGTPTGTRASNGNNGKSGGSGVYVVNGGTFTRNGGVTSNNSVSVNEIENIYLKSVTANGSSMVPITGVNSDI

SEQ ID NO: 24745 - DNA, 837 bp, Unknown
  Obtained from environmental sample
  misc_feature (1)..(837): n is a, c, g, or t
ttgagcggcgtaaacggagtgagcaaggggacactcagcggctccaacccgtatactctgccaatcagcggtttttattccggcggcacattgaatgtggcggtcgaaaaatcgggctatattataaacggctcgccaaagacggtggatatatattaccgcaccgtcacccttaacagtgtaaccgctgacggttcttcaacgcaaaccactacggaattgaccttgacttttgacaatgcgattgatgggctttccgcttccgacatcacattgagcggagtgtctggcgtgatcaaaggtacgctaagtggttctaatccgtacactttgttaatcggcggtttttcttcgggtggcaccttgaatgtggcagtcgcaaaatcgggctataaaataaacggctcgccaaagacggtgggtatattattttataactataacttgggtgttgagatggtccaaatccccggcggcagtttccagatggggagtaacagcggaaacagtaatgagcaacctgtacatactgtaacgctgagcggttttaagatgggcaaatatcaggtgacgcaggaacaatggatggaggtaatggggagcaatccgagtagctttactagttcacccgcgtccggggaagttcagggcaaacgtcctgtggagcgtgtaagctggtatgacgtgcttgtattctgcaacaagttgagcatgagggaagggttaagcccagcgtacaaaatatctggaagcaccgatccggcaagttggggaagcgtgcccacaagcggtaataattcgacatgggacgcggtacaaatggctcggccaatctga

SEQ ID NO: 24746 - protein, 278 aa, Unknown
  Obtained from environmental sample
  DOMAIN (149)...(276): Domain of unknown function (DUF323)
  misc_feature (1)..(278): Xaa is any amino acid
MSGVNGVSKGTLSGSNPYTLPISGFYSGGTLNVAVEKSGYIINGSPKTVDIYYRTVTLNSVTADGSSTQTTTELTLTFDNAIDGLSASDITLSGVSGVIKGTLSGSNPYTLLIGGFSSGGTLNVAVAKSGYKINGSPKTVGILFYNYNLGVEMVQIPGGSFQMGSNSGNSNEQPVHTVTLSGFKMGKYQVTQEQWMEVMGSNPSSFTSSPASGEVQGKRPVERVSWYDVLVFCNKLSMREGLSPAYKISGSTDPASWGSVPTSGNNSTWDAVQMARPI

SEQ ID NO: 24747 - DNA, 594 bp, Unknown
  Obtained from environmental sample
  misc_feature (1)..(594): n is a, c, g, or t
ttgctcgctatttccggcggtattgtcgcgatagcgaccactctgctccttgtcgccgaaggcccggcgtctcttactcttaccgcggaaggccggtataacgaagccgccattgtcgctcttggccgttgtctcgggtttataccccttgttatgaccaccgcaatcatctccggcgtttactctccggcgggaacaaaggccatccacgtgcccgcgattctctttatcaatctgggaatcatgggctttgtaggctcgttctttgtcggcgcgctgataatgacgattgaagtcctgcttctgggctttatcgccaaagggcttgaccgcttcccgggcatgaaagagcttggcgacaatacccgtaccgcaatgagcaaggtccttgatatcgcccttctggtaggcggaatgatggcggctaacgccattgccccgacaatcggctatatctgggttatcgggctttactacctaaaccaaaattccaaaaagccggtatcgtcgatggcgattggccccattggagcgatcagcatgggtattctggttaatattctccacctgataggattgttcccaaaaccttaa

SEQ ID NO: 24748 - protein, 197 aa, Unknown
  Obtained from environmental sample
  SIGNAL (1)...(19)
  misc_feature (1)..(197): Xaa is any amino acid
MLAISGGIVAIATTLLLVAEGPASLTLTAEGRYNEAAIVALGRCLGFIPLVMTTAIISGVYSPAGTKAIHVPAILFINLGIMGFVGSFFVGALIMTIEVLLLGFIAKGLDRFPGMKELGDNTRTAMSKVLDIALLVGGMMAANAIAPTIGYIWVIGLYYLNQNSKKPVSSMAIGPIGAISMGILVNILHLIGLFPKP

SEQ ID NO: 24749 - DNA, 1176 bp, Unknown
  Obtained from environmental sample
  misc_feature (1)..(1176): n is a, c, g, or t
gtgtggaacttgatctccgccgacagtttggagtgctccgggcgcaggtgcccctactatgccacgtgctttctgcagaaggcgcgccaactcgcccaatcttcgcatatagttgtgataaaccacgcgctcttctattcggacgtgtgttccgaggcctcgttcttgggcgccaccggctccatcatcttcgacgaggcgcaccacttggagtcgagcggccaccagcacctacgcaccgagttggacacgaaccgcgtgacggcgtttatagacaggctgcaaaatctgctgcacgtcgcgccggcctttaaggagtttgtcaacgtaggcgagtttgagaaggagatgaagcaccacctgaagcacataagaaagtgttctttggatatgctgagcgagattgacaagtgggctttatttaccgtccccggggccacggcggagtaccagatagcagtcaacgatggttcgctctccggtctgcaagagagcgccgttttcgacatagcgctgggcggattgcaggacacgctccatgaattcaggcagataatctccggggtgcgagagagagaaaagattgacgaactgcgggacgagacgcaagcctgcgcggagcagacgtcgcagatgcgcgccgacctgcagtacctgaccgcggcccgcacggaagagcacgtcttttgggcggagggcaaccacgagaaaaagtggacgaagctctgcggcgttccgcttgacataagcgaacttttggcgcagatatgggagcgttgcggcggcgggatagtctttacctccgcgacgctggcgacgcaaggttcaatggagtacgtaagccgcgccatcggtctggatcgcttcaccgaccgcacggagtccattatcctgcccagcccatacggcgccgaccagacgctcttttgcgctttcagagagtgcccggagccagatgccgcggagttcccccgctttgccgcggaggccatagccgcgatccacgctaaactcggcaaaaacgtgctggcgctcttcacctcaaacgctatgctgaacaacgtctacgctcaactgaaagaacgcccggaggtagaccgcaacaacattctggcgcagggctacgccggaagcagaaacgcgatgtggatcagttcaaggcgcagagcgccatga

SEQ ID NO: 24750 - protein, 391 aa, Unknown
  Obtained from environmental sample
  misc_feature (1)..(391): Xaa is any amino acid
MWNLISADSLECSGRRCPYYATCFLQKARQLAQSSHIVVINHALFYSDVCSEASFLGATGSIIFDEAHHLESSGHQHLRTELDTNRVTAFIDRLQNLLHVAPAFKEFVNVGEFEKEMKHHLKHIRKCSLDMLSEIDKWALFTVPGATAEYQIAVNDGSLSGLQESAVFDIALGGLQDTLHEFRQIISGVREREKIDELRDETQACAEQTSQMRADLQYLTAARTEEHVFWAEGNHEKKWTKLCGVPLDISELLAQIWERCGGGIVFTSATLATQGSMEYVSRAIGLDRFTDRTESIILPSPYGADQTLFCAFRECPEPDAAEFPRFAAEAIAAIHAKLGKNVLALFTSNAMLNNVYAQLKERPEVDRNNILAQGYAGSRNAMWISSRRRAP

SEQ ID NO: 24751 - DNA, 426 bp, Unknown
  Obtained from environmental sample
  misc_feature (1)..(426): n is a, c, g, or t
ttgggacgtttcgactacatcaaattcgagattgaaaggctttgcagagattatcccgcctctgtcggggaagatcgtctgcgtatagaaaacgaagttaacgctctgcggaaagagttgggcaggttaaaacataaagaacgccgcgacgtactgcgccaaagtctctacggagacgaactacctgtcccctgtctgtttaattcggggtgcgccattggaaagaaggggttaaccgcgatagaaatgacaaacaaggatatcgcccttgtgtactggttcaccgaagggaaaaacaggaaattcgtcacacgcgggaattacgacattgaaaaaattcccgggaaaccgtataaccgagctgtgttgaattacaacaaacttgattatgttttcgcgcggataaaactgttgggtaatcagtga

SEQ ID NO: 24752 - protein, 141 aa, Unknown
  Obtained from environmental sample
  misc_feature (1)..(141): Xaa is any amino acid
MGRFDYIKFEIERLCRDYPASVGEDRLRIENEVNALRKELGRLKHKERRDVLRQSLYGDELPVPCLFNSGCAIGKKGLTAIEMTNKDIALVYWFTEGKNRKFVTRGNYDIEKIPGKPYNRAVLNYNKLDYVFARIKLLGNQ

SEQ ID NO: 24753 - DNA, 417 bp, Unknown
  Obtained from environmental sample
  misc_feature (1)..(417): n is a, c, g, or t
gtgttcaatgtcccatacaacccagtggtttcggtcggcgactacacccccgtttcaatattcacaggggacatagccacgggtcccaacgacacattggggctcaacagcccaaccgacaacatcaggacggtggccgccgcaacggctgtccgtcccatactctacgacgccatccagtctgtcagtctgatacgcgcatccatcggtgcgaaccagcagcagttgacatccgtcgcggagtcgctgggaatccaggtcgagaatttcacggcagcgtacagtcagatcagggacgccaacatggcggacgaggtcatcaacctgaccaagttccagatactgaaccagtcaggaaccagcgcccttggccaagcgaaccaagcggcccagttggtcttacagttgctaagatag

SEQ ID NO: 24754 - protein, 138 aa, Unknown
  Obtained from environmental sample
  DOMAIN (45)...(116): Bacterial flagellin C-terminus
  misc_feature (1)..(138): Xaa is any amino acid
MFNVPYNPVVSVGDYTPVSIFTGDIATGPNDTLGLNSPTDNIRTVAAATAVRPILYDAIQSVSLIRASIGANQQQLTSVAESLGIQVENFTAAYSQIRDANMADEVINLTKFQILNQSGTSALGQANQAAQLVLQLLR

SEQ ID NO: 24755 - DNA, 633 bp, Unknown
  Obtained from environmental sample
  misc_feature (1)..(633): n is a, c, g, or t
atgctagggctattggccagaaaagttggtatgactcaaatttttgattcagcgggcaaccttatgcccgtaacggttatgcgcgtagacccgaatgtagtcattgccacaaaaacaaaagaagcggacggttatgccgcggtagttgtcggcatggacgaagcgaaaaaaaatcgcgtaacaaaagccagagccggacagtttcccgcggacattacccccaaaaaacaggttcgcgaattgcgcgattttgaaagagaagttaaggtcggggattcaatcggaatagaattgtttgaaaaagtcagttatgttgatgtttcaggcgtttccaagggcaaaggttttcagggcgttgttaaacggtacggcttcggcggcgggcgcaaaacccacggatcaaagttccaccgcgagccgggttcaaccgggcagagcacatatccgggaaagacttttaaaaaccagaaattacccggacgcatgggccgcgaaaagactacaaccttaagccttaaaatcgtaaaagtggacagcgaaaaacagcttcttatggtaaaaggcgccgttcccggcattaacaaagggctggttcttgtaagagcggctgtaaagaaggggcggaagcaatga

SEQ ID NO: 24756 - protein, 210 aa, Unknown
  Obtained from environmental sample
  DOMAIN (8)...(201): Ribosomal protein L3
  misc_feature (1)..(210): Xaa is any amino acid
MLGLLARKVGMTQIFDSAGNLMPVTVMRVDPNVVIATKTKEADGYAAVVVGMDEAKKNRVTKARAGQFPADITPKKQVRELRDFEREVKVGDSIGIELFEKVSYVDVSGVSKGKGFQGVVKRYGFGGGRKTHGSKFHREPGSTGQSTYPGKTFKNQKLPGRMGREKTTTLSLKIVKVDSEKQLLMVKGAVPGINKGLVLVRAAVKKGRKQ

SEQ ID NO: 24757 - DNA, 657 bp, Unknown
  Obtained from environmental sample
  misc_feature (1)..(657): n is a, c, g, or t
gtgaactttgtggtgaatgtggtcaaagcggtctgtaaccaccttgtggatcttgaggcgttgaataaaaaccccatcacaaaagccaagttccccacggcaagttgtaagccccgtttcgtgaccctcagccaagaagaacaagataggcttcttgaggttatccaaaaggaacgccctgacatattgccgattgtgatgtatatgcttttagttccgtgccgtgcttttagcgaactcgtttacagtaaggtgagtcagttgagggacgggatgattttgatccctacttcaaagaatggagaccagatttttaagcccgtgccggtttcgatggctgactattttgccaacatacctgacggttgcccgttcttgttttatcgtaaggttggcgagacatacctgccattagataacctgcgccatgcttttgagatttgcagaaaaaaggcagggcttcccaatctccgcatacacgacctacggcatcttgccgtgactaacctcatattacggggcgttcctgttcaactgctgatgaaaatctgcggttggcgtaaggatcaaagtcacatctattgtaacatagacttgaagtcaggcgcggaatattttctaaacatggaaaaggaggctatgatgttggcgagttag

SEQ ID NO: 24758 - protein, 218 aa, Unknown
  Obtained from environmental sample
  DOMAIN (51)...(204): Phage integrase family
  misc_feature (1)..(218): Xaa is any amino acid
MNFVVNVVKAVCNHLVDLEALNKNPITKAKFPTASCKPRFVTLSQEEQDRLLEVIQKERPDILPIVMYMLLVPCRAFSELVYSKVSQLRDGMILIPTSKNGDQIFKPVPVSMADYFANIPDGCPFLFYRKVGETYLPLDNLRHAFEICRKKAGLPNLRIHDLRHLAVTNLILRGVPVQLLMKICGWRKDQSHIYCNIDLKSGAEYFLNMEKEAMMLAS

SEQ ID NO: 24759 - DNA, 384 bp, Unknown
  Obtained from environmental sample
  misc_feature (1)..(384): n is a, c, g, or t
gtgaaagtggatcgcgtccatgaacaccaccgcatagaccggatccaacgggcggccctgccactcacgaactaccggaagtaccttgtccgtgacacggcttatcgtgctctccgagcactccaaaccgtatatctcacggatatgcccctctatgtcgctctgcgtcatgcccttggcgtacatcgaaaggatcttctcctcgatctcgtgggttatgctgctctggtgcttcttcaccaactgaggctcgaaatctccgttccggtctcgtggaaccttgagttcgagctcgccgttgctggtcttcaggcttttgcgggtgtgaccgttacggctgttatccgtctccttgtcacggtaatcgtacttgctgtagcctaa

SEQ ID NO: 24760 - protein, 127 aa, Unknown
  Obtained from environmental sample
  misc_feature (1)..(127): Xaa is any amino acid
MKVDRVHEHHRIDRIQRAALPLTNYRKYLVRDTAYRALRALQTVYLTDMPLYVALRHALGVHRKDLLLDLVGYAALVLLHQLRLEISVPVSWNLEFELAVAGLQAFAGVTVTAVIRLLVTVIVLAVA

SEQ ID NO: 24761 - DNA, 513 bp, Unknown
  Obtained from environmental sample
  misc_feature (1)..(513): n is a, c, g, or t
gtggacgggctaaccggcatcacgaacgcgatagagagcgtctatcccaagacggagattcagagctgcataatccaccagatacggagttcgacgaagtttgtttcgtacaaggacatcaaggcgttaatggccgatttgaaacgtgtatacggcgctgtggatgagcagacggcgctttcagagcttgaaaagttcgaggcagtttgggataaaaaataccctaaaatcgcggacagctggcgcgccaactgggctaatttatccacgtacttcaagtacccgccggaggtcagaacgctgatttacacgacaaacgccatagaaggctttaaccggcagcttcggaaagtaactaaaagcaagggcgtgttcccgactgacgacagtctgctcaaaatgctctacttggcgatgatcgacatcaccaagaaatggaagggctcccgcaaagactggtatcaaatcctggcgcaacttgaaatgtttttcccggatagattatcggaatag

SEQ ID NO: 24762 - protein, 170 aa, Unknown
  Obtained from environmental sample
  DOMAIN (2)...(149): Transposase, Mutator family
  misc_feature (1)..(170): Xaa is any amino acid
MDGLTGITNAIESVYPKTEIQSCIIHQIRSSTKFVSYKDIKALMADLKRVYGAVDEQTALSELEKFEAVWDKKYPKIADSWRANWANLSTYFKYPPEVRTLIYTTNAIEGFNRQLRKVTKSKGVFPTDDSLLKMLYLAMIDITKKWKGSRKDWYQILAQLEMFFPDRLSE

SEQ ID NO: 24763 - DNA, 906 bp, Unknown
  Obtained from environmental sample
  misc_feature (1)..(906): n is a, c, g, or t
atgcctaagtacaagttaagtccagaagaacgagccgccgagaaagctcgtcgtgaacaactcactacattaatgtcccagtttaatatcaatggggtgagcgacttccgaggcctattcaaggagatggtaggggtcttcctagagaacggtttagaaggcgagttggaagacgagctgggctacagcaaatacgactaccgtaacaaagagacggagaacagccgcaacggccacacgagcaaaagccttaaaaccagcaacggcgagcttgagatcaaggttccgcgtgaccggaacggcgatttcgaaccccaaatggtgaagaagcaccaaggcagcctcagcaacgagatcgaggataagatcctctcgatgtacgccaagggtatgacgcagagcgacatagaggtgcatattcgcgagatttacggcatagagtgctctgagagcacgataagccgagtcacggacaaggttcttccggtgatacgggagtggcaagcacgtccgttggatgcggtctacgcagttgtgtttatggacgcgatccatttccacgtgcgttccgaaggcagcgtggtcaagaaagccgtctatatcgccatcgggatcagcgccgccggtaaaaaggatgttctgggtatgtgggtgggcgagaacgagagcgccaagttttgggccaccgtgctgaacagcctgaagaaccnggggcgtccaagacatcctgatcgcttgcgtggacgggctaaccggcatcacgaacgcgatagagagcgtctatcccaagacggagattcagagctgcataatccaccagatacggagttcgacgaagtttgtttcgtacaaggacatcaaggcgttaatggccgatttgaaacgtgtatacggcgctgtggatga

SEQ ID NO: 24764 - protein, 301 aa, Unknown
  Obtained from environmental sample
  DOMAIN (15)...(280): Transposase, Mutator family
  misc_feature (1)..(301): Xaa is any amino acid
MPKYKLSPEERAAEKARREQLTTLMSQFNINGVSDFRGLFKEMVGVFLENGLEGELEDELGYSKYDYRNKETENSRNGHTSKSLKTSNGELEIKVPRDRNGDFEPQMVKKHQGSLSNEIEDKILSMYAKGMTQSDIEVHIREIYGIECSESTISRVTDKVLPVIREWQARPLDAVYAVVFMDAIHFHVRSEGSVVKKAVYIAIGISAAGKKDVLGMWVGENESAKFWATVLNSLKNXGRPRHPDRLRGRANRHHERDRERLSQDGDSELHNPPDTEFDEVCFVQGHQGVNGRFETCIRRCG

SEQ ID NO: 24765 - DNA, 609 bp, Unknown
  Obtained from environmental sample
  misc_feature (1)..(609): n is a, c, g, or t
gtgatgccggttagcccgtccacgcaagcgatcaggatgtcttggacgccccnggttcttcaggctgttcagcacggtggcccaaaacttggcgctctcgttctcgcccacccacatacccagaacatcctttttaccggcggcgctgatcccgatggcgatatagacggctttcttgaccacgctgccttcggaacgcacgtggaaatggatcgcgtccataaacacaactgcgtagaccgcatccaacggacgtgcttgccactcccgtatcaccggaagaaccttgtccgtgactcggcttatcgtgctctcagagcactctatgccgtaaatctcgcgaatatgcacctctatgtcgctctgcgtcatacccttggcgtacatcgagaggatcttatcctcgatctcgttgctgaggctgccttggtgcttcttcaccatttggggttcgaaatcgccgttccggtcacgcggaaccttgatctcaagctcgccgttgctggttttaaggcttttgctcgtgtggccgttgcggctgttctccgtctctttgttacggtagtcgtatttgctgtagcccagctcgtcttccaactcgccttctaa

SEQ ID NO: 24766 - protein, 202 aa, Unknown
  Obtained from environmental sample
  misc_feature (1)..(202): Xaa is any amino acid
MMPVSPSTQAIRMSWTPXVLQAVQHGGPKLGALVLAHPHTQNILFTGGADPDGDIDGFLDHAAFGTHVEMDRVHKHNCVDRIQRTCLPLPYHRKNLVRDSAYRALRALYAVNLANMHLYVALRHTLGVHREDLILDLVAEAALVLLHHLGFEIAVPVTRNLDLKLAVAGFKAFARVAVAAVLRLFVTVVVFAVAQLVFQLAF

SEQ ID NO: 24767 - DNA, 1377 bp, Unknown
  Obtained from environmental sample
  misc_feature (1)..(1377): n is a, c, g, or t
atgaaggttctggtcatggggctggggcttaatggcggcggcctcgaatcggcccgctttctggcgggaaagggcgctatagttaccgtaaccgatcttagaaacgaaaatacccttaaaccaaccatcgaaaaactaaaaaacctccccatacgttacgttttaggcaaacacgagatagaagatttcagagacgccgattttgtgataaaaaaccccgcggttaagcccgattcgccttatctacaggccgcaaaaaggattgaaacggacatttccctctttcttgccgcctgcccggcccggcttgtggcagtaacaggctcaaaaggcaaatccagcgtttcctcggctattcatttcgcgttgaacgagaagggacagaccccgcatggaagggcctggcttggcggcaacatcaccatctcgcccctaagcttcctcgaagagctgggcgaagaagacgatgttgtactggagctttccagttggcagttgggagacctaaaggggcgcggccttttaaagcccagggcggcagtaatcacaaacattatgagggatcatcaggacaaatacggcagtatggaagcttatgtggacgacaagcgggttatttaccgcggccaggacgaaaatgacgtaactgtcgccgccgatgacgcctggggaaggagcttcctcagcgaaagccgggggaggtctgtcccctattccacaaagcccctggatagcccaggcggctggctctccgatccgcaaggccccggccttgcaaggctctgggaaatccctggcaagggtaaaatgggagagaaaggccgcgttgtggaagttgtccccgcccggccgcttatccctggttttcaccagaagcaaaacctacttatagcggctctgtcccttctggatctgggtttggaggcggattttgtccgcgaaagccttgggcgcttccccggcatcgaacacaggcttgagttttttcatgaatcaggcggggtaaagttttacaacgacagcgcggccacaattcccgaggccgccgccgccgctttaagcgccttcgagaagccccccgttctagtaaccggaggcgccgacaaggagctggactttacgcctctggctcaggcggtggaaaaagccaaggcccttgttcttttagccgggacaggcagcgaaaaactaaaaacccttctggattcaggcggcataaagtacaggggccccttcgattcccttgaggcggcaataaccgccgccggagaagcggcggtttcaggcgacgccgtggttctttcgccaggctgcgccagtttcgggatgttccttaacgaattcgacccgcgggaaaaaatggaaagaggggagtga

SEQ ID NO: 24768 - protein, 458 aa, Unknown
  Obtained from environmental sample
  DOMAIN (322)...(399): Mur ligase family, glutamate ligase domain
  misc_feature (1)..(458): Xaa is any amino acid
MKVLVMGLGLNGGGLESARFLAGKGAIVTVTDLRNENTLKPTIEKLKNLPIRYVLGKHEIEDFRDADFVIKNPAVKPDSPYLQAAKRIETDISLFLAACPARLVAVTGSKGKSSVSSAIHFALNEKGQTPHGRAWLGGNITISPLSFLEELGEEDDVVLELSSWQLGDLKGRGLLKPRAAVITNIMRDHQDKYGSMEAYVDDKRVIYRGQDENDVTVAADDAWGRSFLSESRGRSVPYSTKPLDSPGGWLSDPQGPGLARLWEIPGKGKMGEKGRVVEVVPARPLIPGFHQKQNLLIAALSLLDLGLEADFVRESLGRFPGIEHRLEFFHESGGVKFYNDSAATIPEAAAAALSAFEKPPVLVTGGADKELDFTPLAQAVEKAKALVLLAGTGSEKLKTLLDSGGIKYRGPFDSLEAAITAAGEAAVSGDAVVLSPGCASFGMFLNEFDPREKMERGE

SEQ ID NO: 24769 - DNA, 840 bp, Unknown
  Obtained from environmental sample
  misc_feature (1)..(840): n is a, c, g, or t
atgaagcgccttatcgcccggcaccgggtaaaccttacccagatttgcaagtgcttcagaaacggggaatcctctggccgctggcacagccccgaattcacaatgctggagtactacaccatgcaggcggattacatggactcgctaaaactaaccgaggagcttttttcttttctcctcggcgaagcgggaaaaagcggaaatgagcgaactgaactatcgcctccctttattaaaattaccatggaagaagcttttagccgctggaccggctttgatctttacaaggccgcggaatcacagcccgcaatggaagaagaggcgcggaagctgggcctttgcccgccgcccggtctttccgttcccgaactctacgaccttatctttatccacgctgtggaaccaaacctgaaactccagcgtcccgttgccatcatcgactatccggcttttgtcccctgcctcgcgaaaaaaagaagcggcggaaacacctccggtaaaactgttgaacgctgggaactttatgctcagggaattgaacttgccaactgctattcggaagaaaccagcgccgaagaagtacgcgctttttttgaaagcgaaaaagctattaaggaaaagaacgcgcttgtaccccacaaaacggacgacgactattggaaattgttttcgtcaaaagagaaccgtttccggaggggaacctcgccctatgggctcggcggcaagttccctgaatgttcaggcgcagccctggggcttgacaggctcatcatgcttcttacagggcgtcgaacaatcgatggtgtgttgcccttcccgccttttaagctagtactatga

SEQ ID NO: 24770 - protein, 279 aa, Unknown
  Obtained from environmental sample
  DOMAIN (1)...(277): tRNA synthetases class II (D, K and N)
  misc_feature (1)..(279): Xaa is any amino acid
MKRLIARHRVNLTQICKCFRNGESSGRWHSPEFTMLEYYTMQADYMDSLKLTEELFSFLLGEAGKSGNERTELSPPFIKITMEEAFSRWTGFDLYKAAESQPAMEEEARKLGLCPPPGLSVPELYDLIFIHAVEPNLKLQRPVAIIDYPAFVPCLAKKRSGGNTSGKTVERWELYAQGIELANCYSEETSAEEVRAFFESEKAIKEKNALVPHKTDDDYWKLFSSKENRFRRGTSPYGLGGKFPECSGAALGLDRLIMLLTGRRTIDGVLPFPPFKLVL

SEQ ID NO: 24771 - DNA, 693 bp, Unknown
  Obtained from environmental sample
  misc_feature (1)..(693): n is a, c, g, or t
atgcatgccctcagcgcaaaggatgtcctagaatatgatatggatattgtcaataagcttgtagatgaggcggaaggccagtatatcaagataggagagtatgaacacaaaccgcagaacgacagtatgggttcagtagttgttgacgacaatgaaatgaaggttactttaaccgtaacgcctccaggagaaggcggctgtgacataacgctggaagcttatcacagcctgcttgtacagaacagggtttaccacggaataaaagaagaatatttggcggaatttgcggacgaccctgtttacagagaacctgtagaggttgccgaaggaataaggccggttaacggcaaagacgcgtatattaaatataattttgaaaccgatcaaacaaaaatatcgttaaaagagggaacaaacggcaaggttaattttaaggaactaaatattattcaaaatgttatggcggatgatgttcttgcgacaaaagtacccccggaagacggcatcgacggaaaaactgttacgggaaaaatacttcccgccaaagccggaagcgacattccaatgcctgtcggaaacaatgtgcgcgttaatgataacgaagatgccattcttgcaaatattaacggacaggtaatgatcgcaaataataaaattaatgttgagcctgttttacagttgaaggcgatgtaa

SEQ ID NO: 24772 - protein, 230 aa, Unknown
  Obtained from environmental sample
  misc_feature (1)..(230): Xaa is any amino acid
MHALSAKDVLEYDMDIVNKLVDEAEGQYIKIGEYEHKPQNDSMGSVVVDDNEMKVTLTVTPPGEGGCDITLEAYHSLLVQNRVYHGIKEEYLAEFADDPVYREPVEVAEGIRPVNGKDAYIKYNFETDQTKISLKEGTNGKVNFKELNIIQNVMADDVLATKVPPEDGIDGKTVTGKILPAKAGSDIPMPVGNNVRVNDNEDAILANINGQVMIANNKINVEPVLQLKAM

SEQ ID NO: 24773 - DNA, 1299 bp, Unknown
  Obtained from environmental sample
  misc_feature (1)..(1299): n is a, c, g, or t
gtgatcgccattatcaaggccagccgcgatgtcgcgattgcaaggcaaaaattgcaagaacgctttaacctttccgaagcccagtcagaggcaatcgtcgagatgcgccttggccgcctgaccagccttgaagtcgaaaagattgaaaaggaactggaagagttaaaggtgcagataagttacttcaagtctctgcttgccgacgagaaaaaactccgctcggttataaaggacgagacaagggccataagcgaaaaatacggcgacaaaaggcggaccgagatcatagccggcgaggttgagaacatcaacattgaagaccttatcaaaaaagaagagatgatgatcctcatatccaaccttggttatgtgaagagagtccccgtttcggcttaccgcaaccagggccgcggcggaaagggcatgcagagcgcgaaactcgcggaagatgattttgtcgatcagatttttgtcgcctcaacccatgaatacattatgttcatcaccagcgcgggcaaggcctactggatgaaggtacacgaactgccggagggcagccggacaagcaaaggctcgcacataaagagcctcttgacagtttcgcctaacgaggacatatccgctattgtctcgctcaaggatttttccgacaccgaattcctgtttatgggaacggcgcggggcgttgtcaaaaaagccagaacatccgaatttgtcaacgcgaaaaccaggggcgttatcgcgattaaccttgacgacggggacaggcttgtcagcgccctgcttaccaacggctccgacgaagtggtgcttatttcccgaagaggacaagctctgcgcacccatgaggatcacgtacgggcgatgggacgctcgtctcgcggggttaccggtatgaggctgtcaaacggcgacgagcttgccggcatgctgcgtgtcgataatggtaaagaccgtcctcctgaaaaagtcgaaaaaatgctgatccttaccgaattcggctatggcaaaagggttgactttggcgaattctcatcgcacggacgcgggacgggcggtcagaaaatttacactgtcaacgaaaaaaccggagaaattgtcggctgtgtttccctgctcgacgatgatgagataatgtgcatcaccagccagggaaaatcaatcaagttaaaggtagacgagatccgcgttatgggccgcgccgcccagggcgtgaggatactcagcatagacaagccggattttgtaatcggccttgaccgtgttgtaaaagaggacgaacctcttgaaggagaataa

SEQ ID NO: 24774 - protein, 432 aa, Unknown
  Obtained from environmental sample
  DOMAIN (324)...(374): DNA gyrase C-terminal domain, beta-propeller
  misc_feature (1)..(432): Xaa is any amino acid
MIAIIKASRDVAIARQKLQERFNLSEAQSEAIVEMRLGRLTSLEVEKIEKELEELKVQISYFKSLLADEKKLRSVIKDETRAISEKYGDKRRTEIIAGEVENINIEDLIKKEEMMILISNLGYVKRVPVSAYRNQGRGGKGMQSAKLAEDDFVDQIFVASTHEYIMFITSAGKAYWMKVHELPEGSRTSKGSHIKSLLTVSPNEDISAIVSLKDFSDTEFLFMGTARGVVKKARTSEFVNAKTRGVIAINLDDGDRLVSALLTNGSDEVVLISRRGQALRTHEDHVRAMGRSSRGVTGMRLSNGDELAGMLRVDNGKDRPPEKVEKMLILTEFGYGKRVDFGEFSSHGRGTGGQKIYTVNEKTGEIVGCVSLLDDDEIMCITSQGKSIKLKVDEIRVMGRAAQGVRILSIDKPDFVIGLDRVVKEDEPLEGE

SEQ ID NO: 24775 - DNA, 819 bp, Unknown
  Obtained from environmental sample
  misc_feature (1)..(819): n is a, c, g, or t
gtgttacagatgcctcctcaatcttccgctgtgattccccttggtttatcgttaagcgcagattccactgttatattaaaacttgatacccttactaaaacaggcgataatgttaaagttactcagcctccgccgggtccgtcaattccgtccggttctgtaacctacggcggtatcaccgttaataacgaaccttcgactgcgcctctgccggaatggaaagctcccgcagctccccagcgacacgacgatatggcggtcttaagccttgttttcactgacggcacttccgcgaagctgcccgcgatcacggacagtgcaaattttacttccagacagtattttatttccgatattgcgcagggaagaaccatcgcttccattaatgtagacaatacaaacactcaccgtgaaatttcgcttaacaatattgaaattattgatccgacgctgacaagcggcggtttaaaacccattaaccctgtttccgttgcgcgtgacgccgtgatcacaatggaaggaattgagataaagcgtccgaccaataatattgacgaccttatccccggacttaccctgaatgtacgcggaatttccgaaagaccggtggatttaaatattaaagccgatgtggaagggattaaaagctcaattatctcttttgtaggaaactataaccggcttatggcggaaataaacgttcttacacgaaacgacgaccgtatcatagatgaattaacatatttatcaacggacgaagccgccgatatgaaaaaaaggctcggcgttttttcagagacaccactcttgttaatttaa

SEQ ID NO: 24776 - protein, 272 aa, Unknown
  Obtained from environmental sample
  misc_feature (1)..(272): Xaa is any amino acid
MLQMPPQSSAVIPLGLSLSADSTVILKLDTLTKTGDNVKVTQPPPGPSIPSGSVTYGGITVNNEPSTAPLPEWKAPAAPQRHDDMAVLSLVFTDGTSAKLPAITDSANFTSRQYFISDIAQGRTIASINVDNTNTHREISLNNIEIIDPTLTSGGLKPINPVSVARDAVITMEGIEIKRPTNNIDDLIPGLTLNVRGISERPVDLNIKADVEGIKSSIISFVGNYNRLMAEINVLTRNDDRIIDELTYLSTDEAADMKKRLGVFSETPLLLI

SEQ ID NO: 24777 - DNA, 420 bp, Unknown
  Obtained from environmental sample
  misc_feature (1)..(420): n is a, c, g, or t
atgaccgaagaaagactgagagaaataaaagaccccatgaatgagttcgtaaaaatacagccgcttttggaagaaacctgcgaaagacttgtaaatcttgcccttgatattcaaacgggaaaagactcccgagccgctcagacaatacagcttttttccggtatttcagagaaaattatacgtatagtaaagcagttcgggatacagggatttatgtccgatgagacaaacggggaaaaaccgcttatcaaaataatgggtgaattcggagaattgataaatgagcttacagacgcctatgaaagacacgatacggtccttgtaggagatattgccgaatacgaagccgctcctaaattacaggaactttattcatcaataataaaaaagagccgtcagccggcgcaggcggaaaaatga

SEQ ID NO: 24778 - protein, 139 aa, Unknown
  Obtained from environmental sample
  misc_feature (1)..(139): Xaa is any amino acid
MTEERLREIKDPMNEFVKIQPLLEETCERLVNLALDIQTGKDSRAAQTIQLFSGISEKIIRIVKQFGIQGFMSDETNGEKPLIKIMGEFGELINELTDAYERHDTVLVGDIAEYEAAPKLQELYSSIIKKSRQPAQAEK

SEQ ID NO: 24779 - DNA, 570 bp, Unknown
  Obtained from environmental sample
  misc_feature (1)..(570): n is a, c, g, or t
atggaccgttcaaaacatttgctttgcctgcgcgactgggatgccagccgtgttctagaaaccatagatatagctattcgtttgaagaatgaggttaaaaatggcgtatattcggagcgtttaaagagtaaaaccataggaatgttctttgaaaaaaattcgcttagaaccattgttacatttcaagttggaatttttcagctcggtggaatgcctgttttccttaatccagagagcattggcaaaagagaagacgttaaagatgtggcaaagtgcttatcgcgctgggtggacgggcttgtggtacgctgctttgagcaaagcctagtggagcagcttgccgaatatgggggtattcccattataaacgccctaacagacgattctcacccttgccaagcattggcttttggacaaatgtgcatagaacagtttggcaatgatttaaaaggaaaaaccgttgcctttattggggatggaaataatgttgcaaattccgttatgaatttatgcgccaagctgggcatgaattttacccttgcctgccccctcggccaatctgatcattga

SEQ ID NO: 24780 - protein, 189 aa, Unknown
  Obtained from environmental sample
  DOMAIN (5)...(144): Aspartate/ornithine carbamoyltransferase, carbamoyl-P binding domain
  misc_feature (1)..(189): Xaa is any amino acid
MDRSKHLLCLRDWDASRVLETIDIAIRLKNEVKNGVYSERLKSKTIGMFFEKNSLRTIVTFQVGIFQLGGMPVFLNPESIGKREDVKDVAKCLSRWVDGLVVRCFEQSLVEQLAEYGGIPIINALTDDSHPCQALAFGQMCIEQFGNDLKGKTVAFIGDGNNVANSVMNLCAKLGMNFTLACPLGQSDH

SEQ ID NO: 24781 - DNA, 318 bp, Unknown
  Obtained from environmental sample
  misc_feature (1)..(318): n is a, c, g, or t
atgaacacgctttacatagtgagtacgcctataggcaatttggaagatataacattcagagcggtgcgcattttaaaagaagtctcgcttattttggcagaagacacgcggcacagccgaattttgcttgagcattatggaataccaacaaaaatggagagttaccacgattttaacaaggagcaagttactcccaaatatattgaatacctgaaaaacaccggagacatagcccttgtgagtgatgctgggaccccaggaattgcagacccgcgtttaatttggttagagcctgcaaagcagagcacattcccctaa

SEQ ID NO: 24782 - protein, 105 aa, Unknown
  Obtained from environmental sample
  misc_feature (1)..(105): Xaa is any amino acid
MNTLYIVSTPIGNLEDITFRAVRILKEVSLILAEDTRHSRILLEHYGIPTKMESYHDFNKEQVTPKYIEYLKNTGDIALVSDAGTPGIADPRLIWLEPAKQSTFP

SEQ ID NO: 24783 - DNA, 915 bp, Unknown
  Obtained from environmental sample
  misc_feature (1)..(915): n is a, c, g, or t
atgattagggaacttggcttagcccaggcgacgagaggttattatcccaatacagtatctcattataaagccggatggattgaaggcgcgttggattatcccgcgcctgtctggcctttagtctcggtgccggggtatttgtactctttgacaaaaaaggatatcccaaggtcaatgtacaacataagtcatgattttaacggcgcttattaccttgatgtcaacgttggcaccgtatcacgcgaggcaaggcttgttgtaaaagccgatggcatggaagtttacgacaagctgtttgtatgcggtccggggaagggggaatggacaaccgtcgcatataacaaggaatggaatatttaccagaatatttataataaggattacaggattgaagtgccttcgggtacaaagatgttaaccattgaagttaccgacggggactggatgtcagtgaacgatatgaaatttaccccggtcttggaaaacgggaatgaaaaggctttttctttaacgcctaacaacaacgattggggaaaggaaatttaccctgttataattgattccaacggcacgctgttaagcaccgaaataaacagggcatggttgtgggataatgtttttaagcaatgggaagattatatcggaaagggcggcgtaatagtcggcgaatggggggcgcataacaaaacccctcatgatatagtgctcaggtggatggaagacaacctgataatttttaaagaacacaggttgggctgggcgttatggaatttcaacggctcttttggcgtggtaaacagtgggagagccgatgtcaagtatgaaaactacaacggctacaagcttgaccgtaaaaatgctggaactgctgcaaaaataccctgtaagccgcgttatgagttttgcttgatgtaa

SEQ ID NO: 24784 - protein, 304 aa, Unknown
  Obtained from environmental sample
  misc_feature (1)..(304): Xaa is any amino acid
MIRELGLAQATRGYYPNTVSHYKAGWIEGALDYPAPVWPLVSVPGYLYSLTKKDIPRSMYNISHDFNGAYYLDVNVGTVSREARLVVKADGMEVYDKLFVCGPGKGEWTTVAYNKEWNIYQNIYNKDYRIEVPSGTKMLTIEVTDGDWMSVNDMKFTPVLENGNEKAFSLTPNNNDWGKEIYPVIIDSNGTLLSTEINRAWLWDNVFKQWEDYIGKGGVIVGEWGAHNKTPHDIVLRWMEDNLIIFKEHRLGWALWNFNGSFGVVNSGRADVKYENYNGYKLDRKNAGTAAKIPCKPRYEFCLM

SEQ ID NO: 24785 - DNA, 765 bp, Unknown
  Obtained from environmental sample
  misc_feature (1)..(765): n is a, c, g, or t
gtggaggacccgcgcattattaaaatgggcgattattattatataacctatgcgtcgcgcacctacccgccgggacagtattggcgggacgacaagcttaccataggggacagacctggtgaagcgccctattttgtccgggctaataatacccttacccacctttgcatgacgaaggattttattaactataaaaagctgggtcgcattaccgacagcaggctggacgacagggacgtaataatttttccggaaaaaatcaacggcaagtacgccaggctttcgcgtcccatggaatggtgcggcaaggacaaggggttttcttgcaaaaacccgtccatctggctttcgttctcggacgatatgcttgaatgggataagccaactctgcttatgcagggcgaacaaccctgggaggatgcaaaaatagggggcggttgcccgcccatcaagacaagcaaaggatggctgcacatctatcacggcgtaagtggcgcagacggcgcgtaccgcgcgggcgcggttatgcttgacctcaaaaatcccgccaaaattatcgccaggactaaggactttatcatggagcccgaatttgactttgagattaatggctactatacaggctgcgtttttcctaccgccaatgtggttaaggataatgtgctgtacgtttattacggcgcggcggacaaatacatttgtgtcgctaccgccccgtttgatcaatttatagacgatttattgtcaaaaaggagtattaaatga

SEQ ID NO: 24786 - protein, 254 aa, Unknown
  Obtained from environmental sample
  DOMAIN (3)...(249): Domain of unknown function (DUF377)
  misc_feature (1)..(254): Xaa is any amino acid
MEDPRIIKMGDYYYITYASRTYPPGQYWRDDKLTIGDRPGEAPYFVRANNTLTHLCMTKDFINYKKLGRITDSRLDDRDVIIFPEKINGKYARLSRPMEWCGKDKGFSCKNPSIWLSFSDDMLEWDKPTLLMQGEQPWEDAKIGGGCPPIKTSKGWLHIYHGVSGADGAYRAGAVMLDLKNPAKIIARTKDFIMEPEFDFEINGYYTGCVFPTANVVKDNVLYVYYGAADKYICVATAPFDQFIDDLLSKRSIK

SEQ ID NO: 24787 - DNA, 957 bp, Unknown
  Obtained from environmental sample
  misc_feature (1)..(957): n is a, c, g, or t
ttgatcgccgagcggctcgaggtacgaggcaattcgcaaagaagatgtggcttttgcaaacaactttgtgcgagcggcgagtttttttgcgtggcgagcacagacggagattccgacaggccgcttttatccgatgaaaacggggtttggcttaaaggcgattcgcttgggattttggcgggcaaggcactaggaatagaggcggtggcaattcctgtgagttgcaacacagctgctgagaaaagcggttttttcaaggaagttttgagaacgagaattggaagcccctttgttattgaagggataaaaaagttgcagggcaaatacaagagtgttgcgggttttgaagcaaacggcggttttttaaccgagagtttaacaacaagagatgctctaacaccaattatcgcaaccattatagatagcaaaaaacagaacctaaaaatatcggagcttctcgtaaaattgccggcaaggtatgcagggagcggtttaaccagaggcttttcggtagatgccacagacggctatagaatagaatttgaaaacggagatattatccatttgcgcaaaagcggaaatgctcccgaatttcgttgctacacggagagcaaaacaccggaacaggcggagcttttgagcgataagtgcataaaaacttttgaactttggaaaattatgggttcaaagctatacgatgaactaaaggaattgacaaaaaaagaagtaaaacacacagaagaaaacattactccaatgaactttgaaatgctccgcgacaacccanaatacgaagaatttgaaaaaaaaggtttggaaattttgaaacagggaaaggctgcggcttatttaatcgcacgcggtcaaggttctaggctcggttttgaaggacaaaaagagtatttaggctggaatcccttggcaaatcattttccaatacacgcaaaaatatattga

SEQ ID NO: 24788 - protein, 318 aa, Unknown
  Obtained from environmental sample
  DOMAIN (52)...(163): Phosphoglucomutase/phosphomannomutase, alpha/beta/alpha domain III
  misc_feature (1)..(318): Xaa is any amino acid
MIAERLEVRGNSQRRCGFCKQLCASGEFFCVASTDGDSDRPLLSDENGVWLKGDSLGILAGKALGIEAVAIPVSCNTAAEKSGFFKEVLRTRIGSPFVIEGIKKLQGKYKSVAGFEANGGFLTESLTTRDALTPIIATIIDSKKQNLKISELLVKLPARYAGSGLTRGFSVDATDGYRIEFENGDIIHLRKSGNAPEFRCYTESKTPEQAELLSDKCIKTFELWKIMGSKLYDELKELTKKEVKHTEENITPMNFEMLRDNPXYEEFEKKGLEILKQGKAAAYLIARGQGSRLGFEGQKEYLGWNPLANHFPIHAKIY

SEQ ID NO: 24789 - DNA, 456 bp, Unknown
  Obtained from environmental sample
  misc_feature (1)..(456): n is a, c, g, or t
gtggccctgttcgtgagccggctgggtttcgccggtctgtcgccttgcgccccgggcacgtgcggcacggctctggccgccgtgatcgcgccctggtgctttctgcccctaccgtgcctctggcggggggcggcgctgctggcgattttttttctgggcgccctggccgccacccgcgccgaacgcatactcggagtcaaagaccccggccaggtggtgattgatgagctgcttggcctgtggcttgtgctctggcccttcgcccagccgtcctggaaaacgatcgccgcagcctttgtcctgttccgcctgttcgacatcgccaagttctggccggtgcgggcttcggaaaactggctgccggacggctacggcgttatgatcgacgatgttttggccggcgtgcaggctttgcttgtgcttgccgccctgcgcgccttgtgcggccctttttga

SEQ ID NO: 24790 - protein, 151 aa, Unknown
  Obtained from environmental sample
  SIGNAL (1)...(26)
  DOMAIN (1)...(146): Phosphatidylglycerophosphatase A
  misc_feature (1)..(151): Xaa is any amino acid
MALFVSRLGFAGLSPCAPGTCGTALAAVIAPWCFLPLPCLWRGAALLAIFFLGALAATRAERILGVKDPGQVVIDELLGLWLVLWPFAQPSWKTIAAAFVLFRLFDIAKFWPVRASENWLPDGYGVMIDDVLAGVQALLVLAALRALCGPF

SEQ ID NO: 24791 - DNA, 531 bp, Unknown
  Obtained from environmental sample
  misc_feature (1)..(531): n is a, c, g, or t
atggcacattggggaaccgccaccactgcgggaagccctgcggaagatgccctcaactgcgtcaaggcggcgctgttgatgagggtggatctgtataacataaataaaaaccggagtcaggaaaacatgggaaacccgcccatcagcatcggctgcggcatcaataccggcattgtaaccgccgggcagatcggctccgatctccgcatggagtacaccgtcataggtgatccggttaatctcgcatcccgtgtcgaagcgctgaacaagcccctgggtacggacatcctgattaccgaggatacctggaacatgataaaggagcatatcattgtcgaagaaatgcctccggtgacggtaaagggaaaagaaaaacctgtgcggctttttgccgttgtgaatctttcttcagtcagcacagttcccaggaatttggctcaagtacgaagaatattgggcattatgccgccggatatttcaaaggtggatgtcaacatcaaagaacacaagtacaagattggcggcaaatga

SEQ ID NO: 24792 - protein, 176 aa, Unknown
  Obtained from environmental sample
  DOMAIN (2)...(134): Adenylate and Guanylate cyclase catalytic domain
  misc_feature (1)..(176): Xaa is any amino acid
MAHWGTATTAGSPAEDALNCVKAALLMRVDLYNINKNRSQENMGNPPISIGCGINTGIVTAGQIGSDLRMEYTVIGDPVNLASRVEALNKPLGTDILITEDTWNMIKEHIIVEEMPPVTVKGKEKPVRLFAVVNLSSVSTVPRNLAQVRRILGIMPPDISKVDVNIKEHKYKIGGK

SEQ ID NO: 24793 - DNA, 573 bp, Unknown
  Obtained from environmental sample
  misc_feature (1)..(573): n is a, c, g, or t
atgaagatgagcggcaaaaaagaatcagagggcagattccggcttgtggatcttcttgttatcctgctctgcctttctggcgcggcttacagcattaacctgttttgggcggatctgtttcaaaccctcaacgggcaaaataaaacgaccgtcgggactgtttttataaaaagaaatatcgtccagcgccgtatgtcggacagggtaatatgggacaggctgattaaagaatcgcccgtatattccaatgacatgatccgcgtgggagataattccgaagccgaccttcaaataggcggtaataacattgttataaatgaaaatacgcttctccgcctgcgctacaacaaagaaacaggcgaatatcaaattgtacttacatcgggcagcatagggcttgttaccgattccgaaggaaatgacgtcgctttgaatattatgggacagcaggtaatagccaaaccgggaaccattcttaacgccgccgttggaaataacggcatagctatacaagtcagcgagggcgcggcggtaattgctgaagaaaatcaaaaccgtgnaattcgcgcgtga

SEQ ID NO: 24794 - protein, 190 aa, Unknown
  Obtained from environmental sample
  misc_feature (1)..(190): Xaa is any amino acid
MKMSGKKESEGRFRLVDLLVILLCLSGAAYSINLFWADLFQTLNGQNKTTVGTVFIKRNIVQRRMSDRVIWDRLIKESPVYSNDMIRVGDNSEADLQIGGNNIVINENTLLRLRYNKETGEYQIVLTSGSIGLVTDSEGNDVALNIMGQQVIAKPGTILNAAVGNNGIAIQVSEGAAVIAEENQNRXIRA

SEQ ID NO: 24795 - DNA, 1284 bp, Unknown
  Obtained from environmental sample
  misc_feature (1)..(1284): n is a, c, g, or t
atgacccatcatctgaaaagcgccacaatgccggagtttttcggttcacggtacgcgtccaacgcgcttaagatcggcgcgtcgatcatcgcttttatttttcttatcccctacacggcgtcgctgtataacggcctttcccgcctgttcgagatggcgtttcatgttgattttatttactgcattatcggcatggccgttcttacagccgtatatgtcgtagtcggcggttattttgccacggcggcgaacgattttatccagggcgtaattatgctctgcgggattgtcgcggttatcgcggcggtgattaacagccacggcggctttattgagacgctgggcaaaatggcggcggttacgccctcggacgcggaaatcgcggccaaaagcgctccgcctttaatcggcgcgaaaggggtgtttgcgtcgtttttcggccccgatcccctaagcttgttaggtgtaataattttaacgtctctcgggacatgggggctgccccagatggtttccaaattttacgcgataaaatccgaaaaaatgatatccaagggcgctattgtatcgacgtttttcgggcttgttgtggccggcggctgttatttcctcggcagtttcggcaggttatacgccaacgccaatattagaaattccggaggcgccatagtctacgacgccatcgtgccggccatgctttcgaatttcggcgatgttttgattggcgttgtcatcgttttggtattcgccgcgtccataagcacgctttcatccctggtcatggcatcctcttctactcttacgctggatttattgaaaggccatgtcattaaaaaaatgagcgaaaaaaaacaactggtgatcatccggatgctgatcgtggtgtttataatcatttcttcatgtatagcggtgatccagtacaaaggcgggatttcgtttatagcccagcttatgggcgtttcatggggcgcgcttgccggttccttccttgcccccttcctctacgggttgtattggaagcgtgttacaaaacccgccgtctggtgcaactttattttcagcacagccctgatgatcctgaacatattcttcaggagttctttcccggcgctgttgcagtcgccaatcaacgcgggggccttcaccatgatcgccggctttgtcatagtgcctgtagtgagcataattaccaaaacgccggacaaaacctcggtggatagatgtttctcctgttatgaagagacggtcagcgttaaggtcagagacgatttgggcaattaa

SEQ ID NO: 24796 - protein, 427 aa, Unknown
  Obtained from environmental sample
  DOMAIN (1)...(354): Sodium:solute symporter family
  misc_feature (1)..(427): Xaa is any amino acid
MTHHLKSATMPEFFGSRYASNALKIGASIIAFIFLIPYTASLYNGLSRLFEMAFHVDFIYCIIGMAVLTAVYVVVGGYFATAANDFIQGVIMLCGIVAVIAAVINSHGGFIETLGKMAAVTPSDAEIAAKSAPPLIGAKGVFASFFGPDPLSLLGVIILTSLGTWGLPQMVSKFYAIKSEKMISKGAIVSTFFGLVVAGGCYFLGSFGRLYANANIRNSGGAIVYDAIVPAMLSNFGDVLIGVVIVLVFAASISTLSSLVMASSSTLTLDLLKGHVIKKMSEKKQLVIIRMLIVVFIIISSCIAVIQYKGGISFIAQLMGVSWGALAGSFLAPFLYGLYWKRVTKPAVWCNFIFSTALMILNIFFRSSFPALLQSPINAGAFTMIAGFVIVPVVSIITKTPDKTSVDRCFSCYEETVSVKVRDDLGN
